United States Patent Application Publication US 2024/0066114 A1 - sequence listing, part 20

SEQ ID NO: 24375 - RNA, 4032 nt, Artificial Sequence
  SARS-CoV-2/Wuhan/WIV05/2019__EPI_ISL_402128 spike protein mRNA gc mod (1-1273)(L18F_D80A_D215G_L242del_A243del_L244del_R246I_K417N_E484 K_N501Y_D614G_A701V)
aggagaaagcuuaccauguucguguuucuggugcugcugccccugguguccagccagugugugaacuucaccaccagaacacagcugccuccagccuacaccaacagcuucaccagaggcguguacuaccccgacaagguguucagauccagcgugcugcacucuacccaggaccuguuccugccuuucuucagcaacgugaccugguuccacgccauccacguguccggcaccaauggcaccaagagauucgccaaccccgugcugcccuucaacgacgggguguacuuugccagcaccgagaaguccaacaucaucagaggcuggaucuucggcaccacacuggacagcaagacccagagccugcugaucgugaacaacgccaccaacguggucaucaaagugugcgaguuccaguucugcaacgaccccuuccugggcgucuacuaccacaagaacaacaagagcuggauggaaagcgaguuccggguguacagcagcgccaacaacugcaccuucgaguacgugucccagccuuuccugauggaccuggaaggcaagcagggcaacuucaagaaccugcgcgaguucguguucaagaacaucgacggcuacuucaaaaucuacagcaagcacaccccuaucaaccucgugcggggccugccucagggcuucucugcucuggaaccccugguggaucugcccaucggcaucaacaucacccgguuucagacacugcacaucagcuaccugacaccuggcgauagcagcagcggauggacagcuggugccgccgcuuacuaugugggcuaccugcagccuagaaccuuccugcugaaguacaacgagaacggcaccaucaccgacgccguggauugugcucuggauccucugagcgagacaaagugcacccugaaguccuucaccguggaaaagggcaucuaccagaccagcaacuuccgggugcagcccaccgaauccaucgugcgguuccccaauaucaccaaucugugccccuucggcgagguguucaaugccaccagauucgccucuguguacgccuggaaccggaagcggaucagcaauugcguggccgacuacuccgugcuguacaacuccgccagcuucagcaccuucaagugcuacggcguguccccuaccaagcugaacgaccugugcuucacaaacguguacgccgacagcuucgugauccggggagaugaagugcggcagauugccccuggacagacaggcaacaucgccgacuacaacuacaagcugcccgacgacuucaccggcugugugauugccuggaacagcaacaaccuggacuccaaagucggcggcaacuacaauuaccuguaccggcuguuccggaaguccaaucugaagcccuucgagcgggacaucagcaccgaaaucuaucaggccggcagcaccccuugcaacggcgugaagggcuucaacugcuacuucccacugcaguccuacggcuuucagcccacauacggcgugggcuaucagcccuacagagugguggugcugagcuucgaacugcugcaugcuccugccacagugugcggcccuaagaaaagcaccaaucucgugaagaacaaaugcgugaacuucaacuucaacggccugaccggcaccggcgugcugacagagagcaacaagaaguuccugccauuccagcaguuuggccgggauaucgccgauaccacagacgccguuagagauccccagacacuggaaauccuggacaucaccccaugcagcuucggcggagugucugugaucaccccuggcaccaacaccagcaaucagguggcagugcuguaccagggcgugaacuguaccgaagugcccguggccauucacgccgaucagcugacaccuacauggcggguguacuccaccggcagcaauguguuucagaccagagccggcugucugaucggagccgagcacgugaacaauagcuacgagugcgacauccccaucggcgcuggcaucugugccagcuaccagacacagacaaacagccccagacgggcuagaagcguggccagccagagcaucauugccuacacaaugucucugggcguggagaacagcguggccuacuccaacaacucuaucgcuauccccaccaacuucaccaucagcgugaccaccgagauccugccuguguccaugaccaagaccagcguggacugcaccauguacaucugcggcgauuccaccgagugcuccaaccugcugcugcaguacggcagcuucugcacccagcugaauagagcccugacagggaucgccguggaacaggacaagaacacccaagagguguucgcccaagugaagcaaaucuacaagaccccuccuaucaaggacuucggcggcuucaauuucagccagauucugcccgauccuagcaagcccagcaagcggagcuucaucgaggaccugcuguucaacaaagugacacuggccgacgccggcuucaucaagcaguauggcgauugucugggcgacauugccgccagggaucugauuugcgcccagaaguuuaacggacugacagugcugccuccucugcugaccgaugagaugaucgcccaguacacaucugcccugcuggccggcacaaucacaagcggcuggacauuuggagcuggcgccgcucugcagauccccuuugcuaugcagauggccuaccgguucaacggcaucggagugacccagaaugugcuguacgagaaccagaagcugaucgccaaccaguucaacagcgccaucggcaagauccaggacagccugagcagcacagcaagcgcccugggaaagcugcaggacguggucaaccagaaugcccaggcacugaacacccuggucaagcagcuguccuccaacuucggcgccaucagcucugugcugaacgauauccugagcagacuggacaaggucgaggccgaggugcagaucgacagacugaucacaggcagacugcagagccuccagacauacgugacccagcagcugaucagagccgccgagauuagagccucugccaaucuggccgccaccaagaugucugagugugugcugggccagagcaagagaguggacuuuugcggcaagggcuaccaccugaugagcuucccucagucugccccucacggcgugguguuucugcacgugacauaugugcccgcucaagagaagaauuucaccaccgcuccagccaucugccacgacggcaaagcccacuuuccuagagaaggcguguucguguccaacggcacccauugguucgugacacagcggaacuucuacgagccccagaucaucaccaccgacaacaccuucgugucuggcaacugcgacguugugaucggcauugugaacaauaccguguacgacccucugcagcccgagcuggacagcuucaaagaggaacuggacaaguacuuuaagaaccacacaagccccgacguggaccugggcgauaucagcggaaucaaugccagcgucgugaacauccagaaagagaucgaccggcugaacgagguggccaagaaucugaacgagagccugaucgaccugcaagaacuggggaaguacgagcaguacaucaaguggcccugguacaucuggcugggcuuuaucgccggacugauugccaucgugauggucacaaucaugcuguguugcaugaccagcugcuguagcugccugaagggcuguuguagcuguggcagcugcugcaaguucgacgaggacgauucugagcccgugcugaagggcgugaaacugcacuacaccugaggacuaguuauaagacugacuagcccgaugggccucccaacgggcccuccuccccuccuugcaccgagauuaauagaucucaaaggcucuuuucagagccaccaaaaaaaaaaaaaaaaaaaaaaaaaaaaaaaaaaaaaaaaaaaaaaaaaaaaaaaaaaaaaaaaaaaaaaaaaaaaaaaaaaaaaaaaaaaaaaaaaaaaa

SEQ ID NO: 24376 - RNA, 4041 nt, Artificial Sequence
  SARS-CoV-2/Wuhan/WIV05/2019__EPI_ISL_402128 spike protein mRNA gc mod (1-1273)(E484K_D614G)
aggagaaagcuuaccauguucguguuucuggugcugcugccccugguguccagccagugugugaaccugaccaccagaacacagcugccuccagccuacaccaacagcuucaccagaggcguguacuaccccgacaagguguucagauccagcgugcugcacucuacccaggaccuguuccugccuuucuucagcaacgugaccugguuccacgccauccacguguccggcaccaauggcaccaagagauucgacaaccccgugcugcccuucaacgacgggguguacuuugccagcaccgagaaguccaacaucaucagaggcuggaucuucggcaccacacuggacagcaagacccagagccugcugaucgugaacaacgccaccaacguggucaucaaagugugcgaguuccaguucugcaacgaccccuuccugggcgucuacuaccacaagaacaacaagagcuggauggaaagcgaguuccggguguacagcagcgccaacaacugcaccuucgaguacgugucccagccuuuccugauggaccuggaaggcaagcagggcaacuucaagaaccugcgcgaguucguguucaagaacaucgacggcuacuucaaaaucuacagcaagcacaccccuaucaaccucgugcgggaucugccucagggcuucucugcucuggaaccccugguggaucugcccaucggcaucaacaucacccgguuucagacacugcuggcccugcacagaagcuaccugacaccuggcgauagcagcagcggauggacagcuggugccgccgcuuacuaugugggcuaccugcagccuagaaccuuccugcugaaguacaacgagaacggcaccaucaccgacgccguggauugugcucuggauccucugagcgagacaaagugcacccugaaguccuucaccguggaaaagggcaucuaccagaccagcaacuuccgggugcagcccaccgaauccaucgugcgguuccccaauaucaccaaucugugccccuucggcgagguguucaaugccaccagauucgccucuguguacgccuggaaccggaagcggaucagcaauugcguggccgacuacuccgugcuguacaacuccgccagcuucagcaccuucaagugcuacggcguguccccuaccaagcugaacgaccugugcuucacaaacguguacgccgacagcuucgugauccggggagaugaagugcggcagauugccccuggacagacaggcaagaucgccgacuacaacuacaagcugcccgacgacuucaccggcugugugauugccuggaacagcaacaaccuggacuccaaagucggcggcaacuacaauuaccuguaccggcuguuccggaaguccaaucugaagcccuucgagcgggacaucagcaccgaaaucuaucaggccggcagcaccccuugcaacggcgugaagggcuucaacugcuacuucccacugcaguccuacggcuuucagcccacaaauggcgugggcuaucagcccuacagagugguggugcugagcuucgaacugcugcaugcuccugccacagugugcggcccuaagaaaagcaccaaucucgugaagaacaaaugcgugaacuucaacuucaacggccugaccggcaccggcgugcugacagagagcaacaagaaguuccugccauuccagcaguuuggccgggauaucgccgauaccacagacgccguuagagauccccagacacuggaaauccuggacaucaccccaugcagcuucggcggagugucugugaucaccccuggcaccaacaccagcaaucagguggcagugcuguaccagggcgugaacuguaccgaagugcccguggccauucacgccgaucagcugacaccuacauggcggguguacuccaccggcagcaauguguuucagaccagagccggcugucugaucggagccgagcacgugaacaauagcuacgagugcgacauccccaucggcgcuggcaucugugccagcuaccagacacagacaaacagccccagacgggcuagaagcguggccagccagagcaucauugccuacacaaugucucugggcgccgagaacagcguggccuacuccaacaacucuaucgcuauccccaccaacuucaccaucagcgugaccaccgagauccugccuguguccaugaccaagaccagcguggacugcaccauguacaucugcggcgauuccaccgagugcuccaaccugcugcugcaguacggcagcuucugcacccagcugaauagagcccugacagggaucgccguggaacaggacaagaacacccaagagguguucgcccaagugaagcaaaucuacaagaccccuccuaucaaggacuucggcggcuucaauuucagccagauucugcccgauccuagcaagcccagcaagcggagcuucaucgaggaccugcuguucaacaaagugacacuggccgacgccggcuucaucaagcaguauggcgauugucugggcgacauugccgccagggaucugauuugcgcccagaaguuuaacggacugacagugcugccuccucugcugaccgaugagaugaucgcccaguacacaucugcccugcuggccggcacaaucacaagcggcuggacauuuggagcuggcgccgcucugcagauccccuuugcuaugcagauggccuaccgguucaacggcaucggagugacccagaaugugcuguacgagaaccagaagcugaucgccaaccaguucaacagcgccaucggcaagauccaggacagccugagcagcacagcaagcgcccugggaaagcugcaggacguggucaaccagaaugcccaggcacugaacacccuggucaagcagcuguccuccaacuucggcgccaucagcucugugcugaacgauauccugagcagacuggacaaggucgaggccgaggugcagaucgacagacugaucacaggcagacugcagagccuccagacauacgugacccagcagcugaucagagccgccgagauuagagccucugccaaucuggccgccaccaagaugucugagugugugcugggccagagcaagagaguggacuuuugcggcaagggcuaccaccugaugagcuucccucagucugccccucacggcgugguguuucugcacgugacauaugugcccgcucaagagaagaauuucaccaccgcuccagccaucugccacgacggcaaagcccacuuuccuagagaaggcguguucguguccaacggcacccauugguucgugacacagcggaacuucuacgagccccagaucaucaccaccgacaacaccuucgugucuggcaacugcgacguugugaucggcauugugaacaauaccguguacgacccucugcagcccgagcuggacagcuucaaagaggaacuggacaaguacuuuaagaaccacacaagccccgacguggaccugggcgauaucagcggaaucaaugccagcgucgugaacauccagaaagagaucgaccggcugaacgagguggccaagaaucugaacgagagccugaucgaccugcaagaacuggggaaguacgagcaguacaucaaguggcccugguacaucuggcugggcuuuaucgccggacugauugccaucgugauggucacaaucaugcuguguugcaugaccagcugcuguagcugccugaagggcuguuguagcuguggcagcugcugcaaguucgacgaggacgauucugagcccgugcugaagggcgugaaacugcacuacaccugaggacuaguuauaagacugacuagcccgaugggccucccaacgggcccuccuccccuccuugcaccgagauuaauagaucucaaaggcucuuuucagagccaccaaaaaaaaaaaaaaaaaaaaaaaaaaaaaaaaaaaaaaaaaaaaaaaaaaaaaaaaaaaaaaaaaaaaaaaaaaaaaaaaaaaaaaaaaaaaaaaaaaaaa

SEQ ID NO: 24377 - RNA, 4041 nt, Artificial Sequence
  SARS-CoV-2/Wuhan/WIV05/2019__EPI_ISL_402128 spike protein mRNA gc mod (1-1273)(L18F_T20N_P26S_D138Y_R190S_K417T_E484K_N501Y_D614G_H655Y _T1027I)
aggagaaagcuuaccauguucguguuucuggugcugcugccccugguguccagccagugugugaacuucaccaacagaacacagcugccuagcgccuacaccaacagcuucaccagaggcguguacuaccccgacaagguguucagauccagcgugcugcacucuacccaggaccuguuccugccuuucuucagcaacgugaccugguuccacgccauccacguguccggcaccaauggcaccaagagauucgacaaccccgugcugcccuucaacgacgggguguacuuugccagcaccgagaaguccaacaucaucagaggcuggaucuucggcaccacacuggacagcaagacccagagccugcugaucgugaacaacgccaccaacguggucaucaaagugugcgaguuccaguucugcaacuaccccuuccugggcgucuacuaccacaagaacaacaagagcuggauggaaagcgaguuccggguguacagcagcgccaacaacugcaccuucgaguacgugucccagccuuuccugauggaccuggaaggcaagcagggcaacuucaagaaccugagcgaguucguguucaagaacaucgacggcuacuucaaaaucuacagcaagcacaccccuaucaaccucgugcgggaucugccucagggcuucucugcucuggaaccccugguggaucugcccaucggcaucaacaucacccgguuucagacacugcuggcccugcacagaagcuaccugacaccuggcgauagcagcagcggauggacagcuggugccgccgcuuacuaugugggcuaccugcagccuagaaccuuccugcugaaguacaacgagaacggcaccaucaccgacgccguggauugugcucuggauccucugagcgagacaaagugcacccugaaguccuucaccguggaaaagggcaucuaccagaccagcaacuuccgggugcagcccaccgaauccaucgugcgguuccccaauaucaccaaucugugccccuucggcgagguguucaaugccaccagauucgccucuguguacgccuggaaccggaagcggaucagcaauugcguggccgacuacuccgugcuguacaacuccgccagcuucagcaccuucaagugcuacggcguguccccuaccaagcugaacgaccugugcuucacaaacguguacgccgacagcuucgugauccggggagaugaagugcggcagauugccccuggacagacaggcaccaucgccgacuacaacuacaagcugcccgacgacuucaccggcugugugauugccuggaacagcaacaaccuggacuccaaagucggcggcaacuacaauuaccuguaccggcuguuccggaaguccaaucugaagcccuucgagcgggacaucagcaccgaaaucuaucaggccggcagcaccccuugcaacggcgugaagggcuucaacugcuacuucccacugcaguccuacggcuuucagcccacauacggcgugggcuaucagcccuacagagugguggugcugagcuucgaacugcugcaugcuccugccacagugugcggcccuaagaaaagcaccaaucucgugaagaacaaaugcgugaacuucaacuucaacggccugaccggcaccggcgugcugacagagagcaacaagaaguuccugccauuccagcaguuuggccgggauaucgccgauaccacagacgccguuagagauccccagacacuggaaauccuggacaucaccccaugcagcuucggcggagugucugugaucaccccuggcaccaacaccagcaaucagguggcagugcuguaccagggcgugaacuguaccgaagugcccguggccauucacgccgaucagcugacaccuacauggcggguguacuccaccggcagcaauguguuucagaccagagccggcugucugaucggagccgaguacgugaacaauagcuacgagugcgacauccccaucggcgcuggcaucugugccagcuaccagacacagacaaacagccccagacgggcuagaagcguggccagccagagcaucauugccuacacaaugucucugggcgccgagaacagcguggccuacuccaacaacucuaucgcuauccccaccaacuucaccaucagcgugaccaccgagauccugccuguguccaugaccaagaccagcguggacugcaccauguacaucugcggcgauuccaccgagugcuccaaccugcugcugcaguacggcagcuucugcacccagcugaauagagcccugacagggaucgccguggaacaggacaagaacacccaagagguguucgcccaagugaagcaaaucuacaagaccccuccuaucaaggacuucggcggcuucaauuucagccagauucugcccgauccuagcaagcccagcaagcggagcuucaucgaggaccugcuguucaacaaagugacacuggccgacgccggcuucaucaagcaguauggcgauugucugggcgacauugccgccagggaucugauuugcgcccagaaguuuaacggacugacagugcugccuccucugcugaccgaugagaugaucgcccaguacacaucugcccugcuggccggcacaaucacaagcggcuggacauuuggagcuggcgccgcucugcagauccccuuugcuaugcagauggccuaccgguucaacggcaucggagugacccagaaugugcuguacgagaaccagaagcugaucgccaaccaguucaacagcgccaucggcaagauccaggacagccugagcagcacagcaagcgcccugggaaagcugcaggacguggucaaccagaaugcccaggcacugaacacccuggucaagcagcuguccuccaacuucggcgccaucagcucugugcugaacgauauccugagcagacuggacaaggucgaggccgaggugcagaucgacagacugaucacaggcagacugcagagccuccagacauacgugacccagcagcugaucagagccgccgagauuagagccucugccaaucuggccgccaucaagaugucugagugugugcugggccagagcaagagaguggacuuuugcggcaagggcuaccaccugaugagcuucccucagucugccccucacggcgugguguuucugcacgugacauaugugcccgcucaagagaagaauuucaccaccgcuccagccaucugccacgacggcaaagcccacuuuccuagagaaggcguguucguguccaacggcacccauugguucgugacacagcggaacuucuacgagccccagaucaucaccaccgacaacaccuucgugucuggcaacugcgacguugugaucggcauugugaacaauaccguguacgacccucugcagcccgagcuggacagcuucaaagaggaacuggacaaguacuuuaagaaccacacaagccccgacguggaccugggcgauaucagcggaaucaaugccagcgucgugaacauccagaaagagaucgaccggcugaacgagguggccaagaaucugaacgagagccugaucgaccugcaagaacuggggaaguacgagcaguacaucaaguggcccugguacaucuggcugggcuuuaucgccggacugauugccaucgugauggucacaaucaugcuguguugcaugaccagcugcuguagcugccugaagggcuguuguagcuguggcagcugcugcaaguucgacgaggacgauucugagcccgugcugaagggcgugaaacugcacuacaccugaggacuaguuauaagacugacuagcccgaugggccucccaacgggcccuccuccccuccuugcaccgagauuaauagaucucaaaggcucuuuucagagccaccaaaaaaaaaaaaaaaaaaaaaaaaaaaaaaaaaaaaaaaaaaaaaaaaaaaaaaaaaaaaaaaaaaaaaaaaaaaaaaaaaaaaaaaaaaaaaaaaaaaaa

SEQ ID NO: 24378 - RNA, 4041 nt, Artificial Sequence
  SARS-CoV-2/Wuhan/WIV05/2019__EPI_ISL_402128 spike protein mRNA gc mod (1-1273)(S13I_W152C_L452R_D614G)
aggagaaagcuuaccauguucguguuucuggugcugcugccccugguguccauccagugugugaaccugaccaccagaacacagcugccuccagccuacaccaacagcuucaccagaggcguguacuaccccgacaagguguucagauccagcgugcugcacucuacccaggaccuguuccugccuuucuucagcaacgugaccugguuccacgccauccacguguccggcaccaauggcaccaagagauucgacaaccccgugcugcccuucaacgacgggguguacuuugccagcaccgagaaguccaacaucaucagaggcuggaucuucggcaccacacuggacagcaagacccagagccugcugaucgugaacaacgccaccaacguggucaucaaagugugcgaguuccaguucugcaacgaccccuuccugggcgucuacuaccacaagaacaacaagagcugcauggaaagcgaguuccggguguacagcagcgccaacaacugcaccuucgaguacgugucccagccuuuccugauggaccuggaaggcaagcagggcaacuucaagaaccugcgcgaguucguguucaagaacaucgacggcuacuucaaaaucuacagcaagcacaccccuaucaaccucgugcgggaucugccucagggcuucucugcucuggaaccccugguggaucugcccaucggcaucaacaucacccgguuucagacacugcuggcccugcacagaagcuaccugacaccuggcgauagcagcagcggauggacagcuggugccgccgcuuacuaugugggcuaccugcagccuagaaccuuccugcugaaguacaacgagaacggcaccaucaccgacgccguggauugugcucuggauccucugagcgagacaaagugcacccugaaguccuucaccguggaaaagggcaucuaccagaccagcaacuuccgggugcagcccaccgaauccaucgugcgguuccccaauaucaccaaucugugccccuucggcgagguguucaaugccaccagauucgccucuguguacgccuggaaccggaagcggaucagcaauugcguggccgacuacuccgugcuguacaacuccgccagcuucagcaccuucaagugcuacggcguguccccuaccaagcugaacgaccugugcuucacaaacguguacgccgacagcuucgugauccggggagaugaagugcggcagauugccccuggacagacaggcaagaucgccgacuacaacuacaagcugcccgacgacuucaccggcugugugauugccuggaacagcaacaaccuggacuccaaagucggcggcaacuacaauuaccgcuaccggcuguuccggaaguccaaucugaagcccuucgagcgggacaucagcaccgaaaucuaucaggccggcagcaccccuugcaacggcguggaaggcuucaacugcuacuucccacugcaguccuacggcuuucagcccacaaauggcgugggcuaucagcccuacagagugguggugcugagcuucgaacugcugcaugcuccugccacagugugcggcccuaagaaaagcaccaaucucgugaagaacaaaugcgugaacuucaacuucaacggccugaccggcaccggcgugcugacagagagcaacaagaaguuccugccauuccagcaguuuggccgggauaucgccgauaccacagacgccguuagagauccccagacacuggaaauccuggacaucaccccaugcagcuucggcggagugucugugaucaccccuggcaccaacaccagcaaucagguggcagugcuguaccagggcgugaacuguaccgaagugcccguggccauucacgccgaucagcugacaccuacauggcggguguacuccaccggcagcaauguguuucagaccagagccggcugucugaucggagccgagcacgugaacaauagcuacgagugcgacauccccaucggcgcuggcaucugugccagcuaccagacacagacaaacagccccagacgggcuagaagcguggccagccagagcaucauugccuacacaaugucucugggcgccgagaacagcguggccuacuccaacaacucuaucgcuauccccaccaacuucaccaucagcgugaccaccgagauccugccuguguccaugaccaagaccagcguggacugcaccauguacaucugcggcgauuccaccgagugcuccaaccugcugcugcaguacggcagcuucugcacccagcugaauagagcccugacagggaucgccguggaacaggacaagaacacccaagagguguucgcccaagugaagcaaaucuacaagaccccuccuaucaaggacuucggcggcuucaauuucagccagauucugcccgauccuagcaagcccagcaagcggagcuucaucgaggaccugcuguucaacaaagugacacuggccgacgccggcuucaucaagcaguauggcgauugucugggcgacauugccgccagggaucugauuugcgcccagaaguuuaacggacugacagugcugccuccucugcugaccgaugagaugaucgcccaguacacaucugcccugcuggccggcacaaucacaagcggcuggacauuuggagcuggcgccgcucugcagauccccuuugcuaugcagauggccuaccgguucaacggcaucggagugacccagaaugugcuguacgagaaccagaagcugaucgccaaccaguucaacagcgccaucggcaagauccaggacagccugagcagcacagcaagcgcccugggaaagcugcaggacguggucaaccagaaugcccaggcacugaacacccuggucaagcagcuguccuccaacuucggcgccaucagcucugugcugaacgauauccugagcagacuggacaaggucgaggccgaggugcagaucgacagacugaucacaggcagacugcagagccuccagacauacgugacccagcagcugaucagagccgccgagauuagagccucugccaaucuggccgccaccaagaugucugagugugugcugggccagagcaagagaguggacuuuugcggcaagggcuaccaccugaugagcuucccucagucugccccucacggcgugguguuucugcacgugacauaugugcccgcucaagagaagaauuucaccaccgcuccagccaucugccacgacggcaaagcccacuuuccuagagaaggcguguucguguccaacggcacccauugguucgugacacagcggaacuucuacgagccccagaucaucaccaccgacaacaccuucgugucuggcaacugcgacguugugaucggcauugugaacaauaccguguacgacccucugcagcccgagcuggacagcuucaaagaggaacuggacaaguacuuuaagaaccacacaagccccgacguggaccugggcgauaucagcggaaucaaugccagcgucgugaacauccagaaagagaucgaccggcugaacgagguggccaagaaucugaacgagagccugaucgaccugcaagaacuggggaaguacgagcaguacaucaaguggcccugguacaucuggcugggcuuuaucgccggacugauugccaucgugauggucacaaucaugcuguguugcaugaccagcugcuguagcugccugaagggcuguuguagcuguggcagcugcugcaaguucgacgaggacgauucugagcccgugcugaagggcgugaaacugcacuacaccugaggacuaguuauaagacugacuagcccgaugggccucccaacgggcccuccuccccuccuugcaccgagauuaauagaucucaaaggcucuuuucagagccaccaaaaaaaaaaaaaaaaaaaaaaaaaaaaaaaaaaaaaaaaaaaaaaaaaaaaaaaaaaaaaaaaaaaaaaaaaaaaaaaaaaaaaaaaaaaaaaaaaaaaa

SEQ ID NO: 24379 - RNA, 4041 nt, Artificial Sequence
  SARS-CoV-2/Wuhan/WIV05/2019__EPI_ISL_402128 spike protein mRNA gc mod (1-1273)
aggagaaagcuuaccauguucguguuccuggugcugcugccucugguguccagccagugugugaaccugaccaccagaacacagcugccuccagccuacaccaacagcuuuaccagaggcguguacuaccccgacaagguguucagauccagcgugcugcacucuacccaggaccuguuccugccuuucuucagcaacgugaccugguuccacgccauccacguguccggcaccaauggcaccaagagauucgacaaccccgugcugcccuucaacgacgggguguacuuugccagcaccgagaaguccaacaucaucagaggcuggaucuucggcaccacacuggacagcaagacccagagccugcugaucgugaacaacgccaccaacguggucaucaaagugugcgaguuccaguucugcaacgaccccuuccugggcgucuacuaccacaagaacaacaagagcuggauggaaagcgaguuccggguguacagcagcgccaacaacugcaccuucgaguacgugucccagccuuuccugauggaccuggaaggcaagcagggcaacuucaagaaccugcgcgaguucguguuuaagaacaucgacggcuacuucaagaucuacagcaagcacaccccuaucaaccucgugcgggaucugccucagggcuucucugcucuggaaccccugguggaucugcccaucggcaucaacaucacccgguuucagacacugcuggcccugcacagaagcuaccugacaccuggcgauagcagcagcggauggacagcuggugccgccgcuuacuaugugggcuaccugcagccuagaaccuuccugcugaaguacaacgagaacggcaccaucaccgacgccguggauugugcucuggauccucugagcgagacaaagugcacccugaaguccuucaccguggaaaagggcaucuaccagaccagcaacuuccgggugcagcccaccgaauccaucgugcgguuccccaauaucaccaaucugugccccuucggcgagguguucaaugccaccagauucgccucuguguacgccuggaaccggaagcggaucagcaauugcguggccgacuacuccgugcuguacaacuccgccagcuucagcaccuucaagugcuacggcguguccccuaccaagcugaacgaccugugcuucacaaacguguacgccgacagcuucgugauccggggagaugaagugcggcagauugccccuggacagacaggcaagaucgccgacuacaacuacaagcugcccgacgacuucaccggcugugugauugccuggaacagcaacaaccuggacuccaaagucggcggcaacuacaauuaccuguaccggcuguuccggaaguccaaucugaagcccuucgagcgggacaucuccaccgagaucuaucaggccggcagcaccccuuguaacggcguggaaggcuucaacugcuacuucccacugcaguccuacggcuuucagcccacaaauggcgugggcuaucagcccuacagagugguggugcugagcuucgaacugcugcaugccccugccacagugugcggcccuaagaaaagcaccaaucucgugaagaacaaaugcgugaacuucaacuucaacggccugaccggcaccggcgugcugacagagagcaacaagaaguuccugccauuccagcaguuuggccgggauaucgccgauaccacagacgccguuagagauccccagacacuggaaauccuggacaucaccccuugcagcuucggcggagugucugugaucaccccuggcaccaacaccagcaaucagguggcagugcuguaccaggacgugaacuguaccgaagugcccguggccauucacgccgaucagcugacaccuacauggcggguguacuccaccggcagcaauguguuucagaccagagccggcugucugaucggagccgagcacgugaacaauagcuacgagugcgacauccccaucggcgcuggaaucugcgccagcuaccagacacagacaaacagcccucggagagccagaagcguggccagccagagcaucauugccuacacaaugucucugggcgccgagaacagcguggccuacuccaacaacucuaucgcuauccccaccaacuucaccaucagcgugaccacagagauccugccuguguccaugaccaagaccagcguggacugcaccauguacaucugcggcgauuccaccgagugcuccaaccugcugcugcaguacggcagcuucugcacccagcugaauagagcccugacagggaucgccguggaacaggacaagaacacccaagagguguucgcccaagugaagcagaucuacaagaccccuccuaucaaggacuucggcggcuucaauuucagccagauucugcccgauccuagcaagcccagcaagcggagcuucaucgaggaccugcuguucaacaaagugacacuggccgacgccggcuucaucaagcaguauggcgauugucugggcgacauugccgccagggaucugauuugcgcccagaaguuuaacggacugacagugcugccuccucugcugaccgaugagaugaucgcccaguacacaucugcccugcuggccggcacaaucacaagcggcuggacauuuggagcaggcgccgcucugcagauccccuuugcuaugcagauggccuaccgguucaacggcaucggagugacccagaaugugcuguacgagaaccagaagcugaucgccaaccaguucaacagcgccaucggcaagauccaggacagccugagcagcacagcaagcgcccugggaaagcugcaggacguggucaaccagaaugcccaggcacugaacacccuggucaagcagcuguccuccaacuucggcgccaucagcucugugcugaacgauauccugagcagacuggacaaggucgaggccgaggugcagaucgacagacugaucacaggcagacugcagagccuccagacauacgugacccagcagcugaucagagccgccgagauuagagccucugccaaucuggccgccaccaagaugucugagugugugcugggccagagcaagagaguggacuuuugcggcaagggcuaccaccugaugagcuucccucagucugccccucacggcgugguguuucugcacgugacauaugugcccgcucaagagaagaauuucaccaccgcuccagccaucugccacgacggcaaagcccacuuuccuagagaaggcguguucguguccaacggcacccauugguucgugacacagcggaacuucuacgagccccagaucaucaccaccgacaacaccuucgugucuggcaacugcgacgucgugaucggcauugugaacaauaccguguacgacccucugcagcccgagcuggacagcuucaaagaggaacuggacaaguacuuuaagaaccacacaagccccgacguggaccugggcgauaucagcggaaucaaugccagcgucgugaacauccagaaagagaucgaccggcugaacgagguggccaagaaucugaacgagagccugaucgaccugcaagaacuggggaaguacgagcaguacaucaaguggcccugguacaucuggcugggcuuuaucgccggacugauugccaucgugauggucacaaucaugcuguguugcaugaccagcugcuguagcugccugaagggcuguuguagcuguggcagcugcugcaaguucgacgaggacgauucugagcccgugcugaagggcgugaaacugcacuacacaugaggacuaguuauaagacugacuagcccgaugggccucccaacgggcccuccuccccuccuugcaccgagauuaauagaucucaaaggcucuuuucagagccaccaaaaaaaaaaaaaaaaaaaaaaaaaaaaaaaaaaaaaaaaaaaaaaaaaaaaaaaaaaaaaaaaaaaaaaaaaaaaaaaaaaaaaaaaaaaaaaaaaaaaa

SEQ ID NO: 24380 - RNA, 4041 nt, Artificial Sequence
  SARS-CoV-2/Wuhan/WIV05/2019__EPI_ISL_402128 spike protein mRNA gc mod (1-1273)(D614G)
aggagaaagcuuaccauguucguguuccuggugcugcugccucugguguccagccagugugugaaccugaccaccagaacacagcugccuccagccuacaccaacagcuuuaccagaggcguguacuaccccgacaagguguucagauccagcgugcugcacucuacccaggaccuguuccugccuuucuucagcaacgugaccugguuccacgccauccacguguccggcaccaauggcaccaagagauucgacaaccccgugcugcccuucaacgacgggguguacuuugccagcaccgagaaguccaacaucaucagaggcuggaucuucggcaccacacuggacagcaagacccagagccugcugaucgugaacaacgccaccaacguggucaucaaagugugcgaguuccaguucugcaacgaccccuuccugggcgucuacuaccacaagaacaacaagagcuggauggaaagcgaguuccggguguacagcagcgccaacaacugcaccuucgaguacgugucccagccuuuccugauggaccuggaaggcaagcagggcaacuucaagaaccugcgcgaguucguguuuaagaacaucgacggcuacuucaagaucuacagcaagcacaccccuaucaaccucgugcgggaucugccucagggcuucucugcucuggaaccccugguggaucugcccaucggcaucaacaucacccgguuucagacacugcuggcccugcacagaagcuaccugacaccuggcgauagcagcagcggauggacagcuggugccgccgcuuacuaugugggcuaccugcagccuagaaccuuccugcugaaguacaacgagaacggcaccaucaccgacgccguggauugugcucuggauccucugagcgagacaaagugcacccugaaguccuucaccguggaaaagggcaucuaccagaccagcaacuuccgggugcagcccaccgaauccaucgugcgguuccccaauaucaccaaucugugccccuucggcgagguguucaaugccaccagauucgccucuguguacgccuggaaccggaagcggaucagcaauugcguggccgacuacuccgugcuguacaacuccgccagcuucagcaccuucaagugcuacggcguguccccuaccaagcugaacgaccugugcuucacaaacguguacgccgacagcuucgugauccggggagaugaagugcggcagauugccccuggacagacaggcaagaucgccgacuacaacuacaagcugcccgacgacuucaccggcugugugauugccuggaacagcaacaaccuggacuccaaagucggcggcaacuacaauuaccuguaccggcuguuccggaaguccaaucugaagcccuucgagcgggacaucuccaccgagaucuaucaggccggcagcaccccuuguaacggcguggaaggcuucaacugcuacuucccacugcaguccuacggcuuucagcccacaaauggcgugggcuaucagcccuacagagugguggugcugagcuucgaacugcugcaugccccugccacagugugcggcccuaagaaaagcaccaaucucgugaagaacaaaugcgugaacuucaacuucaacggccugaccggcaccggcgugcugacagagagcaacaagaaguuccugccauuccagcaguuuggccgggauaucgccgauaccacagacgccguuagagauccccagacacuggaaauccuggacaucaccccuugcagcuucggcggagugucugugaucaccccuggcaccaacaccagcaaucagguggcagugcuguaccagggcgugaacuguaccgaagugcccguggccauucacgccgaucagcugacaccuacauggcggguguacuccaccggcagcaauguguuucagaccagagccggcugucugaucggagccgagcacgugaacaauagcuacgagugcgacauccccaucggcgcuggaaucugcgccagcuaccagacacagacaaacagcccucggagagccagaagcguggccagccagagcaucauugccuacacaaugucucugggcgccgagaacagcguggccuacuccaacaacucuaucgcuauccccaccaacuucaccaucagcgugaccacagagauccugccuguguccaugaccaagaccagcguggacugcaccauguacaucugcggcgauuccaccgagugcuccaaccugcugcugcaguacggcagcuucugcacccagcugaauagagcccugacagggaucgccguggaacaggacaagaacacccaagagguguucgcccaagugaagcagaucuacaagaccccuccuaucaaggacuucggcggcuucaauuucagccagauucugcccgauccuagcaagcccagcaagcggagcuucaucgaggaccugcuguucaacaaagugacacuggccgacgccggcuucaucaagcaguauggcgauugucugggcgacauugccgccagggaucugauuugcgcccagaaguuuaacggacugacagugcugccuccucugcugaccgaugagaugaucgcccaguacacaucugcccugcuggccggcacaaucacaagcggcuggacauuuggagcaggcgccgcucugcagauccccuuugcuaugcagauggccuaccgguucaacggcaucggagugacccagaaugugcuguacgagaaccagaagcugaucgccaaccaguucaacagcgccaucggcaagauccaggacagccugagcagcacagcaagcgcccugggaaagcugcaggacguggucaaccagaaugcccaggcacugaacacccuggucaagcagcuguccuccaacuucggcgccaucagcucugugcugaacgauauccugagcagacuggacaaggucgaggccgaggugcagaucgacagacugaucacaggcagacugcagagccuccagacauacgugacccagcagcugaucagagccgccgagauuagagccucugccaaucuggccgccaccaagaugucugagugugugcugggccagagcaagagaguggacuuuugcggcaagggcuaccaccugaugagcuucccucagucugccccucacggcgugguguuucugcacgugacauaugugcccgcucaagagaagaauuucaccaccgcuccagccaucugccacgacggcaaagcccacuuuccuagagaaggcguguucguguccaacggcacccauugguucgugacacagcggaacuucuacgagccccagaucaucaccaccgacaacaccuucgugucuggcaacugcgacgucgugaucggcauugugaacaauaccguguacgacccucugcagcccgagcuggacagcuucaaagaggaacuggacaaguacuuuaagaaccacacaagccccgacguggaccugggcgauaucagcggaaucaaugccagcgucgugaacauccagaaagagaucgaccggcugaacgagguggccaagaaucugaacgagagccugaucgaccugcaagaacuggggaaguacgagcaguacaucaaguggcccugguacaucuggcugggcuuuaucgccggacugauugccaucgugauggucacaaucaugcuguguugcaugaccagcugcuguagcugccugaagggcuguuguagcuguggcagcugcugcaaguucgacgaggacgauucugagcccgugcugaagggcgugaaacugcacuacacaugaggacuaguuauaagacugacuagcccgaugggccucccaacgggcccuccuccccuccuugcaccgagauuaauagaucucaaaggcucuuuucagagccaccaaaaaaaaaaaaaaaaaaaaaaaaaaaaaaaaaaaaaaaaaaaaaaaaaaaaaaaaaaaaaaaaaaaaaaaaaaaaaaaaaaaaaaaaaaaaaaaaaaaaa

SEQ ID NO: 24381 - RNA, 4041 nt, Artificial Sequence
  SARS-CoV-2/Wuhan/WIV05/2019__EPI_ISL_402128 spike protein mRNA gc mod (1-1273)(A222V_D614G)
aggagaaagcuuaccauguucguguuccuggugcugcugccucugguguccagccagugugugaaccugaccaccagaacacagcugccuccagccuacaccaacagcuuuaccagaggcguguacuaccccgacaagguguucagauccagcgugcugcacucuacccaggaccuguuccugccuuucuucagcaacgugaccugguuccacgccauccacguguccggcaccaauggcaccaagagauucgacaaccccgugcugcccuucaacgacgggguguacuuugccagcaccgagaaguccaacaucaucagaggcuggaucuucggcaccacacuggacagcaagacccagagccugcugaucgugaacaacgccaccaacguggucaucaaagugugcgaguuccaguucugcaacgaccccuuccugggcgucuacuaccacaagaacaacaagagcuggauggaaagcgaguuccggguguacagcagcgccaacaacugcaccuucgaguacgugucccagccuuuccugauggaccuggaaggcaagcagggcaacuucaagaaccugcgcgaguucguguuuaagaacaucgacggcuacuucaagaucuacagcaagcacaccccuaucaaccucgugcgggaucugccucagggcuucucugugcuggaaccccugguggaucugcccaucggcaucaacaucacccgguuucagacacugcuggcccugcacagaagcuaccugacaccuggcgauagcagcagcggauggacagcuggugccgccgcuuacuaugugggcuaccugcagccuagaaccuuccugcugaaguacaacgagaacggcaccaucaccgacgccguggauugugcucuggauccucugagcgagacaaagugcacccugaaguccuucaccguggaaaagggcaucuaccagaccagcaacuuccgggugcagcccaccgaauccaucgugcgguuccccaauaucaccaaucugugccccuucggcgagguguucaaugccaccagauucgccucuguguacgccuggaaccggaagcggaucagcaauugcguggccgacuacuccgugcuguacaacuccgccagcuucagcaccuucaagugcuacggcguguccccuaccaagcugaacgaccugugcuucacaaacguguacgccgacagcuucgugauccggggagaugaagugcggcagauugccccuggacagacaggcaagaucgccgacuacaacuacaagcugcccgacgacuucaccggcugugugauugccuggaacagcaacaaccuggacuccaaagucggcggcaacuacaauuaccuguaccggcuguuccggaaguccaaucugaagcccuucgagcgggacaucuccaccgagaucuaucaggccggcagcaccccuuguaacggcguggaaggcuucaacugcuacuucccacugcaguccuacggcuuucagcccacaaauggcgugggcuaucagcccuacagagugguggugcugagcuucgaacugcugcaugccccugccacagugugcggcccuaagaaaagcaccaaucucgugaagaacaaaugcgugaacuucaacuucaacggccugaccggcaccggcgugcugacagagagcaacaagaaguuccugccauuccagcaguuuggccgggauaucgccgauaccacagacgccguuagagauccccagacacuggaaauccuggacaucaccccuugcagcuucggcggagugucugugaucaccccuggcaccaacaccagcaaucagguggcagugcuguaccagggcgugaacuguaccgaagugcccguggccauucacgccgaucagcugacaccuacauggcggguguacuccaccggcagcaauguguuucagaccagagccggcugucugaucggagccgagcacgugaacaauagcuacgagugcgacauccccaucggcgcuggaaucugcgccagcuaccagacacagacaaacagcccucggagagccagaagcguggccagccagagcaucauugccuacacaaugucucugggcgccgagaacagcguggccuacuccaacaacucuaucgcuauccccaccaacuucaccaucagcgugaccacagagauccugccuguguccaugaccaagaccagcguggacugcaccauguacaucugcggcgauuccaccgagugcuccaaccugcugcugcaguacggcagcuucugcacccagcugaauagagcccugacagggaucgccguggaacaggacaagaacacccaagagguguucgcccaagugaagcagaucuacaagaccccuccuaucaaggacuucggcggcuucaauuucagccagauucugcccgauccuagcaagcccagcaagcggagcuucaucgaggaccugcuguucaacaaagugacacuggccgacgccggcuucaucaagcaguauggcgauugucugggcgacauugccgccagggaucugauuugcgcccagaaguuuaacggacugacagugcugccuccucugcugaccgaugagaugaucgcccaguacacaucugcccugcuggccggcacaaucacaagcggcuggacauuuggagcaggcgccgcucugcagauccccuuugcuaugcagauggccuaccgguucaacggcaucggagugacccagaaugugcuguacgagaaccagaagcugaucgccaaccaguucaacagcgccaucggcaagauccaggacagccugagcagcacagcaagcgcccugggaaagcugcaggacguggucaaccagaaugcccaggcacugaacacccuggucaagcagcuguccuccaacuucggcgccaucagcucugugcugaacgauauccugagcagacuggacaaggucgaggccgaggugcagaucgacagacugaucacaggcagacugcagagccuccagacauacgugacccagcagcugaucagagccgccgagauuagagccucugccaaucuggccgccaccaagaugucugagugugugcugggccagagcaagagaguggacuuuugcggcaagggcuaccaccugaugagcuucccucagucugccccucacggcgugguguuucugcacgugacauaugugcccgcucaagagaagaauuucaccaccgcuccagccaucugccacgacggcaaagcccacuuuccuagagaaggcguguucguguccaacggcacccauugguucgugacacagcggaacuucuacgagccccagaucaucaccaccgacaacaccuucgugucuggcaacugcgacgucgugaucggcauugugaacaauaccguguacgacccucugcagcccgagcuggacagcuucaaagaggaacuggacaaguacuuuaagaaccacacaagccccgacguggaccugggcgauaucagcggaaucaaugccagcgucgugaacauccagaaagagaucgaccggcugaacgagguggccaagaaucugaacgagagccugaucgaccugcaagaacuggggaaguacgagcaguacaucaaguggcccugguacaucuggcugggcuuuaucgccggacugauugccaucgugauggucacaaucaugcuguguugcaugaccagcugcuguagcugccugaagggcuguuguagcuguggcagcugcugcaaguucgacgaggacgauucugagcccgugcugaagggcgugaaacugcacuacacaugaggacuaguuauaagacugacuagcccgaugggccucccaacgggcccuccuccccuccuugcaccgagauuaauagaucucaaaggcucuuuucagagccaccaaaaaaaaaaaaaaaaaaaaaaaaaaaaaaaaaaaaaaaaaaaaaaaaaaaaaaaaaaaaaaaaaaaaaaaaaaaaaaaaaaaaaaaaaaaaaaaaaaaaa

SEQ ID NO: 24382 - RNA, 4041 nt, Artificial Sequence
  SARS-CoV-2/Wuhan/WIV05/2019__EPI_ISL_402128 spike protein mRNA gc mod (1-1273)(N439K_D614G)
aggagaaagcuuaccauguucguguuccuggugcugcugccucugguguccagccagugugugaaccugaccaccagaacacagcugccuccagccuacaccaacagcuuuaccagaggcguguacuaccccgacaagguguucagauccagcgugcugcacucuacccaggaccuguuccugccuuucuucagcaacgugaccugguuccacgccauccacguguccggcaccaauggcaccaagagauucgacaaccccgugcugcccuucaacgacgggguguacuuugccagcaccgagaaguccaacaucaucagaggcuggaucuucggcaccacacuggacagcaagacccagagccugcugaucgugaacaacgccaccaacguggucaucaaagugugcgaguuccaguucugcaacgaccccuuccugggcgucuacuaccacaagaacaacaagagcuggauggaaagcgaguuccggguguacagcagcgccaacaacugcaccuucgaguacgugucccagccuuuccugauggaccuggaaggcaagcagggcaacuucaagaaccugcgcgaguucguguuuaagaacaucgacggcuacuucaagaucuacagcaagcacaccccuaucaaccucgugcgggaucugccucagggcuucucugcucuggaaccccugguggaucugcccaucggcaucaacaucacccgguuucagacacugcuggcccugcacagaagcuaccugacaccuggcgauagcagcagcggauggacagcuggugccgccgcuuacuaugugggcuaccugcagccuagaaccuuccugcugaaguacaacgagaacggcaccaucaccgacgccguggauugugcucuggauccucugagcgagacaaagugcacccugaaguccuucaccguggaaaagggcaucuaccagaccagcaacuuccgggugcagcccaccgaauccaucgugcgguuccccaauaucaccaaucugugccccuucggcgagguguucaaugccaccagauucgccucuguguacgccuggaaccggaagcggaucagcaauugcguggccgacuacuccgugcuguacaacuccgccagcuucagcaccuucaagugcuacggcguguccccuaccaagcugaacgaccugugcuucacaaacguguacgccgacagcuucgugauccggggagaugaagugcggcagauugccccuggacagacaggcaagaucgccgacuacaacuacaagcugcccgacgacuucaccggcugugugauugccuggaacagcaagaaccuggacuccaaagucggcggcaacuacaauuaccuguaccggcuguuccggaaguccaaucugaagcccuucgagcgggacaucuccaccgagaucuaucaggccggcagcaccccuuguaacggcguggaaggcuucaacugcuacuucccacugcaguccuacggcuuucagcccacaaauggcgugggcuaucagcccuacagagugguggugcugagcuucgaacugcugcaugccccugccacagugugcggcccuaagaaaagcaccaaucucgugaagaacaaaugcgugaacuucaacuucaacggccugaccggcaccggcgugcugacagagagcaacaagaaguuccugccauuccagcaguuuggccgggauaucgccgauaccacagacgccguuagagauccccagacacuggaaauccuggacaucaccccuugcagcuucggcggagugucugugaucaccccuggcaccaacaccagcaaucagguggcagugcuguaccagggcgugaacuguaccgaagugcccguggccauucacgccgaucagcugacaccuacauggcggguguacuccaccggcagcaauguguuucagaccagagccggcugucugaucggagccgagcacgugaacaauagcuacgagugcgacauccccaucggcgcuggaaucugcgccagcuaccagacacagacaaacagcccucggagagccagaagcguggccagccagagcaucauugccuacacaaugucucugggcgccgagaacagcguggccuacuccaacaacucuaucgcuauccccaccaacuucaccaucagcgugaccacagagauccugccuguguccaugaccaagaccagcguggacugcaccauguacaucugcggcgauuccaccgagugcuccaaccugcugcugcaguacggcagcuucugcacccagcugaauagagcccugacagggaucgccguggaacaggacaagaacacccaagagguguucgcccaagugaagcagaucuacaagaccccuccuaucaaggacuucggcggcuucaauuucagccagauucugcccgauccuagcaagcccagcaagcggagcuucaucgaggaccugcuguucaacaaagugacacuggccgacgccggcuucaucaagcaguauggcgauugucugggcgacauugccgccagggaucugauuugcgcccagaaguuuaacggacugacagugcugccuccucugcugaccgaugagaugaucgcccaguacacaucugcccugcuggccggcacaaucacaagcggcuggacauuuggagcaggcgccgcucugcagauccccuuugcuaugcagauggccuaccgguucaacggcaucggagugacccagaaugugcuguacgagaaccagaagcugaucgccaaccaguucaacagcgccaucggcaagauccaggacagccugagcagcacagcaagcgcccugggaaagcugcaggacguggucaaccagaaugcccaggcacugaacacccuggucaagcagcuguccuccaacuucggcgccaucagcucugugcugaacgauauccugagcagacuggacaaggucgaggccgaggugcagaucgacagacugaucacaggcagacugcagagccuccagacauacgugacccagcagcugaucagagccgccgagauuagagccucugccaaucuggccgccaccaagaugucugagugugugcugggccagagcaagagaguggacuuuugcggcaagggcuaccaccugaugagcuucccucagucugccccucacggcgugguguuucugcacgugacauaugugcccgcucaagagaagaauuucaccaccgcuccagccaucugccacgacggcaaagcccacuuuccuagagaaggcguguucguguccaacggcacccauugguucgugacacagcggaacuucuacgagccccagaucaucaccaccgacaacaccuucgugucuggcaacugcgacgucgugaucggcauugugaacaauaccguguacgacccucugcagcccgagcuggacagcuucaaagaggaacuggacaaguacuuuaagaaccacacaagccccgacguggaccugggcgauaucagcggaaucaaugccagcgucgugaacauccagaaagagaucgaccggcugaacgagguggccaagaaucugaacgagagccugaucgaccugcaagaacuggggaaguacgagcaguacaucaaguggcccugguacaucuggcugggcuuuaucgccggacugauugccaucgugauggucacaaucaugcuguguugcaugaccagcugcuguagcugccugaagggcuguuguagcuguggcagcugcugcaaguucgacgaggacgauucugagcccgugcugaagggcgugaaacugcacuacacaugaggacuaguuauaagacugacuagcccgaugggccucccaacgggcccuccuccccuccuugcaccgagauuaauagaucucaaaggcucuuuucagagccaccaaaaaaaaaaaaaaaaaaaaaaaaaaaaaaaaaaaaaaaaaaaaaaaaaaaaaaaaaaaaaaaaaaaaaaaaaaaaaaaaaaaaaaaaaaaaaaaaaaaaa

SEQ ID NO: 24383 - RNA, 4041 nt, Artificial Sequence
  SARS-CoV-2/Wuhan/WIV05/2019__EPI_ISL_402128 spike protein mRNA gc mod (1-1273)(S477N_D614G)
aggagaaagcuuaccauguucguguuccuggugcugcugccucugguguccagccagugugugaaccugaccaccagaacacagcugccuccagccuacaccaacagcuuuaccagaggcguguacuaccccgacaagguguucagauccagcgugcugcacucuacccaggaccuguuccugccuuucuucagcaacgugaccugguuccacgccauccacguguccggcaccaauggcaccaagagauucgacaaccccgugcugcccuucaacgacgggguguacuuugccagcaccgagaaguccaacaucaucagaggcuggaucuucggcaccacacuggacagcaagacccagagccugcugaucgugaacaacgccaccaacguggucaucaaagugugcgaguuccaguucugcaacgaccccuuccugggcgucuacuaccacaagaacaacaagagcuggauggaaagcgaguuccggguguacagcagcgccaacaacugcaccuucgaguacgugucccagccuuuccugauggaccuggaaggcaagcagggcaacuucaagaaccugcgcgaguucguguuuaagaacaucgacggcuacuucaagaucuacagcaagcacaccccuaucaaccucgugcgggaucugccucagggcuucucugcucuggaaccccugguggaucugcccaucggcaucaacaucacccgguuucagacacugcuggcccugcacagaagcuaccugacaccuggcgauagcagcagcggauggacagcuggugccgccgcuuacuaugugggcuaccugcagccuagaaccuuccugcugaaguacaacgagaacggcaccaucaccgacgccguggauugugcucuggauccucugagcgagacaaagugcacccugaaguccuucaccguggaaaagggcaucuaccagaccagcaacuuccgggugcagcccaccgaauccaucgugcgguuccccaauaucaccaaucugugccccuucggcgagguguucaaugccaccagauucgccucuguguacgccuggaaccggaagcggaucagcaauugcguggccgacuacuccgugcuguacaacuccgccagcuucagcaccuucaagugcuacggcguguccccuaccaagcugaacgaccugugcuucacaaacguguacgccgacagcuucgugauccggggagaugaagugcggcagauugccccuggacagacaggcaagaucgccgacuacaacuacaagcugcccgacgacuucaccggcugugugauugccuggaacagcaacaaccuggacuccaaagucggcggcaacuacaauuaccuguaccggcuguuccggaaguccaaucugaagcccuucgagcgggacaucuccaccgagaucuaucaggccggcaacaccccuuguaacggcguggaaggcuucaacugcuacuucccacugcaguccuacggcuuucagcccacaaauggcgugggcuaucagcccuacagagugguggugcugagcuucgaacugcugcaugccccugccacagugugcggcccuaagaaaagcaccaaucucgugaagaacaaaugcgugaacuucaacuucaacggccugaccggcaccggcgugcugacagagagcaacaagaaguuccugccauuccagcaguuuggccgggauaucgccgauaccacagacgccguuagagauccccagacacuggaaauccuggacaucaccccuugcagcuucggcggagugucugugaucaccccuggcaccaacaccagcaaucagguggcagugcuguaccagggcgugaacuguaccgaagugcccguggccauucacgccgaucagcugacaccuacauggcggguguacuccaccggcagcaauguguuucagaccagagccggcugucugaucggagccgagcacgugaacaauagcuacgagugcgacauccccaucggcgcuggaaucugcgccagcuaccagacacagacaaacagcccucggagagccagaagcguggccagccagagcaucauugccuacacaaugucucugggcgccgagaacagcguggccuacuccaacaacucuaucgcuauccccaccaacuucaccaucagcgugaccacagagauccugccuguguccaugaccaagaccagcguggacugcaccauguacaucugcggcgauuccaccgagugcuccaaccugcugcugcaguacggcagcuucugcacccagcugaauagagcccugacagggaucgccguggaacaggacaagaacacccaagagguguucgcccaagugaagcagaucuacaagaccccuccuaucaaggacuucggcggcuucaauuucagccagauucugcccgauccuagcaagcccagcaagcggagcuucaucgaggaccugcuguucaacaaagugacacuggccgacgccggcuucaucaagcaguauggcgauugucugggcgacauugccgccagggaucugauuugcgcccagaaguuuaacggacugacagugcugccuccucugcugaccgaugagaugaucgcccaguacacaucugcccugcuggccggcacaaucacaagcggcuggacauuuggagcaggcgccgcucugcagauccccuuugcuaugcagauggccuaccgguucaacggcaucggagugacccagaaugugcuguacgagaaccagaagcugaucgccaaccaguucaacagcgccaucggcaagauccaggacagccugagcagcacagcaagcgcccugggaaagcugcaggacguggucaaccagaaugcccaggcacugaacacccuggucaagcagcuguccuccaacuucggcgccaucagcucugugcugaacgauauccugagcagacuggacaaggucgaggccgaggugcagaucgacagacugaucacaggcagacugcagagccuccagacauacgugacccagcagcugaucagagccgccgagauuagagccucugccaaucuggccgccaccaagaugucugagugugugcugggccagagcaagagaguggacuuuugcggcaagggcuaccaccugaugagcuucccucagucugccccucacggcgugguguuucugcacgugacauaugugcccgcucaagagaagaauuucaccaccgcuccagccaucugccacgacggcaaagcccacuuuccuagagaaggcguguucguguccaacggcacccauugguucgugacacagcggaacuucuacgagccccagaucaucaccaccgacaacaccuucgugucuggcaacugcgacgucgugaucggcauugugaacaauaccguguacgacccucugcagcccgagcuggacagcuucaaagaggaacuggacaaguacuuuaagaaccacacaagccccgacguggaccugggcgauaucagcggaaucaaugccagcgucgugaacauccagaaagagaucgaccggcugaacgagguggccaagaaucugaacgagagccugaucgaccugcaagaacuggggaaguacgagcaguacaucaaguggcccugguacaucuggcugggcuuuaucgccggacugauugccaucgugauggucacaaucaugcuguguugcaugaccagcugcuguagcugccugaagggcuguuguagcuguggcagcugcugcaaguucgacgaggacgauucugagcccgugcugaagggcgugaaacugcacuacacaugaggacuaguuauaagacugacuagcccgaugggccucccaacgggcccuccuccccuccuugcaccgagauuaauagaucucaaaggcucuuuucagagccaccaaaaaaaaaaaaaaaaaaaaaaaaaaaaaaaaaaaaaaaaaaaaaaaaaaaaaaaaaaaaaaaaaaaaaaaaaaaaaaaaaaaaaaaaaaaaaaaaaaaaa

SEQ ID NO: 24384 - RNA, 4041 nt, Artificial Sequence
  SARS-CoV-2/Wuhan/WIV05/2019__EPI_ISL_402128 spike protein mRNA gc mod (1-1273)(N501Y_D614G)
aggagaaagcuuaccauguucguguuccuggugcugcugccucugguguccagccagugugugaaccugaccaccagaacacagcugccuccagccuacaccaacagcuuuaccagaggcguguacuaccccgacaagguguucagauccagcgugcugcacucuacccaggaccuguuccugccuuucuucagcaacgugaccugguuccacgccauccacguguccggcaccaauggcaccaagagauucgacaaccccgugcugcccuucaacgacgggguguacuuugccagcaccgagaaguccaacaucaucagaggcuggaucuucggcaccacacuggacagcaagacccagagccugcugaucgugaacaacgccaccaacguggucaucaaagugugcgaguuccaguucugcaacgaccccuuccugggcgucuacuaccacaagaacaacaagagcuggauggaaagcgaguuccggguguacagcagcgccaacaacugcaccuucgaguacgugucccagccuuuccugauggaccuggaaggcaagcagggcaacuucaagaaccugcgcgaguucguguuuaagaacaucgacggcuacuucaagaucuacagcaagcacaccccuaucaaccucgugcgggaucugccucagggcuucucugcucuggaaccccugguggaucugcccaucggcaucaacaucacccgguuucagacacugcuggcccugcacagaagcuaccugacaccuggcgauagcagcagcggauggacagcuggugccgccgcuuacuaugugggcuaccugcagccuagaaccuuccugcugaaguacaacgagaacggcaccaucaccgacgccguggauugugcucuggauccucugagcgagacaaagugcacccugaaguccuucaccguggaaaagggcaucuaccagaccagcaacuuccgggugcagcccaccgaauccaucgugcgguuccccaauaucaccaaucugugccccuucggcgagguguucaaugccaccagauucgccucuguguacgccuggaaccggaagcggaucagcaauugcguggccgacuacuccgugcuguacaacuccgccagcuucagcaccuucaagugcuacggcguguccccuaccaagcugaacgaccugugcuucacaaacguguacgccgacagcuucgugauccggggagaugaagugcggcagauugccccuggacagacaggcaagaucgccgacuacaacuacaagcugcccgacgacuucaccggcugugugauugccuggaacagcaacaaccuggacuccaaagucggcggcaacuacaauuaccuguaccggcuguuccggaaguccaaucugaagcccuucgagcgggacaucuccaccgagaucuaucaggccggcagcaccccuuguaacggcguggaaggcuucaacugcuacuucccacugcaguccuacggcuuucagcccacauacggcgugggcuaucagcccuacagagugguggugcugagcuucgaacugcugcaugccccugccacagugugcggcccuaagaaaagcaccaaucucgugaagaacaaaugcgugaacuucaacuucaacggccugaccggcaccggcgugcugacagagagcaacaagaaguuccugccauuccagcaguuuggccgggauaucgccgauaccacagacgccguuagagauccccagacacuggaaauccuggacaucaccccuugcagcuucggcggagugucugugaucaccccuggcaccaacaccagcaaucagguggcagugcuguaccagggcgugaacuguaccgaagugcccguggccauucacgccgaucagcugacaccuacauggcggguguacuccaccggcagcaauguguuucagaccagagccggcugucugaucggagccgagcacgugaacaauagcuacgagugcgacauccccaucggcgcuggaaucugcgccagcuaccagacacagacaaacagcccucggagagccagaagcguggccagccagagcaucauugccuacacaaugucucugggcgccgagaacagcguggccuacuccaacaacucuaucgcuauccccaccaacuucaccaucagcgugaccacagagauccugccuguguccaugaccaagaccagcguggacugcaccauguacaucugcggcgauuccaccgagugcuccaaccugcugcugcaguacggcagcuucugcacccagcugaauagagcccugacagggaucgccguggaacaggacaagaacacccaagagguguucgcccaagugaagcagaucuacaagaccccuccuaucaaggacuucggcggcuucaauuucagccagauucugcccgauccuagcaagcccagcaagcggagcuucaucgaggaccugcuguucaacaaagugacacuggccgacgccggcuucaucaagcaguauggcgauugucugggcgacauugccgccagggaucugauuugcgcccagaaguuuaacggacugacagugcugccuccucugcugaccgaugagaugaucgcccaguacacaucugcccugcuggccggcacaaucacaagcggcuggacauuuggagcaggcgccgcucugcagauccccuuugcuaugcagauggccuaccgguucaacggcaucggagugacccagaaugugcuguacgagaaccagaagcugaucgccaaccaguucaacagcgccaucggcaagauccaggacagccugagcagcacagcaagcgcccugggaaagcugcaggacguggucaaccagaaugcccaggcacugaacacccuggucaagcagcuguccuccaacuucggcgccaucagcucugugcugaacgauauccugagcagacuggacaaggucgaggccgaggugcagaucgacagacugaucacaggcagacugcagagccuccagacauacgugacccagcagcugaucagagccgccgagauuagagccucugccaaucuggccgccaccaagaugucugagugugugcugggccagagcaagagaguggacuuuugcggcaagggcuaccaccugaugagcuucccucagucugccccucacggcgugguguuucugcacgugacauaugugcccgcucaagagaagaauuucaccaccgcuccagccaucugccacgacggcaaagcccacuuuccuagagaaggcguguucguguccaacggcacccauugguucgugacacagcggaacuucuacgagccccagaucaucaccaccgacaacaccuucgugucuggcaacugcgacgucgugaucggcauugugaacaauaccguguacgacccucugcagcccgagcuggacagcuucaaagaggaacuggacaaguacuuuaagaaccacacaagccccgacguggaccugggcgauaucagcggaaucaaugccagcgucgugaacauccagaaagagaucgaccggcugaacgagguggccaagaaucugaacgagagccugaucgaccugcaagaacuggggaaguacgagcaguacaucaaguggcccugguacaucuggcugggcuuuaucgccggacugauugccaucgugauggucacaaucaugcuguguugcaugaccagcugcuguagcugccugaagggcuguuguagcuguggcagcugcugcaaguucgacgaggacgauucugagcccgugcugaagggcgugaaacugcacuacacaugaggacuaguuauaagacugacuagcccgaugggccucccaacgggcccuccuccccuccuugcaccgagauuaauagaucucaaaggcucuuuucagagccaccaaaaaaaaaaaaaaaaaaaaaaaaaaaaaaaaaaaaaaaaaaaaaaaaaaaaaaaaaaaaaaaaaaaaaaaaaaaaaaaaaaaaaaaaaaaaaaaaaaaaa

SEQ ID NO: 24385 - RNA, 4035 nt, Artificial Sequence
  SARS-CoV-2/Wuhan/WIV05/2019__EPI_ISL_402128 spike protein mRNA gc mod (1-1273)(H69del_V70del_D614G)
aggagaaagcuuaccauguucguguuccuggugcugcugccucugguguccagccagugugugaaccugaccaccagaacacagcugccuccagccuacaccaacagcuuuaccagaggcguguacuaccccgacaagguguucagauccagcgugcugcacucuacccaggaccuguuccugccuuucuucagcaacgugaccugguuccacgccaucuccggcaccaauggcaccaagagauucgacaaccccgugcugcccuucaacgacgggguguacuuugccagcaccgagaaguccaacaucaucagaggcuggaucuucggcaccacacuggacagcaagacccagagccugcugaucgugaacaacgccaccaacguggucaucaaagugugcgaguuccaguucugcaacgaccccuuccugggcgucuacuaccacaagaacaacaagagcuggauggaaagcgaguuccggguguacagcagcgccaacaacugcaccuucgaguacgugucccagccuuuccugauggaccuggaaggcaagcagggcaacuucaagaaccugcgcgaguucguguuuaagaacaucgacggcuacuucaagaucuacagcaagcacaccccuaucaaccucgugcgggaucugccucagggcuucucugcucuggaaccccugguggaucugcccaucggcaucaacaucacccgguuucagacacugcuggcccugcacagaagcuaccugacaccuggcgauagcagcagcggauggacagcuggugccgccgcuuacuaugugggcuaccugcagccuagaaccuuccugcugaaguacaacgagaacggcaccaucaccgacgccguggauugugcucuggauccucugagcgagacaaagugcacccugaaguccuucaccguggaaaagggcaucuaccagaccagcaacuuccgggugcagcccaccgaauccaucgugcgguuccccaauaucaccaaucugugccccuucggcgagguguucaaugccaccagauucgccucuguguacgccuggaaccggaagcggaucagcaauugcguggccgacuacuccgugcuguacaacuccgccagcuucagcaccuucaagugcuacggcguguccccuaccaagcugaacgaccugugcuucacaaacguguacgccgacagcuucgugauccggggagaugaagugcggcagauugccccuggacagacaggcaagaucgccgacuacaacuacaagcugcccgacgacuucaccggcugugugauugccuggaacagcaacaaccuggacuccaaagucggcggcaacuacaauuaccuguaccggcuguuccggaaguccaaucugaagcccuucgagcgggacaucuccaccgagaucuaucaggccggcagcaccccuuguaacggcguggaaggcuucaacugcuacuucccacugcaguccuacggcuuucagcccacaaauggcgugggcuaucagcccuacagagugguggugcugagcuucgaacugcugcaugccccugccacagugugcggcccuaagaaaagcaccaaucucgugaagaacaaaugcgugaacuucaacuucaacggccugaccggcaccggcgugcugacagagagcaacaagaaguuccugccauuccagcaguuuggccgggauaucgccgauaccacagacgccguuagagauccccagacacuggaaauccuggacaucaccccuugcagcuucggcggagugucugugaucaccccuggcaccaacaccagcaaucagguggcagugcuguaccagggcgugaacuguaccgaagugcccguggccauucacgccgaucagcugacaccuacauggcggguguacuccaccggcagcaauguguuucagaccagagccggcugucugaucggagccgagcacgugaacaauagcuacgagugcgacauccccaucggcgcuggaaucugcgccagcuaccagacacagacaaacagcccucggagagccagaagcguggccagccagagcaucauugccuacacaaugucucugggcgccgagaacagcguggccuacuccaacaacucuaucgcuauccccaccaacuucaccaucagcgugaccacagagauccugccuguguccaugaccaagaccagcguggacugcaccauguacaucugcggcgauuccaccgagugcuccaaccugcugcugcaguacggcagcuucugcacccagcugaauagagcccugacagggaucgccguggaacaggacaagaacacccaagagguguucgcccaagugaagcagaucuacaagaccccuccuaucaaggacuucggcggcuucaauuucagccagauucugcccgauccuagcaagcccagcaagcggagcuucaucgaggaccugcuguucaacaaagugacacuggccgacgccggcuucaucaagcaguauggcgauugucugggcgacauugccgccagggaucugauuugcgcccagaaguuuaacggacugacagugcugccuccucugcugaccgaugagaugaucgcccaguacacaucugcccugcuggccggcacaaucacaagcggcuggacauuuggagcaggcgccgcucugcagauccccuuugcuaugcagauggccuaccgguucaacggcaucggagugacccagaaugugcuguacgagaaccagaagcugaucgccaaccaguucaacagcgccaucggcaagauccaggacagccugagcagcacagcaagcgcccugggaaagcugcaggacguggucaaccagaaugcccaggcacugaacacccuggucaagcagcuguccuccaacuucggcgccaucagcucugugcugaacgauauccugagcagacuggacaaggucgaggccgaggugcagaucgacagacugaucacaggcagacugcagagccuccagacauacgugacccagcagcugaucagagccgccgagauuagagccucugccaaucuggccgccaccaagaugucugagugugugcugggccagagcaagagaguggacuuuugcggcaagggcuaccaccugaugagcuucccucagucugccccucacggcgugguguuucugcacgugacauaugugcccgcucaagagaagaauuucaccaccgcuccagccaucugccacgacggcaaagcccacuuuccuagagaaggcguguucguguccaacggcacccauugguucgugacacagcggaacuucuacgagccccagaucaucaccaccgacaacaccuucgugucuggcaacugcgacgucgugaucggcauugugaacaauaccguguacgacccucugcagcccgagcuggacagcuucaaagaggaacuggacaaguacuuuaagaaccacacaagccccgacguggaccugggcgauaucagcggaaucaaugccagcgucgugaacauccagaaagagaucgaccggcugaacgagguggccaagaaucugaacgagagccugaucgaccugcaagaacuggggaaguacgagcaguacaucaaguggcccugguacaucuggcugggcuuuaucgccggacugauugccaucgugauggucacaaucaugcuguguugcaugaccagcugcuguagcugccugaagggcuguuguagcuguggcagcugcugcaaguucgacgaggacgauucugagcccgugcugaagggcgugaaacugcacuacacaugaggacuaguuauaagacugacuagcccgaugggccucccaacgggcccuccuccccuccuugcaccgagauuaauagaucucaaaggcucuuuucagagccaccaaaaaaaaaaaaaaaaaaaaaaaaaaaaaaaaaaaaaaaaaaaaaaaaaaaaaaaaaaaaaaaaaaaaaaaaaaaaaaaaaaaaaaaaaaaaaaaaaaaaa

SEQ ID NO: 24386 - RNA, 4041 nt, Artificial Sequence
  SARS-CoV-2/Wuhan/WIV05/2019__EPI_ISL_402128 spike protein mRNA gc mod (1-1273)(Y453F_D614G)
aggagaaagcuuaccauguucguguuccuggugcugcugccucugguguccagccagugugugaaccugaccaccagaacacagcugccuccagccuacaccaacagcuuuaccagaggcguguacuaccccgacaagguguucagauccagcgugcugcacucuacccaggaccuguuccugccuuucuucagcaacgugaccugguuccacgccauccacguguccggcaccaauggcaccaagagauucgacaaccccgugcugcccuucaacgacgggguguacuuugccagcaccgagaaguccaacaucaucagaggcuggaucuucggcaccacacuggacagcaagacccagagccugcugaucgugaacaacgccaccaacguggucaucaaagugugcgaguuccaguucugcaacgaccccuuccugggcgucuacuaccacaagaacaacaagagcuggauggaaagcgaguuccggguguacagcagcgccaacaacugcaccuucgaguacgugucccagccuuuccugauggaccuggaaggcaagcagggcaacuucaagaaccugcgcgaguucguguuuaagaacaucgacggcuacuucaagaucuacagcaagcacaccccuaucaaccucgugcgggaucugccucagggcuucucugcucuggaaccccugguggaucugcccaucggcaucaacaucacccgguuucagacacugcuggcccugcacagaagcuaccugacaccuggcgauagcagcagcggauggacagcuggugccgccgcuuacuaugugggcuaccugcagccuagaaccuuccugcugaaguacaacgagaacggcaccaucaccgacgccguggauugugcucuggauccucugagcgagacaaagugcacccugaaguccuucaccguggaaaagggcaucuaccagaccagcaacuuccgggugcagcccaccgaauccaucgugcgguuccccaauaucaccaaucugugccccuucggcgagguguucaaugccaccagauucgccucuguguacgccuggaaccggaagcggaucagcaauugcguggccgacuacuccgugcuguacaacuccgccagcuucagcaccuucaagugcuacggcguguccccuaccaagcugaacgaccugugcuucacaaacguguacgccgacagcuucgugauccggggagaugaagugcggcagauugccccuggacagacaggcaagaucgccgacuacaacuacaagcugcccgacgacuucaccggcugugugauugccuggaacagcaacaaccuggacuccaaagucggcggcaacuacaauuaccuguuccggcuguuccggaaguccaaucugaagcccuucgagcgggacaucuccaccgagaucuaucaggccggcagcaccccuuguaacggcguggaaggcuucaacugcuacuucccacugcaguccuacggcuuucagcccacaaauggcgugggcuaucagcccuacagagugguggugcugagcuucgaacugcugcaugccccugccacagugugcggcccuaagaaaagcaccaaucucgugaagaacaaaugcgugaacuucaacuucaacggccugaccggcaccggcgugcugacagagagcaacaagaaguuccugccauuccagcaguuuggccgggauaucgccgauaccacagacgccguuagagauccccagacacuggaaauccuggacaucaccccuugcagcuucggcggagugucugugaucaccccuggcaccaacaccagcaaucagguggcagugcuguaccagggcgugaacuguaccgaagugcccguggccauucacgccgaucagcugacaccuacauggcggguguacuccaccggcagcaauguguuucagaccagagccggcugucugaucggagccgagcacgugaacaauagcuacgagugcgacauccccaucggcgcuggaaucugcgccagcuaccagacacagacaaacagcccucggagagccagaagcguggccagccagagcaucauugccuacacaaugucucugggcgccgagaacagcguggccuacuccaacaacucuaucgcuauccccaccaacuucaccaucagcgugaccacagagauccugccuguguccaugaccaagaccagcguggacugcaccauguacaucugcggcgauuccaccgagugcuccaaccugcugcugcaguacggcagcuucugcacccagcugaauagagcccugacagggaucgccguggaacaggacaagaacacccaagagguguucgcccaagugaagcagaucuacaagaccccuccuaucaaggacuucggcggcuucaauuucagccagauucugcccgauccuagcaagcccagcaagcggagcuucaucgaggaccugcuguucaacaaagugacacuggccgacgccggcuucaucaagcaguauggcgauugucugggcgacauugccgccagggaucugauuugcgcccagaaguuuaacggacugacagugcugccuccucugcugaccgaugagaugaucgcccaguacacaucugcccugcuggccggcacaaucacaagcggcuggacauuuggagcaggcgccgcucugcagauccccuuugcuaugcagauggccuaccgguucaacggcaucggagugacccagaaugugcuguacgagaaccagaagcugaucgccaaccaguucaacagcgccaucggcaagauccaggacagccugagcagcacagcaagcgcccugggaaagcugcaggacguggucaaccagaaugcccaggcacugaacacccuggucaagcagcuguccuccaacuucggcgccaucagcucugugcugaacgauauccugagcagacuggacaaggucgaggccgaggugcagaucgacagacugaucacaggcagacugcagagccuccagacauacgugacccagcagcugaucagagccgccgagauuagagccucugccaaucuggccgccaccaagaugucugagugugugcugggccagagcaagagaguggacuuuugcggcaagggcuaccaccugaugagcuucccucagucugccccucacggcgugguguuucugcacgugacauaugugcccgcucaagagaagaauuucaccaccgcuccagccaucugccacgacggcaaagcccacuuuccuagagaaggcguguucguguccaacggcacccauugguucgugacacagcggaacuucuacgagccccagaucaucaccaccgacaacaccuucgugucuggcaacugcgacgucgugaucggcauugugaacaauaccguguacgacccucugcagcccgagcuggacagcuucaaagaggaacuggacaaguacuuuaagaaccacacaagccccgacguggaccugggcgauaucagcggaaucaaugccagcgucgugaacauccagaaagagaucgaccggcugaacgagguggccaagaaucugaacgagagccugaucgaccugcaagaacuggggaaguacgagcaguacaucaaguggcccugguacaucuggcugggcuuuaucgccggacugauugccaucgugauggucacaaucaugcuguguugcaugaccagcugcuguagcugccugaagggcuguuguagcuguggcagcugcugcaaguucgacgaggacgauucugagcccgugcugaagggcgugaaacugcacuacacaugaggacuaguuauaagacugacuagcccgaugggccucccaacgggcccuccuccccuccuugcaccgagauuaauagaucucaaaggcucuuuucagagccaccaaaaaaaaaaaaaaaaaaaaaaaaaaaaaaaaaaaaaaaaaaaaaaaaaaaaaaaaaaaaaaaaaaaaaaaaaaaaaaaaaaaaaaaaaaaaaaaaaaaaa

SEQ ID NO: 24387 - RNA, 4041 nt, Artificial Sequence
  SARS-CoV-2/Wuhan/WIV05/2019__EPI_ISL_402128 spike protein mRNA gc mod (1-1273)(D614G_I692V)
aggagaaagcuuaccauguucguguuccuggugcugcugccucugguguccagccagugugugaaccugaccaccagaacacagcugccuccagccuacaccaacagcuuuaccagaggcguguacuaccccgacaagguguucagauccagcgugcugcacucuacccaggaccuguuccugccuuucuucagcaacgugaccugguuccacgccauccacguguccggcaccaauggcaccaagagauucgacaaccccgugcugcccuucaacgacgggguguacuuugccagcaccgagaaguccaacaucaucagaggcuggaucuucggcaccacacuggacagcaagacccagagccugcugaucgugaacaacgccaccaacguggucaucaaagugugcgaguuccaguucugcaacgaccccuuccugggcgucuacuaccacaagaacaacaagagcuggauggaaagcgaguuccggguguacagcagcgccaacaacugcaccuucgaguacgugucccagccuuuccugauggaccuggaaggcaagcagggcaacuucaagaaccugcgcgaguucguguuuaagaacaucgacggcuacuucaagaucuacagcaagcacaccccuaucaaccucgugcgggaucugccucagggcuucucugcucuggaaccccugguggaucugcccaucggcaucaacaucacccgguuucagacacugcuggcccugcacagaagcuaccugacaccuggcgauagcagcagcggauggacagcuggugccgccgcuuacuaugugggcuaccugcagccuagaaccuuccugcugaaguacaacgagaacggcaccaucaccgacgccguggauugugcucuggauccucugagcgagacaaagugcacccugaaguccuucaccguggaaaagggcaucuaccagaccagcaacuuccgggugcagcccaccgaauccaucgugcgguuccccaauaucaccaaucugugccccuucggcgagguguucaaugccaccagauucgccucuguguacgccuggaaccggaagcggaucagcaauugcguggccgacuacuccgugcuguacaacuccgccagcuucagcaccuucaagugcuacggcguguccccuaccaagcugaacgaccugugcuucacaaacguguacgccgacagcuucgugauccggggagaugaagugcggcagauugccccuggacagacaggcaagaucgccgacuacaacuacaagcugcccgacgacuucaccggcugugugauugccuggaacagcaacaaccuggacuccaaagucggcggcaacuacaauuaccuguaccggcuguuccggaaguccaaucugaagcccuucgagcgggacaucuccaccgagaucuaucaggccggcagcaccccuuguaacggcguggaaggcuucaacugcuacuucccacugcaguccuacggcuuucagcccacaaauggcgugggcuaucagcccuacagagugguggugcugagcuucgaacugcugcaugccccugccacagugugcggcccuaagaaaagcaccaaucucgugaagaacaaaugcgugaacuucaacuucaacggccugaccggcaccggcgugcugacagagagcaacaagaaguuccugccauuccagcaguuuggccgggauaucgccgauaccacagacgccguuagagauccccagacacuggaaauccuggacaucaccccuugcagcuucggcggagugucugugaucaccccuggcaccaacaccagcaaucagguggcagugcuguaccagggcgugaacuguaccgaagugcccguggccauucacgccgaucagcugacaccuacauggcggguguacuccaccggcagcaauguguuucagaccagagccggcugucugaucggagccgagcacgugaacaauagcuacgagugcgacauccccaucggcgcuggaaucugcgccagcuaccagacacagacaaacagcccucggagagccagaagcguggccagccagagcgugauugccuacacaaugucucugggcgccgagaacagcguggccuacuccaacaacucuaucgcuauccccaccaacuucaccaucagcgugaccacagagauccugccuguguccaugaccaagaccagcguggacugcaccauguacaucugcggcgauuccaccgagugcuccaaccugcugcugcaguacggcagcuucugcacccagcugaauagagcccugacagggaucgccguggaacaggacaagaacacccaagagguguucgcccaagugaagcagaucuacaagaccccuccuaucaaggacuucggcggcuucaauuucagccagauucugcccgauccuagcaagcccagcaagcggagcuucaucgaggaccugcuguucaacaaagugacacuggccgacgccggcuucaucaagcaguauggcgauugucugggcgacauugccgccagggaucugauuugcgcccagaaguuuaacggacugacagugcugccuccucugcugaccgaugagaugaucgcccaguacacaucugcccugcuggccggcacaaucacaagcggcuggacauuuggagcaggcgccgcucugcagauccccuuugcuaugcagauggccuaccgguucaacggcaucggagugacccagaaugugcuguacgagaaccagaagcugaucgccaaccaguucaacagcgccaucggcaagauccaggacagccugagcagcacagcaagcgcccugggaaagcugcaggacguggucaaccagaaugcccaggcacugaacacccuggucaagcagcuguccuccaacuucggcgccaucagcucugugcugaacgauauccugagcagacuggacaaggucgaggccgaggugcagaucgacagacugaucacaggcagacugcagagccuccagacauacgugacccagcagcugaucagagccgccgagauuagagccucugccaaucuggccgccaccaagaugucugagugugugcugggccagagcaagagaguggacuuuugcggcaagggcuaccaccugaugagcuucccucagucugccccucacggcgugguguuucugcacgugacauaugugcccgcucaagagaagaauuucaccaccgcuccagccaucugccacgacggcaaagcccacuuuccuagagaaggcguguucguguccaacggcacccauugguucgugacacagcggaacuucuacgagccccagaucaucaccaccgacaacaccuucgugucuggcaacugcgacgucgugaucggcauugugaacaauaccguguacgacccucugcagcccgagcuggacagcuucaaagaggaacuggacaaguacuuuaagaaccacacaagccccgacguggaccugggcgauaucagcggaaucaaugccagcgucgugaacauccagaaagagaucgaccggcugaacgagguggccaagaaucugaacgagagccugaucgaccugcaagaacuggggaaguacgagcaguacaucaaguggcccugguacaucuggcugggcuuuaucgccggacugauugccaucgugauggucacaaucaugcuguguugcaugaccagcugcuguagcugccugaagggcuguuguagcuguggcagcugcugcaaguucgacgaggacgauucugagcccgugcugaagggcgugaaacugcacuacacaugaggacuaguuauaagacugacuagcccgaugggccucccaacgggcccuccuccccuccuugcaccgagauuaauagaucucaaaggcucuuuucagagccaccaaaaaaaaaaaaaaaaaaaaaaaaaaaaaaaaaaaaaaaaaaaaaaaaaaaaaaaaaaaaaaaaaaaaaaaaaaaaaaaaaaaaaaaaaaaaaaaaaaaaa

SEQ ID NO: 24388 - RNA, 4041 nt, Artificial Sequence
  SARS-CoV-2/Wuhan/WIV05/2019__EPI_ISL_402128 spike protein mRNA gc mod (1-1273)(D614G_M1229I)
aggagaaagcuuaccauguucguguuccuggugcugcugccucugguguccagccagugugugaaccugaccaccagaacacagcugccuccagccuacaccaacagcuuuaccagaggcguguacuaccccgacaagguguucagauccagcgugcugcacucuacccaggaccuguuccugccuuucuucagcaacgugaccugguuccacgccauccacguguccggcaccaauggcaccaagagauucgacaaccccgugcugcccuucaacgacgggguguacuuugccagcaccgagaaguccaacaucaucagaggcuggaucuucggcaccacacuggacagcaagacccagagccugcugaucgugaacaacgccaccaacguggucaucaaagugugcgaguuccaguucugcaacgaccccuuccugggcgucuacuaccacaagaacaacaagagcuggauggaaagcgaguuccggguguacagcagcgccaacaacugcaccuucgaguacgugucccagccuuuccugauggaccuggaaggcaagcagggcaacuucaagaaccugcgcgaguucguguuuaagaacaucgacggcuacuucaagaucuacagcaagcacaccccuaucaaccucgugcgggaucugccucagggcuucucugcucuggaaccccugguggaucugcccaucggcaucaacaucacccgguuucagacacugcuggcccugcacagaagcuaccugacaccuggcgauagcagcagcggauggacagcuggugccgccgcuuacuaugugggcuaccugcagccuagaaccuuccugcugaaguacaacgagaacggcaccaucaccgacgccguggauugugcucuggauccucugagcgagacaaagugcacccugaaguccuucaccguggaaaagggcaucuaccagaccagcaacuuccgggugcagcccaccgaauccaucgugcgguuccccaauaucaccaaucugugccccuucggcgagguguucaaugccaccagauucgccucuguguacgccuggaaccggaagcggaucagcaauugcguggccgacuacuccgugcuguacaacuccgccagcuucagcaccuucaagugcuacggcguguccccuaccaagcugaacgaccugugcuucacaaacguguacgccgacagcuucgugauccggggagaugaagugcggcagauugccccuggacagacaggcaagaucgccgacuacaacuacaagcugcccgacgacuucaccggcugugugauugccuggaacagcaacaaccuggacuccaaagucggcggcaacuacaauuaccuguaccggcuguuccggaaguccaaucugaagcccuucgagcgggacaucuccaccgagaucuaucaggccggcagcaccccuuguaacggcguggaaggcuucaacugcuacuucccacugcaguccuacggcuuucagcccacaaauggcgugggcuaucagcccuacagagugguggugcugagcuucgaacugcugcaugccccugccacagugugcggcccuaagaaaagcaccaaucucgugaagaacaaaugcgugaacuucaacuucaacggccugaccggcaccggcgugcugacagagagcaacaagaaguuccugccauuccagcaguuuggccgggauaucgccgauaccacagacgccguuagagauccccagacacuggaaauccuggacaucaccccuugcagcuucggcggagugucugugaucaccccuggcaccaacaccagcaaucagguggcagugcuguaccagggcgugaacuguaccgaagugcccguggccauucacgccgaucagcugacaccuacauggcggguguacuccaccggcagcaauguguuucagaccagagccggcugucugaucggagccgagcacgugaacaauagcuacgagugcgacauccccaucggcgcuggaaucugcgccagcuaccagacacagacaaacagcccucggagagccagaagcguggccagccagagcaucauugccuacacaaugucucugggcgccgagaacagcguggccuacuccaacaacucuaucgcuauccccaccaacuucaccaucagcgugaccacagagauccugccuguguccaugaccaagaccagcguggacugcaccauguacaucugcggcgauuccaccgagugcuccaaccugcugcugcaguacggcagcuucugcacccagcugaauagagcccugacagggaucgccguggaacaggacaagaacacccaagagguguucgcccaagugaagcagaucuacaagaccccuccuaucaaggacuucggcggcuucaauuucagccagauucugcccgauccuagcaagcccagcaagcggagcuucaucgaggaccugcuguucaacaaagugacacuggccgacgccggcuucaucaagcaguauggcgauugucugggcgacauugccgccagggaucugauuugcgcccagaaguuuaacggacugacagugcugccuccucugcugaccgaugagaugaucgcccaguacacaucugcccugcuggccggcacaaucacaagcggcuggacauuuggagcaggcgccgcucugcagauccccuuugcuaugcagauggccuaccgguucaacggcaucggagugacccagaaugugcuguacgagaaccagaagcugaucgccaaccaguucaacagcgccaucggcaagauccaggacagccugagcagcacagcaagcgcccugggaaagcugcaggacguggucaaccagaaugcccaggcacugaacacccuggucaagcagcuguccuccaacuucggcgccaucagcucugugcugaacgauauccugagcagacuggacaaggucgaggccgaggugcagaucgacagacugaucacaggcagacugcagagccuccagacauacgugacccagcagcugaucagagccgccgagauuagagccucugccaaucuggccgccaccaagaugucugagugugugcugggccagagcaagagaguggacuuuugcggcaagggcuaccaccugaugagcuucccucagucugccccucacggcgugguguuucugcacgugacauaugugcccgcucaagagaagaauuucaccaccgcuccagccaucugccacgacggcaaagcccacuuuccuagagaaggcguguucguguccaacggcacccauugguucgugacacagcggaacuucuacgagccccagaucaucaccaccgacaacaccuucgugucuggcaacugcgacgucgugaucggcauugugaacaauaccguguacgacccucugcagcccgagcuggacagcuucaaagaggaacuggacaaguacuuuaagaaccacacaagccccgacguggaccugggcgauaucagcggaaucaaugccagcgucgugaacauccagaaagagaucgaccggcugaacgagguggccaagaaucugaacgagagccugaucgaccugcaagaacuggggaaguacgagcaguacaucaaguggcccugguacaucuggcugggcuuuaucgccggacugauugccaucgugaucgucacaaucaugcuguguugcaugaccagcugcuguagcugccugaagggcuguuguagcuguggcagcugcugcaaguucgacgaggacgauucugagcccgugcugaagggcgugaaacugcacuacacaugaggacuaguuauaagacugacuagcccgaugggccucccaacgggcccuccuccccuccuugcaccgagauuaauagaucucaaaggcucuuuucagagccaccaaaaaaaaaaaaaaaaaaaaaaaaaaaaaaaaaaaaaaaaaaaaaaaaaaaaaaaaaaaaaaaaaaaaaaaaaaaaaaaaaaaaaaaaaaaaaaaaaaaaa

SEQ ID NO: 24389 - RNA, 4035 nt, Artificial Sequence
  SARS-CoV-2/Wuhan/WIV05/2019__EPI_ISL_402128 spike protein mRNA gc mod (1-1273)(H69del_V70del_A222V_Y453F_S477N_D614G_I692V)
aggagaaagcuuaccauguucguguuccuggugcugcugccucugguguccagccagugugugaaccugaccaccagaacacagcugccuccagccuacaccaacagcuuuaccagaggcguguacuaccccgacaagguguucagauccagcgugcugcacucuacccaggaccuguuccugccuuucuucagcaacgugaccugguuccacgccaucuccggcaccaauggcaccaagagauucgacaaccccgugcugcccuucaacgacgggguguacuuugccagcaccgagaaguccaacaucaucagaggcuggaucuucggcaccacacuggacagcaagacccagagccugcugaucgugaacaacgccaccaacguggucaucaaagugugcgaguuccaguucugcaacgaccccuuccugggcgucuacuaccacaagaacaacaagagcuggauggaaagcgaguuccggguguacagcagcgccaacaacugcaccuucgaguacgugucccagccuuuccugauggaccuggaaggcaagcagggcaacuucaagaaccugcgcgaguucguguuuaagaacaucgacggcuacuucaagaucuacagcaagcacaccccuaucaaccucgugcgggaucugccucagggcuucucugugcuggaaccccugguggaucugcccaucggcaucaacaucacccgguuucagacacugcuggcccugcacagaagcuaccugacaccuggcgauagcagcagcggauggacagcuggugccgccgcuuacuaugugggcuaccugcagccuagaaccuuccugcugaaguacaacgagaacggcaccaucaccgacgccguggauugugcucuggauccucugagcgagacaaagugcacccugaaguccuucaccguggaaaagggcaucuaccagaccagcaacuuccgggugcagcccaccgaauccaucgugcgguuccccaauaucaccaaucugugccccuucggcgagguguucaaugccaccagauucgccucuguguacgccuggaaccggaagcggaucagcaauugcguggccgacuacuccgugcuguacaacuccgccagcuucagcaccuucaagugcuacggcguguccccuaccaagcugaacgaccugugcuucacaaacguguacgccgacagcuucgugauccggggagaugaagugcggcagauugccccuggacagacaggcaagaucgccgacuacaacuacaagcugcccgacgacuucaccggcugugugauugccuggaacagcaacaaccuggacuccaaagucggcggcaacuacaauuaccuguuccggcuguuccggaaguccaaucugaagcccuucgagcgggacaucuccaccgagaucuaucaggccggcaacaccccuuguaacggcguggaaggcuucaacugcuacuucccacugcaguccuacggcuuucagcccacaaauggcgugggcuaucagcccuacagagugguggugcugagcuucgaacugcugcaugccccugccacagugugcggcccuaagaaaagcaccaaucucgugaagaacaaaugcgugaacuucaacuucaacggccugaccggcaccggcgugcugacagagagcaacaagaaguuccugccauuccagcaguuuggccgggauaucgccgauaccacagacgccguuagagauccccagacacuggaaauccuggacaucaccccuugcagcuucggcggagugucugugaucaccccuggcaccaacaccagcaaucagguggcagugcuguaccagggcgugaacuguaccgaagugcccguggccauucacgccgaucagcugacaccuacauggcggguguacuccaccggcagcaauguguuucagaccagagccggcugucugaucggagccgagcacgugaacaauagcuacgagugcgacauccccaucggcgcuggaaucugcgccagcuaccagacacagacaaacagcccucggagagccagaagcguggccagccagagcgugauugccuacacaaugucucugggcgccgagaacagcguggccuacuccaacaacucuaucgcuauccccaccaacuucaccaucagcgugaccacagagauccugccuguguccaugaccaagaccagcguggacugcaccauguacaucugcggcgauuccaccgagugcuccaaccugcugcugcaguacggcagcuucugcacccagcugaauagagcccugacagggaucgccguggaacaggacaagaacacccaagagguguucgcccaagugaagcagaucuacaagaccccuccuaucaaggacuucggcggcuucaauuucagccagauucugcccgauccuagcaagcccagcaagcggagcuucaucgaggaccugcuguucaacaaagugacacuggccgacgccggcuucaucaagcaguauggcgauugucugggcgacauugccgccagggaucugauuugcgcccagaaguuuaacggacugacagugcugccuccucugcugaccgaugagaugaucgcccaguacacaucugcccugcuggccggcacaaucacaagcggcuggacauuuggagcaggcgccgcucugcagauccccuuugcuaugcagauggccuaccgguucaacggcaucggagugacccagaaugugcuguacgagaaccagaagcugaucgccaaccaguucaacagcgccaucggcaagauccaggacagccugagcagcacagcaagcgcccugggaaagcugcaggacguggucaaccagaaugcccaggcacugaacacccuggucaagcagcuguccuccaacuucggcgccaucagcucugugcugaacgauauccugagcagacuggacaaggucgaggccgaggugcagaucgacagacugaucacaggcagacugcagagccuccagacauacgugacccagcagcugaucagagccgccgagauuagagccucugccaaucuggccgccaccaagaugucugagugugugcugggccagagcaagagaguggacuuuugcggcaagggcuaccaccugaugagcuucccucagucugccccucacggcgugguguuucugcacgugacauaugugcccgcucaagagaagaauuucaccaccgcuccagccaucugccacgacggcaaagcccacuuuccuagagaaggcguguucguguccaacggcacccauugguucgugacacagcggaacuucuacgagccccagaucaucaccaccgacaacaccuucgugucuggcaacugcgacgucgugaucggcauugugaacaauaccguguacgacccucugcagcccgagcuggacagcuucaaagaggaacuggacaaguacuuuaagaaccacacaagccccgacguggaccugggcgauaucagcggaaucaaugccagcgucgugaacauccagaaagagaucgaccggcugaacgagguggccaagaaucugaacgagagccugaucgaccugcaagaacuggggaaguacgagcaguacaucaaguggcccugguacaucuggcugggcuuuaucgccggacugauugccaucgugauggucacaaucaugcuguguugcaugaccagcugcuguagcugccugaagggcuguuguagcuguggcagcugcugcaaguucgacgaggacgauucugagcccgugcugaagggcgugaaacugcacuacacaugaggacuaguuauaagacugacuagcccgaugggccucccaacgggcccuccuccccuccuugcaccgagauuaauagaucucaaaggcucuuuucagagccaccaaaaaaaaaaaaaaaaaaaaaaaaaaaaaaaaaaaaaaaaaaaaaaaaaaaaaaaaaaaaaaaaaaaaaaaaaaaaaaaaaaaaaaaaaaaaaaaaaaaaa

SEQ ID NO: 24390 - RNA, 4035 nt, Artificial Sequence
  SARS-CoV-2/Wuhan/WIV05/2019__EPI_ISL_402128 spike protein mRNA gc mod (1-1273)(H69del_V70del_Y453F_D614G_I692V_M1229I)
aggagaaagcuuaccauguucguguuccuggugcugcugccucugguguccagccagugugugaaccugaccaccagaacacagcugccuccagccuacaccaacagcuuuaccagaggcguguacuaccccgacaagguguucagauccagcgugcugcacucuacccaggaccuguuccugccuuucuucagcaacgugaccugguuccacgccaucuccggcaccaauggcaccaagagauucgacaaccccgugcugcccuucaacgacgggguguacuuugccagcaccgagaaguccaacaucaucagaggcuggaucuucggcaccacacuggacagcaagacccagagccugcugaucgugaacaacgccaccaacguggucaucaaagugugcgaguuccaguucugcaacgaccccuuccugggcgucuacuaccacaagaacaacaagagcuggauggaaagcgaguuccggguguacagcagcgccaacaacugcaccuucgaguacgugucccagccuuuccugauggaccuggaaggcaagcagggcaacuucaagaaccugcgcgaguucguguuuaagaacaucgacggcuacuucaagaucuacagcaagcacaccccuaucaaccucgugcgggaucugccucagggcuucucugcucuggaaccccugguggaucugcccaucggcaucaacaucacccgguuucagacacugcuggcccugcacagaagcuaccugacaccuggcgauagcagcagcggauggacagcuggugccgccgcuuacuaugugggcuaccugcagccuagaaccuuccugcugaaguacaacgagaacggcaccaucaccgacgccguggauugugcucuggauccucugagcgagacaaagugcacccugaaguccuucaccguggaaaagggcaucuaccagaccagcaacuuccgggugcagcccaccgaauccaucgugcgguuccccaauaucaccaaucugugccccuucggcgagguguucaaugccaccagauucgccucuguguacgccuggaaccggaagcggaucagcaauugcguggccgacuacuccgugcuguacaacuccgccagcuucagcaccuucaagugcuacggcguguccccuaccaagcugaacgaccugugcuucacaaacguguacgccgacagcuucgugauccggggagaugaagugcggcagauugccccuggacagacaggcaagaucgccgacuacaacuacaagcugcccgacgacuucaccggcugugugauugccuggaacagcaacaaccuggacuccaaagucggcggcaacuacaauuaccuguuccggcuguuccggaaguccaaucugaagcccuucgagcgggacaucuccaccgagaucuaucaggccggcagcaccccuuguaacggcguggaaggcuucaacugcuacuucccacugcaguccuacggcuuucagcccacaaauggcgugggcuaucagcccuacagagugguggugcugagcuucgaacugcugcaugccccugccacagugugcggcccuaagaaaagcaccaaucucgugaagaacaaaugcgugaacuucaacuucaacggccugaccggcaccggcgugcugacagagagcaacaagaaguuccugccauuccagcaguuuggccgggauaucgccgauaccacagacgccguuagagauccccagacacuggaaauccuggacaucaccccuugcagcuucggcggagugucugugaucaccccuggcaccaacaccagcaaucagguggcagugcuguaccagggcgugaacuguaccgaagugcccguggccauucacgccgaucagcugacaccuacauggcggguguacuccaccggcagcaauguguuucagaccagagccggcugucugaucggagccgagcacgugaacaauagcuacgagugcgacauccccaucggcgcuggaaucugcgccagcuaccagacacagacaaacagcccucggagagccagaagcguggccagccagagcgugauugccuacacaaugucucugggcgccgagaacagcguggccuacuccaacaacucuaucgcuauccccaccaacuucaccaucagcgugaccacagagauccugccuguguccaugaccaagaccagcguggacugcaccauguacaucugcggcgauuccaccgagugcuccaaccugcugcugcaguacggcagcuucugcacccagcugaauagagcccugacagggaucgccguggaacaggacaagaacacccaagagguguucgcccaagugaagcagaucuacaagaccccuccuaucaaggacuucggcggcuucaauuucagccagauucugcccgauccuagcaagcccagcaagcggagcuucaucgaggaccugcuguucaacaaagugacacuggccgacgccggcuucaucaagcaguauggcgauugucugggcgacauugccgccagggaucugauuugcgcccagaaguuuaacggacugacagugcugccuccucugcugaccgaugagaugaucgcccaguacacaucugcccugcuggccggcacaaucacaagcggcuggacauuuggagcaggcgccgcucugcagauccccuuugcuaugcagauggccuaccgguucaacggcaucggagugacccagaaugugcuguacgagaaccagaagcugaucgccaaccaguucaacagcgccaucggcaagauccaggacagccugagcagcacagcaagcgcccugggaaagcugcaggacguggucaaccagaaugcccaggcacugaacacccuggucaagcagcuguccuccaacuucggcgccaucagcucugugcugaacgauauccugagcagacuggacaaggucgaggccgaggugcagaucgacagacugaucacaggcagacugcagagccuccagacauacgugacccagcagcugaucagagccgccgagauuagagccucugccaaucuggccgccaccaagaugucugagugugugcugggccagagcaagagaguggacuuuugcggcaagggcuaccaccugaugagcuucccucagucugccccucacggcgugguguuucugcacgugacauaugugcccgcucaagagaagaauuucaccaccgcuccagccaucugccacgacggcaaagcccacuuuccuagagaaggcguguucguguccaacggcacccauugguucgugacacagcggaacuucuacgagccccagaucaucaccaccgacaacaccuucgugucuggcaacugcgacgucgugaucggcauugugaacaauaccguguacgacccucugcagcccgagcuggacagcuucaaagaggaacuggacaaguacuuuaagaaccacacaagccccgacguggaccugggcgauaucagcggaaucaaugccagcgucgugaacauccagaaagagaucgaccggcugaacgagguggccaagaaucugaacgagagccugaucgaccugcaagaacuggggaaguacgagcaguacaucaaguggcccugguacaucuggcugggcuuuaucgccggacugauugccaucgugaucgucacaaucaugcuguguugcaugaccagcugcuguagcugccugaagggcuguuguagcuguggcagcugcugcaaguucgacgaggacgauucugagcccgugcugaagggcgugaaacugcacuacacaugaggacuaguuauaagacugacuagcccgaugggccucccaacgggcccuccuccccuccuugcaccgagauuaauagaucucaaaggcucuuuucagagccaccaaaaaaaaaaaaaaaaaaaaaaaaaaaaaaaaaaaaaaaaaaaaaaaaaaaaaaaaaaaaaaaaaaaaaaaaaaaaaaaaaaaaaaaaaaaaaaaaaaaaa

SEQ ID NO: 24391 - RNA, 4032 nt, Artificial Sequence
  SARS-CoV-2/Wuhan/WIV05/2019__EPI_ISL_402128 spike protein mRNA gc mod (1-1273)(H69del_V70del_Y144del_N501Y_A570D_D614G_P681H_T716I_S982 A_D1118H)
aggagaaagcuuaccauguucguguuccuggugcugcugccucugguguccagccagugugugaaccugaccaccagaacacagcugccuccagccuacaccaacagcuuuaccagaggcguguacuaccccgacaagguguucagauccagcgugcugcacucuacccaggaccuguuccugccuuucuucagcaacgugaccugguuccacgccaucuccggcaccaauggcaccaagagauucgacaaccccgugcugcccuucaacgacgggguguacuuugccagcaccgagaaguccaacaucaucagaggcuggaucuucggcaccacacuggacagcaagacccagagccugcugaucgugaacaacgccaccaacguggucaucaaagugugcgaguuccaguucugcaacgaccccuuccugggcgucuaccacaagaacaacaagagcuggauggaaagcgaguuccggguguacagcagcgccaacaacugcaccuucgaguacgugucccagccuuuccugauggaccuggaaggcaagcagggcaacuucaagaaccugcgcgaguucguguuuaagaacaucgacggcuacuucaagaucuacagcaagcacaccccuaucaaccucgugcgggaucugccucagggcuucucugcucuggaaccccugguggaucugcccaucggcaucaacaucacccgguuucagacacugcuggcccugcacagaagcuaccugacaccuggcgauagcagcagcggauggacagcuggugccgccgcuuacuaugugggcuaccugcagccuagaaccuuccugcugaaguacaacgagaacggcaccaucaccgacgccguggauugugcucuggauccucugagcgagacaaagugcacccugaaguccuucaccguggaaaagggcaucuaccagaccagcaacuuccgggugcagcccaccgaauccaucgugcgguuccccaauaucaccaaucugugccccuucggcgagguguucaaugccaccagauucgccucuguguacgccuggaaccggaagcggaucagcaauugcguggccgacuacuccgugcuguacaacuccgccagcuucagcaccuucaagugcuacggcguguccccuaccaagcugaacgaccugugcuucacaaacguguacgccgacagcuucgugauccggggagaugaagugcggcagauugccccuggacagacaggcaagaucgccgacuacaacuacaagcugcccgacgacuucaccggcugugugauugccuggaacagcaacaaccuggacuccaaagucggcggcaacuacaauuaccuguaccggcuguuccggaaguccaaucugaagcccuucgagcgggacaucuccaccgagaucuaucaggccggcagcaccccuuguaacggcguggaaggcuucaacugcuacuucccacugcaguccuacggcuuucagcccacauacggcgugggcuaucagcccuacagagugguggugcugagcuucgaacugcugcaugccccugccacagugugcggcccuaagaaaagcaccaaucucgugaagaacaaaugcgugaacuucaacuucaacggccugaccggcaccggcgugcugacagagagcaacaagaaguuccugccauuccagcaguuuggccgggauaucgacgauaccacagacgccguuagagauccccagacacuggaaauccuggacaucaccccuugcagcuucggcggagugucugugaucaccccuggcaccaacaccagcaaucagguggcagugcuguaccagggcgugaacuguaccgaagugcccguggccauucacgccgaucagcugacaccuacauggcggguguacuccaccggcagcaauguguuucagaccagagccggcugucugaucggagccgagcacgugaacaauagcuacgagugcgacauccccaucggcgcuggaaucugcgccagcuaccagacacagacaaacagccaccggagagccagaagcguggccagccagagcaucauugccuacacaaugucucugggcgccgagaacagcguggccuacuccaacaacucuaucgcuauccccaucaacuucaccaucagcgugaccacagagauccugccuguguccaugaccaagaccagcguggacugcaccauguacaucugcggcgauuccaccgagugcuccaaccugcugcugcaguacggcagcuucugcacccagcugaauagagcccugacagggaucgccguggaacaggacaagaacacccaagagguguucgcccaagugaagcagaucuacaagaccccuccuaucaaggacuucggcggcuucaauuucagccagauucugcccgauccuagcaagcccagcaagcggagcuucaucgaggaccugcuguucaacaaagugacacuggccgacgccggcuucaucaagcaguauggcgauugucugggcgacauugccgccagggaucugauuugcgcccagaaguuuaacggacugacagugcugccuccucugcugaccgaugagaugaucgcccaguacacaucugcccugcuggccggcacaaucacaagcggcuggacauuuggagcaggcgccgcucugcagauccccuuugcuaugcagauggccuaccgguucaacggcaucggagugacccagaaugugcuguacgagaaccagaagcugaucgccaaccaguucaacagcgccaucggcaagauccaggacagccugagcagcacagcaagcgcccugggaaagcugcaggacguggucaaccagaaugcccaggcacugaacacccuggucaagcagcuguccuccaacuucggcgccaucagcucugugcugaacgauauccuggccagacuggacaaggucgaggccgaggugcagaucgacagacugaucacaggcagacugcagagccuccagacauacgugacccagcagcugaucagagccgccgagauuagagccucugccaaucuggccgccaccaagaugucugagugugugcugggccagagcaagagaguggacuuuugcggcaagggcuaccaccugaugagcuucccucagucugccccucacggcgugguguuucugcacgugacauaugugcccgcucaagagaagaauuucaccaccgcuccagccaucugccacgacggcaaagcccacuuuccuagagaaggcguguucguguccaacggcacccauugguucgugacacagcggaacuucuacgagccccagaucaucaccacccacaacaccuucgugucuggcaacugcgacgucgugaucggcauugugaacaauaccguguacgacccucugcagcccgagcuggacagcuucaaagaggaacuggacaaguacuuuaagaaccacacaagccccgacguggaccugggcgauaucagcggaaucaaugccagcgucgugaacauccagaaagagaucgaccggcugaacgagguggccaagaaucugaacgagagccugaucgaccugcaagaacuggggaaguacgagcaguacaucaaguggcccugguacaucuggcugggcuuuaucgccggacugauugccaucgugauggucacaaucaugcuguguugcaugaccagcugcuguagcugccugaagggcuguuguagcuguggcagcugcugcaaguucgacgaggacgauucugagcccgugcugaagggcgugaaacugcacuacacaugaggacuaguuauaagacugacuagcccgaugggccucccaacgggcccuccuccccuccuugcaccgagauuaauagaucucaaaggcucuuuucagagccaccaaaaaaaaaaaaaaaaaaaaaaaaaaaaaaaaaaaaaaaaaaaaaaaaaaaaaaaaaaaaaaaaaaaaaaaaaaaaaaaaaaaaaaaaaaaaaaaaaaaaa

SEQ ID NO: 24392 - RNA, 4041 nt, Artificial Sequence
  SARS-CoV-2/Wuhan/WIV05/2019__EPI_ISL_402128 spike protein mRNA gc mod (1-1273)(K417N_E484K_N501Y_D614G)
aggagaaagcuuaccauguucguguuccuggugcugcugccucugguguccagccagugugugaaccugaccaccagaacacagcugccuccagccuacaccaacagcuuuaccagaggcguguacuaccccgacaagguguucagauccagcgugcugcacucuacccaggaccuguuccugccuuucuucagcaacgugaccugguuccacgccauccacguguccggcaccaauggcaccaagagauucgacaaccccgugcugcccuucaacgacgggguguacuuugccagcaccgagaaguccaacaucaucagaggcuggaucuucggcaccacacuggacagcaagacccagagccugcugaucgugaacaacgccaccaacguggucaucaaagugugcgaguuccaguucugcaacgaccccuuccugggcgucuacuaccacaagaacaacaagagcuggauggaaagcgaguuccggguguacagcagcgccaacaacugcaccuucgaguacgugucccagccuuuccugauggaccuggaaggcaagcagggcaacuucaagaaccugcgcgaguucguguuuaagaacaucgacggcuacuucaagaucuacagcaagcacaccccuaucaaccucgugcgggaucugccucagggcuucucugcucuggaaccccugguggaucugcccaucggcaucaacaucacccgguuucagacacugcuggcccugcacagaagcuaccugacaccuggcgauagcagcagcggauggacagcuggugccgccgcuuacuaugugggcuaccugcagccuagaaccuuccugcugaaguacaacgagaacggcaccaucaccgacgccguggauugugcucuggauccucugagcgagacaaagugcacccugaaguccuucaccguggaaaagggcaucuaccagaccagcaacuuccgggugcagcccaccgaauccaucgugcgguuccccaauaucaccaaucugugccccuucggcgagguguucaaugccaccagauucgccucuguguacgccuggaaccggaagcggaucagcaauugcguggccgacuacuccgugcuguacaacuccgccagcuucagcaccuucaagugcuacggcguguccccuaccaagcugaacgaccugugcuucacaaacguguacgccgacagcuucgugauccggggagaugaagugcggcagauugccccuggacagacaggcaacaucgccgacuacaacuacaagcugcccgacgacuucaccggcugugugauugccuggaacagcaacaaccuggacuccaaagucggcggcaacuacaauuaccuguaccggcuguuccggaaguccaaucugaagcccuucgagcgggacaucuccaccgagaucuaucaggccggcagcaccccuuguaacggcgugaagggcuucaacugcuacuucccacugcaguccuacggcuuucagcccacauacggcgugggcuaucagcccuacagagugguggugcugagcuucgaacugcugcaugccccugccacagugugcggcccuaagaaaagcaccaaucucgugaagaacaaaugcgugaacuucaacuucaacggccugaccggcaccggcgugcugacagagagcaacaagaaguuccugccauuccagcaguuuggccgggauaucgccgauaccacagacgccguuagagauccccagacacuggaaauccuggacaucaccccuugcagcuucggcggagugucugugaucaccccuggcaccaacaccagcaaucagguggcagugcuguaccagggcgugaacuguaccgaagugcccguggccauucacgccgaucagcugacaccuacauggcggguguacuccaccggcagcaauguguuucagaccagagccggcugucugaucggagccgagcacgugaacaauagcuacgagugcgacauccccaucggcgcuggaaucugcgccagcuaccagacacagacaaacagcccucggagagccagaagcguggccagccagagcaucauugccuacacaaugucucugggcgccgagaacagcguggccuacuccaacaacucuaucgcuauccccaccaacuucaccaucagcgugaccacagagauccugccuguguccaugaccaagaccagcguggacugcaccauguacaucugcggcgauuccaccgagugcuccaaccugcugcugcaguacggcagcuucugcacccagcugaauagagcccugacagggaucgccguggaacaggacaagaacacccaagagguguucgcccaagugaagcagaucuacaagaccccuccuaucaaggacuucggcggcuucaauuucagccagauucugcccgauccuagcaagcccagcaagcggagcuucaucgaggaccugcuguucaacaaagugacacuggccgacgccggcuucaucaagcaguauggcgauugucugggcgacauugccgccagggaucugauuugcgcccagaaguuuaacggacugacagugcugccuccucugcugaccgaugagaugaucgcccaguacacaucugcccugcuggccggcacaaucacaagcggcuggacauuuggagcaggcgccgcucugcagauccccuuugcuaugcagauggccuaccgguucaacggcaucggagugacccagaaugugcuguacgagaaccagaagcugaucgccaaccaguucaacagcgccaucggcaagauccaggacagccugagcagcacagcaagcgcccugggaaagcugcaggacguggucaaccagaaugcccaggcacugaacacccuggucaagcagcuguccuccaacuucggcgccaucagcucugugcugaacgauauccugagcagacuggacaaggucgaggccgaggugcagaucgacagacugaucacaggcagacugcagagccuccagacauacgugacccagcagcugaucagagccgccgagauuagagccucugccaaucuggccgccaccaagaugucugagugugugcugggccagagcaagagaguggacuuuugcggcaagggcuaccaccugaugagcuucccucagucugccccucacggcgugguguuucugcacgugacauaugugcccgcucaagagaagaauuucaccaccgcuccagccaucugccacgacggcaaagcccacuuuccuagagaaggcguguucguguccaacggcacccauugguucgugacacagcggaacuucuacgagccccagaucaucaccaccgacaacaccuucgugucuggcaacugcgacgucgugaucggcauugugaacaauaccguguacgacccucugcagcccgagcuggacagcuucaaagaggaacuggacaaguacuuuaagaaccacacaagccccgacguggaccugggcgauaucagcggaaucaaugccagcgucgugaacauccagaaagagaucgaccggcugaacgagguggccaagaaucugaacgagagccugaucgaccugcaagaacuggggaaguacgagcaguacaucaaguggcccugguacaucuggcugggcuuuaucgccggacugauugccaucgugauggucacaaucaugcuguguugcaugaccagcugcuguagcugccugaagggcuguuguagcuguggcagcugcugcaaguucgacgaggacgauucugagcccgugcugaagggcgugaaacugcacuacacaugaggacuaguuauaagacugacuagcccgaugggccucccaacgggcccuccuccccuccuugcaccgagauuaauagaucucaaaggcucuuuucagagccaccaaaaaaaaaaaaaaaaaaaaaaaaaaaaaaaaaaaaaaaaaaaaaaaaaaaaaaaaaaaaaaaaaaaaaaaaaaaaaaaaaaaaaaaaaaaaaaaaaaaaa

SEQ ID NO: 24393 - RNA, 4032 nt, Artificial Sequence
  SARS-CoV-2/Wuhan/WIV05/2019__EPI_ISL_402128 spike protein mRNA gc mod (1-1273)(L18F_D80A_D215G_L242del_A243del_L244del_R246I_K417N_E484 K_N501Y_D614G_A701V)
aggagaaagcuuaccauguucguguuccuggugcugcugccucugguguccagccagugugugaacuucaccaccagaacacagcugccuccagccuacaccaacagcuuuaccagaggcguguacuaccccgacaagguguucagauccagcgugcugcacucuacccaggaccuguuccugccuuucuucagcaacgugaccugguuccacgccauccacguguccggcaccaauggcaccaagagauucgccaaccccgugcugcccuucaacgacgggguguacuuugccagcaccgagaaguccaacaucaucagaggcuggaucuucggcaccacacuggacagcaagacccagagccugcugaucgugaacaacgccaccaacguggucaucaaagugugcgaguuccaguucugcaacgaccccuuccugggcgucuacuaccacaagaacaacaagagcuggauggaaagcgaguuccggguguacagcagcgccaacaacugcaccuucgaguacgugucccagccuuuccugauggaccuggaaggcaagcagggcaacuucaagaaccugcgcgaguucguguuuaagaacaucgacggcuacuucaagaucuacagcaagcacaccccuaucaaccucgugcggggccugccucagggcuucucugcucuggaaccccugguggaucugcccaucggcaucaacaucacccgguuucagacacugcacaucagcuaccugacaccuggcgauagcagcagcggauggacagcuggugccgccgcuuacuaugugggcuaccugcagccuagaaccuuccugcugaaguacaacgagaacggcaccaucaccgacgccguggauugugcucuggauccucugagcgagacaaagugcacccugaaguccuucaccguggaaaagggcaucuaccagaccagcaacuuccgggugcagcccaccgaauccaucgugcgguuccccaauaucaccaaucugugccccuucggcgagguguucaaugccaccagauucgccucuguguacgccuggaaccggaagcggaucagcaauugcguggccgacuacuccgugcuguacaacuccgccagcuucagcaccuucaagugcuacggcguguccccuaccaagcugaacgaccugugcuucacaaacguguacgccgacagcuucgugauccggggagaugaagugcggcagauugccccuggacagacaggcaacaucgccgacuacaacuacaagcugcccgacgacuucaccggcugugugauugccuggaacagcaacaaccuggacuccaaagucggcggcaacuacaauuaccuguaccggcuguuccggaaguccaaucugaagcccuucgagcgggacaucuccaccgagaucuaucaggccggcagcaccccuuguaacggcgugaagggcuucaacugcuacuucccacugcaguccuacggcuuucagcccacauacggcgugggcuaucagcccuacagagugguggugcugagcuucgaacugcugcaugccccugccacagugugcggcccuaagaaaagcaccaaucucgugaagaacaaaugcgugaacuucaacuucaacggccugaccggcaccggcgugcugacagagagcaacaagaaguuccugccauuccagcaguuuggccgggauaucgccgauaccacagacgccguuagagauccccagacacuggaaauccuggacaucaccccuugcagcuucggcggagugucugugaucaccccuggcaccaacaccagcaaucagguggcagugcuguaccagggcgugaacuguaccgaagugcccguggccauucacgccgaucagcugacaccuacauggcggguguacuccaccggcagcaauguguuucagaccagagccggcugucugaucggagccgagcacgugaacaauagcuacgagugcgacauccccaucggcgcuggaaucugcgccagcuaccagacacagacaaacagcccucggagagccagaagcguggccagccagagcaucauugccuacacaaugucucugggcguggagaacagcguggccuacuccaacaacucuaucgcuauccccaccaacuucaccaucagcgugaccacagagauccugccuguguccaugaccaagaccagcguggacugcaccauguacaucugcggcgauuccaccgagugcuccaaccugcugcugcaguacggcagcuucugcacccagcugaauagagcccugacagggaucgccguggaacaggacaagaacacccaagagguguucgcccaagugaagcagaucuacaagaccccuccuaucaaggacuucggcggcuucaauuucagccagauucugcccgauccuagcaagcccagcaagcggagcuucaucgaggaccugcuguucaacaaagugacacuggccgacgccggcuucaucaagcaguauggcgauugucugggcgacauugccgccagggaucugauuugcgcccagaaguuuaacggacugacagugcugccuccucugcugaccgaugagaugaucgcccaguacacaucugcccugcuggccggcacaaucacaagcggcuggacauuuggagcaggcgccgcucugcagauccccuuugcuaugcagauggccuaccgguucaacggcaucggagugacccagaaugugcuguacgagaaccagaagcugaucgccaaccaguucaacagcgccaucggcaagauccaggacagccugagcagcacagcaagcgcccugggaaagcugcaggacguggucaaccagaaugcccaggcacugaacacccuggucaagcagcuguccuccaacuucggcgccaucagcucugugcugaacgauauccugagcagacuggacaaggucgaggccgaggugcagaucgacagacugaucacaggcagacugcagagccuccagacauacgugacccagcagcugaucagagccgccgagauuagagccucugccaaucuggccgccaccaagaugucugagugugugcugggccagagcaagagaguggacuuuugcggcaagggcuaccaccugaugagcuucccucagucugccccucacggcgugguguuucugcacgugacauaugugcccgcucaagagaagaauuucaccaccgcuccagccaucugccacgacggcaaagcccacuuuccuagagaaggcguguucguguccaacggcacccauugguucgugacacagcggaacuucuacgagccccagaucaucaccaccgacaacaccuucgugucuggcaacugcgacgucgugaucggcauugugaacaauaccguguacgacccucugcagcccgagcuggacagcuucaaagaggaacuggacaaguacuuuaagaaccacacaagccccgacguggaccugggcgauaucagcggaaucaaugccagcgucgugaacauccagaaagagaucgaccggcugaacgagguggccaagaaucugaacgagagccugaucgaccugcaagaacuggggaaguacgagcaguacaucaaguggcccugguacaucuggcugggcuuuaucgccggacugauugccaucgugauggucacaaucaugcuguguugcaugaccagcugcuguagcugccugaagggcuguuguagcuguggcagcugcugcaaguucgacgaggacgauucugagcccgugcugaagggcgugaaacugcacuacacaugaggacuaguuauaagacugacuagcccgaugggccucccaacgggcccuccuccccuccuugcaccgagauuaauagaucucaaaggcucuuuucagagccaccaaaaaaaaaaaaaaaaaaaaaaaaaaaaaaaaaaaaaaaaaaaaaaaaaaaaaaaaaaaaaaaaaaaaaaaaaaaaaaaaaaaaaaaaaaaaaaaaaaaaa

SEQ ID NO: 24394 - RNA, 4041 nt, Artificial Sequence
  SARS-CoV-2/Wuhan/WIV05/2019__EPI_ISL_402128 spike protein mRNA gc mod (1-1273)(E484K_D614G)
aggagaaagcuuaccauguucguguuccuggugcugcugccucugguguccagccagugugugaaccugaccaccagaacacagcugccuccagccuacaccaacagcuuuaccagaggcguguacuaccccgacaagguguucagauccagcgugcugcacucuacccaggaccuguuccugccuuucuucagcaacgugaccugguuccacgccauccacguguccggcaccaauggcaccaagagauucgacaaccccgugcugcccuucaacgacgggguguacuuugccagcaccgagaaguccaacaucaucagaggcuggaucuucggcaccacacuggacagcaagacccagagccugcugaucgugaacaacgccaccaacguggucaucaaagugugcgaguuccaguucugcaacgaccccuuccugggcgucuacuaccacaagaacaacaagagcuggauggaaagcgaguuccggguguacagcagcgccaacaacugcaccuucgaguacgugucccagccuuuccugauggaccuggaaggcaagcagggcaacuucaagaaccugcgcgaguucguguuuaagaacaucgacggcuacuucaagaucuacagcaagcacaccccuaucaaccucgugcgggaucugccucagggcuucucugcucuggaaccccugguggaucugcccaucggcaucaacaucacccgguuucagacacugcuggcccugcacagaagcuaccugacaccuggcgauagcagcagcggauggacagcuggugccgccgcuuacuaugugggcuaccugcagccuagaaccuuccugcugaaguacaacgagaacggcaccaucaccgacgccguggauugugcucuggauccucugagcgagacaaagugcacccugaaguccuucaccguggaaaagggcaucuaccagaccagcaacuuccgggugcagcccaccgaauccaucgugcgguuccccaauaucaccaaucugugccccuucggcgagguguucaaugccaccagauucgccucuguguacgccuggaaccggaagcggaucagcaauugcguggccgacuacuccgugcuguacaacuccgccagcuucagcaccuucaagugcuacggcguguccccuaccaagcugaacgaccugugcuucacaaacguguacgccgacagcuucgugauccggggagaugaagugcggcagauugccccuggacagacaggcaagaucgccgacuacaacuacaagcugcccgacgacuucaccggcugugugauugccuggaacagcaacaaccuggacuccaaagucggcggcaacuacaauuaccuguaccggcuguuccggaaguccaaucugaagcccuucgagcgggacaucuccaccgagaucuaucaggccggcagcaccccuuguaacggcgugaagggcuucaacugcuacuucccacugcaguccuacggcuuucagcccacaaauggcgugggcuaucagcccuacagagugguggugcugagcuucgaacugcugcaugccccugccacagugugcggcccuaagaaaagcaccaaucucgugaagaacaaaugcgugaacuucaacuucaacggccugaccggcaccggcgugcugacagagagcaacaagaaguuccugccauuccagcaguuuggccgggauaucgccgauaccacagacgccguuagagauccccagacacuggaaauccuggacaucaccccuugcagcuucggcggagugucugugaucaccccuggcaccaacaccagcaaucagguggcagugcuguaccagggcgugaacuguaccgaagugcccguggccauucacgccgaucagcugacaccuacauggcggguguacuccaccggcagcaauguguuucagaccagagccggcugucugaucggagccgagcacgugaacaauagcuacgagugcgacauccccaucggcgcuggaaucugcgccagcuaccagacacagacaaacagcccucggagagccagaagcguggccagccagagcaucauugccuacacaaugucucugggcgccgagaacagcguggccuacuccaacaacucuaucgcuauccccaccaacuucaccaucagcgugaccacagagauccugccuguguccaugaccaagaccagcguggacugcaccauguacaucugcggcgauuccaccgagugcuccaaccugcugcugcaguacggcagcuucugcacccagcugaauagagcccugacagggaucgccguggaacaggacaagaacacccaagagguguucgcccaagugaagcagaucuacaagaccccuccuaucaaggacuucggcggcuucaauuucagccagauucugcccgauccuagcaagcccagcaagcggagcuucaucgaggaccugcuguucaacaaagugacacuggccgacgccggcuucaucaagcaguauggcgauugucugggcgacauugccgccagggaucugauuugcgcccagaaguuuaacggacugacagugcugccuccucugcugaccgaugagaugaucgcccaguacacaucugcccugcuggccggcacaaucacaagcggcuggacauuuggagcaggcgccgcucugcagauccccuuugcuaugcagauggccuaccgguucaacggcaucggagugacccagaaugugcuguacgagaaccagaagcugaucgccaaccaguucaacagcgccaucggcaagauccaggacagccugagcagcacagcaagcgcccugggaaagcugcaggacguggucaaccagaaugcccaggcacugaacacccuggucaagcagcuguccuccaacuucggcgccaucagcucugugcugaacgauauccugagcagacuggacaaggucgaggccgaggugcagaucgacagacugaucacaggcagacugcagagccuccagacauacgugacccagcagcugaucagagccgccgagauuagagccucugccaaucuggccgccaccaagaugucugagugugugcugggccagagcaagagaguggacuuuugcggcaagggcuaccaccugaugagcuucccucagucugccccucacggcgugguguuucugcacgugacauaugugcccgcucaagagaagaauuucaccaccgcuccagccaucugccacgacggcaaagcccacuuuccuagagaaggcguguucguguccaacggcacccauugguucgugacacagcggaacuucuacgagccccagaucaucaccaccgacaacaccuucgugucuggcaacugcgacgucgugaucggcauugugaacaauaccguguacgacccucugcagcccgagcuggacagcuucaaagaggaacuggacaaguacuuuaagaaccacacaagccccgacguggaccugggcgauaucagcggaaucaaugccagcgucgugaacauccagaaagagaucgaccggcugaacgagguggccaagaaucugaacgagagccugaucgaccugcaagaacuggggaaguacgagcaguacaucaaguggcccugguacaucuggcugggcuuuaucgccggacugauugccaucgugauggucacaaucaugcuguguugcaugaccagcugcuguagcugccugaagggcuguuguagcuguggcagcugcugcaaguucgacgaggacgauucugagcccgugcugaagggcgugaaacugcacuacacaugaggacuaguuauaagacugacuagcccgaugggccucccaacgggcccuccuccccuccuugcaccgagauuaauagaucucaaaggcucuuuucagagccaccaaaaaaaaaaaaaaaaaaaaaaaaaaaaaaaaaaaaaaaaaaaaaaaaaaaaaaaaaaaaaaaaaaaaaaaaaaaaaaaaaaaaaaaaaaaaaaaaaaaaa

SEQ ID NO: 24395 - RNA, 4041 nt, Artificial Sequence
  SARS-CoV-2/Wuhan/WIV05/2019__EPI_ISL_402128 spike protein mRNA gc mod (1-1273)(L18F_T20N_P26S_D138Y_R190S_K417T_E484K_N501Y_D614G_H655Y _T1027I)
aggagaaagcuuaccauguucguguuccuggugcugcugccucugguguccagccagugugugaacuucaccaacagaacacagcugccuagcgccuacaccaacagcuuuaccagaggcguguacuaccccgacaagguguucagauccagcgugcugcacucuacccaggaccuguuccugccuuucuucagcaacgugaccugguuccacgccauccacguguccggcaccaauggcaccaagagauucgacaaccccgugcugcccuucaacgacgggguguacuuugccagcaccgagaaguccaacaucaucagaggcuggaucuucggcaccacacuggacagcaagacccagagccugcugaucgugaacaacgccaccaacguggucaucaaagugugcgaguuccaguucugcaacuaccccuuccugggcgucuacuaccacaagaacaacaagagcuggauggaaagcgaguuccggguguacagcagcgccaacaacugcaccuucgaguacgugucccagccuuuccugauggaccuggaaggcaagcagggcaacuucaagaaccugagcgaguucguguuuaagaacaucgacggcuacuucaagaucuacagcaagcacaccccuaucaaccucgugcgggaucugccucagggcuucucugcucuggaaccccugguggaucugcccaucggcaucaacaucacccgguuucagacacugcuggcccugcacagaagcuaccugacaccuggcgauagcagcagcggauggacagcuggugccgccgcuuacuaugugggcuaccugcagccuagaaccuuccugcugaaguacaacgagaacggcaccaucaccgacgccguggauugugcucuggauccucugagcgagacaaagugcacccugaaguccuucaccguggaaaagggcaucuaccagaccagcaacuuccgggugcagcccaccgaauccaucgugcgguuccccaauaucaccaaucugugccccuucggcgagguguucaaugccaccagauucgccucuguguacgccuggaaccggaagcggaucagcaauugcguggccgacuacuccgugcuguacaacuccgccagcuucagcaccuucaagugcuacggcguguccccuaccaagcugaacgaccugugcuucacaaacguguacgccgacagcuucgugauccggggagaugaagugcggcagauugccccuggacagacaggcaccaucgccgacuacaacuacaagcugcccgacgacuucaccggcugugugauugccuggaacagcaacaaccuggacuccaaagucggcggcaacuacaauuaccuguaccggcuguuccggaaguccaaucugaagcccuucgagcgggacaucuccaccgagaucuaucaggccggcagcaccccuuguaacggcgugaagggcuucaacugcuacuucccacugcaguccuacggcuuucagcccacauacggcgugggcuaucagcccuacagagugguggugcugagcuucgaacugcugcaugccccugccacagugugcggcccuaagaaaagcaccaaucucgugaagaacaaaugcgugaacuucaacuucaacggccugaccggcaccggcgugcugacagagagcaacaagaaguuccugccauuccagcaguuuggccgggauaucgccgauaccacagacgccguuagagauccccagacacuggaaauccuggacaucaccccuugcagcuucggcggagugucugugaucaccccuggcaccaacaccagcaaucagguggcagugcuguaccagggcgugaacuguaccgaagugcccguggccauucacgccgaucagcugacaccuacauggcggguguacuccaccggcagcaauguguuucagaccagagccggcugucugaucggagccgaguacgugaacaauagcuacgagugcgacauccccaucggcgcuggaaucugcgccagcuaccagacacagacaaacagcccucggagagccagaagcguggccagccagagcaucauugccuacacaaugucucugggcgccgagaacagcguggccuacuccaacaacucuaucgcuauccccaccaacuucaccaucagcgugaccacagagauccugccuguguccaugaccaagaccagcguggacugcaccauguacaucugcggcgauuccaccgagugcuccaaccugcugcugcaguacggcagcuucugcacccagcugaauagagcccugacagggaucgccguggaacaggacaagaacacccaagagguguucgcccaagugaagcagaucuacaagaccccuccuaucaaggacuucggcggcuucaauuucagccagauucugcccgauccuagcaagcccagcaagcggagcuucaucgaggaccugcuguucaacaaagugacacuggccgacgccggcuucaucaagcaguauggcgauugucugggcgacauugccgccagggaucugauuugcgcccagaaguuuaacggacugacagugcugccuccucugcugaccgaugagaugaucgcccaguacacaucugcccugcuggccggcacaaucacaagcggcuggacauuuggagcaggcgccgcucugcagauccccuuugcuaugcagauggccuaccgguucaacggcaucggagugacccagaaugugcuguacgagaaccagaagcugaucgccaaccaguucaacagcgccaucggcaagauccaggacagccugagcagcacagcaagcgcccugggaaagcugcaggacguggucaaccagaaugcccaggcacugaacacccuggucaagcagcuguccuccaacuucggcgccaucagcucugugcugaacgauauccugagcagacuggacaaggucgaggccgaggugcagaucgacagacugaucacaggcagacugcagagccuccagacauacgugacccagcagcugaucagagccgccgagauuagagccucugccaaucuggccgccaucaagaugucugagugugugcugggccagagcaagagaguggacuuuugcggcaagggcuaccaccugaugagcuucccucagucugccccucacggcgugguguuucugcacgugacauaugugcccgcucaagagaagaauuucaccaccgcuccagccaucugccacgacggcaaagcccacuuuccuagagaaggcguguucguguccaacggcacccauugguucgugacacagcggaacuucuacgagccccagaucaucaccaccgacaacaccuucgugucuggcaacugcgacgucgugaucggcauugugaacaauaccguguacgacccucugcagcccgagcuggacagcuucaaagaggaacuggacaaguacuuuaagaaccacacaagccccgacguggaccugggcgauaucagcggaaucaaugccagcgucgugaacauccagaaagagaucgaccggcugaacgagguggccaagaaucugaacgagagccugaucgaccugcaagaacuggggaaguacgagcaguacaucaaguggcccugguacaucuggcugggcuuuaucgccggacugauugccaucgugauggucacaaucaugcuguguugcaugaccagcugcuguagcugccugaagggcuguuguagcuguggcagcugcugcaaguucgacgaggacgauucugagcccgugcugaagggcgugaaacugcacuacacaugaggacuaguuauaagacugacuagcccgaugggccucccaacgggcccuccuccccuccuugcaccgagauuaauagaucucaaaggcucuuuucagagccaccaaaaaaaaaaaaaaaaaaaaaaaaaaaaaaaaaaaaaaaaaaaaaaaaaaaaaaaaaaaaaaaaaaaaaaaaaaaaaaaaaaaaaaaaaaaaaaaaaaaaa

SEQ ID NO: 24396 - RNA, 4041 nt, Artificial Sequence
  SARS-CoV-2/Wuhan/WIV05/2019__EPI_ISL_402128 spike protein mRNA gc mod (1-1273)(S13I_W152C_L452R_D614G)
aggagaaagcuuaccauguucguguuccuggugcugcugccucugguguccauccagugugugaaccugaccaccagaacacagcugccuccagccuacaccaacagcuuuaccagaggcguguacuaccccgacaagguguucagauccagcgugcugcacucuacccaggaccuguuccugccuuucuucagcaacgugaccugguuccacgccauccacguguccggcaccaauggcaccaagagauucgacaaccccgugcugcccuucaacgacgggguguacuuugccagcaccgagaaguccaacaucaucagaggcuggaucuucggcaccacacuggacagcaagacccagagccugcugaucgugaacaacgccaccaacguggucaucaaagugugcgaguuccaguucugcaacgaccccuuccugggcgucuacuaccacaagaacaacaagagcugcauggaaagcgaguuccggguguacagcagcgccaacaacugcaccuucgaguacgugucccagccuuuccugauggaccuggaaggcaagcagggcaacuucaagaaccugcgcgaguucguguuuaagaacaucgacggcuacuucaagaucuacagcaagcacaccccuaucaaccucgugcgggaucugccucagggcuucucugcucuggaaccccugguggaucugcccaucggcaucaacaucacccgguuucagacacugcuggcccugcacagaagcuaccugacaccuggcgauagcagcagcggauggacagcuggugccgccgcuuacuaugugggcuaccugcagccuagaaccuuccugcugaaguacaacgagaacggcaccaucaccgacgccguggauugugcucuggauccucugagcgagacaaagugcacccugaaguccuucaccguggaaaagggcaucuaccagaccagcaacuuccgggugcagcccaccgaauccaucgugcgguuccccaauaucaccaaucugugccccuucggcgagguguucaaugccaccagauucgccucuguguacgccuggaaccggaagcggaucagcaauugcguggccgacuacuccgugcuguacaacuccgccagcuucagcaccuucaagugcuacggcguguccccuaccaagcugaacgaccugugcuucacaaacguguacgccgacagcuucgugauccggggagaugaagugcggcagauugccccuggacagacaggcaagaucgccgacuacaacuacaagcugcccgacgacuucaccggcugugugauugccuggaacagcaacaaccuggacuccaaagucggcggcaacuacaauuaccgcuaccggcuguuccggaaguccaaucugaagcccuucgagcgggacaucuccaccgagaucuaucaggccggcagcaccccuuguaacggcguggaaggcuucaacugcuacuucccacugcaguccuacggcuuucagcccacaaauggcgugggcuaucagcccuacagagugguggugcugagcuucgaacugcugcaugccccugccacagugugcggcccuaagaaaagcaccaaucucgugaagaacaaaugcgugaacuucaacuucaacggccugaccggcaccggcgugcugacagagagcaacaagaaguuccugccauuccagcaguuuggccgggauaucgccgauaccacagacgccguuagagauccccagacacuggaaauccuggacaucaccccuugcagcuucggcggagugucugugaucaccccuggcaccaacaccagcaaucagguggcagugcuguaccagggcgugaacuguaccgaagugcccguggccauucacgccgaucagcugacaccuacauggcggguguacuccaccggcagcaauguguuucagaccagagccggcugucugaucggagccgagcacgugaacaauagcuacgagugcgacauccccaucggcgcuggaaucugcgccagcuaccagacacagacaaacagcccucggagagccagaagcguggccagccagagcaucauugccuacacaaugucucugggcgccgagaacagcguggccuacuccaacaacucuaucgcuauccccaccaacuucaccaucagcgugaccacagagauccugccuguguccaugaccaagaccagcguggacugcaccauguacaucugcggcgauuccaccgagugcuccaaccugcugcugcaguacggcagcuucugcacccagcugaauagagcccugacagggaucgccguggaacaggacaagaacacccaagagguguucgcccaagugaagcagaucuacaagaccccuccuaucaaggacuucggcggcuucaauuucagccagauucugcccgauccuagcaagcccagcaagcggagcuucaucgaggaccugcuguucaacaaagugacacuggccgacgccggcuucaucaagcaguauggcgauugucugggcgacauugccgccagggaucugauuugcgcccagaaguuuaacggacugacagugcugccuccucugcugaccgaugagaugaucgcccaguacacaucugcccugcuggccggcacaaucacaagcggcuggacauuuggagcaggcgccgcucugcagauccccuuugcuaugcagauggccuaccgguucaacggcaucggagugacccagaaugugcuguacgagaaccagaagcugaucgccaaccaguucaacagcgccaucggcaagauccaggacagccugagcagcacagcaagcgcccugggaaagcugcaggacguggucaaccagaaugcccaggcacugaacacccuggucaagcagcuguccuccaacuucggcgccaucagcucugugcugaacgauauccugagcagacuggacaaggucgaggccgaggugcagaucgacagacugaucacaggcagacugcagagccuccagacauacgugacccagcagcugaucagagccgccgagauuagagccucugccaaucuggccgccaccaagaugucugagugugugcugggccagagcaagagaguggacuuuugcggcaagggcuaccaccugaugagcuucccucagucugccccucacggcgugguguuucugcacgugacauaugugcccgcucaagagaagaauuucaccaccgcuccagccaucugccacgacggcaaagcccacuuuccuagagaaggcguguucguguccaacggcacccauugguucgugacacagcggaacuucuacgagccccagaucaucaccaccgacaacaccuucgugucuggcaacugcgacgucgugaucggcauugugaacaauaccguguacgacccucugcagcccgagcuggacagcuucaaagaggaacuggacaaguacuuuaagaaccacacaagccccgacguggaccugggcgauaucagcggaaucaaugccagcgucgugaacauccagaaagagaucgaccggcugaacgagguggccaagaaucugaacgagagccugaucgaccugcaagaacuggggaaguacgagcaguacaucaaguggcccugguacaucuggcugggcuuuaucgccggacugauugccaucgugauggucacaaucaugcuguguugcaugaccagcugcuguagcugccugaagggcuguuguagcuguggcagcugcugcaaguucgacgaggacgauucugagcccgugcugaagggcgugaaacugcacuacacaugaggacuaguuauaagacugacuagcccgaugggccucccaacgggcccuccuccccuccuugcaccgagauuaauagaucucaaaggcucuuuucagagccaccaaaaaaaaaaaaaaaaaaaaaaaaaaaaaaaaaaaaaaaaaaaaaaaaaaaaaaaaaaaaaaaaaaaaaaaaaaaaaaaaaaaaaaaaaaaaaaaaaaaaa

SEQ ID NO: 24397 - RNA, 4041 nt, Artificial Sequence
  SARS-CoV-2/Wuhan/WIV05/2019__EPI_ISL_402128 spike protein mRNA gc (1-1273)(K986P_V987P) R10136, R10158
aggagaaagcuuaccauguucguguuccugguccuccugccccuggugagcucccagugcgugaaccucaccacccgcacgcagcugccgcccgccuacaccaacagcuucacccggggcgucuacuaccccgacaagguguuccgcuccagcgugcugcacuccacccaggaccucuuccugcccuucuucagcaacgucacgugguuccacgccauccacguguccgggaccaacggcaccaagcgguucgacaacccggugcugcccuucaacgacggggucuacuucgcgagcaccgagaaguccaacaucauccgcggcuggaucuucgggacgacccucgacagcaagacccagucccugcugaucgugaacaacgccaccaacguggucaucaaggugugcgaguuccaguucugcaacgaccccuuccucggcguguacuaccacaagaacaacaagagcuggauggaguccgaguuccgggucuacagcuccgccaacaacugcacguucgaguacgugagccagcccuuccugauggaccuggagggcaagcaggggaacuucaagaaccuccgcgaguucguguucaagaacaucgacggcuacuucaagaucuacuccaagcacaccccgaucaaccugguccgggaccugccccagggguucagcgcccucgagccccugguggaccugcccaucggcaucaacaucacccgcuuccagacccuccuggcccugcaccgguccuaccucacgccgggggacagcagcuccggcuggaccgcgggcgccgccgccuacuacgugggguaccugcagccccgcaccuuccugcucaaguacaacgagaacggcaccaucacggacgcggucgacugcgcccuggacccccugagcgagaccaagugcacccucaaguccuucaccguggagaaggggaucuaccagacgagcaacuuccgggugcagcccaccgaguccaucguccgcuucccgaacaucaccaaccugugccccuucggcgagguguucaacgccacccgguucgccagcgucuacgccuggaaccgcaagcggaucuccaacugcguggcggacuacagcgugcuguacaacuccgccagcuucuccacguucaagugcuacggcgucagccccaccaagcucaacgaccugugcuucaccaacguguacgccgacuccuucgugauccgcggggacgagguccggcagaucgcccccggccagaccgggaagaucgccgacuacaacuacaagcugccggacgacuucacgggcugcgugaucgcguggaacagcaacaaccucgacuccaaggucgggggcaacuacaacuaccuguaccgccuguuccgcaagagcaaccucaagcccuucgagcgggacaucuccaccgagaucuaccaggccggcagcacccccugcaacgggguggagggcuucaacugcuacuucccccugcaguccuacggguuccagccgaccaacggcgugggguaccagcccuaccggguggucgugcugagcuucgagcuccugcacgcccccgccacggugugcggccccaagaaguccaccaaccuggucaagaacaagugcgugaacuucaacuucaacggccucaccgggaccggcgugcugaccgagagcaacaagaaguuccugccguuccagcaguucgggcgcgacaucgccgacacgaccgacgcgguccgcgacccccagacccuggagauccucgacaucacccccugcagcuucggcgggguguccgugaucacgccgggcaccaacaccagcaaccaggucgccgugcuguaccaggacgugaacugcaccgagguccccguggccauccacgccgaccagcugacgcccaccuggcggguguacuccaccggcagcaacgucuuccagacccgcgccgggugccucaucggcgcggagcacgugaacaacuccuacgagugcgacauccccaucggggccggcaucugcgccagcuaccagacgcagaccaacuccccgcggcgcgcccggagcguggcgucccagagcaucaucgccuacaccaugucccugggcgccgagaacagcgucgccuacuccaacaacagcaucgccauccccaccaacuucacgaucuccgugaccaccgagauccugcccgugagcaugaccaagacgagcgucgacugcaccauguacaucugcggggacuccaccgagugcagcaaccuccugcugcaguacggcuccuucugcacccagcucaaccgcgcgcugacggggaucgccguggagcaggacaagaacacccaggagguguucgcccaggucaagcagaucuacaagacgcccccgaucaaggacuucggcggguucaacuucagccagauccugcccgaccccuccaagcccagcaagcgguccuucaucgaggaccuccuguucaacaaggugacccuggccgacgccggcuucaucaagcaguacggcgacugccucggggacaucgcggcccgcgaccugaucugcgcccagaaguucaacggccugaccgugcucccgccccugcugaccgacgagaugaucgcccaguacaccagcgcccuccuggcggggaccaucacguccggcuggaccuucggggccggcgccgcccugcagauccccuucgcgaugcagauggccuaccgguucaacggcaucggggucacccagaacgugcucuacgagaaccagaagcugaucgccaaccaguucaacagcgccaucggcaagauccaggacucccugagcuccaccgccagcgcgcucgggaagcugcaggacguggucaaccagaacgcccaggcccugaacacgcucgugaagcagcuguccagcaacuucggcgccaucuccagcgugcugaacgacauccucucccgccuggacccgcccgaggccgaggugcagaucgaccggcugaucaccgggcgccuccagagccugcagaccuacgugacccagcagcugauccgggcggccgagauccgcgccagcgccaaccucgccgcgaccaagauguccgagugcguccugggccagagcaagcggguggacuucugcggcaagggguaccaccugauguccuucccccagagcgccccgcacggcguggucuuccuccacgugacguacguccccgcccaggagaagaacuucaccaccgcccccgcgaucugccacgacgggaaggcccacuucccccgcgagggcguguucguguccaacgggacccacugguucgucacgcagcggaacuucuacgagccgcagaucaucaccaccgacaacaccuucgugagcggcaacugcgacguggucaucggcaucgugaacaacacgguguacgacccccugcagcccgagcuggacuccuucaaggaggagcucgacaaguacuucaagaaccacaccagccccgacgucgaccugggggacaucuccggcaucaacgccagcguggugaacauccagaaggagaucgaccgccugaacgaggucgccaagaaccucaacgagucccugaucgaccugcaggagcucgggaaguacgagcaguacaucaaguggccgugguacaucuggcugggcuucaucgccggccugaucgcgaucgugauggugaccaucaugcucugcugcaugaccagcugcugcuccugccugaaggggugcugcagcugcggcuccugcugcaaguucgacgaggacgacagcgagcccguccugaagggggugaagcuccacuacacgugaggacuaguuauaagacugacuagcccgaugggccucccaacgggcccuccuccccuccuugcaccgagauuaauagaucucaaaggcucuuuucagagccaccaaaaaaaaaaaaaaaaaaaaaaaaaaaaaaaaaaaaaaaaaaaaaaaaaaaaaaaaaaaaaaaaaaaaaaaaaaaaaaaaaaaaaaaaaaaaaaaaaaaaa

SEQ ID NO: 24398 - RNA, 4041 nt, Artificial Sequence
  SARS-CoV-2/Wuhan/WIV05/2019__EPI_ISL_402128 spike protein mRNA gc (1-1273)(K986P_V987P_ D614G)
aggagaaagcuuaccauguucguguuccugguccuccugccccuggugagcucccagugcgugaaccucaccacccgcacgcagcugccgcccgccuacaccaacagcuucacccggggcgucuacuaccccgacaagguguuccgcuccagcgugcugcacuccacccaggaccucuuccugcccuucuucagcaacgucacgugguuccacgccauccacguguccgggaccaacggcaccaagcgguucgacaacccggugcugcccuucaacgacggggucuacuucgcgagcaccgagaaguccaacaucauccgcggcuggaucuucgggacgacccucgacagcaagacccagucccugcugaucgugaacaacgccaccaacguggucaucaaggugugcgaguuccaguucugcaacgaccccuuccucggcguguacuaccacaagaacaacaagagcuggauggaguccgaguuccgggucuacagcuccgccaacaacugcacguucgaguacgugagccagcccuuccugauggaccuggagggcaagcaggggaacuucaagaaccuccgcgaguucguguucaagaacaucgacggcuacuucaagaucuacuccaagcacaccccgaucaaccugguccgggaccugccccagggguucagcgcccucgagccccugguggaccugcccaucggcaucaacaucacccgcuuccagacccuccuggcccugcaccgguccuaccucacgccgggggacagcagcuccggcuggaccgcgggcgccgccgccuacuacgugggguaccugcagccccgcaccuuccugcucaaguacaacgagaacggcaccaucacggacgcggucgacugcgcccuggacccccugagcgagaccaagugcacccucaaguccuucaccguggagaaggggaucuaccagacgagcaacuuccgggugcagcccaccgaguccaucguccgcuucccgaacaucaccaaccugugccccuucggcgagguguucaacgccacccgguucgccagcgucuacgccuggaaccgcaagcggaucuccaacugcguggcggacuacagcgugcuguacaacuccgccagcuucuccacguucaagugcuacggcgucagccccaccaagcucaacgaccugugcuucaccaacguguacgccgacuccuucgugauccgcggggacgagguccggcagaucgcccccggccagaccgggaagaucgccgacuacaacuacaagcugccggacgacuucacgggcugcgugaucgcguggaacagcaacaaccucgacuccaaggucgggggcaacuacaacuaccuguaccgccuguuccgcaagagcaaccucaagcccuucgagcgggacaucuccaccgagaucuaccaggccggcagcacccccugcaacgggguggagggcuucaacugcuacuucccccugcaguccuacggguuccagccgaccaacggcgugggguaccagcccuaccggguggucgugcugagcuucgagcuccugcacgcccccgccacggugugcggccccaagaaguccaccaaccuggucaagaacaagugcgugaacuucaacuucaacggccucaccgggaccggcgugcugaccgagagcaacaagaaguuccugccguuccagcaguucgggcgcgacaucgccgacacgaccgacgcgguccgcgacccccagacccuggagauccucgacaucacccccugcagcuucggcgggguguccgugaucacgccgggcaccaacaccagcaaccaggucgccgugcuguaccagggcgugaacugcaccgagguccccguggccauccacgccgaccagcugacgcccaccuggcggguguacuccaccggcagcaacgucuuccagacccgcgccgggugccucaucggcgcggagcacgugaacaacuccuacgagugcgacauccccaucggggccggcaucugcgccagcuaccagacgcagaccaacuccccgcggcgcgcccggagcguggcgucccagagcaucaucgccuacaccaugucccugggcgccgagaacagcgucgccuacuccaacaacagcaucgccauccccaccaacuucacgaucuccgugaccaccgagauccugcccgugagcaugaccaagacgagcgucgacugcaccauguacaucugcggggacuccaccgagugcagcaaccuccugcugcaguacggcuccuucugcacccagcucaaccgcgcgcugacggggaucgccguggagcaggacaagaacacccaggagguguucgcccaggucaagcagaucuacaagacgcccccgaucaaggacuucggcggguucaacuucagccagauccugcccgaccccuccaagcccagcaagcgguccuucaucgaggaccuccuguucaacaaggugacccuggccgacgccggcuucaucaagcaguacggcgacugccucggggacaucgcggcccgcgaccugaucugcgcccagaaguucaacggccugaccgugcucccgccccugcugaccgacgagaugaucgcccaguacaccagcgcccuccuggcggggaccaucacguccggcuggaccuucggggccggcgccgcccugcagauccccuucgcgaugcagauggccuaccgguucaacggcaucggggucacccagaacgugcucuacgagaaccagaagcugaucgccaaccaguucaacagcgccaucggcaagauccaggacucccugagcuccaccgccagcgcgcucgggaagcugcaggacguggucaaccagaacgcccaggcccugaacacgcucgugaagcagcuguccagcaacuucggcgccaucuccagcgugcugaacgacauccucucccgccuggacccgcccgaggccgaggugcagaucgaccggcugaucaccgggcgccuccagagccugcagaccuacgugacccagcagcugauccgggcggccgagauccgcgccagcgccaaccucgccgcgaccaagauguccgagugcguccugggccagagcaagcggguggacuucugcggcaagggguaccaccugauguccuucccccagagcgccccgcacggcguggucuuccuccacgugacguacguccccgcccaggagaagaacuucaccaccgcccccgcgaucugccacgacgggaaggcccacuucccccgcgagggcguguucguguccaacgggacccacugguucgucacgcagcggaacuucuacgagccgcagaucaucaccaccgacaacaccuucgugagcggcaacugcgacguggucaucggcaucgugaacaacacgguguacgacccccugcagcccgagcuggacuccuucaaggaggagcucgacaaguacuucaagaaccacaccagccccgacgucgaccugggggacaucuccggcaucaacgccagcguggugaacauccagaaggagaucgaccgccugaacgaggucgccaagaaccucaacgagucccugaucgaccugcaggagcucgggaaguacgagcaguacaucaaguggccgugguacaucuggcugggcuucaucgccggccugaucgcgaucgugauggugaccaucaugcucugcugcaugaccagcugcugcuccugccugaaggggugcugcagcugcggcuccugcugcaaguucgacgaggacgacagcgagcccguccugaagggggugaagcuccacuacacgugaggacuaguuauaagacugacuagcccgaugggccucccaacgggcccuccuccccuccuugcaccgagauuaauagaucucaaaggcucuuuucagagccaccaaaaaaaaaaaaaaaaaaaaaaaaaaaaaaaaaaaaaaaaaaaaaaaaaaaaaaaaaaaaaaaaaaaaaaaaaaaaaaaaaaaaaaaaaaaaaaaaaaaaa

SEQ ID NO: 24399 - RNA, 4041 nt, Artificial Sequence
  SARS-CoV-2/Wuhan/WIV05/2019__EPI_ISL_402128 spike protein mRNA gc (1-1273)(K986P_V987P_A222V_D614G)
aggagaaagcuuaccauguucguguuccugguccuccugccccuggugagcucccagugcgugaaccucaccacccgcacgcagcugccgcccgccuacaccaacagcuucacccggggcgucuacuaccccgacaagguguuccgcuccagcgugcugcacuccacccaggaccucuuccugcccuucuucagcaacgucacgugguuccacgccauccacguguccgggaccaacggcaccaagcgguucgacaacccggugcugcccuucaacgacggggucuacuucgcgagcaccgagaaguccaacaucauccgcggcuggaucuucgggacgacccucgacagcaagacccagucccugcugaucgugaacaacgccaccaacguggucaucaaggugugcgaguuccaguucugcaacgaccccuuccucggcguguacuaccacaagaacaacaagagcuggauggaguccgaguuccgggucuacagcuccgccaacaacugcacguucgaguacgugagccagcccuuccugauggaccuggagggcaagcaggggaacuucaagaaccuccgcgaguucguguucaagaacaucgacggcuacuucaagaucuacuccaagcacaccccgaucaaccugguccgggaccugccccagggguucagcguccucgagccccugguggaccugcccaucggcaucaacaucacccgcuuccagacccuccuggcccugcaccgguccuaccucacgccgggggacagcagcuccggcuggaccgcgggcgccgccgccuacuacgugggguaccugcagccccgcaccuuccugcucaaguacaacgagaacggcaccaucacggacgcggucgacugcgcccuggacccccugagcgagaccaagugcacccucaaguccuucaccguggagaaggggaucuaccagacgagcaacuuccgggugcagcccaccgaguccaucguccgcuucccgaacaucaccaaccugugccccuucggcgagguguucaacgccacccgguucgccagcgucuacgccuggaaccgcaagcggaucuccaacugcguggcggacuacagcgugcuguacaacuccgccagcuucuccacguucaagugcuacggcgucagccccaccaagcucaacgaccugugcuucaccaacguguacgccgacuccuucgugauccgcggggacgagguccggcagaucgcccccggccagaccgggaagaucgccgacuacaacuacaagcugccggacgacuucacgggcugcgugaucgcguggaacagcaacaaccucgacuccaaggucgggggcaacuacaacuaccuguaccgccuguuccgcaagagcaaccucaagcccuucgagcgggacaucuccaccgagaucuaccaggccggcagcacccccugcaacgggguggagggcuucaacugcuacuucccccugcaguccuacggguuccagccgaccaacggcgugggguaccagcccuaccggguggucgugcugagcuucgagcuccugcacgcccccgccacggugugcggccccaagaaguccaccaaccuggucaagaacaagugcgugaacuucaacuucaacggccucaccgggaccggcgugcugaccgagagcaacaagaaguuccugccguuccagcaguucgggcgcgacaucgccgacacgaccgacgcgguccgcgacccccagacccuggagauccucgacaucacccccugcagcuucggcgggguguccgugaucacgccgggcaccaacaccagcaaccaggucgccgugcuguaccagggcgugaacugcaccgagguccccguggccauccacgccgaccagcugacgcccaccuggcggguguacuccaccggcagcaacgucuuccagacccgcgccgggugccucaucggcgcggagcacgugaacaacuccuacgagugcgacauccccaucggggccggcaucugcgccagcuaccagacgcagaccaacuccccgcggcgcgcccggagcguggcgucccagagcaucaucgccuacaccaugucccugggcgccgagaacagcgucgccuacuccaacaacagcaucgccauccccaccaacuucacgaucuccgugaccaccgagauccugcccgugagcaugaccaagacgagcgucgacugcaccauguacaucugcggggacuccaccgagugcagcaaccuccugcugcaguacggcuccuucugcacccagcucaaccgcgcgcugacggggaucgccguggagcaggacaagaacacccaggagguguucgcccaggucaagcagaucuacaagacgcccccgaucaaggacuucggcggguucaacuucagccagauccugcccgaccccuccaagcccagcaagcgguccuucaucgaggaccuccuguucaacaaggugacccuggccgacgccggcuucaucaagcaguacggcgacugccucggggacaucgcggcccgcgaccugaucugcgcccagaaguucaacggccugaccgugcucccgccccugcugaccgacgagaugaucgcccaguacaccagcgcccuccuggcggggaccaucacguccggcuggaccuucggggccggcgccgcccugcagauccccuucgcgaugcagauggccuaccgguucaacggcaucggggucacccagaacgugcucuacgagaaccagaagcugaucgccaaccaguucaacagcgccaucggcaagauccaggacucccugagcuccaccgccagcgcgcucgggaagcugcaggacguggucaaccagaacgcccaggcccugaacacgcucgugaagcagcuguccagcaacuucggcgccaucuccagcgugcugaacgacauccucucccgccuggacccgcccgaggccgaggugcagaucgaccggcugaucaccgggcgccuccagagccugcagaccuacgugacccagcagcugauccgggcggccgagauccgcgccagcgccaaccucgccgcgaccaagauguccgagugcguccugggccagagcaagcggguggacuucugcggcaagggguaccaccugauguccuucccccagagcgccccgcacggcguggucuuccuccacgugacguacguccccgcccaggagaagaacuucaccaccgcccccgcgaucugccacgacgggaaggcccacuucccccgcgagggcguguucguguccaacgggacccacugguucgucacgcagcggaacuucuacgagccgcagaucaucaccaccgacaacaccuucgugagcggcaacugcgacguggucaucggcaucgugaacaacacgguguacgacccccugcagcccgagcuggacuccuucaaggaggagcucgacaaguacuucaagaaccacaccagccccgacgucgaccugggggacaucuccggcaucaacgccagcguggugaacauccagaaggagaucgaccgccugaacgaggucgccaagaaccucaacgagucccugaucgaccugcaggagcucgggaaguacgagcaguacaucaaguggccgugguacaucuggcugggcuucaucgccggccugaucgcgaucgugauggugaccaucaugcucugcugcaugaccagcugcugcuccugccugaaggggugcugcagcugcggcuccugcugcaaguucgacgaggacgacagcgagcccguccugaagggggugaagcuccacuacacgugaggacuaguuauaagacugacuagcccgaugggccucccaacgggcccuccuccccuccuugcaccgagauuaauagaucucaaaggcucuuuucagagccaccaaaaaaaaaaaaaaaaaaaaaaaaaaaaaaaaaaaaaaaaaaaaaaaaaaaaaaaaaaaaaaaaaaaaaaaaaaaaaaaaaaaaaaaaaaaaaaaaaaaaa

SEQ ID NO: 24400 - RNA, 4041 nt, Artificial Sequence
  SARS-CoV-2/Wuhan/WIV05/2019__EPI_ISL_402128 spike protein mRNA gc (1-1273)(K986P_V987P_N439K_D614G)
aggagaaagcuuaccauguucguguuccugguccuccugccccuggugagcucccagugcgugaaccucaccacccgcacgcagcugccgcccgccuacaccaacagcuucacccggggcgucuacuaccccgacaagguguuccgcuccagcgugcugcacuccacccaggaccucuuccugcccuucuucagcaacgucacgugguuccacgccauccacguguccgggaccaacggcaccaagcgguucgacaacccggugcugcccuucaacgacggggucuacuucgcgagcaccgagaaguccaacaucauccgcggcuggaucuucgggacgacccucgacagcaagacccagucccugcugaucgugaacaacgccaccaacguggucaucaaggugugcgaguuccaguucugcaacgaccccuuccucggcguguacuaccacaagaacaacaagagcuggauggaguccgaguuccgggucuacagcuccgccaacaacugcacguucgaguacgugagccagcccuuccugauggaccuggagggcaagcaggggaacuucaagaaccuccgcgaguucguguucaagaacaucgacggcuacuucaagaucuacuccaagcacaccccgaucaaccugguccgggaccugccccagggguucagcgcccucgagccccugguggaccugcccaucggcaucaacaucacccgcuuccagacccuccuggcccugcaccgguccuaccucacgccgggggacagcagcuccggcuggaccgcgggcgccgccgccuacuacgugggguaccugcagccccgcaccuuccugcucaaguacaacgagaacggcaccaucacggacgcggucgacugcgcccuggacccccugagcgagaccaagugcacccucaaguccuucaccguggagaaggggaucuaccagacgagcaacuuccgggugcagcccaccgaguccaucguccgcuucccgaacaucaccaaccugugccccuucggcgagguguucaacgccacccgguucgccagcgucuacgccuggaaccgcaagcggaucuccaacugcguggcggacuacagcgugcuguacaacuccgccagcuucuccacguucaagugcuacggcgucagccccaccaagcucaacgaccugugcuucaccaacguguacgccgacuccuucgugauccgcggggacgagguccggcagaucgcccccggccagaccgggaagaucgccgacuacaacuacaagcugccggacgacuucacgggcugcgugaucgcguggaacagcaagaaccucgacuccaaggucgggggcaacuacaacuaccuguaccgccuguuccgcaagagcaaccucaagcccuucgagcgggacaucuccaccgagaucuaccaggccggcagcacccccugcaacgggguggagggcuucaacugcuacuucccccugcaguccuacggguuccagccgaccaacggcgugggguaccagcccuaccggguggucgugcugagcuucgagcuccugcacgcccccgccacggugugcggccccaagaaguccaccaaccuggucaagaacaagugcgugaacuucaacuucaacggccucaccgggaccggcgugcugaccgagagcaacaagaaguuccugccguuccagcaguucgggcgcgacaucgccgacacgaccgacgcgguccgcgacccccagacccuggagauccucgacaucacccccugcagcuucggcgggguguccgugaucacgccgggcaccaacaccagcaaccaggucgccgugcuguaccagggcgugaacugcaccgagguccccguggccauccacgccgaccagcugacgcccaccuggcggguguacuccaccggcagcaacgucuuccagacccgcgccgggugccucaucggcgcggagcacgugaacaacuccuacgagugcgacauccccaucggggccggcaucugcgccagcuaccagacgcagaccaacuccccgcggcgcgcccggagcguggcgucccagagcaucaucgccuacaccaugucccugggcgccgagaacagcgucgccuacuccaacaacagcaucgccauccccaccaacuucacgaucuccgugaccaccgagauccugcccgugagcaugaccaagacgagcgucgacugcaccauguacaucugcggggacuccaccgagugcagcaaccuccugcugcaguacggcuccuucugcacccagcucaaccgcgcgcugacggggaucgccguggagcaggacaagaacacccaggagguguucgcccaggucaagcagaucuacaagacgcccccgaucaaggacuucggcggguucaacuucagccagauccugcccgaccccuccaagcccagcaagcgguccuucaucgaggaccuccuguucaacaaggugacccuggccgacgccggcuucaucaagcaguacggcgacugccucggggacaucgcggcccgcgaccugaucugcgcccagaaguucaacggccugaccgugcucccgccccugcugaccgacgagaugaucgcccaguacaccagcgcccuccuggcggggaccaucacguccggcuggaccuucggggccggcgccgcccugcagauccccuucgcgaugcagauggccuaccgguucaacggcaucggggucacccagaacgugcucuacgagaaccagaagcugaucgccaaccaguucaacagcgccaucggcaagauccaggacucccugagcuccaccgccagcgcgcucgggaagcugcaggacguggucaaccagaacgcccaggcccugaacacgcucgugaagcagcuguccagcaacuucggcgccaucuccagcgugcugaacgacauccucucccgccuggacccgcccgaggccgaggugcagaucgaccggcugaucaccgggcgccuccagagccugcagaccuacgugacccagcagcugauccgggcggccgagauccgcgccagcgccaaccucgccgcgaccaagauguccgagugcguccugggccagagcaagcggguggacuucugcggcaagggguaccaccugauguccuucccccagagcgccccgcacggcguggucuuccuccacgugacguacguccccgcccaggagaagaacuucaccaccgcccccgcgaucugccacgacgggaaggcccacuucccccgcgagggcguguucguguccaacgggacccacugguucgucacgcagcggaacuucuacgagccgcagaucaucaccaccgacaacaccuucgugagcggcaacugcgacguggucaucggcaucgugaacaacacgguguacgacccccugcagcccgagcuggacuccuucaaggaggagcucgacaaguacuucaagaaccacaccagccccgacgucgaccugggggacaucuccggcaucaacgccagcguggugaacauccagaaggagaucgaccgccugaacgaggucgccaagaaccucaacgagucccugaucgaccugcaggagcucgggaaguacgagcaguacaucaaguggccgugguacaucuggcugggcuucaucgccggccugaucgcgaucgugauggugaccaucaugcucugcugcaugaccagcugcugcuccugccugaaggggugcugcagcugcggcuccugcugcaaguucgacgaggacgacagcgagcccguccugaagggggugaagcuccacuacacgugaggacuaguuauaagacugacuagcccgaugggccucccaacgggcccuccuccccuccuugcaccgagauuaauagaucucaaaggcucuuuucagagccaccaaaaaaaaaaaaaaaaaaaaaaaaaaaaaaaaaaaaaaaaaaaaaaaaaaaaaaaaaaaaaaaaaaaaaaaaaaaaaaaaaaaaaaaaaaaaaaaaaaaaa

SEQ ID NO: 24401 - RNA, 4041 nt, Artificial Sequence
  SARS-CoV-2/Wuhan/WIV05/2019__EPI_ISL_402128 spike protein mRNA gc (1-1273)(K986P_V987P_S477N_D614G)
aggagaaagcuuaccauguucguguuccugguccuccugccccuggugagcucccagugcgugaaccucaccacccgcacgcagcugccgcccgccuacaccaacagcuucacccggggcgucuacuaccccgacaagguguuccgcuccagcgugcugcacuccacccaggaccucuuccugcccuucuucagcaacgucacgugguuccacgccauccacguguccgggaccaacggcaccaagcgguucgacaacccggugcugcccuucaacgacggggucuacuucgcgagcaccgagaaguccaacaucauccgcggcuggaucuucgggacgacccucgacagcaagacccagucccugcugaucgugaacaacgccaccaacguggucaucaaggugugcgaguuccaguucugcaacgaccccuuccucggcguguacuaccacaagaacaacaagagcuggauggaguccgaguuccgggucuacagcuccgccaacaacugcacguucgaguacgugagccagcccuuccugauggaccuggagggcaagcaggggaacuucaagaaccuccgcgaguucguguucaagaacaucgacggcuacuucaagaucuacuccaagcacaccccgaucaaccugguccgggaccugccccagggguucagcgcccucgagccccugguggaccugcccaucggcaucaacaucacccgcuuccagacccuccuggcccugcaccgguccuaccucacgccgggggacagcagcuccggcuggaccgcgggcgccgccgccuacuacgugggguaccugcagccccgcaccuuccugcucaaguacaacgagaacggcaccaucacggacgcggucgacugcgcccuggacccccugagcgagaccaagugcacccucaaguccuucaccguggagaaggggaucuaccagacgagcaacuuccgggugcagcccaccgaguccaucguccgcuucccgaacaucaccaaccugugccccuucggcgagguguucaacgccacccgguucgccagcgucuacgccuggaaccgcaagcggaucuccaacugcguggcggacuacagcgugcuguacaacuccgccagcuucuccacguucaagugcuacggcgucagccccaccaagcucaacgaccugugcuucaccaacguguacgccgacuccuucgugauccgcggggacgagguccggcagaucgcccccggccagaccgggaagaucgccgacuacaacuacaagcugccggacgacuucacgggcugcgugaucgcguggaacagcaacaaccucgacuccaaggucgggggcaacuacaacuaccuguaccgccuguuccgcaagagcaaccucaagcccuucgagcgggacaucuccaccgagaucuaccaggccggcaacacccccugcaacgggguggagggcuucaacugcuacuucccccugcaguccuacggguuccagccgaccaacggcgugggguaccagcccuaccggguggucgugcugagcuucgagcuccugcacgcccccgccacggugugcggccccaagaaguccaccaaccuggucaagaacaagugcgugaacuucaacuucaacggccucaccgggaccggcgugcugaccgagagcaacaagaaguuccugccguuccagcaguucgggcgcgacaucgccgacacgaccgacgcgguccgcgacccccagacccuggagauccucgacaucacccccugcagcuucggcgggguguccgugaucacgccgggcaccaacaccagcaaccaggucgccgugcuguaccagggcgugaacugcaccgagguccccguggccauccacgccgaccagcugacgcccaccuggcggguguacuccaccggcagcaacgucuuccagacccgcgccgggugccucaucggcgcggagcacgugaacaacuccuacgagugcgacauccccaucggggccggcaucugcgccagcuaccagacgcagaccaacuccccgcggcgcgcccggagcguggcgucccagagcaucaucgccuacaccaugucccugggcgccgagaacagcgucgccuacuccaacaacagcaucgccauccccaccaacuucacgaucuccgugaccaccgagauccugcccgugagcaugaccaagacgagcgucgacugcaccauguacaucugcggggacuccaccgagugcagcaaccuccugcugcaguacggcuccuucugcacccagcucaaccgcgcgcugacggggaucgccguggagcaggacaagaacacccaggagguguucgcccaggucaagcagaucuacaagacgcccccgaucaaggacuucggcggguucaacuucagccagauccugcccgaccccuccaagcccagcaagcgguccuucaucgaggaccuccuguucaacaaggugacccuggccgacgccggcuucaucaagcaguacggcgacugccucggggacaucgcggcccgcgaccugaucugcgcccagaaguucaacggccugaccgugcucccgccccugcugaccgacgagaugaucgcccaguacaccagcgcccuccuggcggggaccaucacguccggcuggaccuucggggccggcgccgcccugcagauccccuucgcgaugcagauggccuaccgguucaacggcaucggggucacccagaacgugcucuacgagaaccagaagcugaucgccaaccaguucaacagcgccaucggcaagauccaggacucccugagcuccaccgccagcgcgcucgggaagcugcaggacguggucaaccagaacgcccaggcccugaacacgcucgugaagcagcuguccagcaacuucggcgccaucuccagcgugcugaacgacauccucucccgccuggacccgcccgaggccgaggugcagaucgaccggcugaucaccgggcgccuccagagccugcagaccuacgugacccagcagcugauccgggcggccgagauccgcgccagcgccaaccucgccgcgaccaagauguccgagugcguccugggccagagcaagcggguggacuucugcggcaagggguaccaccugauguccuucccccagagcgccccgcacggcguggucuuccuccacgugacguacguccccgcccaggagaagaacuucaccaccgcccccgcgaucugccacgacgggaaggcccacuucccccgcgagggcguguucguguccaacgggacccacugguucgucacgcagcggaacuucuacgagccgcagaucaucaccaccgacaacaccuucgugagcggcaacugcgacguggucaucggcaucgugaacaacacgguguacgacccccugcagcccgagcuggacuccuucaaggaggagcucgacaaguacuucaagaaccacaccagccccgacgucgaccugggggacaucuccggcaucaacgccagcguggugaacauccagaaggagaucgaccgccugaacgaggucgccaagaaccucaacgagucccugaucgaccugcaggagcucgggaaguacgagcaguacaucaaguggccgugguacaucuggcugggcuucaucgccggccugaucgcgaucgugauggugaccaucaugcucugcugcaugaccagcugcugcuccugccugaaggggugcugcagcugcggcuccugcugcaaguucgacgaggacgacagcgagcccguccugaagggggugaagcuccacuacacgugaggacuaguuauaagacugacuagcccgaugggccucccaacgggcccuccuccccuccuugcaccgagauuaauagaucucaaaggcucuuuucagagccaccaaaaaaaaaaaaaaaaaaaaaaaaaaaaaaaaaaaaaaaaaaaaaaaaaaaaaaaaaaaaaaaaaaaaaaaaaaaaaaaaaaaaaaaaaaaaaaaaaaaaa

SEQ ID NO: 24402 - RNA, 4041 nt, Artificial Sequence
  SARS-CoV-2/Wuhan/WIV05/2019__EPI_ISL_402128 spike protein mRNA gc (1-1273)(K986P_V987P_N501Y_D614G)
aggagaaagcuuaccauguucguguuccugguccuccugccccuggugagcucccagugcgugaaccucaccacccgcacgcagcugccgcccgccuacaccaacagcuucacccggggcgucuacuaccccgacaagguguuccgcuccagcgugcugcacuccacccaggaccucuuccugcccuucuucagcaacgucacgugguuccacgccauccacguguccgggaccaacggcaccaagcgguucgacaacccggugcugcccuucaacgacggggucuacuucgcgagcaccgagaaguccaacaucauccgcggcuggaucuucgggacgacccucgacagcaagacccagucccugcugaucgugaacaacgccaccaacguggucaucaaggugugcgaguuccaguucugcaacgaccccuuccucggcguguacuaccacaagaacaacaagagcuggauggaguccgaguuccgggucuacagcuccgccaacaacugcacguucgaguacgugagccagcccuuccugauggaccuggagggcaagcaggggaacuucaagaaccuccgcgaguucguguucaagaacaucgacggcuacuucaagaucuacuccaagcacaccccgaucaaccugguccgggaccugccccagggguucagcgcccucgagccccugguggaccugcccaucggcaucaacaucacccgcuuccagacccuccuggcccugcaccgguccuaccucacgccgggggacagcagcuccggcuggaccgcgggcgccgccgccuacuacgugggguaccugcagccccgcaccuuccugcucaaguacaacgagaacggcaccaucacggacgcggucgacugcgcccuggacccccugagcgagaccaagugcacccucaaguccuucaccguggagaaggggaucuaccagacgagcaacuuccgggugcagcccaccgaguccaucguccgcuucccgaacaucaccaaccugugccccuucggcgagguguucaacgccacccgguucgccagcgucuacgccuggaaccgcaagcggaucuccaacugcguggcggacuacagcgugcuguacaacuccgccagcuucuccacguucaagugcuacggcgucagccccaccaagcucaacgaccugugcuucaccaacguguacgccgacuccuucgugauccgcggggacgagguccggcagaucgcccccggccagaccgggaagaucgccgacuacaacuacaagcugccggacgacuucacgggcugcgugaucgcguggaacagcaacaaccucgacuccaaggucgggggcaacuacaacuaccuguaccgccuguuccgcaagagcaaccucaagcccuucgagcgggacaucuccaccgagaucuaccaggccggcagcacccccugcaacgggguggagggcuucaacugcuacuucccccugcaguccuacggguuccagccgaccuacggcgugggguaccagcccuaccggguggucgugcugagcuucgagcuccugcacgcccccgccacggugugcggccccaagaaguccaccaaccuggucaagaacaagugcgugaacuucaacuucaacggccucaccgggaccggcgugcugaccgagagcaacaagaaguuccugccguuccagcaguucgggcgcgacaucgccgacacgaccgacgcgguccgcgacccccagacccuggagauccucgacaucacccccugcagcuucggcgggguguccgugaucacgccgggcaccaacaccagcaaccaggucgccgugcuguaccagggcgugaacugcaccgagguccccguggccauccacgccgaccagcugacgcccaccuggcggguguacuccaccggcagcaacgucuuccagacccgcgccgggugccucaucggcgcggagcacgugaacaacuccuacgagugcgacauccccaucggggccggcaucugcgccagcuaccagacgcagaccaacuccccgcggcgcgcccggagcguggcgucccagagcaucaucgccuacaccaugucccugggcgccgagaacagcgucgccuacuccaacaacagcaucgccauccccaccaacuucacgaucuccgugaccaccgagauccugcccgugagcaugaccaagacgagcgucgacugcaccauguacaucugcggggacuccaccgagugcagcaaccuccugcugcaguacggcuccuucugcacccagcucaaccgcgcgcugacggggaucgccguggagcaggacaagaacacccaggagguguucgcccaggucaagcagaucuacaagacgcccccgaucaaggacuucggcggguucaacuucagccagauccugcccgaccccuccaagcccagcaagcgguccuucaucgaggaccuccuguucaacaaggugacccuggccgacgccggcuucaucaagcaguacggcgacugccucggggacaucgcggcccgcgaccugaucugcgcccagaaguucaacggccugaccgugcucccgccccugcugaccgacgagaugaucgcccaguacaccagcgcccuccuggcggggaccaucacguccggcuggaccuucggggccggcgccgcccugcagauccccuucgcgaugcagauggccuaccgguucaacggcaucggggucacccagaacgugcucuacgagaaccagaagcugaucgccaaccaguucaacagcgccaucggcaagauccaggacucccugagcuccaccgccagcgcgcucgggaagcugcaggacguggucaaccagaacgcccaggcccugaacacgcucgugaagcagcuguccagcaacuucggcgccaucuccagcgugcugaacgacauccucucccgccuggacccgcccgaggccgaggugcagaucgaccggcugaucaccgggcgccuccagagccugcagaccuacgugacccagcagcugauccgggcggccgagauccgcgccagcgccaaccucgccgcgaccaagauguccgagugcguccugggccagagcaagcggguggacuucugcggcaagggguaccaccugauguccuucccccagagcgccccgcacggcguggucuuccuccacgugacguacguccccgcccaggagaagaacuucaccaccgcccccgcgaucugccacgacgggaaggcccacuucccccgcgagggcguguucguguccaacgggacccacugguucgucacgcagcggaacuucuacgagccgcagaucaucaccaccgacaacaccuucgugagcggcaacugcgacguggucaucggcaucgugaacaacacgguguacgacccccugcagcccgagcuggacuccuucaaggaggagcucgacaaguacuucaagaaccacaccagccccgacgucgaccugggggacaucuccggcaucaacgccagcguggugaacauccagaaggagaucgaccgccugaacgaggucgccaagaaccucaacgagucccugaucgaccugcaggagcucgggaaguacgagcaguacaucaaguggccgugguacaucuggcugggcuucaucgccggccugaucgcgaucgugauggugaccaucaugcucugcugcaugaccagcugcugcuccugccugaaggggugcugcagcugcggcuccugcugcaaguucgacgaggacgacagcgagcccguccugaagggggugaagcuccacuacacgugaggacuaguuauaagacugacuagcccgaugggccucccaacgggcccuccuccccuccuugcaccgagauuaauagaucucaaaggcucuuuucagagccaccaaaaaaaaaaaaaaaaaaaaaaaaaaaaaaaaaaaaaaaaaaaaaaaaaaaaaaaaaaaaaaaaaaaaaaaaaaaaaaaaaaaaaaaaaaaaaaaaaaaaa

SEQ ID NO: 24403 - RNA, 4035 nt, Artificial Sequence
  SARS-CoV-2/Wuhan/WIV05/2019__EPI_ISL_402128 spike protein mRNA gc (1-1273)(K986P_V987P_H69del_V70del_D614G)
aggagaaagcuuaccauguucguguuccugguccuccugccccuggugagcucccagugcgugaaccucaccacccgcacgcagcugccgcccgccuacaccaacagcuucacccggggcgucuacuaccccgacaagguguuccgcuccagcgugcugcacuccacccaggaccucuuccugcccuucuucagcaacgucacgugguuccacgccaucuccgggaccaacggcaccaagcgguucgacaacccggugcugcccuucaacgacggggucuacuucgcgagcaccgagaaguccaacaucauccgcggcuggaucuucgggacgacccucgacagcaagacccagucccugcugaucgugaacaacgccaccaacguggucaucaaggugugcgaguuccaguucugcaacgaccccuuccucggcguguacuaccacaagaacaacaagagcuggauggaguccgaguuccgggucuacagcuccgccaacaacugcacguucgaguacgugagccagcccuuccugauggaccuggagggcaagcaggggaacuucaagaaccuccgcgaguucguguucaagaacaucgacggcuacuucaagaucuacuccaagcacaccccgaucaaccugguccgggaccugccccagggguucagcgcccucgagccccugguggaccugcccaucggcaucaacaucacccgcuuccagacccuccuggcccugcaccgguccuaccucacgccgggggacagcagcuccggcuggaccgcgggcgccgccgccuacuacgugggguaccugcagccccgcaccuuccugcucaaguacaacgagaacggcaccaucacggacgcggucgacugcgcccuggacccccugagcgagaccaagugcacccucaaguccuucaccguggagaaggggaucuaccagacgagcaacuuccgggugcagcccaccgaguccaucguccgcuucccgaacaucaccaaccugugccccuucggcgagguguucaacgccacccgguucgccagcgucuacgccuggaaccgcaagcggaucuccaacugcguggcggacuacagcgugcuguacaacuccgccagcuucuccacguucaagugcuacggcgucagccccaccaagcucaacgaccugugcuucaccaacguguacgccgacuccuucgugauccgcggggacgagguccggcagaucgcccccggccagaccgggaagaucgccgacuacaacuacaagcugccggacgacuucacgggcugcgugaucgcguggaacagcaacaaccucgacuccaaggucgggggcaacuacaacuaccuguaccgccuguuccgcaagagcaaccucaagcccuucgagcgggacaucuccaccgagaucuaccaggccggcagcacccccugcaacgggguggagggcuucaacugcuacuucccccugcaguccuacggguuccagccgaccaacggcgugggguaccagcccuaccggguggucgugcugagcuucgagcuccugcacgcccccgccacggugugcggccccaagaaguccaccaaccuggucaagaacaagugcgugaacuucaacuucaacggccucaccgggaccggcgugcugaccgagagcaacaagaaguuccugccguuccagcaguucgggcgcgacaucgccgacacgaccgacgcgguccgcgacccccagacccuggagauccucgacaucacccccugcagcuucggcgggguguccgugaucacgccgggcaccaacaccagcaaccaggucgccgugcuguaccagggcgugaacugcaccgagguccccguggccauccacgccgaccagcugacgcccaccuggcggguguacuccaccggcagcaacgucuuccagacccgcgccgggugccucaucggcgcggagcacgugaacaacuccuacgagugcgacauccccaucggggccggcaucugcgccagcuaccagacgcagaccaacuccccgcggcgcgcccggagcguggcgucccagagcaucaucgccuacaccaugucccugggcgccgagaacagcgucgccuacuccaacaacagcaucgccauccccaccaacuucacgaucuccgugaccaccgagauccugcccgugagcaugaccaagacgagcgucgacugcaccauguacaucugcggggacuccaccgagugcagcaaccuccugcugcaguacggcuccuucugcacccagcucaaccgcgcgcugacggggaucgccguggagcaggacaagaacacccaggagguguucgcccaggucaagcagaucuacaagacgcccccgaucaaggacuucggcggguucaacuucagccagauccugcccgaccccuccaagcccagcaagcgguccuucaucgaggaccuccuguucaacaaggugacccuggccgacgccggcuucaucaagcaguacggcgacugccucggggacaucgcggcccgcgaccugaucugcgcccagaaguucaacggccugaccgugcucccgccccugcugaccgacgagaugaucgcccaguacaccagcgcccuccuggcggggaccaucacguccggcuggaccuucggggccggcgccgcccugcagauccccuucgcgaugcagauggccuaccgguucaacggcaucggggucacccagaacgugcucuacgagaaccagaagcugaucgccaaccaguucaacagcgccaucggcaagauccaggacucccugagcuccaccgccagcgcgcucgggaagcugcaggacguggucaaccagaacgcccaggcccugaacacgcucgugaagcagcuguccagcaacuucggcgccaucuccagcgugcugaacgacauccucucccgccuggacccgcccgaggccgaggugcagaucgaccggcugaucaccgggcgccuccagagccugcagaccuacgugacccagcagcugauccgggcggccgagauccgcgccagcgccaaccucgccgcgaccaagauguccgagugcguccugggccagagcaagcggguggacuucugcggcaagggguaccaccugauguccuucccccagagcgccccgcacggcguggucuuccuccacgugacguacguccccgcccaggagaagaacuucaccaccgcccccgcgaucugccacgacgggaaggcccacuucccccgcgagggcguguucguguccaacgggacccacugguucgucacgcagcggaacuucuacgagccgcagaucaucaccaccgacaacaccuucgugagcggcaacugcgacguggucaucggcaucgugaacaacacgguguacgacccccugcagcccgagcuggacuccuucaaggaggagcucgacaaguacuucaagaaccacaccagccccgacgucgaccugggggacaucuccggcaucaacgccagcguggugaacauccagaaggagaucgaccgccugaacgaggucgccaagaaccucaacgagucccugaucgaccugcaggagcucgggaaguacgagcaguacaucaaguggccgugguacaucuggcugggcuucaucgccggccugaucgcgaucgugauggugaccaucaugcucugcugcaugaccagcugcugcuccugccugaaggggugcugcagcugcggcuccugcugcaaguucgacgaggacgacagcgagcccguccugaagggggugaagcuccacuacacgugaggacuaguuauaagacugacuagcccgaugggccucccaacgggcccuccuccccuccuugcaccgagauuaauagaucucaaaggcucuuuucagagccaccaaaaaaaaaaaaaaaaaaaaaaaaaaaaaaaaaaaaaaaaaaaaaaaaaaaaaaaaaaaaaaaaaaaaaaaaaaaaaaaaaaaaaaaaaaaaaaaaaaaaa

SEQ ID NO: 24404 - RNA, 4041 nt, Artificial Sequence
  SARS-CoV-2/Wuhan/WIV05/2019__EPI_ISL_402128 spike protein mRNA gc (1-1273)(K986P_V987P_Y453F_D614G)
aggagaaagcuuaccauguucguguuccugguccuccugccccuggugagcucccagugcgugaaccucaccacccgcacgcagcugccgcccgccuacaccaacagcuucacccggggcgucuacuaccccgacaagguguuccgcuccagcgugcugcacuccacccaggaccucuuccugcccuucuucagcaacgucacgugguuccacgccauccacguguccgggaccaacggcaccaagcgguucgacaacccggugcugcccuucaacgacggggucuacuucgcgagcaccgagaaguccaacaucauccgcggcuggaucuucgggacgacccucgacagcaagacccagucccugcugaucgugaacaacgccaccaacguggucaucaaggugugcgaguuccaguucugcaacgaccccuuccucggcguguacuaccacaagaacaacaagagcuggauggaguccgaguuccgggucuacagcuccgccaacaacugcacguucgaguacgugagccagcccuuccugauggaccuggagggcaagcaggggaacuucaagaaccuccgcgaguucguguucaagaacaucgacggcuacuucaagaucuacuccaagcacaccccgaucaaccugguccgggaccugccccagggguucagcgcccucgagccccugguggaccugcccaucggcaucaacaucacccgcuuccagacccuccuggcccugcaccgguccuaccucacgccgggggacagcagcuccggcuggaccgcgggcgccgccgccuacuacgugggguaccugcagccccgcaccuuccugcucaaguacaacgagaacggcaccaucacggacgcggucgacugcgcccuggacccccugagcgagaccaagugcacccucaaguccuucaccguggagaaggggaucuaccagacgagcaacuuccgggugcagcccaccgaguccaucguccgcuucccgaacaucaccaaccugugccccuucggcgagguguucaacgccacccgguucgccagcgucuacgccuggaaccgcaagcggaucuccaacugcguggcggacuacagcgugcuguacaacuccgccagcuucuccacguucaagugcuacggcgucagccccaccaagcucaacgaccugugcuucaccaacguguacgccgacuccuucgugauccgcggggacgagguccggcagaucgcccccggccagaccgggaagaucgccgacuacaacuacaagcugccggacgacuucacgggcugcgugaucgcguggaacagcaacaaccucgacuccaaggucgggggcaacuacaacuaccuguuccgccuguuccgcaagagcaaccucaagcccuucgagcgggacaucuccaccgagaucuaccaggccggcagcacccccugcaacgggguggagggcuucaacugcuacuucccccugcaguccuacggguuccagccgaccaacggcgugggguaccagcccuaccggguggucgugcugagcuucgagcuccugcacgcccccgccacggugugcggccccaagaaguccaccaaccuggucaagaacaagugcgugaacuucaacuucaacggccucaccgggaccggcgugcugaccgagagcaacaagaaguuccugccguuccagcaguucgggcgcgacaucgccgacacgaccgacgcgguccgcgacccccagacccuggagauccucgacaucacccccugcagcuucggcgggguguccgugaucacgccgggcaccaacaccagcaaccaggucgccgugcuguaccagggcgugaacugcaccgagguccccguggccauccacgccgaccagcugacgcccaccuggcggguguacuccaccggcagcaacgucuuccagacccgcgccgggugccucaucggcgcggagcacgugaacaacuccuacgagugcgacauccccaucggggccggcaucugcgccagcuaccagacgcagaccaacuccccgcggcgcgcccggagcguggcgucccagagcaucaucgccuacaccaugucccugggcgccgagaacagcgucgccuacuccaacaacagcaucgccauccccaccaacuucacgaucuccgugaccaccgagauccugcccgugagcaugaccaagacgagcgucgacugcaccauguacaucugcggggacuccaccgagugcagcaaccuccugcugcaguacggcuccuucugcacccagcucaaccgcgcgcugacggggaucgccguggagcaggacaagaacacccaggagguguucgcccaggucaagcagaucuacaagacgcccccgaucaaggacuucggcggguucaacuucagccagauccugcccgaccccuccaagcccagcaagcgguccuucaucgaggaccuccuguucaacaaggugacccuggccgacgccggcuucaucaagcaguacggcgacugccucggggacaucgcggcccgcgaccugaucugcgcccagaaguucaacggccugaccgugcucccgccccugcugaccgacgagaugaucgcccaguacaccagcgcccuccuggcggggaccaucacguccggcuggaccuucggggccggcgccgcccugcagauccccuucgcgaugcagauggccuaccgguucaacggcaucggggucacccagaacgugcucuacgagaaccagaagcugaucgccaaccaguucaacagcgccaucggcaagauccaggacucccugagcuccaccgccagcgcgcucgggaagcugcaggacguggucaaccagaacgcccaggcccugaacacgcucgugaagcagcuguccagcaacuucggcgccaucuccagcgugcugaacgacauccucucccgccuggacccgcccgaggccgaggugcagaucgaccggcugaucaccgggcgccuccagagccugcagaccuacgugacccagcagcugauccgggcggccgagauccgcgccagcgccaaccucgccgcgaccaagauguccgagugcguccugggccagagcaagcggguggacuucugcggcaagggguaccaccugauguccuucccccagagcgccccgcacggcguggucuuccuccacgugacguacguccccgcccaggagaagaacuucaccaccgcccccgcgaucugccacgacgggaaggcccacuucccccgcgagggcguguucguguccaacgggacccacugguucgucacgcagcggaacuucuacgagccgcagaucaucaccaccgacaacaccuucgugagcggcaacugcgacguggucaucggcaucgugaacaacacgguguacgacccccugcagcccgagcuggacuccuucaaggaggagcucgacaaguacuucaagaaccacaccagccccgacgucgaccugggggacaucuccggcaucaacgccagcguggugaacauccagaaggagaucgaccgccugaacgaggucgccaagaaccucaacgagucccugaucgaccugcaggagcucgggaaguacgagcaguacaucaaguggccgugguacaucuggcugggcuucaucgccggccugaucgcgaucgugauggugaccaucaugcucugcugcaugaccagcugcugcuccugccugaaggggugcugcagcugcggcuccugcugcaaguucgacgaggacgacagcgagcccguccugaagggggugaagcuccacuacacgugaggacuaguuauaagacugacuagcccgaugggccucccaacgggcccuccuccccuccuugcaccgagauuaauagaucucaaaggcucuuuucagagccaccaaaaaaaaaaaaaaaaaaaaaaaaaaaaaaaaaaaaaaaaaaaaaaaaaaaaaaaaaaaaaaaaaaaaaaaaaaaaaaaaaaaaaaaaaaaaaaaaaaaaa

SEQ ID NO: 24405 - RNA, 4041 nt, Artificial Sequence
  SARS-CoV-2/Wuhan/WIV05/2019__EPI_ISL_402128 spike protein mRNA gc (1-1273)(K986P_V987P_D614G_I692V)
aggagaaagcuuaccauguucguguuccugguccuccugccccuggugagcucccagugcgugaaccucaccacccgcacgcagcugccgcccgccuacaccaacagcuucacccggggcgucuacuaccccgacaagguguuccgcuccagcgugcugcacuccacccaggaccucuuccugcccuucuucagcaacgucacgugguuccacgccauccacguguccgggaccaacggcaccaagcgguucgacaacccggugcugcccuucaacgacggggucuacuucgcgagcaccgagaaguccaacaucauccgcggcuggaucuucgggacgacccucgacagcaagacccagucccugcugaucgugaacaacgccaccaacguggucaucaaggugugcgaguuccaguucugcaacgaccccuuccucggcguguacuaccacaagaacaacaagagcuggauggaguccgaguuccgggucuacagcuccgccaacaacugcacguucgaguacgugagccagcccuuccugauggaccuggagggcaagcaggggaacuucaagaaccuccgcgaguucguguucaagaacaucgacggcuacuucaagaucuacuccaagcacaccccgaucaaccugguccgggaccugccccagggguucagcgcccucgagccccugguggaccugcccaucggcaucaacaucacccgcuuccagacccuccuggcccugcaccgguccuaccucacgccgggggacagcagcuccggcuggaccgcgggcgccgccgccuacuacgugggguaccugcagccccgcaccuuccugcucaaguacaacgagaacggcaccaucacggacgcggucgacugcgcccuggacccccugagcgagaccaagugcacccucaaguccuucaccguggagaaggggaucuaccagacgagcaacuuccgggugcagcccaccgaguccaucguccgcuucccgaacaucaccaaccugugccccuucggcgagguguucaacgccacccgguucgccagcgucuacgccuggaaccgcaagcggaucuccaacugcguggcggacuacagcgugcuguacaacuccgccagcuucuccacguucaagugcuacggcgucagccccaccaagcucaacgaccugugcuucaccaacguguacgccgacuccuucgugauccgcggggacgagguccggcagaucgcccccggccagaccgggaagaucgccgacuacaacuacaagcugccggacgacuucacgggcugcgugaucgcguggaacagcaacaaccucgacuccaaggucgggggcaacuacaacuaccuguaccgccuguuccgcaagagcaaccucaagcccuucgagcgggacaucuccaccgagaucuaccaggccggcagcacccccugcaacgggguggagggcuucaacugcuacuucccccugcaguccuacggguuccagccgaccaacggcgugggguaccagcccuaccggguggucgugcugagcuucgagcuccugcacgcccccgccacggugugcggccccaagaaguccaccaaccuggucaagaacaagugcgugaacuucaacuucaacggccucaccgggaccggcgugcugaccgagagcaacaagaaguuccugccguuccagcaguucgggcgcgacaucgccgacacgaccgacgcgguccgcgacccccagacccuggagauccucgacaucacccccugcagcuucggcgggguguccgugaucacgccgggcaccaacaccagcaaccaggucgccgugcuguaccagggcgugaacugcaccgagguccccguggccauccacgccgaccagcugacgcccaccuggcggguguacuccaccggcagcaacgucuuccagacccgcgccgggugccucaucggcgcggagcacgugaacaacuccuacgagugcgacauccccaucggggccggcaucugcgccagcuaccagacgcagaccaacuccccgcggcgcgcccggagcguggcgucccagagcgucaucgccuacaccaugucccugggcgccgagaacagcgucgccuacuccaacaacagcaucgccauccccaccaacuucacgaucuccgugaccaccgagauccugcccgugagcaugaccaagacgagcgucgacugcaccauguacaucugcggggacuccaccgagugcagcaaccuccugcugcaguacggcuccuucugcacccagcucaaccgcgcgcugacggggaucgccguggagcaggacaagaacacccaggagguguucgcccaggucaagcagaucuacaagacgcccccgaucaaggacuucggcggguucaacuucagccagauccugcccgaccccuccaagcccagcaagcgguccuucaucgaggaccuccuguucaacaaggugacccuggccgacgccggcuucaucaagcaguacggcgacugccucggggacaucgcggcccgcgaccugaucugcgcccagaaguucaacggccugaccgugcucccgccccugcugaccgacgagaugaucgcccaguacaccagcgcccuccuggcggggaccaucacguccggcuggaccuucggggccggcgccgcccugcagauccccuucgcgaugcagauggccuaccgguucaacggcaucggggucacccagaacgugcucuacgagaaccagaagcugaucgccaaccaguucaacagcgccaucggcaagauccaggacucccugagcuccaccgccagcgcgcucgggaagcugcaggacguggucaaccagaacgcccaggcccugaacacgcucgugaagcagcuguccagcaacuucggcgccaucuccagcgugcugaacgacauccucucccgccuggacccgcccgaggccgaggugcagaucgaccggcugaucaccgggcgccuccagagccugcagaccuacgugacccagcagcugauccgggcggccgagauccgcgccagcgccaaccucgccgcgaccaagauguccgagugcguccugggccagagcaagcggguggacuucugcggcaagggguaccaccugauguccuucccccagagcgccccgcacggcguggucuuccuccacgugacguacguccccgcccaggagaagaacuucaccaccgcccccgcgaucugccacgacgggaaggcccacuucccccgcgagggcguguucguguccaacgggacccacugguucgucacgcagcggaacuucuacgagccgcagaucaucaccaccgacaacaccuucgugagcggcaacugcgacguggucaucggcaucgugaacaacacgguguacgacccccugcagcccgagcuggacuccuucaaggaggagcucgacaaguacuucaagaaccacaccagccccgacgucgaccugggggacaucuccggcaucaacgccagcguggugaacauccagaaggagaucgaccgccugaacgaggucgccaagaaccucaacgagucccugaucgaccugcaggagcucgggaaguacgagcaguacaucaaguggccgugguacaucuggcugggcuucaucgccggccugaucgcgaucgugauggugaccaucaugcucugcugcaugaccagcugcugcuccugccugaaggggugcugcagcugcggcuccugcugcaaguucgacgaggacgacagcgagcccguccugaagggggugaagcuccacuacacgugaggacuaguuauaagacugacuagcccgaugggccucccaacgggcccuccuccccuccuugcaccgagauuaauagaucucaaaggcucuuuucagagccaccaaaaaaaaaaaaaaaaaaaaaaaaaaaaaaaaaaaaaaaaaaaaaaaaaaaaaaaaaaaaaaaaaaaaaaaaaaaaaaaaaaaaaaaaaaaaaaaaaaaaa

SEQ ID NO: 24406 - RNA, 4041 nt, Artificial Sequence
  SARS-CoV-2/Wuhan/WIV05/2019__EPI_ISL_402128 spike protein mRNA gc (1-1273)(K986P_V987P_D614G_M1229I)
aggagaaagcuuaccauguucguguuccugguccuccugccccuggugagcucccagugcgugaaccucaccacccgcacgcagcugccgcccgccuacaccaacagcuucacccggggcgucuacuaccccgacaagguguuccgcuccagcgugcugcacuccacccaggaccucuuccugcccuucuucagcaacgucacgugguuccacgccauccacguguccgggaccaacggcaccaagcgguucgacaacccggugcugcccuucaacgacggggucuacuucgcgagcaccgagaaguccaacaucauccgcggcuggaucuucgggacgacccucgacagcaagacccagucccugcugaucgugaacaacgccaccaacguggucaucaaggugugcgaguuccaguucugcaacgaccccuuccucggcguguacuaccacaagaacaacaagagcuggauggaguccgaguuccgggucuacagcuccgccaacaacugcacguucgaguacgugagccagcccuuccugauggaccuggagggcaagcaggggaacuucaagaaccuccgcgaguucguguucaagaacaucgacggcuacuucaagaucuacuccaagcacaccccgaucaaccugguccgggaccugccccagggguucagcgcccucgagccccugguggaccugcccaucggcaucaacaucacccgcuuccagacccuccuggcccugcaccgguccuaccucacgccgggggacagcagcuccggcuggaccgcgggcgccgccgccuacuacgugggguaccugcagccccgcaccuuccugcucaaguacaacgagaacggcaccaucacggacgcggucgacugcgcccuggacccccugagcgagaccaagugcacccucaaguccuucaccguggagaaggggaucuaccagacgagcaacuuccgggugcagcccaccgaguccaucguccgcuucccgaacaucaccaaccugugccccuucggcgagguguucaacgccacccgguucgccagcgucuacgccuggaaccgcaagcggaucuccaacugcguggcggacuacagcgugcuguacaacuccgccagcuucuccacguucaagugcuacggcgucagccccaccaagcucaacgaccugugcuucaccaacguguacgccgacuccuucgugauccgcggggacgagguccggcagaucgcccccggccagaccgggaagaucgccgacuacaacuacaagcugccggacgacuucacgggcugcgugaucgcguggaacagcaacaaccucgacuccaaggucgggggcaacuacaacuaccuguaccgccuguuccgcaagagcaaccucaagcccuucgagcgggacaucuccaccgagaucuaccaggccggcagcacccccugcaacgggguggagggcuucaacugcuacuucccccugcaguccuacggguuccagccgaccaacggcgugggguaccagcccuaccggguggucgugcugagcuucgagcuccugcacgcccccgccacggugugcggccccaagaaguccaccaaccuggucaagaacaagugcgugaacuucaacuucaacggccucaccgggaccggcgugcugaccgagagcaacaagaaguuccugccguuccagcaguucgggcgcgacaucgccgacacgaccgacgcgguccgcgacccccagacccuggagauccucgacaucacccccugcagcuucggcgggguguccgugaucacgccgggcaccaacaccagcaaccaggucgccgugcuguaccagggcgugaacugcaccgagguccccguggccauccacgccgaccagcugacgcccaccuggcggguguacuccaccggcagcaacgucuuccagacccgcgccgggugccucaucggcgcggagcacgugaacaacuccuacgagugcgacauccccaucggggccggcaucugcgccagcuaccagacgcagaccaacuccccgcggcgcgcccggagcguggcgucccagagcaucaucgccuacaccaugucccugggcgccgagaacagcgucgccuacuccaacaacagcaucgccauccccaccaacuucacgaucuccgugaccaccgagauccugcccgugagcaugaccaagacgagcgucgacugcaccauguacaucugcggggacuccaccgagugcagcaaccuccugcugcaguacggcuccuucugcacccagcucaaccgcgcgcugacggggaucgccguggagcaggacaagaacacccaggagguguucgcccaggucaagcagaucuacaagacgcccccgaucaaggacuucggcggguucaacuucagccagauccugcccgaccccuccaagcccagcaagcgguccuucaucgaggaccuccuguucaacaaggugacccuggccgacgccggcuucaucaagcaguacggcgacugccucggggacaucgcggcccgcgaccugaucugcgcccagaaguucaacggccugaccgugcucccgccccugcugaccgacgagaugaucgcccaguacaccagcgcccuccuggcggggaccaucacguccggcuggaccuucggggccggcgccgcccugcagauccccuucgcgaugcagauggccuaccgguucaacggcaucggggucacccagaacgugcucuacgagaaccagaagcugaucgccaaccaguucaacagcgccaucggcaagauccaggacucccugagcuccaccgccagcgcgcucgggaagcugcaggacguggucaaccagaacgcccaggcccugaacacgcucgugaagcagcuguccagcaacuucggcgccaucuccagcgugcugaacgacauccucucccgccuggacccgcccgaggccgaggugcagaucgaccggcugaucaccgggcgccuccagagccugcagaccuacgugacccagcagcugauccgggcggccgagauccgcgccagcgccaaccucgccgcgaccaagauguccgagugcguccugggccagagcaagcggguggacuucugcggcaagggguaccaccugauguccuucccccagagcgccccgcacggcguggucuuccuccacgugacguacguccccgcccaggagaagaacuucaccaccgcccccgcgaucugccacgacgggaaggcccacuucccccgcgagggcguguucguguccaacgggacccacugguucgucacgcagcggaacuucuacgagccgcagaucaucaccaccgacaacaccuucgugagcggcaacugcgacguggucaucggcaucgugaacaacacgguguacgacccccugcagcccgagcuggacuccuucaaggaggagcucgacaaguacuucaagaaccacaccagccccgacgucgaccugggggacaucuccggcaucaacgccagcguggugaacauccagaaggagaucgaccgccugaacgaggucgccaagaaccucaacgagucccugaucgaccugcaggagcucgggaaguacgagcaguacaucaaguggccgugguacaucuggcugggcuucaucgccggccugaucgcgaucgugaucgugaccaucaugcucugcugcaugaccagcugcugcuccugccugaaggggugcugcagcugcggcuccugcugcaaguucgacgaggacgacagcgagcccguccugaagggggugaagcuccacuacacgugaggacuaguuauaagacugacuagcccgaugggccucccaacgggcccuccuccccuccuugcaccgagauuaauagaucucaaaggcucuuuucagagccaccaaaaaaaaaaaaaaaaaaaaaaaaaaaaaaaaaaaaaaaaaaaaaaaaaaaaaaaaaaaaaaaaaaaaaaaaaaaaaaaaaaaaaaaaaaaaaaaaaaaaa

SEQ ID NO: 24407 - RNA, 4035 nt, Artificial Sequence
  SARS-CoV-2/Wuhan/WIV05/2019__EPI_ISL_402128 spike protein mRNA gc (1-1273)(K986P_V987P_H69del_V70del_A222V_Y453F_S477N_D614G_I692V)
aggagaaagcuuaccauguucguguuccugguccuccugccccuggugagcucccagugcgugaaccucaccacccgcacgcagcugccgcccgccuacaccaacagcuucacccggggcgucuacuaccccgacaagguguuccgcuccagcgugcugcacuccacccaggaccucuuccugcccuucuucagcaacgucacgugguuccacgccaucuccgggaccaacggcaccaagcgguucgacaacccggugcugcccuucaacgacggggucuacuucgcgagcaccgagaaguccaacaucauccgcggcuggaucuucgggacgacccucgacagcaagacccagucccugcugaucgugaacaacgccaccaacguggucaucaaggugugcgaguuccaguucugcaacgaccccuuccucggcguguacuaccacaagaacaacaagagcuggauggaguccgaguuccgggucuacagcuccgccaacaacugcacguucgaguacgugagccagcccuuccugauggaccuggagggcaagcaggggaacuucaagaaccuccgcgaguucguguucaagaacaucgacggcuacuucaagaucuacuccaagcacaccccgaucaaccugguccgggaccugccccagggguucagcguccucgagccccugguggaccugcccaucggcaucaacaucacccgcuuccagacccuccuggcccugcaccgguccuaccucacgccgggggacagcagcuccggcuggaccgcgggcgccgccgccuacuacgugggguaccugcagccccgcaccuuccugcucaaguacaacgagaacggcaccaucacggacgcggucgacugcgcccuggacccccugagcgagaccaagugcacccucaaguccuucaccguggagaaggggaucuaccagacgagcaacuuccgggugcagcccaccgaguccaucguccgcuucccgaacaucaccaaccugugccccuucggcgagguguucaacgccacccgguucgccagcgucuacgccuggaaccgcaagcggaucuccaacugcguggcggacuacagcgugcuguacaacuccgccagcuucuccacguucaagugcuacggcgucagccccaccaagcucaacgaccugugcuucaccaacguguacgccgacuccuucgugauccgcggggacgagguccggcagaucgcccccggccagaccgggaagaucgccgacuacaacuacaagcugccggacgacuucacgggcugcgugaucgcguggaacagcaacaaccucgacuccaaggucgggggcaacuacaacuaccuguuccgccuguuccgcaagagcaaccucaagcccuucgagcgggacaucuccaccgagaucuaccaggccggcaacacccccugcaacgggguggagggcuucaacugcuacuucccccugcaguccuacggguuccagccgaccaacggcgugggguaccagcccuaccggguggucgugcugagcuucgagcuccugcacgcccccgccacggugugcggccccaagaaguccaccaaccuggucaagaacaagugcgugaacuucaacuucaacggccucaccgggaccggcgugcugaccgagagcaacaagaaguuccugccguuccagcaguucgggcgcgacaucgccgacacgaccgacgcgguccgcgacccccagacccuggagauccucgacaucacccccugcagcuucggcgggguguccgugaucacgccgggcaccaacaccagcaaccaggucgccgugcuguaccagggcgugaacugcaccgagguccccguggccauccacgccgaccagcugacgcccaccuggcggguguacuccaccggcagcaacgucuuccagacccgcgccgggugccucaucggcgcggagcacgugaacaacuccuacgagugcgacauccccaucggggccggcaucugcgccagcuaccagacgcagaccaacuccccgcggcgcgcccggagcguggcgucccagagcgucaucgccuacaccaugucccugggcgccgagaacagcgucgccuacuccaacaacagcaucgccauccccaccaacuucacgaucuccgugaccaccgagauccugcccgugagcaugaccaagacgagcgucgacugcaccauguacaucugcggggacuccaccgagugcagcaaccuccugcugcaguacggcuccuucugcacccagcucaaccgcgcgcugacggggaucgccguggagcaggacaagaacacccaggagguguucgcccaggucaagcagaucuacaagacgcccccgaucaaggacuucggcggguucaacuucagccagauccugcccgaccccuccaagcccagcaagcgguccuucaucgaggaccuccuguucaacaaggugacccuggccgacgccggcuucaucaagcaguacggcgacugccucggggacaucgcggcccgcgaccugaucugcgcccagaaguucaacggccugaccgugcucccgccccugcugaccgacgagaugaucgcccaguacaccagcgcccuccuggcggggaccaucacguccggcuggaccuucggggccggcgccgcccugcagauccccuucgcgaugcagauggccuaccgguucaacggcaucggggucacccagaacgugcucuacgagaaccagaagcugaucgccaaccaguucaacagcgccaucggcaagauccaggacucccugagcuccaccgccagcgcgcucgggaagcugcaggacguggucaaccagaacgcccaggcccugaacacgcucgugaagcagcuguccagcaacuucggcgccaucuccagcgugcugaacgacauccucucccgccuggacccgcccgaggccgaggugcagaucgaccggcugaucaccgggcgccuccagagccugcagaccuacgugacccagcagcugauccgggcggccgagauccgcgccagcgccaaccucgccgcgaccaagauguccgagugcguccugggccagagcaagcggguggacuucugcggcaagggguaccaccugauguccuucccccagagcgccccgcacggcguggucuuccuccacgugacguacguccccgcccaggagaagaacuucaccaccgcccccgcgaucugccacgacgggaaggcccacuucccccgcgagggcguguucguguccaacgggacccacugguucgucacgcagcggaacuucuacgagccgcagaucaucaccaccgacaacaccuucgugagcggcaacugcgacguggucaucggcaucgugaacaacacgguguacgacccccugcagcccgagcuggacuccuucaaggaggagcucgacaaguacuucaagaaccacaccagccccgacgucgaccugggggacaucuccggcaucaacgccagcguggugaacauccagaaggagaucgaccgccugaacgaggucgccaagaaccucaacgagucccugaucgaccugcaggagcucgggaaguacgagcaguacaucaaguggccgugguacaucuggcugggcuucaucgccggccugaucgcgaucgugauggugaccaucaugcucugcugcaugaccagcugcugcuccugccugaaggggugcugcagcugcggcuccugcugcaaguucgacgaggacgacagcgagcccguccugaagggggugaagcuccacuacacgugaggacuaguuauaagacugacuagcccgaugggccucccaacgggcccuccuccccuccuugcaccgagauuaauagaucucaaaggcucuuuucagagccaccaaaaaaaaaaaaaaaaaaaaaaaaaaaaaaaaaaaaaaaaaaaaaaaaaaaaaaaaaaaaaaaaaaaaaaaaaaaaaaaaaaaaaaaaaaaaaaaaaaaaa

SEQ ID NO: 24408 - RNA, 4035 nt, Artificial Sequence
  SARS-CoV-2/Wuhan/WIV05/2019__EPI_ISL_402128 spike protein mRNA gc (1-1273)(K986P_V987P_H69del_V70del_Y453F_D614G_I692V_M1229I)
aggagaaagcuuaccauguucguguuccugguccuccugccccuggugagcucccagugcgugaaccucaccacccgcacgcagcugccgcccgccuacaccaacagcuucacccggggcgucuacuaccccgacaagguguuccgcuccagcgugcugcacuccacccaggaccucuuccugcccuucuucagcaacgucacgugguuccacgccaucuccgggaccaacggcaccaagcgguucgacaacccggugcugcccuucaacgacggggucuacuucgcgagcaccgagaaguccaacaucauccgcggcuggaucuucgggacgacccucgacagcaagacccagucccugcugaucgugaacaacgccaccaacguggucaucaaggugugcgaguuccaguucugcaacgaccccuuccucggcguguacuaccacaagaacaacaagagcuggauggaguccgaguuccgggucuacagcuccgccaacaacugcacguucgaguacgugagccagcccuuccugauggaccuggagggcaagcaggggaacuucaagaaccuccgcgaguucguguucaagaacaucgacggcuacuucaagaucuacuccaagcacaccccgaucaaccugguccgggaccugccccagggguucagcgcccucgagccccugguggaccugcccaucggcaucaacaucacccgcuuccagacccuccuggcccugcaccgguccuaccucacgccgggggacagcagcuccggcuggaccgcgggcgccgccgccuacuacgugggguaccugcagccccgcaccuuccugcucaaguacaacgagaacggcaccaucacggacgcggucgacugcgcccuggacccccugagcgagaccaagugcacccucaaguccuucaccguggagaaggggaucuaccagacgagcaacuuccgggugcagcccaccgaguccaucguccgcuucccgaacaucaccaaccugugccccuucggcgagguguucaacgccacccgguucgccagcgucuacgccuggaaccgcaagcggaucuccaacugcguggcggacuacagcgugcuguacaacuccgccagcuucuccacguucaagugcuacggcgucagccccaccaagcucaacgaccugugcuucaccaacguguacgccgacuccuucgugauccgcggggacgagguccggcagaucgcccccggccagaccgggaagaucgccgacuacaacuacaagcugccggacgacuucacgggcugcgugaucgcguggaacagcaacaaccucgacuccaaggucgggggcaacuacaacuaccuguuccgccuguuccgcaagagcaaccucaagcccuucgagcgggacaucuccaccgagaucuaccaggccggcagcacccccugcaacgggguggagggcuucaacugcuacuucccccugcaguccuacggguuccagccgaccaacggcgugggguaccagcccuaccggguggucgugcugagcuucgagcuccugcacgcccccgccacggugugcggccccaagaaguccaccaaccuggucaagaacaagugcgugaacuucaacuucaacggccucaccgggaccggcgugcugaccgagagcaacaagaaguuccugccguuccagcaguucgggcgcgacaucgccgacacgaccgacgcgguccgcgacccccagacccuggagauccucgacaucacccccugcagcuucggcgggguguccgugaucacgccgggcaccaacaccagcaaccaggucgccgugcuguaccagggcgugaacugcaccgagguccccguggccauccacgccgaccagcugacgcccaccuggcggguguacuccaccggcagcaacgucuuccagacccgcgccgggugccucaucggcgcggagcacgugaacaacuccuacgagugcgacauccccaucggggccggcaucugcgccagcuaccagacgcagaccaacuccccgcggcgcgcccggagcguggcgucccagagcgugaucgccuacaccaugucccugggcgccgagaacagcgucgccuacuccaacaacagcaucgccauccccaccaacuucacgaucuccgugaccaccgagauccugcccgugagcaugaccaagacgagcgucgacugcaccauguacaucugcggggacuccaccgagugcagcaaccuccugcugcaguacggcuccuucugcacccagcucaaccgcgcgcugacggggaucgccguggagcaggacaagaacacccaggagguguucgcccaggucaagcagaucuacaagacgcccccgaucaaggacuucggcggguucaacuucagccagauccugcccgaccccuccaagcccagcaagcgguccuucaucgaggaccuccuguucaacaaggugacccuggccgacgccggcuucaucaagcaguacggcgacugccucggggacaucgcggcccgcgaccugaucugcgcccagaaguucaacggccugaccgugcucccgccccugcugaccgacgagaugaucgcccaguacaccagcgcccuccuggcggggaccaucacguccggcuggaccuucggggccggcgccgcccugcagauccccuucgcgaugcagauggccuaccgguucaacggcaucggggucacccagaacgugcucuacgagaaccagaagcugaucgccaaccaguucaacagcgccaucggcaagauccaggacucccugagcuccaccgccagcgcgcucgggaagcugcaggacguggucaaccagaacgcccaggcccugaacacgcucgugaagcagcuguccagcaacuucggcgccaucuccagcgugcugaacgacauccucucccgccuggacccgcccgaggccgaggugcagaucgaccggcugaucaccgggcgccuccagagccugcagaccuacgugacccagcagcugauccgggcggccgagauccgcgccagcgccaaccucgccgcgaccaagauguccgagugcguccugggccagagcaagcggguggacuucugcggcaagggguaccaccugauguccuucccccagagcgccccgcacggcguggucuuccuccacgugacguacguccccgcccaggagaagaacuucaccaccgcccccgcgaucugccacgacgggaaggcccacuucccccgcgagggcguguucguguccaacgggacccacugguucgucacgcagcggaacuucuacgagccgcagaucaucaccaccgacaacaccuucgugagcggcaacugcgacguggucaucggcaucgugaacaacacgguguacgacccccugcagcccgagcuggacuccuucaaggaggagcucgacaaguacuucaagaaccacaccagccccgacgucgaccugggggacaucuccggcaucaacgccagcguggugaacauccagaaggagaucgaccgccugaacgaggucgccaagaaccucaacgagucccugaucgaccugcaggagcucgggaaguacgagcaguacaucaaguggccgugguacaucuggcugggcuucaucgccggccugaucgcgaucgugaucgugaccaucaugcucugcugcaugaccagcugcugcuccugccugaaggggugcugcagcugcggcuccugcugcaaguucgacgaggacgacagcgagcccguccugaagggggugaagcuccacuacacgugaggacuaguuauaagacugacuagcccgaugggccucccaacgggcccuccuccccuccuugcaccgagauuaauagaucucaaaggcucuuuucagagccaccaaaaaaaaaaaaaaaaaaaaaaaaaaaaaaaaaaaaaaaaaaaaaaaaaaaaaaaaaaaaaaaaaaaaaaaaaaaaaaaaaaaaaaaaaaaaaaaaaaaaa

SEQ ID NO: 24409 - RNA, 4032 nt, Artificial Sequence
  SARS-CoV-2/Wuhan/WIV05/2019__EPI_ISL_402128 spike protein mRNA gc (1-1273)(K986P_V987P_K986P_V987P_H69del_V70del_Y144del_N501Y_A570 D_D614G_P681H_T716I_S982A_D1118H)
aggagaaagcuuaccauguucguguuccugguccuccugccccuggugagcucccagugcgugaaccucaccacccgcacgcagcugccgcccgccuacaccaacagcuucacccggggcgucuacuaccccgacaagguguuccgcuccagcgugcugcacuccacccaggaccucuuccugcccuucuucagcaacgucacgugguuccacgccaucuccgggaccaacggcaccaagcgguucgacaacccggugcugcccuucaacgacggggucuacuucgcgagcaccgagaaguccaacaucauccgcggcuggaucuucgggacgacccucgacagcaagacccagucccugcugaucgugaacaacgccaccaacguggucaucaaggugugcgaguuccaguucugcaacgaccccuuccucggcguguaccacaagaacaacaagagcuggauggaguccgaguuccgggucuacagcuccgccaacaacugcacguucgaguacgugagccagcccuuccugauggaccuggagggcaagcaggggaacuucaagaaccuccgcgaguucguguucaagaacaucgacggcuacuucaagaucuacuccaagcacaccccgaucaaccugguccgggaccugccccagggguucagcgcccucgagccccugguggaccugcccaucggcaucaacaucacccgcuuccagacccuccuggcccugcaccgguccuaccucacgccgggggacagcagcuccggcuggaccgcgggcgccgccgccuacuacgugggguaccugcagccccgcaccuuccugcucaaguacaacgagaacggcaccaucacggacgcggucgacugcgcccuggacccccugagcgagaccaagugcacccucaaguccuucaccguggagaaggggaucuaccagacgagcaacuuccgggugcagcccaccgaguccaucguccgcuucccgaacaucaccaaccugugccccuucggcgagguguucaacgccacccgguucgccagcgucuacgccuggaaccgcaagcggaucuccaacugcguggcggacuacagcgugcuguacaacuccgccagcuucuccacguucaagugcuacggcgucagccccaccaagcucaacgaccugugcuucaccaacguguacgccgacuccuucgugauccgcggggacgagguccggcagaucgcccccggccagaccgggaagaucgccgacuacaacuacaagcugccggacgacuucacgggcugcgugaucgcguggaacagcaacaaccucgacuccaaggucgggggcaacuacaacuaccuguaccgccuguuccgcaagagcaaccucaagcccuucgagcgggacaucuccaccgagaucuaccaggccggcagcacccccugcaacgggguggagggcuucaacugcuacuucccccugcaguccuacggguuccagccgaccuacggcgugggguaccagcccuaccggguggucgugcugagcuucgagcuccugcacgcccccgccacggugugcggccccaagaaguccaccaaccuggucaagaacaagugcgugaacuucaacuucaacggccucaccgggaccggcgugcugaccgagagcaacaagaaguuccugccguuccagcaguucgggcgcgacaucgacgacacgaccgacgcgguccgcgacccccagacccuggagauccucgacaucacccccugcagcuucggcgggguguccgugaucacgccgggcaccaacaccagcaaccaggucgccgugcuguaccagggcgugaacugcaccgagguccccguggccauccacgccgaccagcugacgcccaccuggcggguguacuccaccggcagcaacgucuuccagacccgcgccgggugccucaucggcgcggagcacgugaacaacuccuacgagugcgacauccccaucggggccggcaucugcgccagcuaccagacgcagaccaacucccaccggcgcgcccggagcguggcgucccagagcaucaucgccuacaccaugucccugggcgccgagaacagcgucgccuacuccaacaacagcaucgccauccccaucaacuucacgaucuccgugaccaccgagauccugcccgugagcaugaccaagacgagcgucgacugcaccauguacaucugcggggacuccaccgagugcagcaaccuccugcugcaguacggcuccuucugcacccagcucaaccgcgcgcugacggggaucgccguggagcaggacaagaacacccaggagguguucgcccaggucaagcagaucuacaagacgcccccgaucaaggacuucggcggguucaacuucagccagauccugcccgaccccuccaagcccagcaagcgguccuucaucgaggaccuccuguucaacaaggugacccuggccgacgccggcuucaucaagcaguacggcgacugccucggggacaucgcggcccgcgaccugaucugcgcccagaaguucaacggccugaccgugcucccgccccugcugaccgacgagaugaucgcccaguacaccagcgcccuccuggcggggaccaucacguccggcuggaccuucggggccggcgccgcccugcagauccccuucgcgaugcagauggccuaccgguucaacggcaucggggucacccagaacgugcucuacgagaaccagaagcugaucgccaaccaguucaacagcgccaucggcaagauccaggacucccugagcuccaccgccagcgcgcucgggaagcugcaggacguggucaaccagaacgcccaggcccugaacacgcucgugaagcagcuguccagcaacuucggcgccaucuccagcgugcugaacgacauccucgcccgccuggacccgcccgaggccgaggugcagaucgaccggcugaucaccgggcgccuccagagccugcagaccuacgugacccagcagcugauccgggcggccgagauccgcgccagcgccaaccucgccgcgaccaagauguccgagugcguccugggccagagcaagcggguggacuucugcggcaagggguaccaccugauguccuucccccagagcgccccgcacggcguggucuuccuccacgugacguacguccccgcccaggagaagaacuucaccaccgcccccgcgaucugccacgacgggaaggcccacuucccccgcgagggcguguucguguccaacgggacccacugguucgucacgcagcggaacuucuacgagccgcagaucaucaccacccacaacaccuucgugagcggcaacugcgacguggucaucggcaucgugaacaacacgguguacgacccccugcagcccgagcuggacuccuucaaggaggagcucgacaaguacuucaagaaccacaccagccccgacgucgaccugggggacaucuccggcaucaacgccagcguggugaacauccagaaggagaucgaccgccugaacgaggucgccaagaaccucaacgagucccugaucgaccugcaggagcucgggaaguacgagcaguacaucaaguggccgugguacaucuggcugggcuucaucgccggccugaucgcgaucgugauggugaccaucaugcucugcugcaugaccagcugcugcuccugccugaaggggugcugcagcugcggcuccugcugcaaguucgacgaggacgacagcgagcccguccugaagggggugaagcuccacuacacgugaggacuaguuauaagacugacuagcccgaugggccucccaacgggcccuccuccccuccuugcaccgagauuaauagaucucaaaggcucuuuucagagccaccaaaaaaaaaaaaaaaaaaaaaaaaaaaaaaaaaaaaaaaaaaaaaaaaaaaaaaaaaaaaaaaaaaaaaaaaaaaaaaaaaaaaaaaaaaaaaaaaaaaaa

SEQ ID NO: 24410 - RNA, 4041 nt, Artificial Sequence
  SARS-CoV-2/Wuhan/WIV05/2019__EPI_ISL_402128 spike protein mRNA gc (1-1273)(K986P_V987P_K986P_V987P_K417N_E484K_N501Y_D614G)
aggagaaagcuuaccauguucguguuccugguccuccugccccuggugagcucccagugcgugaaccucaccacccgcacgcagcugccgcccgccuacaccaacagcuucacccggggcgucuacuaccccgacaagguguuccgcuccagcgugcugcacuccacccaggaccucuuccugcccuucuucagcaacgucacgugguuccacgccauccacguguccgggaccaacggcaccaagcgguucgacaacccggugcugcccuucaacgacggggucuacuucgcgagcaccgagaaguccaacaucauccgcggcuggaucuucgggacgacccucgacagcaagacccagucccugcugaucgugaacaacgccaccaacguggucaucaaggugugcgaguuccaguucugcaacgaccccuuccucggcguguacuaccacaagaacaacaagagcuggauggaguccgaguuccgggucuacagcuccgccaacaacugcacguucgaguacgugagccagcccuuccugauggaccuggagggcaagcaggggaacuucaagaaccuccgcgaguucguguucaagaacaucgacggcuacuucaagaucuacuccaagcacaccccgaucaaccugguccgggaccugccccagggguucagcgcccucgagccccugguggaccugcccaucggcaucaacaucacccgcuuccagacccuccuggcccugcaccgguccuaccucacgccgggggacagcagcuccggcuggaccgcgggcgccgccgccuacuacgugggguaccugcagccccgcaccuuccugcucaaguacaacgagaacggcaccaucacggacgcggucgacugcgcccuggacccccugagcgagaccaagugcacccucaaguccuucaccguggagaaggggaucuaccagacgagcaacuuccgggugcagcccaccgaguccaucguccgcuucccgaacaucaccaaccugugccccuucggcgagguguucaacgccacccgguucgccagcgucuacgccuggaaccgcaagcggaucuccaacugcguggcggacuacagcgugcuguacaacuccgccagcuucuccacguucaagugcuacggcgucagccccaccaagcucaacgaccugugcuucaccaacguguacgccgacuccuucgugauccgcggggacgagguccggcagaucgcccccggccagaccgggaacaucgccgacuacaacuacaagcugccggacgacuucacgggcugcgugaucgcguggaacagcaacaaccucgacuccaaggucgggggcaacuacaacuaccuguaccgccuguuccgcaagagcaaccucaagcccuucgagcgggacaucuccaccgagaucuaccaggccggcagcacccccugcaacggggugaagggcuucaacugcuacuucccccugcaguccuacggguuccagccgaccuacggcgugggguaccagcccuaccggguggucgugcugagcuucgagcuccugcacgcccccgccacggugugcggccccaagaaguccaccaaccuggucaagaacaagugcgugaacuucaacuucaacggccucaccgggaccggcgugcugaccgagagcaacaagaaguuccugccguuccagcaguucgggcgcgacaucgccgacacgaccgacgcgguccgcgacccccagacccuggagauccucgacaucacccccugcagcuucggcgggguguccgugaucacgccgggcaccaacaccagcaaccaggucgccgugcuguaccagggcgugaacugcaccgagguccccguggccauccacgccgaccagcugacgcccaccuggcggguguacuccaccggcagcaacgucuuccagacccgcgccgggugccucaucggcgcggagcacgugaacaacuccuacgagugcgacauccccaucggggccggcaucugcgccagcuaccagacgcagaccaacuccccgcggcgcgcccggagcguggcgucccagagcaucaucgccuacaccaugucccugggcgccgagaacagcgucgccuacuccaacaacagcaucgccauccccaccaacuucacgaucuccgugaccaccgagauccugcccgugagcaugaccaagacgagcgucgacugcaccauguacaucugcggggacuccaccgagugcagcaaccuccugcugcaguacggcuccuucugcacccagcucaaccgcgcgcugacggggaucgccguggagcaggacaagaacacccaggagguguucgcccaggucaagcagaucuacaagacgcccccgaucaaggacuucggcggguucaacuucagccagauccugcccgaccccuccaagcccagcaagcgguccuucaucgaggaccuccuguucaacaaggugacccuggccgacgccggcuucaucaagcaguacggcgacugccucggggacaucgcggcccgcgaccugaucugcgcccagaaguucaacggccugaccgugcucccgccccugcugaccgacgagaugaucgcccaguacaccagcgcccuccuggcggggaccaucacguccggcuggaccuucggggccggcgccgcccugcagauccccuucgcgaugcagauggccuaccgguucaacggcaucggggucacccagaacgugcucuacgagaaccagaagcugaucgccaaccaguucaacagcgccaucggcaagauccaggacucccugagcuccaccgccagcgcgcucgggaagcugcaggacguggucaaccagaacgcccaggcccugaacacgcucgugaagcagcuguccagcaacuucggcgccaucuccagcgugcugaacgacauccucucccgccuggacccgcccgaggccgaggugcagaucgaccggcugaucaccgggcgccuccagagccugcagaccuacgugacccagcagcugauccgggcggccgagauccgcgccagcgccaaccucgccgcgaccaagauguccgagugcguccugggccagagcaagcggguggacuucugcggcaagggguaccaccugauguccuucccccagagcgccccgcacggcguggucuuccuccacgugacguacguccccgcccaggagaagaacuucaccaccgcccccgcgaucugccacgacgggaaggcccacuucccccgcgagggcguguucguguccaacgggacccacugguucgucacgcagcggaacuucuacgagccgcagaucaucaccaccgacaacaccuucgugagcggcaacugcgacguggucaucggcaucgugaacaacacgguguacgacccccugcagcccgagcuggacuccuucaaggaggagcucgacaaguacuucaagaaccacaccagccccgacgucgaccugggggacaucuccggcaucaacgccagcguggugaacauccagaaggagaucgaccgccugaacgaggucgccaagaaccucaacgagucccugaucgaccugcaggagcucgggaaguacgagcaguacaucaaguggccgugguacaucuggcugggcuucaucgccggccugaucgcgaucgugauggugaccaucaugcucugcugcaugaccagcugcugcuccugccugaaggggugcugcagcugcggcuccugcugcaaguucgacgaggacgacagcgagcccguccugaagggggugaagcuccacuacacgugaggacuaguuauaagacugacuagcccgaugggccucccaacgggcccuccuccccuccuugcaccgagauuaauagaucucaaaggcucuuuucagagccaccaaaaaaaaaaaaaaaaaaaaaaaaaaaaaaaaaaaaaaaaaaaaaaaaaaaaaaaaaaaaaaaaaaaaaaaaaaaaaaaaaaaaaaaaaaaaaaaaaaaaa

SEQ ID NO: 24411 - RNA, 4032 nt, Artificial Sequence
  SARS-CoV-2/Wuhan/WIV05/2019__EPI_ISL_402128 spike protein mRNA gc (1-1273)(K986P_V987P_K986P_V987P_L18F_D80A_D215G_L242del_A243del_ L244del_R246I_K417N_E484K_N501Y_D614G_A701V)
aggagaaagcuuaccauguucguguuccugguccuccugccccuggugagcucccagugcgugaacuucaccacccgcacgcagcugccgcccgccuacaccaacagcuucacccggggcgucuacuaccccgacaagguguuccgcuccagcgugcugcacuccacccaggaccucuuccugcccuucuucagcaacgucacgugguuccacgccauccacguguccgggaccaacggcaccaagcgguucgccaacccggugcugcccuucaacgacggggucuacuucgcgagcaccgagaaguccaacaucauccgcggcuggaucuucgggacgacccucgacagcaagacccagucccugcugaucgugaacaacgccaccaacguggucaucaaggugugcgaguuccaguucugcaacgaccccuuccucggcguguacuaccacaagaacaacaagagcuggauggaguccgaguuccgggucuacagcuccgccaacaacugcacguucgaguacgugagccagcccuuccugauggaccuggagggcaagcaggggaacuucaagaaccuccgcgaguucguguucaagaacaucgacggcuacuucaagaucuacuccaagcacaccccgaucaaccugguccggggccugccccagggguucagcgcccucgagccccugguggaccugcccaucggcaucaacaucacccgcuuccagacccuccacaucuccuaccucacgccgggggacagcagcuccggcuggaccgcgggcgccgccgccuacuacgugggguaccugcagccccgcaccuuccugcucaaguacaacgagaacggcaccaucacggacgcggucgacugcgcccuggacccccugagcgagaccaagugcacccucaaguccuucaccguggagaaggggaucuaccagacgagcaacuuccgggugcagcccaccgaguccaucguccgcuucccgaacaucaccaaccugugccccuucggcgagguguucaacgccacccgguucgccagcgucuacgccuggaaccgcaagcggaucuccaacugcguggcggacuacagcgugcuguacaacuccgccagcuucuccacguucaagugcuacggcgucagccccaccaagcucaacgaccugugcuucaccaacguguacgccgacuccuucgugauccgcggggacgagguccggcagaucgcccccggccagaccgggaacaucgccgacuacaacuacaagcugccggacgacuucacgggcugcgugaucgcguggaacagcaacaaccucgacuccaaggucgggggcaacuacaacuaccuguaccgccuguuccgcaagagcaaccucaagcccuucgagcgggacaucuccaccgagaucuaccaggccggcagcacccccugcaacggggugaagggcuucaacugcuacuucccccugcaguccuacggguuccagccgaccuacggcgugggguaccagcccuaccggguggucgugcugagcuucgagcuccugcacgcccccgccacggugugcggccccaagaaguccaccaaccuggucaagaacaagugcgugaacuucaacuucaacggccucaccgggaccggcgugcugaccgagagcaacaagaaguuccugccguuccagcaguucgggcgcgacaucgccgacacgaccgacgcgguccgcgacccccagacccuggagauccucgacaucacccccugcagcuucggcgggguguccgugaucacgccgggcaccaacaccagcaaccaggucgccgugcuguaccagggcgugaacugcaccgagguccccguggccauccacgccgaccagcugacgcccaccuggcggguguacuccaccggcagcaacgucuuccagacccgcgccgggugccucaucggcgcggagcacgugaacaacuccuacgagugcgacauccccaucggggccggcaucugcgccagcuaccagacgcagaccaacuccccgcggcgcgcccggagcguggcgucccagagcaucaucgccuacaccaugucccugggcguggagaacagcgucgccuacuccaacaacagcaucgccauccccaccaacuucacgaucuccgugaccaccgagauccugcccgugagcaugaccaagacgagcgucgacugcaccauguacaucugcggggacuccaccgagugcagcaaccuccugcugcaguacggcuccuucugcacccagcucaaccgcgcgcugacggggaucgccguggagcaggacaagaacacccaggagguguucgcccaggucaagcagaucuacaagacgcccccgaucaaggacuucggcggguucaacuucagccagauccugcccgaccccuccaagcccagcaagcgguccuucaucgaggaccuccuguucaacaaggugacccuggccgacgccggcuucaucaagcaguacggcgacugccucggggacaucgcggcccgcgaccugaucugcgcccagaaguucaacggccugaccgugcucccgccccugcugaccgacgagaugaucgcccaguacaccagcgcccuccuggcggggaccaucacguccggcuggaccuucggggccggcgccgcccugcagauccccuucgcgaugcagauggccuaccgguucaacggcaucggggucacccagaacgugcucuacgagaaccagaagcugaucgccaaccaguucaacagcgccaucggcaagauccaggacucccugagcuccaccgccagcgcgcucgggaagcugcaggacguggucaaccagaacgcccaggcccugaacacgcucgugaagcagcuguccagcaacuucggcgccaucuccagcgugcugaacgacauccucucccgccuggacccgcccgaggccgaggugcagaucgaccggcugaucaccgggcgccuccagagccugcagaccuacgugacccagcagcugauccgggcggccgagauccgcgccagcgccaaccucgccgcgaccaagauguccgagugcguccugggccagagcaagcggguggacuucugcggcaagggguaccaccugauguccuucccccagagcgccccgcacggcguggucuuccuccacgugacguacguccccgcccaggagaagaacuucaccaccgcccccgcgaucugccacgacgggaaggcccacuucccccgcgagggcguguucguguccaacgggacccacugguucgucacgcagcggaacuucuacgagccgcagaucaucaccaccgacaacaccuucgugagcggcaacugcgacguggucaucggcaucgugaacaacacgguguacgacccccugcagcccgagcuggacuccuucaaggaggagcucgacaaguacuucaagaaccacaccagccccgacgucgaccugggggacaucuccggcaucaacgccagcguggugaacauccagaaggagaucgaccgccugaacgaggucgccaagaaccucaacgagucccugaucgaccugcaggagcucgggaaguacgagcaguacaucaaguggccgugguacaucuggcugggcuucaucgccggccugaucgcgaucgugauggugaccaucaugcucugcugcaugaccagcugcugcuccugccugaaggggugcugcagcugcggcuccugcugcaaguucgacgaggacgacagcgagcccguccugaagggggugaagcuccacuacacgugaggacuaguuauaagacugacuagcccgaugggccucccaacgggcccuccuccccuccuugcaccgagauuaauagaucucaaaggcucuuuucagagccaccaaaaaaaaaaaaaaaaaaaaaaaaaaaaaaaaaaaaaaaaaaaaaaaaaaaaaaaaaaaaaaaaaaaaaaaaaaaaaaaaaaaaaaaaaaaaaaaaaaaaa

SEQ ID NO: 24412 - RNA, 4041 nt, Artificial Sequence
  SARS-CoV-2/Wuhan/WIV05/2019__EPI_ISL_402128 spike protein mRNA gc (1-1273)(K986P_V987P_K986P_V987P_E484K_D614G)
aggagaaagcuuaccauguucguguuccugguccuccugccccuggugagcucccagugcgugaaccucaccacccgcacgcagcugccgcccgccuacaccaacagcuucacccggggcgucuacuaccccgacaagguguuccgcuccagcgugcugcacuccacccaggaccucuuccugcccuucuucagcaacgucacgugguuccacgccauccacguguccgggaccaacggcaccaagcgguucgacaacccggugcugcccuucaacgacggggucuacuucgcgagcaccgagaaguccaacaucauccgcggcuggaucuucgggacgacccucgacagcaagacccagucccugcugaucgugaacaacgccaccaacguggucaucaaggugugcgaguuccaguucugcaacgaccccuuccucggcguguacuaccacaagaacaacaagagcuggauggaguccgaguuccgggucuacagcuccgccaacaacugcacguucgaguacgugagccagcccuuccugauggaccuggagggcaagcaggggaacuucaagaaccuccgcgaguucguguucaagaacaucgacggcuacuucaagaucuacuccaagcacaccccgaucaaccugguccgggaccugccccagggguucagcgcccucgagccccugguggaccugcccaucggcaucaacaucacccgcuuccagacccuccuggcccugcaccgguccuaccucacgccgggggacagcagcuccggcuggaccgcgggcgccgccgccuacuacgugggguaccugcagccccgcaccuuccugcucaaguacaacgagaacggcaccaucacggacgcggucgacugcgcccuggacccccugagcgagaccaagugcacccucaaguccuucaccguggagaaggggaucuaccagacgagcaacuuccgggugcagcccaccgaguccaucguccgcuucccgaacaucaccaaccugugccccuucggcgagguguucaacgccacccgguucgccagcgucuacgccuggaaccgcaagcggaucuccaacugcguggcggacuacagcgugcuguacaacuccgccagcuucuccacguucaagugcuacggcgucagccccaccaagcucaacgaccugugcuucaccaacguguacgccgacuccuucgugauccgcggggacgagguccggcagaucgcccccggccagaccgggaagaucgccgacuacaacuacaagcugccggacgacuucacgggcugcgugaucgcguggaacagcaacaaccucgacuccaaggucgggggcaacuacaacuaccuguaccgccuguuccgcaagagcaaccucaagcccuucgagcgggacaucuccaccgagaucuaccaggccggcagcacccccugcaacggggugaagggcuucaacugcuacuucccccugcaguccuacggguuccagccgaccaacggcgugggguaccagcccuaccggguggucgugcugagcuucgagcuccugcacgcccccgccacggugugcggccccaagaaguccaccaaccuggucaagaacaagugcgugaacuucaacuucaacggccucaccgggaccggcgugcugaccgagagcaacaagaaguuccugccguuccagcaguucgggcgcgacaucgccgacacgaccgacgcgguccgcgacccccagacccuggagauccucgacaucacccccugcagcuucggcgggguguccgugaucacgccgggcaccaacaccagcaaccaggucgccgugcuguaccagggcgugaacugcaccgagguccccguggccauccacgccgaccagcugacgcccaccuggcggguguacuccaccggcagcaacgucuuccagacccgcgccgggugccucaucggcgcggagcacgugaacaacuccuacgagugcgacauccccaucggggccggcaucugcgccagcuaccagacgcagaccaacuccccgcggcgcgcccggagcguggcgucccagagcaucaucgccuacaccaugucccugggcgccgagaacagcgucgccuacuccaacaacagcaucgccauccccaccaacuucacgaucuccgugaccaccgagauccugcccgugagcaugaccaagacgagcgucgacugcaccauguacaucugcggggacuccaccgagugcagcaaccuccugcugcaguacggcuccuucugcacccagcucaaccgcgcgcugacggggaucgccguggagcaggacaagaacacccaggagguguucgcccaggucaagcagaucuacaagacgcccccgaucaaggacuucggcggguucaacuucagccagauccugcccgaccccuccaagcccagcaagcgguccuucaucgaggaccuccuguucaacaaggugacccuggccgacgccggcuucaucaagcaguacggcgacugccucggggacaucgcggcccgcgaccugaucugcgcccagaaguucaacggccugaccgugcucccgccccugcugaccgacgagaugaucgcccaguacaccagcgcccuccuggcggggaccaucacguccggcuggaccuucggggccggcgccgcccugcagauccccuucgcgaugcagauggccuaccgguucaacggcaucggggucacccagaacgugcucuacgagaaccagaagcugaucgccaaccaguucaacagcgccaucggcaagauccaggacucccugagcuccaccgccagcgcgcucgggaagcugcaggacguggucaaccagaacgcccaggcccugaacacgcucgugaagcagcuguccagcaacuucggcgccaucuccagcgugcugaacgacauccucucccgccuggacccgcccgaggccgaggugcagaucgaccggcugaucaccgggcgccuccagagccugcagaccuacgugacccagcagcugauccgggcggccgagauccgcgccagcgccaaccucgccgcgaccaagauguccgagugcguccugggccagagcaagcggguggacuucugcggcaagggguaccaccugauguccuucccccagagcgccccgcacggcguggucuuccuccacgugacguacguccccgcccaggagaagaacuucaccaccgcccccgcgaucugccacgacgggaaggcccacuucccccgcgagggcguguucguguccaacgggacccacugguucgucacgcagcggaacuucuacgagccgcagaucaucaccaccgacaacaccuucgugagcggcaacugcgacguggucaucggcaucgugaacaacacgguguacgacccccugcagcccgagcuggacuccuucaaggaggagcucgacaaguacuucaagaaccacaccagccccgacgucgaccugggggacaucuccggcaucaacgccagcguggugaacauccagaaggagaucgaccgccugaacgaggucgccaagaaccucaacgagucccugaucgaccugcaggagcucgggaaguacgagcaguacaucaaguggccgugguacaucuggcugggcuucaucgccggccugaucgcgaucgugauggugaccaucaugcucugcugcaugaccagcugcugcuccugccugaaggggugcugcagcugcggcuccugcugcaaguucgacgaggacgacagcgagcccguccugaagggggugaagcuccacuacacgugaggacuaguuauaagacugacuagcccgaugggccucccaacgggcccuccuccccuccuugcaccgagauuaauagaucucaaaggcucuuuucagagccaccaaaaaaaaaaaaaaaaaaaaaaaaaaaaaaaaaaaaaaaaaaaaaaaaaaaaaaaaaaaaaaaaaaaaaaaaaaaaaaaaaaaaaaaaaaaaaaaaaaaaa

SEQ ID NO: 24413 - RNA, 4041 nt, Artificial Sequence
  SARS-CoV-2/Wuhan/WIV05/2019__EPI_ISL_402128 spike protein mRNA gc (1-1273)(K986P_V987P_K986P_V987P_L18F_T20N_P26S_D138Y_R190S_K417T _E484K_N501Y_D614G_H655Y_T1027I)
aggagaaagcuuaccauguucguguuccugguccuccugccccuggugagcucccagugcgugaacuucaccaaccgcacgcagcugccgagcgccuacaccaacagcuucacccggggcgucuacuaccccgacaagguguuccgcuccagcgugcugcacuccacccaggaccucuuccugcccuucuucagcaacgucacgugguuccacgccauccacguguccgggaccaacggcaccaagcgguucgacaacccggugcugcccuucaacgacggggucuacuucgcgagcaccgagaaguccaacaucauccgcggcuggaucuucgggacgacccucgacagcaagacccagucccugcugaucgugaacaacgccaccaacguggucaucaaggugugcgaguuccaguucugcaacuaccccuuccucggcguguacuaccacaagaacaacaagagcuggauggaguccgaguuccgggucuacagcuccgccaacaacugcacguucgaguacgugagccagcccuuccugauggaccuggagggcaagcaggggaacuucaagaaccucagcgaguucguguucaagaacaucgacggcuacuucaagaucuacuccaagcacaccccgaucaaccugguccgggaccugccccagggguucagcgcccucgagccccugguggaccugcccaucggcaucaacaucacccgcuuccagacccuccuggcccugcaccgguccuaccucacgccgggggacagcagcuccggcuggaccgcgggcgccgccgccuacuacgugggguaccugcagccccgcaccuuccugcucaaguacaacgagaacggcaccaucacggacgcggucgacugcgcccuggacccccugagcgagaccaagugcacccucaaguccuucaccguggagaaggggaucuaccagacgagcaacuuccgggugcagcccaccgaguccaucguccgcuucccgaacaucaccaaccugugccccuucggcgagguguucaacgccacccgguucgccagcgucuacgccuggaaccgcaagcggaucuccaacugcguggcggacuacagcgugcuguacaacuccgccagcuucuccacguucaagugcuacggcgucagccccaccaagcucaacgaccugugcuucaccaacguguacgccgacuccuucgugauccgcggggacgagguccggcagaucgcccccggccagaccgggaccaucgccgacuacaacuacaagcugccggacgacuucacgggcugcgugaucgcguggaacagcaacaaccucgacuccaaggucgggggcaacuacaacuaccuguaccgccuguuccgcaagagcaaccucaagcccuucgagcgggacaucuccaccgagaucuaccaggccggcagcacccccugcaacggggugaagggcuucaacugcuacuucccccugcaguccuacggguuccagccgaccuacggcgugggguaccagcccuaccggguggucgugcugagcuucgagcuccugcacgcccccgccacggugugcggccccaagaaguccaccaaccuggucaagaacaagugcgugaacuucaacuucaacggccucaccgggaccggcgugcugaccgagagcaacaagaaguuccugccguuccagcaguucgggcgcgacaucgccgacacgaccgacgcgguccgcgacccccagacccuggagauccucgacaucacccccugcagcuucggcgggguguccgugaucacgccgggcaccaacaccagcaaccaggucgccgugcuguaccagggcgugaacugcaccgagguccccguggccauccacgccgaccagcugacgcccaccuggcggguguacuccaccggcagcaacgucuuccagacccgcgccgggugccucaucggcgcggaguacgugaacaacuccuacgagugcgacauccccaucggggccggcaucugcgccagcuaccagacgcagaccaacuccccgcggcgcgcccggagcguggcgucccagagcaucaucgccuacaccaugucccugggcgccgagaacagcgucgccuacuccaacaacagcaucgccauccccaccaacuucacgaucuccgugaccaccgagauccugcccgugagcaugaccaagacgagcgucgacugcaccauguacaucugcggggacuccaccgagugcagcaaccuccugcugcaguacggcuccuucugcacccagcucaaccgcgcgcugacggggaucgccguggagcaggacaagaacacccaggagguguucgcccaggucaagcagaucuacaagacgcccccgaucaaggacuucggcggguucaacuucagccagauccugcccgaccccuccaagcccagcaagcgguccuucaucgaggaccuccuguucaacaaggugacccuggccgacgccggcuucaucaagcaguacggcgacugccucggggacaucgcggcccgcgaccugaucugcgcccagaaguucaacggccugaccgugcucccgccccugcugaccgacgagaugaucgcccaguacaccagcgcccuccuggcggggaccaucacguccggcuggaccuucggggccggcgccgcccugcagauccccuucgcgaugcagauggccuaccgguucaacggcaucggggucacccagaacgugcucuacgagaaccagaagcugaucgccaaccaguucaacagcgccaucggcaagauccaggacucccugagcuccaccgccagcgcgcucgggaagcugcaggacguggucaaccagaacgcccaggcccugaacacgcucgugaagcagcuguccagcaacuucggcgccaucuccagcgugcugaacgacauccucucccgccuggacccgcccgaggccgaggugcagaucgaccggcugaucaccgggcgccuccagagccugcagaccuacgugacccagcagcugauccgggcggccgagauccgcgccagcgccaaccucgccgcgaucaagauguccgagugcguccugggccagagcaagcggguggacuucugcggcaagggguaccaccugauguccuucccccagagcgccccgcacggcguggucuuccuccacgugacguacguccccgcccaggagaagaacuucaccaccgcccccgcgaucugccacgacgggaaggcccacuucccccgcgagggcguguucguguccaacgggacccacugguucgucacgcagcggaacuucuacgagccgcagaucaucaccaccgacaacaccuucgugagcggcaacugcgacguggucaucggcaucgugaacaacacgguguacgacccccugcagcccgagcuggacuccuucaaggaggagcucgacaaguacuucaagaaccacaccagccccgacgucgaccugggggacaucuccggcaucaacgccagcguggugaacauccagaaggagaucgaccgccugaacgaggucgccaagaaccucaacgagucccugaucgaccugcaggagcucgggaaguacgagcaguacaucaaguggccgugguacaucuggcugggcuucaucgccggccugaucgcgaucgugauggugaccaucaugcucugcugcaugaccagcugcugcuccugccugaaggggugcugcagcugcggcuccugcugcaaguucgacgaggacgacagcgagcccguccugaagggggugaagcuccacuacacgugaggacuaguuauaagacugacuagcccgaugggccucccaacgggcccuccuccccuccuugcaccgagauuaauagaucucaaaggcucuuuucagagccaccaaaaaaaaaaaaaaaaaaaaaaaaaaaaaaaaaaaaaaaaaaaaaaaaaaaaaaaaaaaaaaaaaaaaaaaaaaaaaaaaaaaaaaaaaaaaaaaaaaaaa

SEQ ID NO: 24414 - RNA, 4041 nt, Artificial Sequence
  SARS-CoV-2/Wuhan/WIV05/2019__EPI_ISL_402128 spike protein mRNA gc (1-1273)(K986P_V987P_K986P_V987P_S13I_W152C_L452R_D614G)
aggagaaagcuuaccauguucguguuccugguccuccugccccuggugagcauccagugcgugaaccucaccacccgcacgcagcugccgcccgccuacaccaacagcuucacccggggcgucuacuaccccgacaagguguuccgcuccagcgugcugcacuccacccaggaccucuuccugcccuucuucagcaacgucacgugguuccacgccauccacguguccgggaccaacggcaccaagcgguucgacaacccggugcugcccuucaacgacggggucuacuucgcgagcaccgagaaguccaacaucauccgcggcuggaucuucgggacgacccucgacagcaagacccagucccugcugaucgugaacaacgccaccaacguggucaucaaggugugcgaguuccaguucugcaacgaccccuuccucggcguguacuaccacaagaacaacaagagcugcauggaguccgaguuccgggucuacagcuccgccaacaacugcacguucgaguacgugagccagcccuuccugauggaccuggagggcaagcaggggaacuucaagaaccuccgcgaguucguguucaagaacaucgacggcuacuucaagaucuacuccaagcacaccccgaucaaccugguccgggaccugccccagggguucagcgcccucgagccccugguggaccugcccaucggcaucaacaucacccgcuuccagacccuccuggcccugcaccgguccuaccucacgccgggggacagcagcuccggcuggaccgcgggcgccgccgccuacuacgugggguaccugcagccccgcaccuuccugcucaaguacaacgagaacggcaccaucacggacgcggucgacugcgcccuggacccccugagcgagaccaagugcacccucaaguccuucaccguggagaaggggaucuaccagacgagcaacuuccgggugcagcccaccgaguccaucguccgcuucccgaacaucaccaaccugugccccuucggcgagguguucaacgccacccgguucgccagcgucuacgccuggaaccgcaagcggaucuccaacugcguggcggacuacagcgugcuguacaacuccgccagcuucuccacguucaagugcuacggcgucagccccaccaagcucaacgaccugugcuucaccaacguguacgccgacuccuucgugauccgcggggacgagguccggcagaucgcccccggccagaccgggaagaucgccgacuacaacuacaagcugccggacgacuucacgggcugcgugaucgcguggaacagcaacaaccucgacuccaaggucgggggcaacuacaacuaccgcuaccgccuguuccgcaagagcaaccucaagcccuucgagcgggacaucuccaccgagaucuaccaggccggcagcacccccugcaacgggguggagggcuucaacugcuacuucccccugcaguccuacggguuccagccgaccaacggcgugggguaccagcccuaccggguggucgugcugagcuucgagcuccugcacgcccccgccacggugugcggccccaagaaguccaccaaccuggucaagaacaagugcgugaacuucaacuucaacggccucaccgggaccggcgugcugaccgagagcaacaagaaguuccugccguuccagcaguucgggcgcgacaucgccgacacgaccgacgcgguccgcgacccccagacccuggagauccucgacaucacccccugcagcuucggcgggguguccgugaucacgccgggcaccaacaccagcaaccaggucgccgugcuguaccagggcgugaacugcaccgagguccccguggccauccacgccgaccagcugacgcccaccuggcggguguacuccaccggcagcaacgucuuccagacccgcgccgggugccucaucggcgcggagcacgugaacaacuccuacgagugcgacauccccaucggggccggcaucugcgccagcuaccagacgcagaccaacuccccgcggcgcgcccggagcguggcgucccagagcaucaucgccuacaccaugucccugggcgccgagaacagcgucgccuacuccaacaacagcaucgccauccccaccaacuucacgaucuccgugaccaccgagauccugcccgugagcaugaccaagacgagcgucgacugcaccauguacaucugcggggacuccaccgagugcagcaaccuccugcugcaguacggcuccuucugcacccagcucaaccgcgcgcugacggggaucgccguggagcaggacaagaacacccaggagguguucgcccaggucaagcagaucuacaagacgcccccgaucaaggacuucggcggguucaacuucagccagauccugcccgaccccuccaagcccagcaagcgguccuucaucgaggaccuccuguucaacaaggugacccuggccgacgccggcuucaucaagcaguacggcgacugccucggggacaucgcggcccgcgaccugaucugcgcccagaaguucaacggccugaccgugcucccgccccugcugaccgacgagaugaucgcccaguacaccagcgcccuccuggcggggaccaucacguccggcuggaccuucggggccggcgccgcccugcagauccccuucgcgaugcagauggccuaccgguucaacggcaucggggucacccagaacgugcucuacgagaaccagaagcugaucgccaaccaguucaacagcgccaucggcaagauccaggacucccugagcuccaccgccagcgcgcucgggaagcugcaggacguggucaaccagaacgcccaggcccugaacacgcucgugaagcagcuguccagcaacuucggcgccaucuccagcgugcugaacgacauccucucccgccuggacccgcccgaggccgaggugcagaucgaccggcugaucaccgggcgccuccagagccugcagaccuacgugacccagcagcugauccgggcggccgagauccgcgccagcgccaaccucgccgcgaccaagauguccgagugcguccugggccagagcaagcggguggacuucugcggcaagggguaccaccugauguccuucccccagagcgccccgcacggcguggucuuccuccacgugacguacguccccgcccaggagaagaacuucaccaccgcccccgcgaucugccacgacgggaaggcccacuucccccgcgagggcguguucguguccaacgggacccacugguucgucacgcagcggaacuucuacgagccgcagaucaucaccaccgacaacaccuucgugagcggcaacugcgacguggucaucggcaucgugaacaacacgguguacgacccccugcagcccgagcuggacuccuucaaggaggagcucgacaaguacuucaagaaccacaccagccccgacgucgaccugggggacaucuccggcaucaacgccagcguggugaacauccagaaggagaucgaccgccugaacgaggucgccaagaaccucaacgagucccugaucgaccugcaggagcucgggaaguacgagcaguacaucaaguggccgugguacaucuggcugggcuucaucgccggccugaucgcgaucgugauggugaccaucaugcucugcugcaugaccagcugcugcuccugccugaaggggugcugcagcugcggcuccugcugcaaguucgacgaggacgacagcgagcccguccugaagggggugaagcuccacuacacgugaggacuaguuauaagacugacuagcccgaugggccucccaacgggcccuccuccccuccuugcaccgagauuaauagaucucaaaggcucuuuucagagccaccaaaaaaaaaaaaaaaaaaaaaaaaaaaaaaaaaaaaaaaaaaaaaaaaaaaaaaaaaaaaaaaaaaaaaaaaaaaaaaaaaaaaaaaaaaaaaaaaaaaaa

SEQ ID NO: 24415 - RNA, 4041 nt, Artificial Sequence
  SARS-CoV-2/Wuhan/WIV05/2019__EPI_ISL_402128 spike protein mRNA gc (1-1273)(K986P_V987P)
aggagaaagcuuaccauguucguguuccugguccuccugccccuggugagcucccagugcgugaaccucaccacccgcacgcagcugccgcccgccuacaccaacagcuucacccggggcgucuacuaccccgacaagguguuccgcuccagcgugcugcacuccacccaggaccucuuccugcccuucuucagcaacgucacgugguuccacgccauccacguguccgggaccaacggcaccaagcgguucgacaacccggugcugcccuucaacgacggggucuacuucgcgagcaccgagaaguccaacaucauccgcggcuggaucuucgggacgacccucgacagcaagacccagucccugcugaucgugaacaacgccaccaacguggucaucaaggugugcgaguuccaguucugcaacgaccccuuccucggcguguacuaccacaagaacaacaagagcuggauggaguccgaguuccgggucuacagcuccgccaacaacugcacguucgaguacgugagccagcccuuccugauggaccuggagggcaagcaggggaacuucaagaaccuccgcgaguucguguucaagaacaucgacggcuacuucaagaucuacuccaagcacaccccgaucaaccugguccgggaccugccccagggguucagcgcccucgagccccugguggaccugcccaucggcaucaacaucacccgcuuccagacccuccuggcccugcaccgguccuaccucacgccgggggacagcagcuccggcuggaccgcgggcgccgccgccuacuacgugggguaccugcagccccgcaccuuccugcucaaguacaacgagaacggcaccaucacggacgcggucgacugcgcccuggacccccugagcgagaccaagugcacccucaaguccuucaccguggagaaggggaucuaccagacgagcaacuuccgggugcagcccaccgaguccaucguccgcuucccgaacaucaccaaccugugccccuucggcgagguguucaacgccacccgguucgccagcgucuacgccuggaaccgcaagcggaucuccaacugcguggcggacuacagcgugcuguacaacuccgccagcuucuccacguucaagugcuacggcgucagccccaccaagcucaacgaccugugcuucaccaacguguacgccgacuccuucgugauccgcggggacgagguccggcagaucgcccccggccagaccgggaagaucgccgacuacaacuacaagcugccggacgacuucacgggcugcgugaucgcguggaacagcaacaaccucgacuccaaggucgggggcaacuacaacuaccuguaccgccuguuccgcaagagcaaccucaagcccuucgagcgggacaucuccaccgagaucuaccaggccggcagcacccccugcaacgggguggagggcuucaacugcuacuucccccugcaguccuacggguuccagccgaccaacggcgugggguaccagcccuaccggguggucgugcugagcuucgagcuccugcacgcccccgccacggugugcggccccaagaaguccaccaaccuggucaagaacaagugcgugaacuucaacuucaacggccucaccgggaccggcgugcugaccgagagcaacaagaaguuccugccguuccagcaguucgggcgcgacaucgccgacacgaccgacgcgguccgcgacccccagacccuggagauccucgacaucacccccugcagcuucggcgggguguccgugaucacgccgggcaccaacaccagcaaccaggucgccgugcuguaccaggacgugaacugcaccgagguccccguggccauccacgccgaccagcugacgcccaccuggcggguguacuccaccggcagcaacgucuuccagacccgcgccgggugccucaucggcgcggagcacgugaacaacuccuacgagugcgacauccccaucggggccggcaucugcgccagcuaccagacgcagaccaacuccccgcggcgcgcccggagcguggcgucccagagcaucaucgccuacaccaugucccugggcgccgagaacagcgucgccuacuccaacaacagcaucgccauccccaccaacuucacgaucuccgugaccaccgagauccugcccgugagcaugaccaagacgagcgucgacugcaccauguacaucugcggggacuccaccgagugcagcaaccuccugcugcaguacggcuccuucugcacccagcucaaccgcgcgcugacggggaucgccguggagcaggacaagaacacccaggagguguucgcccaggucaagcagaucuacaagacgcccccgaucaaggacuucggcggguucaacuucagccagauccugcccgaccccuccaagcccagcaagcgguccuucaucgaggaccuccuguucaacaaggugacccuggccgacgccggcuucaucaagcaguacggcgacugccucggggacaucgcggcccgcgaccugaucugcgcccagaaguucaacggccugaccgugcucccgccccugcugaccgacgagaugaucgcccaguacaccagcgcccuccuggcggggaccaucacguccggcuggaccuucggggccggcgccgcccugcagauccccuucgcgaugcagauggccuaccgguucaacggcaucggggucacccagaacgugcucuacgagaaccagaagcugaucgccaaccaguucaacagcgccaucggcaagauccaggacucccugagcuccaccgccagcgcgcucgggaagcugcaggacguggucaaccagaacgcccaggcccugaacacgcucgugaagcagcuguccagcaacuucggcgccaucuccagcgugcugaacgacauccucucccgccuggacccgcccgaggccgagguccagaucgaccggcugaucaccgggcgccuccagagccugcagaccuacgugacccagcagcugauccgggcggccgagauccgcgccagcgccaaccucgccgcgaccaagauguccgagugcgugcugggccagagcaagcgggucgacuucugcggcaagggguaccaccugauguccuucccccagagcgcgccccacggcgugguguuccuccacgucacguacgugcccgcccaggagaagaacuucaccaccgccccggccaucugccacgacgggaaggcccacuucccccgcgagggcgucuucguguccaacgggacccacugguucgugacgcagcggaacuucuacgagccccagaucaucaccaccgacaacaccuucgucagcggcaacugcgacguggugaucggcaucgucaacaacacgguguacgacccccugcagccggagcuggacuccuucaaggaggagcucgacaaguacuucaagaaccacaccagccccgacguggaccugggggacaucuccggcaucaacgccagcgucgugaacauccagaaggagaucgaccgccugaacgagguggccaagaaccucaacgagucccugaucgaccugcaggagcucgggaaguacgagcaguacaucaaguggcccugguacaucuggcugggcuucaucgccggccugaucgcgaucgucauggugaccaucaugcucugcugcaugaccagcugcugcuccugccugaaggggugcugcagcugcggcuccugcugcaaguucgacgaggacgacagcgagccggugcugaagggggucaagcuccacuacacgugaggacuaguuauaagacugacuagcccgaugggccucccaacgggcccuccuccccuccuugcaccgagauuaauagaucucaaaggcucuuuucagagccaccaaaaaaaaaaaaaaaaaaaaaaaaaaaaaaaaaaaaaaaaaaaaaaaaaaaaaaaaaaaaaaaaaaaaaaaaaaaaaaaaaaaaaaaaaaaaaaaaaaaaa

SEQ ID NO: 24416 - RNA, 4041 nt, Artificial Sequence
  SARS-CoV-2/Wuhan/WIV05/2019__EPI_ISL_402128 spike protein mRNA gc (1-1273)(K986P_V987P_ D614G)
aggagaaagcuuaccauguucguguuccugguccuccugccccuggugagcucccagugcgugaaccucaccacccgcacgcagcugccgcccgccuacaccaacagcuucacccggggcgucuacuaccccgacaagguguuccgcuccagcgugcugcacuccacccaggaccucuuccugcccuucuucagcaacgucacgugguuccacgccauccacguguccgggaccaacggcaccaagcgguucgacaacccggugcugcccuucaacgacggggucuacuucgcgagcaccgagaaguccaacaucauccgcggcuggaucuucgggacgacccucgacagcaagacccagucccugcugaucgugaacaacgccaccaacguggucaucaaggugugcgaguuccaguucugcaacgaccccuuccucggcguguacuaccacaagaacaacaagagcuggauggaguccgaguuccgggucuacagcuccgccaacaacugcacguucgaguacgugagccagcccuuccugauggaccuggagggcaagcaggggaacuucaagaaccuccgcgaguucguguucaagaacaucgacggcuacuucaagaucuacuccaagcacaccccgaucaaccugguccgggaccugccccagggguucagcgcccucgagccccugguggaccugcccaucggcaucaacaucacccgcuuccagacccuccuggcccugcaccgguccuaccucacgccgggggacagcagcuccggcuggaccgcgggcgccgccgccuacuacgugggguaccugcagccccgcaccuuccugcucaaguacaacgagaacggcaccaucacggacgcggucgacugcgcccuggacccccugagcgagaccaagugcacccucaaguccuucaccguggagaaggggaucuaccagacgagcaacuuccgggugcagcccaccgaguccaucguccgcuucccgaacaucaccaaccugugccccuucggcgagguguucaacgccacccgguucgccagcgucuacgccuggaaccgcaagcggaucuccaacugcguggcggacuacagcgugcuguacaacuccgccagcuucuccacguucaagugcuacggcgucagccccaccaagcucaacgaccugugcuucaccaacguguacgccgacuccuucgugauccgcggggacgagguccggcagaucgcccccggccagaccgggaagaucgccgacuacaacuacaagcugccggacgacuucacgggcugcgugaucgcguggaacagcaacaaccucgacuccaaggucgggggcaacuacaacuaccuguaccgccuguuccgcaagagcaaccucaagcccuucgagcgggacaucuccaccgagaucuaccaggccggcagcacccccugcaacgggguggagggcuucaacugcuacuucccccugcaguccuacggguuccagccgaccaacggcgugggguaccagcccuaccggguggucgugcugagcuucgagcuccugcacgcccccgccacggugugcggccccaagaaguccaccaaccuggucaagaacaagugcgugaacuucaacuucaacggccucaccgggaccggcgugcugaccgagagcaacaagaaguuccugccguuccagcaguucgggcgcgacaucgccgacacgaccgacgcgguccgcgacccccagacccuggagauccucgacaucacccccugcagcuucggcgggguguccgugaucacgccgggcaccaacaccagcaaccaggucgccgugcuguaccagggcgugaacugcaccgagguccccguggccauccacgccgaccagcugacgcccaccuggcggguguacuccaccgggagcaacgucuuccagacccgcgccggcugccucaucggggcggagcacgugaacaacuccuacgagugcgacauccccaucggcgccggcaucugcgccagcuaccagacgcagaccaacuccccgcggcgcgcccggagcguggcgucccagagcaucaucgccuacaccaugucccugggggccgagaacagcgucgccuacuccaacaacagcaucgccauccccaccaacuucacgaucuccgugaccaccgagauccugcccgugagcaugaccaagacgagcgucgacugcaccauguacaucugcggcgacuccaccgagugcagcaaccuccugcugcaguacggguccuucugcacccagcucaaccgcgcgcugacgggcaucgccguggagcaggacaagaacacccaggagguguucgcccaggucaagcagaucuacaagacgcccccgaucaaggacuucgggggcuucaacuucagccagauccugcccgaccccuccaagcccagcaagcgguccuucaucgaggaccuccuguucaacaaggugacccuggccgacgccggcuucaucaagcaguacggggacugccucggcgacaucgcggcccgcgaccugaucugcgcccagaaguucaacgggcugaccgugcucccgccccugcugaccgacgagaugaucgcccaguacaccagcgcccuccuggcgggcaccaucacguccggguggaccuucggcgccggcgccgcccugcagauccccuucgcgaugcagauggccuaccgguucaacgggaucggcgucacccagaacgugcucuacgagaaccagaagcugaucgccaaccaguucaacagcgccaucgggaagauccaggacucccugagcuccaccgccagcgcgcucggcaagcugcaggacguggucaaccagaacgcccaggcccugaacacgcucgugaagcagcuguccagcaacuucggggccaucuccagcgugcugaacgacauccucucccgccuggacccgcccgaggccgagguccagaucgaccggcugaucaccggccgccuccagagccugcagaccuacgugacccagcagcugauccgggcggccgagauccgcgccagcgccaaccucgccgcgaccaagauguccgagugcgugcugggccagagcaagcgggucgacuucugcgggaagggcuaccaccugauguccuucccccagagcgcgccccacggggugguguuccuccacgucacguacgugcccgcccaggagaagaacuucaccaccgccccggccaucugccacgacggcaaggcccacuucccccgcgagggggucuucguguccaacggcacccacugguucgugacgcagcggaacuucuacgagccccagaucaucaccaccgacaacaccuucgucagcggcaacugcgacguggugaucgggaucgucaacaacacgguguacgacccccugcagccggagcuggacuccuucaaggaggagcucgacaaguacuucaagaaccacaccagccccgacguggaccugggcgacaucuccgggaucaacgccagcgucgugaacauccagaaggagaucgaccgccugaacgagguggccaagaaccucaacgagucccugaucgaccugcaggagcucggcaaguacgagcaguacaucaaguggcccugguacaucuggcugggcuucaucgccgggcugaucgcgaucgucauggugaccaucaugcucugcugcaugaccagcugcugcuccugccugaagggcugcugcagcugcggguccugcugcaaguucgacgaggacgacagcgagccggugcugaagggcgucaagcuccacuacacgugaggacuaguuauaagacugacuagcccgaugggccucccaacgggcccuccuccccuccuugcaccgagauuaauagaucucaaaggcucuuuucagagccaccaaaaaaaaaaaaaaaaaaaaaaaaaaaaaaaaaaaaaaaaaaaaaaaaaaaaaaaaaaaaaaaaaaaaaaaaaaaaaaaaaaaaaaaaaaaaaaaaaaaaa

SEQ ID NO: 24417 - RNA, 4041 nt, Artificial Sequence
  SARS-CoV-2/Wuhan/WIV05/2019__EPI_ISL_402128 spike protein mRNA gc (1-1273)(K986P_V987P_A222V_D614G)
aggagaaagcuuaccauguucguguuccugguccuccugccccuggugagcucccagugcgugaaccucaccacccgcacgcagcugccgcccgccuacaccaacagcuucacccggggcgucuacuaccccgacaagguguuccgcuccagcgugcugcacuccacccaggaccucuuccugcccuucuucagcaacgucacgugguuccacgccauccacguguccgggaccaacggcaccaagcgguucgacaacccggugcugcccuucaacgacggggucuacuucgcgagcaccgagaaguccaacaucauccgcggcuggaucuucgggacgacccucgacagcaagacccagucccugcugaucgugaacaacgccaccaacguggucaucaaggugugcgaguuccaguucugcaacgaccccuuccucggcguguacuaccacaagaacaacaagagcuggauggaguccgaguuccgggucuacagcuccgccaacaacugcacguucgaguacgugagccagcccuuccugauggaccuggagggcaagcaggggaacuucaagaaccuccgcgaguucguguucaagaacaucgacggcuacuucaagaucuacuccaagcacaccccgaucaaccugguccgggaccugccccagggguucagcgugcucgagccccugguggaccugcccaucggcaucaacaucacccgcuuccagacccuccuggcccugcaccgguccuaccucacgccgggggacagcagcuccggcuggaccgccggcgcggccgccuacuacgucggguaccugcagccccgcaccuuccugcucaaguacaacgagaacggcaccaucacggacgccguggacugcgcgcuggacccccugagcgagaccaagugcacccucaaguccuucaccguggagaaggggaucuaccagacgagcaacuuccggguccagcccaccgaguccaucgugcgcuucccgaacaucaccaaccugugccccuucggcgaggucuucaacgccacccgguucgccagcguguacgccuggaaccgcaagcggaucuccaacugcguggccgacuacagcguccuguacaacuccgcgagcuucuccacguucaagugcuacggcgugagccccaccaagcucaacgaccugugcuucaccaacguguacgccgacuccuucgucauccgcggggacgaggugcggcagaucgcccccggccagaccgggaagaucgccgacuacaacuacaagcugccggacgacuucacgggcugcgugaucgccuggaacagcaacaaccucgacuccaaggucgggggcaacuacaacuaccuguaccgccuguuccgcaagagcaaccucaagcccuucgagcgggacaucuccaccgagaucuaccaggcgggcagcacccccugcaacgggguggagggcuucaacugcuacuucccccugcaguccuacggguuccagccgaccaacggcgugggguaccagcccuaccgggucguggugcugagcuucgagcuccugcacgcccccgccacggucugcggccccaagaaguccaccaaccuggugaagaacaagugcgugaacuucaacuucaacggccucaccgggaccggcguccugaccgagagcaacaagaaguuccugccguuccagcaguucgggcgcgacaucgccgacacgaccgacgccgugcgcgacccccagacccuggagauccucgacaucacccccugcagcuucggcgggguguccgucaucacgccgggcaccaacaccagcaaccagguggcggugcuguaccagggcgucaacugcaccgaggugcccguggccauccacgccgaccagcugacgcccaccuggcgggucuacuccaccgggagcaacguguuccagacccgcgccggcugccucaucggggccgagcacgugaacaacuccuacgagugcgacauccccaucggcgcgggcaucugcgccagcuaccagacgcagaccaacuccccgcggcgcgcccggagcgucgccucccagagcaucaucgcguacaccaugucccugggggccgagaacagcguggccuacuccaacaacagcaucgccauccccaccaacuucacgaucuccgugaccaccgagauccugcccgucagcaugaccaagacgagcguggacugcaccauguacaucugcggcgacuccaccgagugcagcaaccuccugcugcaguacggguccuucugcacccagcucaaccgcgcccugacgggcaucgcgguggagcaggacaagaacacccaggaggucuucgcccaggugaagcagaucuacaagacgcccccgaucaaggacuucgggggcuucaacuucagccagauccugcccgaccccuccaagcccagcaagcgguccuucaucgaggaccuccuguucaacaaggugacccuggccgacgccggcuucaucaagcaguacggggacugccucggcgacaucgccgcgcgcgaccugaucugcgcccagaaguucaacgggcugaccguccucccgccccugcugaccgacgagaugaucgcccaguacaccagcgcccuccuggccggcaccaucacguccggguggaccuucggcgcgggcgccgcccugcagauccccuucgccaugcagauggcguaccgguucaacgggaucggcgugacccagaacgugcucuacgagaaccagaagcugaucgccaaccaguucaacagcgccaucgggaagauccaggacucccugagcuccaccgccagcgcccucggcaagcugcaggacgucgugaaccagaacgcgcaggcccugaacacgcucgugaagcagcuguccagcaacuucggggccaucuccagcguccugaacgacauccucucccgccuggacccgcccgaggccgaggugcagaucgaccggcugaucaccggccgccuccagagccugcagaccuacgugacccagcagcugauccgggccgcggagauccgcgccagcgccaaccucgccgccaccaagauguccgagugcguccugggccagagcaagcggguggacuucugcgggaagggcuaccaccugauguccuucccccagagcgcgccccacgggguggucuuccuccacgugacguacguccccgcccaggagaagaacuucaccaccgccccggccaucugccacgacggcaaggcgcacuucccccgcgaggggguguucguguccaacggcacccacugguucgucacgcagcggaacuucuacgagccccagaucaucaccaccgacaacaccuucgugagcggcaacugcgacguggucaucgggaucgugaacaacacgguguacgacccccugcagccggagcuggacuccuucaaggaggagcucgacaaguacuucaagaaccacaccagccccgacgucgaccugggcgacaucuccgggaucaacgccagcguggugaacauccagaaggagaucgaccgccugaacgaggucgccaagaaccucaacgagucccugaucgaccugcaggagcucggcaaguacgagcaguacaucaaguggcccugguacaucuggcugggcuucaucgccgggcugaucgccaucgugauggugaccaucaugcucugcugcaugaccagcugcugcuccugccugaagggcugcugcagcugcggguccugcugcaaguucgacgaggacgacagcgagccgguccugaagggcgugaagcuccacuacacgugaggacuaguuauaagacugacuagcccgaugggccucccaacgggcccuccuccccuccuugcaccgagauuaauagaucucaaaggcucuuuucagagccaccaaaaaaaaaaaaaaaaaaaaaaaaaaaaaaaaaaaaaaaaaaaaaaaaaaaaaaaaaaaaaaaaaaaaaaaaaaaaaaaaaaaaaaaaaaaaaaaaaaaaa

SEQ ID NO: 24418 - RNA, 4041 nt, Artificial Sequence
  SARS-CoV-2/Wuhan/WIV05/2019__EPI_ISL_402128 spike protein mRNA gc (1-1273)(K986P_V987P_N439K_D614G)
aggagaaagcuuaccauguucguguuccugguccuccugccccuggugagcucccagugcgugaaccucaccacccgcacgcagcugccgcccgccuacaccaacagcuucacccggggcgucuacuaccccgacaagguguuccgcuccagcgugcugcacuccacccaggaccucuuccugcccuucuucagcaacgucacgugguuccacgccauccacguguccgggaccaacggcaccaagcgguucgacaacccggugcugcccuucaacgacggggucuacuucgcgagcaccgagaaguccaacaucauccgcggcuggaucuucgggacgacccucgacagcaagacccagucccugcugaucgugaacaacgccaccaacguggucaucaaggugugcgaguuccaguucugcaacgaccccuuccucggcguguacuaccacaagaacaacaagagcuggauggaguccgaguuccgggucuacagcuccgccaacaacugcacguucgaguacgugagccagcccuuccugauggaccuggagggcaagcaggggaacuucaagaaccuccgcgaguucguguucaagaacaucgacggcuacuucaagaucuacuccaagcacaccccgaucaaccugguccgggaccugccccagggguucagcgcccucgagccccugguggaccugcccaucggcaucaacaucacccgcuuccagacccuccuggcccugcaccgguccuaccucacgccgggggacagcagcuccggcuggaccgcgggcgccgccgccuacuacgugggguaccugcagccccgcaccuuccugcucaaguacaacgagaacggcaccaucacggacgcggucgacugcgcccuggacccccugagcgagaccaagugcacccucaaguccuucaccguggagaaggggaucuaccagacgagcaacuuccgggugcagcccaccgaguccaucguccgcuucccgaacaucaccaaccugugccccuucggcgagguguucaacgccacccgguucgccagcgucuacgccuggaaccgcaagcggaucuccaacugcguggcggacuacagcgugcuguacaacuccgccagcuucuccacguucaagugcuacggcgucagccccaccaagcucaacgaccugugcuucaccaacguguacgccgacuccuucgugauccgcggggacgagguccggcagaucgcccccggccagaccgggaagaucgccgacuacaacuacaagcugccggacgacuucacgggcugcgugaucgcguggaacagcaagaaccucgacuccaaggucgggggcaacuacaacuaccuguaccgccuguuccgcaagagcaaccucaagcccuucgagcgggacaucuccaccgagaucuaccaggccggcagcacccccugcaacgggguggagggcuucaacugcuacuucccccugcaguccuacggguuccagccgaccaacggcgugggguaccagcccuaccggguggucgugcugagcuucgagcuccugcacgcccccgccacggugugcggccccaagaaguccaccaaccuggucaagaacaagugcgugaacuucaacuucaacggccucaccgggaccggcgugcugaccgagagcaacaagaaguuccugccguuccagcaguucgggcgcgacaucgccgacacgaccgacgcgguccgcgacccccagacccuggagauccucgacaucacccccugcagcuucggcgggguguccgugaucacgccgggcaccaacaccagcaaccaggucgccgugcuguaccagggcgugaacugcaccgagguccccguggccauccacgccgaccagcugacgcccaccuggcggguguacuccaccgggagcaacgucuuccagacccgcgccggcugccucaucggggcggagcacgugaacaacuccuacgagugcgacauccccaucggcgccggcaucugcgccagcuaccagacgcagaccaacuccccgcggcgcgcccggagcguggcgucccagagcaucaucgccuacaccaugucccugggggccgagaacagcgucgccuacuccaacaacagcaucgccauccccaccaacuucacgaucuccgugaccaccgagauccugcccgugagcaugaccaagacgagcgucgacugcaccauguacaucugcggcgacuccaccgagugcagcaaccuccugcugcaguacggguccuucugcacccagcucaaccgcgcgcugacgggcaucgccguggagcaggacaagaacacccaggagguguucgcccaggucaagcagaucuacaagacgcccccgaucaaggacuucgggggcuucaacuucagccagauccugcccgaccccuccaagcccagcaagcgguccuucaucgaggaccuccuguucaacaaggugacccuggccgacgccggcuucaucaagcaguacggggacugccucggcgacaucgcggcccgcgaccugaucugcgcccagaaguucaacgggcugaccgugcucccgccccugcugaccgacgagaugaucgcccaguacaccagcgcccuccuggcgggcaccaucacguccggguggaccuucggcgccggcgccgcccugcagauccccuucgcgaugcagauggccuaccgguucaacgggaucggcgucacccagaacgugcucuacgagaaccagaagcugaucgccaaccaguucaacagcgccaucgggaagauccaggacucccugagcuccaccgccagcgcgcucggcaagcugcaggacguggucaaccagaacgcccaggcccugaacacgcucgugaagcagcuguccagcaacuucggggccaucuccagcgugcugaacgacauccucucccgccuggacccgcccgaggccgagguccagaucgaccggcugaucaccggccgccuccagagccugcagaccuacgugacccagcagcugauccgggcggccgagauccgcgccagcgccaaccucgccgcgaccaagauguccgagugcgugcugggccagagcaagcgggucgacuucugcgggaagggcuaccaccugauguccuucccccagagcgcgccccacggggugguguuccuccacgucacguacgugcccgcccaggagaagaacuucaccaccgccccggccaucugccacgacggcaaggcccacuucccccgcgagggggucuucguguccaacggcacccacugguucgugacgcagcggaacuucuacgagccccagaucaucaccaccgacaacaccuucgucagcggcaacugcgacguggugaucgggaucgucaacaacacgguguacgacccccugcagccggagcuggacuccuucaaggaggagcucgacaaguacuucaagaaccacaccagccccgacguggaccugggcgacaucuccgggaucaacgccagcgucgugaacauccagaaggagaucgaccgccugaacgagguggccaagaaccucaacgagucccugaucgaccugcaggagcucggcaaguacgagcaguacaucaaguggcccugguacaucuggcugggcuucaucgccgggcugaucgcgaucgucauggugaccaucaugcucugcugcaugaccagcugcugcuccugccugaagggcugcugcagcugcggguccugcugcaaguucgacgaggacgacagcgagccggugcugaagggcgucaagcuccacuacacgugaggacuaguuauaagacugacuagcccgaugggccucccaacgggcccuccuccccuccuugcaccgagauuaauagaucucaaaggcucuuuucagagccaccaaaaaaaaaaaaaaaaaaaaaaaaaaaaaaaaaaaaaaaaaaaaaaaaaaaaaaaaaaaaaaaaaaaaaaaaaaaaaaaaaaaaaaaaaaaaaaaaaaaaa

SEQ ID NO: 24419 - RNA, 4041 nt, Artificial Sequence
  SARS-CoV-2/Wuhan/WIV05/2019__EPI_ISL_402128 spike protein mRNA gc (1-1273)(K986P_V987P_S477N_D614G)
aggagaaagcuuaccauguucguguuccugguccuccugccccuggugagcucccagugcgugaaccucaccacccgcacgcagcugccgcccgccuacaccaacagcuucacccggggcgucuacuaccccgacaagguguuccgcuccagcgugcugcacuccacccaggaccucuuccugcccuucuucagcaacgucacgugguuccacgccauccacguguccgggaccaacggcaccaagcgguucgacaacccggugcugcccuucaacgacggggucuacuucgcgagcaccgagaaguccaacaucauccgcggcuggaucuucgggacgacccucgacagcaagacccagucccugcugaucgugaacaacgccaccaacguggucaucaaggugugcgaguuccaguucugcaacgaccccuuccucggcguguacuaccacaagaacaacaagagcuggauggaguccgaguuccgggucuacagcuccgccaacaacugcacguucgaguacgugagccagcccuuccugauggaccuggagggcaagcaggggaacuucaagaaccuccgcgaguucguguucaagaacaucgacggcuacuucaagaucuacuccaagcacaccccgaucaaccugguccgggaccugccccagggguucagcgcccucgagccccugguggaccugcccaucggcaucaacaucacccgcuuccagacccuccuggcccugcaccgguccuaccucacgccgggggacagcagcuccggcuggaccgcgggcgccgccgccuacuacgugggguaccugcagccccgcaccuuccugcucaaguacaacgagaacggcaccaucacggacgcggucgacugcgcccuggacccccugagcgagaccaagugcacccucaaguccuucaccguggagaaggggaucuaccagacgagcaacuuccgggugcagcccaccgaguccaucguccgcuucccgaacaucaccaaccugugccccuucggcgagguguucaacgccacccgguucgccagcgucuacgccuggaaccgcaagcggaucuccaacugcguggcggacuacagcgugcuguacaacuccgccagcuucuccacguucaagugcuacggcgucagccccaccaagcucaacgaccugugcuucaccaacguguacgccgacuccuucgugauccgcggggacgagguccggcagaucgcccccggccagaccgggaagaucgccgacuacaacuacaagcugccggacgacuucacgggcugcgugaucgcguggaacagcaacaaccucgacuccaaggucgggggcaacuacaacuaccuguaccgccuguuccgcaagagcaaccucaagcccuucgagcgggacaucuccaccgagaucuaccaggccggcaacacccccugcaacgggguggagggcuucaacugcuacuucccccugcagagcuacggguuccagccgaccaacggcgugggguaccagcccuaccggguggucgugcuguccuucgagcuccugcacgcccccgccacggugugcggccccaagaaguccaccaaccuggucaagaacaagugcgugaacuucaacuucaacggccucaccgggaccggcgugcugaccgagagcaacaagaaguuccugccguuccagcaguucgggcgcgacaucgccgacacgaccgacgcgguccgcgacccccagacccuggagauccucgacaucacccccugcagcuucggcggggugagcgugaucacgccgggcaccaacaccuccaaccaggucgccgugcuguaccagggcgugaacugcaccgagguccccguggccauccacgccgaccagcugacgcccaccuggcggguguacagcaccggguccaacgucuuccagacccgcgccggcugccucaucggggcggagcacgugaacaacagcuacgagugcgacauccccaucggcgccggcaucugcgccuccuaccagacgcagaccaacagcccgcggcgcgcccgguccguggcgagccaguccaucaucgccuacaccaugagccugggggccgagaacuccgucgccuacagcaacaacuccaucgccauccccaccaacuucacgaucagcgugaccaccgagauccugcccguguccaugaccaagacgagcgucgacugcaccauguacaucugcggcgacagcaccgagugcuccaaccuccugcugcaguacgggagcuucugcacccagcucaaccgcgcgcugacgggcaucgccguggagcaggacaagaacacccaggagguguucgcccaggucaagcagaucuacaagacgcccccgaucaaggacuucgggggcuucaacuucucccagauccugcccgaccccagcaagcccuccaagcggagcuucaucgaggaccuccuguucaacaaggugacccuggccgacgccggcuucaucaagcaguacggggacugccucggcgacaucgcggcccgcgaccugaucugcgcccagaaguucaacgggcugaccgugcucccgccccugcugaccgacgagaugaucgcccaguacaccuccgcccuccuggcgggcaccaucacgagcggguggaccuucggcgccggcgccgcccugcagauccccuucgcgaugcagauggccuaccgguucaacgggaucggcgucacccagaacgugcucuacgagaaccagaagcugaucgccaaccaguucaacuccgccaucgggaagauccaggacagccuguccagcaccgccuccgcgcucggcaagcugcaggacguggucaaccagaacgcccaggcccugaacacgcucgugaagcagcugagcuccaacuucggggccaucagcuccgugcugaacgacauccucagccgccuggacccgcccgaggccgagguccagaucgaccggcugaucaccggccgccuccagucccugcagaccuacgugacccagcagcugauccgggcggccgagauccgcgccagcgccaaccucgccgcgaccaagaugagcgagugcgugcugggccaguccaagcgggucgacuucugcgggaagggcuaccaccugaugagcuucccccaguccgcgccccacggggugguguuccuccacgucacguacgugcccgcccaggagaagaacuucaccaccgccccggccaucugccacgacggcaaggcccacuucccccgcgagggggucuucgugagcaacggcacccacugguucgugacgcagcggaacuucuacgagccccagaucaucaccaccgacaacaccuucgucuccggcaacugcgacguggugaucgggaucgucaacaacacgguguacgacccccugcagccggagcuggacagcuucaaggaggagcucgacaaguacuucaagaaccacaccucccccgacguggaccugggcgacaucagcgggaucaacgccuccgucgugaacauccagaaggagaucgaccgccugaacgagguggccaagaaccucaacgagagccugaucgaccugcaggagcucggcaaguacgagcaguacaucaaguggcccugguacaucuggcugggcuucaucgccgggcugaucgcgaucgucauggugaccaucaugcucugcugcaugaccuccugcugcagcugccugaagggcugcugcuccugcgggagcugcugcaaguucgacgaggacgacuccgagccggugcugaagggcgucaagcuccacuacacgugaggacuaguuauaagacugacuagcccgaugggccucccaacgggcccuccuccccuccuugcaccgagauuaauagaucucaaaggcucuuuucagagccaccaaaaaaaaaaaaaaaaaaaaaaaaaaaaaaaaaaaaaaaaaaaaaaaaaaaaaaaaaaaaaaaaaaaaaaaaaaaaaaaaaaaaaaaaaaaaaaaaaaaaa

SEQ ID NO: 24420 - RNA, 4041 nt, Artificial Sequence
  SARS-CoV-2/Wuhan/WIV05/2019__EPI_ISL_402128 spike protein mRNA gc (1-1273)(K986P_V987P_N501Y_D614G)
aggagaaagcuuaccauguucguguuccugguccuccugccccuggugagcucccagugcgugaaccucaccacccgcacgcagcugccgcccgccuacaccaacagcuucacccggggcgucuacuaccccgacaagguguuccgcuccagcgugcugcacuccacccaggaccucuuccugcccuucuucagcaacgucacgugguuccacgccauccacguguccgggaccaacggcaccaagcgguucgacaacccggugcugcccuucaacgacggggucuacuucgcgagcaccgagaaguccaacaucauccgcggcuggaucuucgggacgacccucgacagcaagacccagucccugcugaucgugaacaacgccaccaacguggucaucaaggugugcgaguuccaguucugcaacgaccccuuccucggcguguacuaccacaagaacaacaagagcuggauggaguccgaguuccgggucuacagcuccgccaacaacugcacguucgaguacgugagccagcccuuccugauggaccuggagggcaagcaggggaacuucaagaaccuccgcgaguucguguucaagaacaucgacggcuacuucaagaucuacuccaagcacaccccgaucaaccugguccgggaccugccccagggguucagcgcccucgagccccugguggaccugcccaucggcaucaacaucacccgcuuccagacccuccuggcccugcaccgguccuaccucacgccgggggacagcagcuccggcuggaccgcgggcgccgccgccuacuacgugggguaccugcagccccgcaccuuccugcucaaguacaacgagaacggcaccaucacggacgcggucgacugcgcccuggacccccugagcgagaccaagugcacccucaaguccuucaccguggagaaggggaucuaccagacgagcaacuuccgggugcagcccaccgaguccaucguccgcuucccgaacaucaccaaccugugccccuucggcgagguguucaacgccacccgguucgccagcgucuacgccuggaaccgcaagcggaucuccaacugcguggcggacuacagcgugcuguacaacuccgccagcuucuccacguucaagugcuacggcgucagccccaccaagcucaacgaccugugcuucaccaacguguacgccgacuccuucgugauccgcggggacgagguccggcagaucgcccccggccagaccgggaagaucgccgacuacaacuacaagcugccggacgacuucacgggcugcgugaucgcguggaacagcaacaaccucgacuccaaggucgggggcaacuacaacuaccuguaccgccuguuccgcaagagcaaccucaagcccuucgagcgggacaucuccaccgagaucuaccaggccggcagcacccccugcaacgggguggagggcuucaacugcuacuucccccugcaguccuacggguuccagccgaccuacggcgugggguaccagcccuaccggguggucgugcugagcuucgagcuccugcacgcccccgccacggugugcggccccaagaaguccaccaaccuggucaagaacaagugcgugaacuucaacuucaacggccucaccgggaccggcgugcugaccgagagcaacaagaaguuccugccguuccagcaguucgggcgcgacaucgccgacacgaccgacgcgguccgcgacccccagacccuggagauccucgacaucacccccugcagcuucggcgggguguccgugaucacgccgggcaccaacaccagcaaccaggucgccgugcuguaccagggcgugaacugcaccgagguccccguggccauccacgccgaccagcugacgcccaccuggcggguguacuccaccgggagcaacgucuuccagacccgcgccggcugccucaucggggcggagcacgugaacaacuccuacgagugcgacauccccaucggcgccggcaucugcgccagcuaccagacgcagaccaacuccccgcggcgcgcccggagcguggcgucccagagcaucaucgccuacaccaugucccugggggccgagaacagcgucgccuacuccaacaacagcaucgccauccccaccaacuucacgaucuccgugaccaccgagauccugcccgugagcaugaccaagacgagcgucgacugcaccauguacaucugcggcgacuccaccgagugcagcaaccuccugcugcaguacggguccuucugcacccagcucaaccgcgcgcugacgggcaucgccguggagcaggacaagaacacccaggagguguucgcccaggucaagcagaucuacaagacgcccccgaucaaggacuucgggggcuucaacuucagccagauccugcccgaccccuccaagcccagcaagcgguccuucaucgaggaccuccuguucaacaaggugacccuggccgacgccggcuucaucaagcaguacggggacugccucggcgacaucgcggcccgcgaccugaucugcgcccagaaguucaacgggcugaccgugcucccgccccugcugaccgacgagaugaucgcccaguacaccagcgcccuccuggcgggcaccaucacguccggguggaccuucggcgccggcgccgcccugcagauccccuucgcgaugcagauggccuaccgguucaacgggaucggcgucacccagaacgugcucuacgagaaccagaagcugaucgccaaccaguucaacagcgccaucgggaagauccaggacucccugagcuccaccgccagcgcgcucggcaagcugcaggacguggucaaccagaacgcccaggcccugaacacgcucgugaagcagcuguccagcaacuucggggccaucuccagcgugcugaacgacauccucucccgccuggacccgcccgaggccgagguccagaucgaccggcugaucaccggccgccuccagagccugcagaccuacgugacccagcagcugauccgggcggccgagauccgcgccagcgccaaccucgccgcgaccaagauguccgagugcgugcugggccagagcaagcgggucgacuucugcgggaagggcuaccaccugauguccuucccccagagcgcgccccacggggugguguuccuccacgucacguacgugcccgcccaggagaagaacuucaccaccgccccggccaucugccacgacggcaaggcccacuucccccgcgagggggucuucguguccaacggcacccacugguucgugacgcagcggaacuucuacgagccccagaucaucaccaccgacaacaccuucgucagcggcaacugcgacguggugaucgggaucgucaacaacacgguguacgacccccugcagccggagcuggacuccuucaaggaggagcucgacaaguacuucaagaaccacaccagccccgacguggaccugggcgacaucuccgggaucaacgccagcgucgugaacauccagaaggagaucgaccgccugaacgagguggccaagaaccucaacgagucccugaucgaccugcaggagcucggcaaguacgagcaguacaucaaguggcccugguacaucuggcugggcuucaucgccgggcugaucgcgaucgucauggugaccaucaugcucugcugcaugaccagcugcugcuccugccugaagggcugcugcagcugcggguccugcugcaaguucgacgaggacgacagcgagccggugcugaagggcgucaagcuccacuacacgugaggacuaguuauaagacugacuagcccgaugggccucccaacgggcccuccuccccuccuugcaccgagauuaauagaucucaaaggcucuuuucagagccaccaaaaaaaaaaaaaaaaaaaaaaaaaaaaaaaaaaaaaaaaaaaaaaaaaaaaaaaaaaaaaaaaaaaaaaaaaaaaaaaaaaaaaaaaaaaaaaaaaaaaa

SEQ ID NO: 24421 - RNA, 4035 nt, Artificial Sequence
  SARS-CoV-2/Wuhan/WIV05/2019__EPI_ISL_402128 spike protein mRNA gc (1-1273)(K986P_V987P_H69del_V70del_D614G)
aggagaaagcuuaccauguucguguuccugguccuccugccccuggugagcucccagugcgugaaccucaccacccgcacgcagcugccgcccgccuacaccaacagcuucacccggggcgucuacuaccccgacaagguguuccgcuccagcgugcugcacuccacccaggaccucuuccugcccuucuucagcaacgucacgugguuccacgccaucuccgggaccaacggcaccaagcgguucgacaacccggugcugcccuucaacgacgggguguacuucgcgagcaccgagaaguccaacaucauccgcggcuggaucuucgggacgacccucgacagcaagacccagucccugcugaucgucaacaacgccaccaacguggugaucaaggucugcgaguuccaguucugcaacgaccccuuccucggcguguacuaccacaagaacaacaagagcuggauggaguccgaguuccggguguacagcuccgccaacaacugcacguucgaguacgucagccagcccuuccugauggaccuggagggcaagcaggggaacuucaagaaccuccgcgaguucguguucaagaacaucgacggcuacuucaagaucuacuccaagcacaccccgaucaaccuggugcgggaccugccccagggguucagcgcccucgagccccuggucgaccugcccaucggcaucaacaucacccgcuuccagacccuccuggcccugcaccgguccuaccucacgccgggggacagcagcuccggcuggaccgcgggcgccgccgccuacuacgugggguaccugcagccccgcaccuuccugcucaaguacaacgagaacggcaccaucacggacgcgguggacugcgcccuggacccccugagcgagaccaagugcacccucaaguccuucaccgucgagaaggggaucuaccagacgagcaacuuccgggugcagcccaccgaguccaucgugcgcuucccgaacaucaccaaccugugccccuucggcgaggucuucaacgccacccgguucgccagcguguacgccuggaaccgcaagcggaucuccaacugcgucgcggacuacagcgugcuguacaacuccgccagcuucuccacguucaagugcuacggcgugagccccaccaagcucaacgaccugugcuucaccaacgucuacgccgacuccuucgugauccgcggggacgaggugcggcagaucgcccccggccagaccgggaagaucgccgacuacaacuacaagcugccggacgacuucacgggcugcgucaucgcguggaacagcaacaaccucgacuccaaggucgggggcaacuacaacuaccuguaccgccuguuccgcaagagcaaccucaagcccuucgagcgggacaucuccaccgagaucuaccaggccggcagcacccccugcaacgggguggagggcuucaacugcuacuucccccugcaguccuacggguuccagccgaccaacggcgugggguaccagcccuaccggguggugguccugagcuucgagcuccugcacgcccccgccacggugugcggccccaagaaguccaccaaccuggugaagaacaagugcgucaacuucaacuucaacggccucaccgggaccggcgugcugaccgagagcaacaagaaguuccugccguuccagcaguucgggcgcgacaucgccgacacgaccgacgcggugcgcgacccccagacccuggagauccucgacaucacccccugcagcuucggcggggucuccgugaucacgccgggcaccaacaccagcaaccagguggccguccuguaccagggcgugaacugcaccgaggugcccgucgccauccacgccgaccagcugacgcccaccuggcggguguacuccaccgggagcaacguguuccagacccgcgccggcugccucaucggggcggagcacgucaacaacuccuacgagugcgacauccccaucggcgccggcaucugcgccagcuaccagacgcagaccaacuccccgcggcgcgcccggagcguggcgucccagagcaucaucgccuacaccaugucccugggggccgagaacagcguggccuacuccaacaacagcaucgccauccccaccaacuucacgaucuccgucaccaccgagauccugcccgugagcaugaccaagacgagcguggacugcaccauguacaucugcggcgacuccaccgagugcagcaaccuccugcugcaguacggguccuucugcacccagcucaaccgcgcgcugacgggcaucgccgucgagcaggacaagaacacccaggagguguucgcccaggugaagcagaucuacaagacgcccccgaucaaggacuucgggggcuucaacuucagccagauccugcccgaccccuccaagcccagcaagcgguccuucaucgaggaccuccuguucaacaaggucacccuggccgacgccggcuucaucaagcaguacggggacugccucggcgacaucgcggcccgcgaccugaucugcgcccagaaguucaacgggcugaccgugcucccgccccugcugaccgacgagaugaucgcccaguacaccagcgcccuccuggcgggcaccaucacguccggguggaccuucggcgccggcgccgcccugcagauccccuucgcgaugcagauggccuaccgguucaacgggaucggcgugacccagaacguccucuacgagaaccagaagcugaucgccaaccaguucaacagcgccaucgggaagauccaggacucccugagcuccaccgccagcgcgcucggcaagcugcaggacguggugaaccagaacgcccaggcccugaacacgcucgucaagcagcuguccagcaacuucggggccaucuccagcgugcugaacgacauccucucccgccuggacccgcccgaggccgaggugcagaucgaccggcugaucaccggccgccuccagagccugcagaccuacgucacccagcagcugauccgggcggccgagauccgcgccagcgccaaccucgccgcgaccaagauguccgagugcgugcugggccagagcaagcggguggacuucugcgggaagggcuaccaccugauguccuucccccagagcgcgccccacggggucguguuccuccacgugacguacguccccgcccaggagaagaacuucaccaccgccccggccaucugccacgacggcaaggcccacuucccccgcgaggggguguucgucuccaacggcacccacugguucgugacgcagcggaacuucuacgagccccagaucaucaccaccgacaacaccuucgugagcggcaacugcgacgucgugaucgggaucgugaacaacacggucuacgacccccugcagccggagcuggacuccuucaaggaggagcucgacaaguacuucaagaaccacaccagccccgacguggaccugggcgacaucuccgggaucaacgccagcguggucaacauccagaaggagaucgaccgccugaacgagguggccaagaaccucaacgagucccugaucgaccugcaggagcucggcaaguacgagcaguacaucaaguggcccugguacaucuggcugggcuucaucgccgggcugaucgcgaucgugauggucaccaucaugcucugcugcaugaccagcugcugcuccugccugaagggcugcugcagcugcggguccugcugcaaguucgacgaggacgacagcgagccggugcugaagggcgugaagcuccacuacacgugaggacuaguuauaagacugacuagcccgaugggccucccaacgggcccuccuccccuccuugcaccgagauuaauagaucucaaaggcucuuuucagagccaccaaaaaaaaaaaaaaaaaaaaaaaaaaaaaaaaaaaaaaaaaaaaaaaaaaaaaaaaaaaaaaaaaaaaaaaaaaaaaaaaaaaaaaaaaaaaaaaaaaaaa

SEQ ID NO: 24422 - RNA, 4041 nt, Artificial Sequence
  SARS-CoV-2/Wuhan/WIV05/2019__EPI_ISL_402128 spike protein mRNA gc (1-1273)(K986P_V987P_Y453F_D614G)
aggagaaagcuuaccauguucguguuccugguccuccugccccuggugagcucccagugcgugaaccucaccacccgcacgcagcugccgcccgccuacaccaacagcuucacccggggcgucuacuaccccgacaagguguuccgcuccagcgugcugcacuccacccaggaccucuuccugcccuucuucagcaacgucacgugguuccacgccauccacguguccgggaccaacggcaccaagcgguucgacaacccggugcugcccuucaacgacggggucuacuucgcgagcaccgagaaguccaacaucauccgcggcuggaucuucgggacgacccucgacagcaagacccagucccugcugaucgugaacaacgccaccaacguggucaucaaggugugcgaguuccaguucugcaacgaccccuuccucggcguguacuaccacaagaacaacaagagcuggauggaguccgaguuccgggucuacagcuccgccaacaacugcacguucgaguacgugagccagcccuuccugauggaccuggagggcaagcaggggaacuucaagaaccuccgcgaguucguguucaagaacaucgacggcuacuucaagaucuacuccaagcacaccccgaucaaccugguccgggaccugccccagggguucagcgcccucgagccccugguggaccugcccaucggcaucaacaucacccgcuuccagacccuccuggcccugcaccgguccuaccucacgccgggggacagcagcuccggcuggaccgcgggcgccgccgccuacuacgugggguaccugcagccccgcaccuuccugcucaaguacaacgagaacggcaccaucacggacgcggucgacugcgcccuggacccccugagcgagaccaagugcacccucaaguccuucaccguggagaaggggaucuaccagacgagcaacuuccgggugcagcccaccgaguccaucguccgcuucccgaacaucaccaaccugugccccuucggcgagguguucaacgccacccgguucgccagcgucuacgccuggaaccgcaagcggaucuccaacugcguggcggacuacagcgugcuguacaacuccgccagcuucuccacguucaagugcuacggcgucagccccaccaagcucaacgaccugugcuucaccaacguguacgccgacuccuucgugauccgcggggacgagguccggcagaucgcccccggccagaccgggaagaucgccgacuacaacuacaagcugccggacgacuucacgggcugcgugaucgcguggaacagcaacaaccucgacuccaaggucgggggcaacuacaacuaccuguuccgccuguuccgcaagagcaaccucaagcccuucgagcgggacaucuccaccgagaucuaccaggccggcagcacccccugcaacgggguggagggcuucaacugcuacuucccccugcaguccuacggguuccagccgaccaacggcgugggguaccagcccuaccggguggucgugcugagcuucgagcuccugcacgcccccgccacggugugcggccccaagaaguccaccaaccuggucaagaacaagugcgugaacuucaacuucaacggccucaccgggaccggcgugcugaccgagagcaacaagaaguuccugccguuccagcaguucgggcgcgacaucgccgacacgaccgacgcgguccgcgacccccagacccuggagauccucgacaucacccccugcagcuucggcgggguguccgugaucacgccgggcaccaacaccagcaaccaggucgccgugcuguaccagggcgugaacugcaccgagguccccguggccauccacgccgaccagcugacgcccaccuggcggguguacuccaccgggagcaacgucuuccagacccgcgccggcugccucaucggggcggagcacgugaacaacuccuacgagugcgacauccccaucggcgccggcaucugcgccagcuaccagacgcagaccaacuccccgcggcgcgcccggagcguggcgucccagagcaucaucgccuacaccaugucccugggggccgagaacagcgucgccuacuccaacaacagcaucgccauccccaccaacuucacgaucuccgugaccaccgagauccugcccgugagcaugaccaagacgagcgucgacugcaccauguacaucugcggcgacuccaccgagugcagcaaccuccugcugcaguacggguccuucugcacccagcucaaccgcgcgcugacgggcaucgccguggagcaggacaagaacacccaggagguguucgcccaggucaagcagaucuacaagacgcccccgaucaaggacuucgggggcuucaacuucagccagauccugcccgaccccuccaagcccagcaagcgguccuucaucgaggaccuccuguucaacaaggugacccuggccgacgccggcuucaucaagcaguacggggacugccucggcgacaucgcggcccgcgaccugaucugcgcccagaaguucaacgggcugaccgugcucccgccccugcugaccgacgagaugaucgcccaguacaccagcgcccuccuggcgggcaccaucacguccggguggaccuucggcgccggcgccgcccugcagauccccuucgcgaugcagauggccuaccgguucaacgggaucggcgucacccagaacgugcucuacgagaaccagaagcugaucgccaaccaguucaacagcgccaucgggaagauccaggacucccugagcuccaccgccagcgcgcucggcaagcugcaggacguggucaaccagaacgcccaggcccugaacacgcucgugaagcagcuguccagcaacuucggggccaucuccagcgugcugaacgacauccucucccgccuggacccgcccgaggccgagguccagaucgaccggcugaucaccggccgccuccagagccugcagaccuacgugacccagcagcugauccgggcggccgagauccgcgccagcgccaaccucgccgcgaccaagauguccgagugcgugcugggccagagcaagcgggucgacuucugcgggaagggcuaccaccugauguccuucccccagagcgcgccccacggggugguguuccuccacgucacguacgugcccgcccaggagaagaacuucaccaccgccccggccaucugccacgacggcaaggcccacuucccccgcgagggggucuucguguccaacggcacccacugguucgugacgcagcggaacuucuacgagccccagaucaucaccaccgacaacaccuucgucagcggcaacugcgacguggugaucgggaucgucaacaacacgguguacgacccccugcagccggagcuggacuccuucaaggaggagcucgacaaguacuucaagaaccacaccagccccgacguggaccugggcgacaucuccgggaucaacgccagcgucgugaacauccagaaggagaucgaccgccugaacgagguggccaagaaccucaacgagucccugaucgaccugcaggagcucggcaaguacgagcaguacaucaaguggcccugguacaucuggcugggcuucaucgccgggcugaucgcgaucgucauggugaccaucaugcucugcugcaugaccagcugcugcuccugccugaagggcugcugcagcugcggguccugcugcaaguucgacgaggacgacagcgagccggugcugaagggcgucaagcuccacuacacgugaggacuaguuauaagacugacuagcccgaugggccucccaacgggcccuccuccccuccuugcaccgagauuaauagaucucaaaggcucuuuucagagccaccaaaaaaaaaaaaaaaaaaaaaaaaaaaaaaaaaaaaaaaaaaaaaaaaaaaaaaaaaaaaaaaaaaaaaaaaaaaaaaaaaaaaaaaaaaaaaaaaaaaaa

SEQ ID NO: 24423 - RNA, 4041 nt, Artificial Sequence
  SARS-CoV-2/Wuhan/WIV05/2019__EPI_ISL_402128 spike protein mRNA gc (1-1273)(K986P_V987P_D614G_I692V)
aggagaaagcuuaccauguucguguuccugguccuccugccccuggugagcucccagugcgugaaccucaccacccgcacgcagcugccgcccgccuacaccaacagcuucacccggggcgucuacuaccccgacaagguguuccgcuccagcgugcugcacuccacccaggaccucuuccugcccuucuucagcaacgucacgugguuccacgccauccacguguccgggaccaacggcaccaagcgguucgacaacccggugcugcccuucaacgacggggucuacuucgcgagcaccgagaaguccaacaucauccgcggcuggaucuucgggacgacccucgacagcaagacccagucccugcugaucgugaacaacgccaccaacguggucaucaaggugugcgaguuccaguucugcaacgaccccuuccucggcguguacuaccacaagaacaacaagagcuggauggaguccgaguuccgggucuacagcuccgccaacaacugcacguucgaguacgugagccagcccuuccugauggaccuggagggcaagcaggggaacuucaagaaccuccgcgaguucguguucaagaacaucgacggcuacuucaagaucuacuccaagcacaccccgaucaaccugguccgggaccugccccagggguucagcgcccucgagccccugguggaccugcccaucggcaucaacaucacccgcuuccagacccuccuggcccugcaccgguccuaccucacgccgggggacagcagcuccggcuggaccgcgggcgccgccgccuacuacgugggguaccugcagccccgcaccuuccugcucaaguacaacgagaacggcaccaucacggacgcggucgacugcgcccuggacccccugagcgagaccaagugcacccucaaguccuucaccguggagaaggggaucuaccagacgagcaacuuccgggugcagcccaccgaguccaucguccgcuucccgaacaucaccaaccugugccccuucggcgagguguucaacgccacccgguucgccagcgucuacgccuggaaccgcaagcggaucuccaacugcguggcggacuacagcgugcuguacaacuccgccagcuucuccacguucaagugcuacggcgucagccccaccaagcucaacgaccugugcuucaccaacguguacgccgacuccuucgugauccgcggggacgagguccggcagaucgcccccggccagaccgggaagaucgccgacuacaacuacaagcugccggacgacuucacgggcugcgugaucgcguggaacagcaacaaccucgacuccaaggucgggggcaacuacaacuaccuguaccgccuguuccgcaagagcaaccucaagcccuucgagcgggacaucuccaccgagaucuaccaggccggcagcacccccugcaacgggguggagggcuucaacugcuacuucccccugcaguccuacggguuccagccgaccaacggcgugggguaccagcccuaccggguggucgugcugagcuucgagcuccugcacgcccccgccacggugugcggccccaagaaguccaccaaccuggucaagaacaagugcgugaacuucaacuucaacggccucaccgggaccggcgugcugaccgagagcaacaagaaguuccugccguuccagcaguucgggcgcgacaucgccgacacgaccgacgcgguccgcgacccccagacccuggagauccucgacaucacccccugcagcuucggcgggguguccgugaucacgccgggcaccaacaccagcaaccaggucgccgugcuguaccagggcgugaacugcaccgagguccccguggccauccacgccgaccagcugacgcccaccuggcggguguacuccaccgggagcaacgucuuccagacccgcgccggcugccucaucggggcggagcacgugaacaacuccuacgagugcgacauccccaucggcgccggcaucugcgccagcuaccagacgcagaccaacuccccgcggcgcgcccggagcguggcgucccagagcgucaucgccuacaccaugucccugggggccgagaacagcguggccuacuccaacaacagcaucgccauccccaccaacuucacgaucuccgugaccaccgagauccugcccgucagcaugaccaagacgagcguggacugcaccauguacaucugcggcgacuccaccgagugcagcaaccuccugcugcaguacggguccuucugcacccagcucaaccgcgcgcugacgggcaucgccguggagcaggacaagaacacccaggaggucuucgcccaggugaagcagaucuacaagacgcccccgaucaaggacuucgggggcuucaacuucagccagauccugcccgaccccuccaagcccagcaagcgguccuucaucgaggaccuccuguucaacaaggugacccuggccgacgccggcuucaucaagcaguacggggacugccucggcgacaucgcggcccgcgaccugaucugcgcccagaaguucaacgggcugaccguccucccgccccugcugaccgacgagaugaucgcccaguacaccagcgcccuccuggcgggcaccaucacguccggguggaccuucggcgccggcgccgcccugcagauccccuucgcgaugcagauggccuaccgguucaacgggaucggcgugacccagaacgugcucuacgagaaccagaagcugaucgccaaccaguucaacagcgccaucgggaagauccaggacucccugagcuccaccgccagcgcgcucggcaagcugcaggacgucgugaaccagaacgcccaggcccugaacacgcucgugaagcagcuguccagcaacuucggggccaucuccagcguccugaacgacauccucucccgccuggacccgcccgaggccgaggugcagaucgaccggcugaucaccggccgccuccagagccugcagaccuacgugacccagcagcugauccgggcggccgagauccgcgccagcgccaaccucgccgcgaccaagauguccgagugcguccugggccagagcaagcggguggacuucugcgggaagggcuaccaccugauguccuucccccagagcgcgccccacgggguggucuuccuccacgugacguacguccccgcccaggagaagaacuucaccaccgccccggccaucugccacgacggcaaggcccacuucccccgcgaggggguguucguguccaacggcacccacugguucgucacgcagcggaacuucuacgagccccagaucaucaccaccgacaacaccuucgugagcggcaacugcgacguggucaucgggaucgugaacaacacgguguacgacccccugcagccggagcuggacuccuucaaggaggagcucgacaaguacuucaagaaccacaccagccccgacgucgaccugggcgacaucuccgggaucaacgccagcguggugaacauccagaaggagaucgaccgccugaacgaggucgccaagaaccucaacgagucccugaucgaccugcaggagcucggcaaguacgagcaguacaucaaguggcccugguacaucuggcugggcuucaucgccgggcugaucgcgaucgugauggugaccaucaugcucugcugcaugaccagcugcugcuccugccugaagggcugcugcagcugcggguccugcugcaaguucgacgaggacgacagcgagccgguccugaagggcgugaagcuccacuacacgugaggacuaguuauaagacugacuagcccgaugggccucccaacgggcccuccuccccuccuugcaccgagauuaauagaucucaaaggcucuuuucagagccaccaaaaaaaaaaaaaaaaaaaaaaaaaaaaaaaaaaaaaaaaaaaaaaaaaaaaaaaaaaaaaaaaaaaaaaaaaaaaaaaaaaaaaaaaaaaaaaaaaaaaa

SEQ ID NO: 24424 - RNA, 4041 nt, Artificial Sequence
  SARS-CoV-2/Wuhan/WIV05/2019__EPI_ISL_402128 spike protein mRNA gc (1-1273)(K986P_V987P_D614G_M1229I)
aggagaaagcuuaccauguucguguuccugguccuccugccccuggugagcucccagugcgugaaccucaccacccgcacgcagcugccgcccgccuacaccaacagcuucacccggggcgucuacuaccccgacaagguguuccgcuccagcgugcugcacuccacccaggaccucuuccugcccuucuucagcaacgucacgugguuccacgccauccacguguccgggaccaacggcaccaagcgguucgacaacccggugcugcccuucaacgacggggucuacuucgcgagcaccgagaaguccaacaucauccgcggcuggaucuucgggacgacccucgacagcaagacccagucccugcugaucgugaacaacgccaccaacguggucaucaaggugugcgaguuccaguucugcaacgaccccuuccucggcguguacuaccacaagaacaacaagagcuggauggaguccgaguuccgggucuacagcuccgccaacaacugcacguucgaguacgugagccagcccuuccugauggaccuggagggcaagcaggggaacuucaagaaccuccgcgaguucguguucaagaacaucgacggcuacuucaagaucuacuccaagcacaccccgaucaaccugguccgggaccugccccagggguucagcgcccucgagccccugguggaccugcccaucggcaucaacaucacccgcuuccagacccuccuggcccugcaccgguccuaccucacgccgggggacagcagcuccggcuggaccgcgggcgccgccgccuacuacgugggguaccugcagccccgcaccuuccugcucaaguacaacgagaacggcaccaucacggacgcggucgacugcgcccuggacccccugagcgagaccaagugcacccucaaguccuucaccguggagaaggggaucuaccagacgagcaacuuccgggugcagcccaccgaguccaucguccgcuucccgaacaucaccaaccugugccccuucggcgagguguucaacgccacccgguucgccagcgucuacgccuggaaccgcaagcggaucuccaacugcguggcggacuacagcgugcuguacaacuccgccagcuucuccacguucaagugcuacggcgucagccccaccaagcucaacgaccugugcuucaccaacguguacgccgacuccuucgugauccgcggggacgagguccggcagaucgcccccggccagaccgggaagaucgccgacuacaacuacaagcugccggacgacuucacgggcugcgugaucgcguggaacagcaacaaccucgacuccaaggucgggggcaacuacaacuaccuguaccgccuguuccgcaagagcaaccucaagcccuucgagcgggacaucuccaccgagaucuaccaggccggcagcacccccugcaacgggguggagggcuucaacugcuacuucccccugcaguccuacggguuccagccgaccaacggcgugggguaccagcccuaccggguggucgugcugagcuucgagcuccugcacgcccccgccacggugugcggccccaagaaguccaccaaccuggucaagaacaagugcgugaacuucaacuucaacggccucaccgggaccggcgugcugaccgagagcaacaagaaguuccugccguuccagcaguucgggcgcgacaucgccgacacgaccgacgcgguccgcgacccccagacccuggagauccucgacaucacccccugcagcuucggcgggguguccgugaucacgccgggcaccaacaccagcaaccaggucgccgugcuguaccagggcgugaacugcaccgagguccccguggccauccacgccgaccagcugacgcccaccuggcggguguacuccaccgggagcaacgucuuccagacccgcgccggcugccucaucggggcggagcacgugaacaacuccuacgagugcgacauccccaucggcgccggcaucugcgccagcuaccagacgcagaccaacuccccgcggcgcgcccggagcguggcgucccagagcaucaucgccuacaccaugucccugggggccgagaacagcgucgccuacuccaacaacagcaucgccauccccaccaacuucacgaucuccgugaccaccgagauccugcccgugagcaugaccaagacgagcgucgacugcaccauguacaucugcggcgacuccaccgagugcagcaaccuccugcugcaguacggguccuucugcacccagcucaaccgcgcgcugacgggcaucgccguggagcaggacaagaacacccaggagguguucgcccaggucaagcagaucuacaagacgcccccgaucaaggacuucgggggcuucaacuucagccagauccugcccgaccccuccaagcccagcaagcgguccuucaucgaggaccuccuguucaacaaggugacccuggccgacgccggcuucaucaagcaguacggggacugccucggcgacaucgcggcccgcgaccugaucugcgcccagaaguucaacgggcugaccgugcucccgccccugcugaccgacgagaugaucgcccaguacaccagcgcccuccuggcgggcaccaucacguccggguggaccuucggcgccggcgccgcccugcagauccccuucgcgaugcagauggccuaccgguucaacgggaucggcgucacccagaacgugcucuacgagaaccagaagcugaucgccaaccaguucaacagcgccaucgggaagauccaggacucccugagcuccaccgccagcgcgcucggcaagcugcaggacguggucaaccagaacgcccaggcccugaacacgcucgugaagcagcuguccagcaacuucggggccaucuccagcgugcugaacgacauccucucccgccuggacccgcccgaggccgagguccagaucgaccggcugaucaccggccgccuccagagccugcagaccuacgugacccagcagcugauccgggcggccgagauccgcgccagcgccaaccucgccgcgaccaagauguccgagugcgugcugggccagagcaagcgggucgacuucugcgggaagggcuaccaccugauguccuucccccagagcgcgccccacggggugguguuccuccacgucacguacgugcccgcccaggagaagaacuucaccaccgccccggccaucugccacgacggcaaggcccacuucccccgcgagggggucuucguguccaacggcacccacugguucgugacgcagcggaacuucuacgagccccagaucaucaccaccgacaacaccuucgucagcggcaacugcgacguggugaucgggaucgucaacaacacgguguacgacccccugcagccggagcuggacuccuucaaggaggagcucgacaaguacuucaagaaccacaccagccccgacguggaccugggcgacaucuccgggaucaacgccagcgucgugaacauccagaaggagaucgaccgccugaacgagguggccaagaaccucaacgagucccugaucgaccugcaggagcucggcaaguacgagcaguacaucaaguggcccugguacaucuggcugggcuucaucgccgggcugaucgcgaucgucaucgugaccaucaugcucugcugcaugaccagcugcugcuccugccugaagggcugcugcagcugcggguccugcugcaaguucgacgaggacgacagcgagccggugcugaagggcgucaagcuccacuacacgugaggacuaguuauaagacugacuagcccgaugggccucccaacgggcccuccuccccuccuugcaccgagauuaauagaucucaaaggcucuuuucagagccaccaaaaaaaaaaaaaaaaaaaaaaaaaaaaaaaaaaaaaaaaaaaaaaaaaaaaaaaaaaaaaaaaaaaaaaaaaaaaaaaaaaaaaaaaaaaaaaaaaaaaa

SEQ ID NO: 24425 - RNA, 4035 nt, Artificial Sequence
  SARS-CoV-2/Wuhan/WIV05/2019__EPI_ISL_402128 spike protein mRNA gc (1-1273)(K986P_V987P_H69del_V70del_A222V_Y453F_S477N_D614G_I692V)
aggagaaagcuuaccauguucguguuccugguccuccugccccuggugagcucccagugcgugaaccucaccacccgcacgcagcugccgcccgccuacaccaacagcuucacccggggcgucuacuaccccgacaagguguuccgcuccagcgugcugcacuccacccaggaccucuuccugcccuucuucagcaacgucacgugguuccacgccaucuccgggaccaacggcaccaagcgguucgacaacccggugcugcccuucaacgacgggguguacuucgcgagcaccgagaaguccaacaucauccgcggcuggaucuucgggacgacccucgacagcaagacccagucccugcugaucgucaacaacgccaccaacguggugaucaaggucugcgaguuccaguucugcaacgaccccuuccucggcguguacuaccacaagaacaacaagagcuggauggaguccgaguuccggguguacagcuccgccaacaacugcacguucgaguacgucagccagcccuuccugauggaccuggagggcaagcaggggaacuucaagaaccuccgcgaguucguguucaagaacaucgacggcuacuucaagaucuacuccaagcacaccccgaucaaccuggugcgggaccugccccagggguucagcguccucgagccccugguggaccugcccaucggcaucaacaucacccgcuuccagacccuccuggcccugcaccgguccuaccucacgccgggggacagcagcuccggcuggaccgccggcgcggccgccuacuacgugggguaccugcagccccgcaccuuccugcucaaguacaacgagaacggcaccaucacggacgccgucgacugcgcgcuggacccccugagcgagaccaagugcacccucaaguccuucaccguggagaaggggaucuaccagacgagcaacuuccgggugcagcccaccgaguccaucguccgcuucccgaacaucaccaaccugugccccuucggcgagguguucaacgccacccgguucgccagcgucuacgccuggaaccgcaagcggaucuccaacugcguggccgacuacagcgugcuguacaacuccgcgagcuucuccacguucaagugcuacggcgucagccccaccaagcucaacgaccugugcuucaccaacguguacgccgacuccuucgugauccgcggggacgagguccggcagaucgcccccggccagaccgggaagaucgccgacuacaacuacaagcugccggacgacuucacgggcugcgugaucgccuggaacagcaacaaccucgacuccaaggucgggggcaacuacaacuaccuguuccgccuguuccgcaagagcaaccucaagcccuucgagcgggacaucuccaccgagaucuaccaggcgggcaacacccccugcaacgggguggagggcuucaacugcuacuucccccugcagagcuacggguuccagccgaccaacggcgugggguaccagcccuaccggguggucgugcuguccuucgagcuccugcacgcccccgccacggugugcggccccaagaaguccaccaaccuggucaagaacaagugcgugaacuucaacuucaacggccucaccgggaccggcgugcugaccgagagcaacaagaaguuccugccguuccagcaguucgggcgcgacaucgccgacacgaccgacgccguccgcgacccccagacccuggagauccucgacaucacccccugcagcuucggcggggugagcgugaucacgccgggcaccaacaccuccaaccaggucgcggugcuguaccagggcgugaacugcaccgagguccccguggccauccacgccgaccagcugacgcccaccuggcggguguacagcaccggguccaacgucuuccagacccgcgccggcugccucaucggggccgagcacgugaacaacagcuacgagugcgacauccccaucggcgcgggcaucugcgccuccuaccagacgcagaccaacagcccgcggcgcgcccgguccguggccagccaguccgucaucgcguacaccaugagccugggggccgagaacuccguggccuacagcaacaacuccaucgccauccccaccaacuucacgaucagcgugaccaccgagauccugcccgucuccaugaccaagacgagcguggacugcaccauguacaucugcggcgacagcaccgagugcuccaaccuccugcugcaguacgggagcuucugcacccagcucaaccgcgcccugacgggcaucgcgguggagcaggacaagaacacccaggaggucuucgcccaggugaagcagaucuacaagacgcccccgaucaaggacuucgggggcuucaacuucucccagauccugcccgaccccagcaagcccuccaagcggagcuucaucgaggaccuccuguucaacaaggugacccuggccgacgccggcuucaucaagcaguacggggacugccucggcgacaucgccgcgcgcgaccugaucugcgcccagaaguucaacgggcugaccguccucccgccccugcugaccgacgagaugaucgcccaguacaccuccgcccuccuggccggcaccaucacgagcggguggaccuucggcgcgggcgccgcccugcagauccccuucgccaugcagauggcguaccgguucaacgggaucggcgugacccagaacgugcucuacgagaaccagaagcugaucgccaaccaguucaacuccgccaucgggaagauccaggacagccuguccagcaccgccuccgcccucggcaagcugcaggacgucgugaaccagaacgcgcaggcccugaacacgcucgugaagcagcugagcuccaacuucggggccaucagcuccguccugaacgacauccucagccgccuggacccgcccgaggccgaggugcagaucgaccggcugaucaccggccgccuccagucccugcagaccuacgugacccagcagcugauccgggccgcggagauccgcgccagcgccaaccucgccgccaccaagaugagcgagugcguccugggccaguccaagcggguggacuucugcgggaagggcuaccaccugaugagcuucccccaguccgcgccccacgggguggucuuccuccacgugacguacguccccgcccaggagaagaacuucaccaccgccccggccaucugccacgacggcaaggcgcacuucccccgcgaggggguguucgugagcaacggcacccacugguucgucacgcagcggaacuucuacgagccccagaucaucaccaccgacaacaccuucguguccggcaacugcgacguggucaucgggaucgugaacaacacgguguacgacccccugcagccggagcuggacagcuucaaggaggagcucgacaaguacuucaagaaccacaccucccccgacgucgaccugggcgacaucagcgggaucaacgccuccguggugaacauccagaaggagaucgaccgccugaacgaggucgccaagaaccucaacgagagccugaucgaccugcaggagcucggcaaguacgagcaguacaucaaguggcccugguacaucuggcugggcuucaucgccgggcugaucgccaucgugauggugaccaucaugcucugcugcaugaccuccugcugcagcugccugaagggcugcugcuccugcgggagcugcugcaaguucgacgaggacgacuccgagccgguccugaagggcgugaagcuccacuacacgugaggacuaguuauaagacugacuagcccgaugggccucccaacgggcccuccuccccuccuugcaccgagauuaauagaucucaaaggcucuuuucagagccaccaaaaaaaaaaaaaaaaaaaaaaaaaaaaaaaaaaaaaaaaaaaaaaaaaaaaaaaaaaaaaaaaaaaaaaaaaaaaaaaaaaaaaaaaaaaaaaaaaaaaa

SEQ ID NO: 24426 - RNA, 4035 nt, Artificial Sequence
  SARS-CoV-2/Wuhan/WIV05/2019__EPI_ISL_402128 spike protein mRNA gc (1-1273)(K986P_V987P_H69del_V70del_Y453F_D614G_I692V_M1229I)
aggagaaagcuuaccauguucguguuccugguccuccugccccuggugagcucccagugcgugaaccucaccacccgcacgcagcugccgcccgccuacaccaacagcuucacccggggcgucuacuaccccgacaagguguuccgcuccagcgugcugcacuccacccaggaccucuuccugcccuucuucagcaacgucacgugguuccacgccaucuccgggaccaacggcaccaagcgguucgacaacccggugcugcccuucaacgacgggguguacuucgcgagcaccgagaaguccaacaucauccgcggcuggaucuucgggacgacccucgacagcaagacccagucccugcugaucgucaacaacgccaccaacguggugaucaaggucugcgaguuccaguucugcaacgaccccuuccucggcguguacuaccacaagaacaacaagagcuggauggaguccgaguuccggguguacagcuccgccaacaacugcacguucgaguacgucagccagcccuuccugauggaccuggagggcaagcaggggaacuucaagaaccuccgcgaguucguguucaagaacaucgacggcuacuucaagaucuacuccaagcacaccccgaucaaccuggugcgggaccugccccagggguucagcgcccucgagccccuggucgaccugcccaucggcaucaacaucacccgcuuccagacccuccuggcccugcaccgguccuaccucacgccgggggacagcagcuccggcuggaccgcgggcgccgccgccuacuacgugggguaccugcagccccgcaccuuccugcucaaguacaacgagaacggcaccaucacggacgcgguggacugcgcccuggacccccugagcgagaccaagugcacccucaaguccuucaccgucgagaaggggaucuaccagacgagcaacuuccgggugcagcccaccgaguccaucgugcgcuucccgaacaucaccaaccugugccccuucggcgaggucuucaacgccacccgguucgccagcguguacgccuggaaccgcaagcggaucuccaacugcgucgcggacuacagcgugcuguacaacuccgccagcuucuccacguucaagugcuacggcgugagccccaccaagcucaacgaccugugcuucaccaacgucuacgccgacuccuucgugauccgcggggacgaggugcggcagaucgcccccggccagaccgggaagaucgccgacuacaacuacaagcugccggacgacuucacgggcugcgucaucgcguggaacagcaacaaccucgacuccaaggucgggggcaacuacaacuaccuguuccgccuguuccgcaagagcaaccucaagcccuucgagcgggacaucuccaccgagaucuaccaggccggcagcacccccugcaacgggguggagggcuucaacugcuacuucccccugcaguccuacggguuccagccgaccaacggcgugggguaccagcccuaccggguggugguccugagcuucgagcuccugcacgcccccgccacggugugcggccccaagaaguccaccaaccuggugaagaacaagugcgucaacuucaacuucaacggccucaccgggaccggcgugcugaccgagagcaacaagaaguuccugccguuccagcaguucgggcgcgacaucgccgacacgaccgacgcggugcgcgacccccagacccuggagauccucgacaucacccccugcagcuucggcggggucuccgugaucacgccgggcaccaacaccagcaaccagguggccguccuguaccagggcgugaacugcaccgaggugcccgucgccauccacgccgaccagcugacgcccaccuggcggguguacuccaccgggagcaacguguuccagacccgcgccggcugccucaucggggcggagcacgucaacaacuccuacgagugcgacauccccaucggcgccggcaucugcgccagcuaccagacgcagaccaacuccccgcggcgcgcccggagcguggcgucccagagcgugaucgccuacaccaugucccugggggccgagaacagcgucgccuacuccaacaacagcaucgccauccccaccaacuucacgaucuccgugaccaccgagauccugcccgugagcaugaccaagacgagcgucgacugcaccauguacaucugcggcgacuccaccgagugcagcaaccuccugcugcaguacggguccuucugcacccagcucaaccgcgcgcugacgggcaucgccguggagcaggacaagaacacccaggagguguucgcccaggucaagcagaucuacaagacgcccccgaucaaggacuucgggggcuucaacuucagccagauccugcccgaccccuccaagcccagcaagcgguccuucaucgaggaccuccuguucaacaaggugacccuggccgacgccggcuucaucaagcaguacggggacugccucggcgacaucgcggcccgcgaccugaucugcgcccagaaguucaacgggcugaccgugcucccgccccugcugaccgacgagaugaucgcccaguacaccagcgcccuccuggcgggcaccaucacguccggguggaccuucggcgccggcgccgcccugcagauccccuucgcgaugcagauggccuaccgguucaacgggaucggcgucacccagaacgugcucuacgagaaccagaagcugaucgccaaccaguucaacagcgccaucgggaagauccaggacucccugagcuccaccgccagcgcgcucggcaagcugcaggacguggucaaccagaacgcccaggcccugaacacgcucgugaagcagcuguccagcaacuucggggccaucuccagcgugcugaacgacauccucucccgccuggacccgcccgaggccgagguccagaucgaccggcugaucaccggccgccuccagagccugcagaccuacgugacccagcagcugauccgggcggccgagauccgcgccagcgccaaccucgccgcgaccaagauguccgagugcgugcugggccagagcaagcgggucgacuucugcgggaagggcuaccaccugauguccuucccccagagcgcgccccacggggugguguuccuccacgucacguacgugcccgcccaggagaagaacuucaccaccgccccggccaucugccacgacggcaaggcccacuucccccgcgagggggucuucguguccaacggcacccacugguucgugacgcagcggaacuucuacgagccccagaucaucaccaccgacaacaccuucgucagcggcaacugcgacguggugaucgggaucgucaacaacacgguguacgacccccugcagccggagcuggacuccuucaaggaggagcucgacaaguacuucaagaaccacaccagccccgacguggaccugggcgacaucuccgggaucaacgccagcgucgugaacauccagaaggagaucgaccgccugaacgagguggccaagaaccucaacgagucccugaucgaccugcaggagcucggcaaguacgagcaguacaucaaguggcccugguacaucuggcugggcuucaucgccgggcugaucgcgaucgucaucgugaccaucaugcucugcugcaugaccagcugcugcuccugccugaagggcugcugcagcugcggguccugcugcaaguucgacgaggacgacagcgagccggugcugaagggcgucaagcuccacuacacgugaggacuaguuauaagacugacuagcccgaugggccucccaacgggcccuccuccccuccuugcaccgagauuaauagaucucaaaggcucuuuucagagccaccaaaaaaaaaaaaaaaaaaaaaaaaaaaaaaaaaaaaaaaaaaaaaaaaaaaaaaaaaaaaaaaaaaaaaaaaaaaaaaaaaaaaaaaaaaaaaaaaaaaaa

SEQ ID NO: 24427 - RNA, 4032 nt, Artificial Sequence
  SARS-CoV-2/Wuhan/WIV05/2019__EPI_ISL_402128 spike protein mRNA gc (1-1273)(K986P_V987P_K986P_V987P_H69del_V70del_Y144del_N501Y_A570 D_D614G_P681H_T716I_S982A_D1118H)
aggagaaagcuuaccauguucguguuccugguccuccugccccuggugagcucccagugcgugaaccucaccacccgcacgcagcugccgcccgccuacaccaacagcuucacccggggcgucuacuaccccgacaagguguuccgcuccagcgugcugcacuccacccaggaccucuuccugcccuucuucagcaacgucacgugguuccacgccaucuccgggaccaacggcaccaagcgguucgacaacccggugcugcccuucaacgacgggguguacuucgcgagcaccgagaaguccaacaucauccgcggcuggaucuucgggacgacccucgacagcaagacccagucccugcugaucgucaacaacgccaccaacguggugaucaaggucugcgaguuccaguucugcaacgaccccuuccucggcguguaccacaagaacaacaagagcuggauggaguccgaguuccggguguacagcuccgccaacaacugcacguucgaguacgucagccagcccuuccugauggaccuggagggcaagcaggggaacuucaagaaccuccgcgaguucguguucaagaacaucgacggcuacuucaagaucuacuccaagcacaccccgaucaaccuggugcgggaccugccccagggguucagcgcccucgagccccuggucgaccugcccaucggcaucaacaucacccgcuuccagacccuccuggcccugcaccgguccuaccucacgccgggggacagcagcuccggcuggaccgcgggcgccgccgccuacuacgugggguaccugcagccccgcaccuuccugcucaaguacaacgagaacggcaccaucacggacgcgguggacugcgcccuggacccccugagcgagaccaagugcacccucaaguccuucaccgucgagaaggggaucuaccagacgagcaacuuccgggugcagcccaccgaguccaucgugcgcuucccgaacaucaccaaccugugccccuucggcgaggucuucaacgccacccgguucgccagcguguacgccuggaaccgcaagcggaucuccaacugcgucgcggacuacagcgugcuguacaacuccgccagcuucuccacguucaagugcuacggcgugagccccaccaagcucaacgaccugugcuucaccaacgucuacgccgacuccuucgugauccgcggggacgaggugcggcagaucgcccccggccagaccgggaagaucgccgacuacaacuacaagcugccggacgacuucacgggcugcgucaucgcguggaacagcaacaaccucgacuccaaggucgggggcaacuacaacuaccuguaccgccuguuccgcaagagcaaccucaagcccuucgagcgggacaucuccaccgagaucuaccaggccggcagcacccccugcaacgggguggagggcuucaacugcuacuucccccugcaguccuacggguuccagccgaccuacggcgugggguaccagcccuaccggguggugguccugagcuucgagcuccugcacgcccccgccacggugugcggccccaagaaguccaccaaccuggugaagaacaagugcgucaacuucaacuucaacggccucaccgggaccggcgugcugaccgagagcaacaagaaguuccugccguuccagcaguucgggcgcgacaucgacgacacgaccgacgccgugcgcgacccccagacccuggagauccucgacaucacccccugcagcuucggcggggucuccgugaucacgccgggcaccaacaccagcaaccagguggcgguccuguaccagggcgugaacugcaccgaggugcccgucgccauccacgccgaccagcugacgcccaccuggcggguguacuccaccgggagcaacguguuccagacccgcgccggcugccucaucggggccgagcacgucaacaacuccuacgagugcgacauccccaucggcgcgggcaucugcgccagcuaccagacgcagaccaacucccaccggcgcgcccggagcguggccucccagagcaucaucgcguacaccaugucccugggggccgagaacagcguggccuacuccaacaacagcaucgccaucccgaucaacuucaccaucuccgucacgaccgagauccugcccgugagcaugaccaagaccagcguggacugcacgauguacaucugcggcgacuccaccgagugcagcaaccuccugcugcaguacggguccuucugcacccagcucaaccgcgcccugaccggcaucgcggucgagcaggacaagaacacgcaggagguguucgcccaggugaagcagaucuacaagaccccgcccaucaaggacuucgggggcuucaacuucagccagauccugcccgaccccuccaagcccagcaagcgguccuucaucgaggaccuccuguucaacaaggucacccuggccgacgccggcuucaucaagcaguacggggacugccucggcgacaucgccgcgcgcgaccugaucugcgcccagaaguucaacgggcugaccgugcugcccccgcuccugacggacgagaugaucgcccaguacaccagcgcccuccuggccggcaccaucaccuccggguggacguucggcgcgggcgccgcccugcagauccccuucgccaugcagauggcguaccgguucaacgggaucggcgugacccagaacguccucuacgagaaccagaagcugaucgccaaccaguucaacagcgccaucgggaagauccaggacucccugagcuccaccgccagcgcccucggcaagcugcaggacguggugaaccagaacgcgcaggcccugaacacccucgucaagcagcuguccagcaacuucggggccaucuccagcgugcugaacgacauccucgcccgccuggacccgcccgaggccgaggugcagaucgaccggcugaucacgggccgccuccagucccugcagaccuacgucacccagcagcugauccgggcggccgagauccgcgccagcgccaaccucgccgcgaccaagaugagcgagugcgugcugggccaguccaagcggguggacuucugcgggaagggcuaccaccugaugagcuucccccaguccgcgccccacggggucguguuccuccacgugaccuacguccccgcccaggagaagaacuucacgaccgcccccgccaucugccacgacggcaaggcccacuucccgcgcgaggggguguucgucagcaacggcacccacugguucgugacccagcggaacuucuacgagccccagaucaucacgacccacaacaccuucguguccggcaacugcgacgucgugaucgggaucgugaacaacaccgucuacgacccccugcagcccgagcuggacagcuucaaggaggagcucgacaaguacuucaagaaccacacguccccggacguggaccugggcgacaucagcgggaucaacgccuccguggucaacauccagaaggagaucgaccgccugaacgagguggccaagaaccucaacgagagccugaucgaccugcaggagcucggcaaguacgagcaguacaucaaguggcccugguacaucuggcugggcuucaucgccgggcugaucgcgaucgugauggucaccaucaugcucugcugcaugaccuccugcugcagcugccugaagggcugcugcuccugcgggagcugcugcaaguucgacgaggacgacuccgagcccgugcugaagggcgugaagcuccacuacaccugaggacuaguuauaagacugacuagcccgaugggccucccaacgggcccuccuccccuccuugcaccgagauuaauagaucucaaaggcucuuuucagagccaccaaaaaaaaaaaaaaaaaaaaaaaaaaaaaaaaaaaaaaaaaaaaaaaaaaaaaaaaaaaaaaaaaaaaaaaaaaaaaaaaaaaaaaaaaaaaaaaaaaaaa

SEQ ID NO: 24428 - RNA, 4041 nt, Artificial Sequence
  SARS-CoV-2/Wuhan/WIV05/2019__EPI_ISL_402128 spike protein mRNA gc (1-1273)(K986P_V987P_K986P_V987P_K417N_E484K_N501Y_D614G)
aggagaaagcuuaccauguucguguuccugguccuccugccccuggugagcucccagugcgugaaccucaccacccgcacgcagcugccgcccgccuacaccaacagcuucacccggggcgucuacuaccccgacaagguguuccgcuccagcgugcugcacuccacccaggaccucuuccugcccuucuucagcaacgucacgugguuccacgccauccacguguccgggaccaacggcaccaagcgguucgacaacccggugcugcccuucaacgacggggucuacuucgcgagcaccgagaaguccaacaucauccgcggcuggaucuucgggacgacccucgacagcaagacccagucccugcugaucgugaacaacgccaccaacguggucaucaaggugugcgaguuccaguucugcaacgaccccuuccucggcguguacuaccacaagaacaacaagagcuggauggaguccgaguuccgggucuacagcuccgccaacaacugcacguucgaguacgugagccagcccuuccugauggaccuggagggcaagcaggggaacuucaagaaccuccgcgaguucguguucaagaacaucgacggcuacuucaagaucuacuccaagcacaccccgaucaaccugguccgggaccugccccagggguucagcgcccucgagccccugguggaccugcccaucggcaucaacaucacccgcuuccagacccuccuggcccugcaccgguccuaccucacgccgggggacagcagcuccggcuggaccgcgggcgccgccgccuacuacgugggguaccugcagccccgcaccuuccugcucaaguacaacgagaacggcaccaucacggacgcggucgacugcgcccuggacccccugagcgagaccaagugcacccucaaguccuucaccguggagaaggggaucuaccagacgagcaacuuccgggugcagcccaccgaguccaucguccgcuucccgaacaucaccaaccugugccccuucggcgagguguucaacgccacccgguucgccagcgucuacgccuggaaccgcaagcggaucuccaacugcguggcggacuacagcgugcuguacaacuccgccagcuucuccacguucaagugcuacggcgucagccccaccaagcucaacgaccugugcuucaccaacguguacgccgacuccuucgugauccgcggggacgagguccggcagaucgcccccggccagaccgggaacaucgccgacuacaacuacaagcugccggacgacuucacgggcugcgugaucgcguggaacagcaacaaccucgacuccaaggucgggggcaacuacaacuaccuguaccgccuguuccgcaagagcaaccucaagcccuucgagcgggacaucuccaccgagaucuaccaggccggcagcacccccugcaacggggugaagggcuucaacugcuacuucccccugcaguccuacggguuccagccgaccuacggcgugggguaccagcccuaccggguggucgugcugagcuucgagcuccugcacgcccccgccacggugugcggccccaagaaguccaccaaccuggucaagaacaagugcgugaacuucaacuucaacggccucaccgggaccggcgugcugaccgagagcaacaagaaguuccugccguuccagcaguucgggcgcgacaucgccgacacgaccgacgcgguccgcgacccccagacccuggagauccucgacaucacccccugcagcuucggcgggguguccgugaucacgccgggcaccaacaccagcaaccaggucgccgugcuguaccagggcgugaacugcaccgagguccccguggccauccacgccgaccagcugacgcccaccuggcggguguacuccaccgggagcaacgucuuccagacccgcgccggcugccucaucggggcggagcacgugaacaacuccuacgagugcgacauccccaucggcgccggcaucugcgccagcuaccagacgcagaccaacuccccgcggcgcgcccggagcguggcgucccagagcaucaucgccuacaccaugucccugggggccgagaacagcgucgccuacuccaacaacagcaucgccauccccaccaacuucacgaucuccgugaccaccgagauccugcccgugagcaugaccaagacgagcgucgacugcaccauguacaucugcggcgacuccaccgagugcagcaaccuccugcugcaguacggguccuucugcacccagcucaaccgcgcgcugacgggcaucgccguggagcaggacaagaacacccaggagguguucgcccaggucaagcagaucuacaagacgcccccgaucaaggacuucgggggcuucaacuucagccagauccugcccgaccccuccaagcccagcaagcgguccuucaucgaggaccuccuguucaacaaggugacccuggccgacgccggcuucaucaagcaguacggggacugccucggcgacaucgcggcccgcgaccugaucugcgcccagaaguucaacgggcugaccgugcucccgccccugcugaccgacgagaugaucgcccaguacaccagcgcccuccuggcgggcaccaucacguccggguggaccuucggcgccggcgccgcccugcagauccccuucgcgaugcagauggccuaccgguucaacgggaucggcgucacccagaacgugcucuacgagaaccagaagcugaucgccaaccaguucaacagcgccaucgggaagauccaggacucccugagcuccaccgccagcgcgcucggcaagcugcaggacguggucaaccagaacgcccaggcccugaacacgcucgugaagcagcuguccagcaacuucggggccaucuccagcgugcugaacgacauccucucccgccuggacccgcccgaggccgagguccagaucgaccggcugaucaccggccgccuccagagccugcagaccuacgugacccagcagcugauccgggcggccgagauccgcgccagcgccaaccucgccgcgaccaagauguccgagugcgugcugggccagagcaagcgggucgacuucugcgggaagggcuaccaccugauguccuucccccagagcgcgccccacggggugguguuccuccacgucacguacgugcccgcccaggagaagaacuucaccaccgccccggccaucugccacgacggcaaggcccacuucccccgcgagggggucuucguguccaacggcacccacugguucgugacgcagcggaacuucuacgagccccagaucaucaccaccgacaacaccuucgucagcggcaacugcgacguggugaucgggaucgucaacaacacgguguacgacccccugcagccggagcuggacuccuucaaggaggagcucgacaaguacuucaagaaccacaccagccccgacguggaccugggcgacaucuccgggaucaacgccagcgucgugaacauccagaaggagaucgaccgccugaacgagguggccaagaaccucaacgagucccugaucgaccugcaggagcucggcaaguacgagcaguacaucaaguggcccugguacaucuggcugggcuucaucgccgggcugaucgcgaucgucauggugaccaucaugcucugcugcaugaccagcugcugcuccugccugaagggcugcugcagcugcggguccugcugcaaguucgacgaggacgacagcgagccggugcugaagggcgucaagcuccacuacacgugaggacuaguuauaagacugacuagcccgaugggccucccaacgggcccuccuccccuccuugcaccgagauuaauagaucucaaaggcucuuuucagagccaccaaaaaaaaaaaaaaaaaaaaaaaaaaaaaaaaaaaaaaaaaaaaaaaaaaaaaaaaaaaaaaaaaaaaaaaaaaaaaaaaaaaaaaaaaaaaaaaaaaaaa

SEQ ID NO: 24429 - RNA, 4032 nt, Artificial Sequence
  SARS-CoV-2/Wuhan/WIV05/2019__EPI_ISL_402128 spike protein mRNA gc (1-1273)(K986P_V987P_K986P_V987P_L18F_D80A_D215G_L242del_A243del_ L244del_R246I_K417N_E484K_N501Y_D614G_A701V)
aggagaaagcuuaccauguucguguuccugguccuccugccccuggugagcucccagugcgugaacuucaccacccgcacgcagcucccgcccgccuacaccaacagcuucacccggggcgucuacuaccccgacaagguguuccgcuccagcgugcugcacuccacccaggaccuguuccuccccuucuucagcaacgucacgugguuccacgccauccacguguccgggaccaacggcaccaagcgguucgcgaacccggugcugcccuucaacgacggggucuacuucgccagcaccgagaaguccaacaucauccgcggcuggaucuucgggacgacccuggacagcaagacccagucccuccugaucgugaacaacgccaccaacguggucaucaaggugugcgaguuccaguucugcaacgaccccuuccugggcguguacuaccacaagaacaacaagagcuggauggaguccgaguuccgggucuacagcuccgccaacaacugcacguucgaguacgugagccagcccuuccucauggaccuggagggcaagcaggggaacuucaagaaccugcgcgaguucguguucaagaacaucgacggcuacuucaagaucuacuccaagcacaccccgaucaaccucguccgggggcugccccagggcuucagcgcccuggagccccucguggaccugcccaucgggaucaacaucacccgcuuccagacccugcacaucuccuaccucacgccgggcgacagcagcuccggcuggaccgcgggggccgccgccuacuacgugggcuaccugcagccccggaccuuccugcucaaguacaacgagaacgggaccaucacggacgcggucgacugcgcccuggacccccugagcgagaccaagugcacccucaaguccuucaccguggagaagggcaucuaccagacgagcaacuuccgcgugcagcccaccgaguccaucguccgguucccgaacaucaccaaccugugccccuucggcgagguguucaacgccacccgcuucgccagcgucuacgccuggaaccggaagcgcaucuccaacugcguggcggacuacagcgugcuguacaacuccgccagcuucuccacguucaagugcuacggggucagccccaccaagcucaacgaccugugcuucaccaacguguacgccgacuccuucgugauccggggcgacgagguccgccagaucgcccccgggcagaccggcaacaucgccgacuacaacuacaagcugccggacgacuucacggggugcgugaucgcguggaacagcaacaaccucgacuccaaggugggcggcaacuacaacuaccuguaccggcuguuccgcaagagcaaccucaagcccuucgagcgggacaucuccaccgagaucuaccaggccgggagcacccccugcaacggcgucaagggguucaacugcuacuucccccugcaguccuacggcuuccagccgaccuacggggugggcuaccagcccuaccgcguggucgugcugagcuucgagcuccugcacgcccccgccacggugugcggccccaagaaguccaccaaccuggucaagaacaagugcgugaacuucaacuucaacgggcucaccggcaccggggugcugaccgagagcaacaagaaguuccugccguuccagcaguucggccgggacaucgccgacacgaccgacgcgguccgcgacccccagacccucgagauccuggacaucacccccugcagcuucgggggcguguccgugaucacgccgggcaccaacaccagcaaccaggucgccgugcuguaccagggggugaacugcaccgagguccccguggccauccacgccgaccagcugacgcccaccuggcgcguguacuccaccggcagcaacgucuuccagacccgggccgggugccucaucggcgcggagcacgugaacaacuccuacgagugcgacauccccaucggcgccgggaucugcgccagcuaccagacgcagaccaacuccccgcgccgggcccgcagcguggcgucccagagcaucaucgccuacaccaugucccugggcgucgagaacagcguggccuacuccaacaacagcaucgccauccccaccaacuucacgaucuccgugaccaccgagauccugcccgucagcaugaccaagacgagcguggacugcaccauguacaucugcggggacuccaccgagugcagcaaccuccugcugcaguacggcuccuucugcacccagcucaaccgggcccugacggggaucgcgguggagcaggacaagaacacccaggaggucuucgcccaggugaagcagaucuacaagacgcccccgaucaaggacuucggcggcuucaacuucagccagauccugcccgaccccuccaagcccagcaagcgcuccuucaucgaggaccuccuguucaacaaggugacccuggccgacgccggguucaucaagcaguacggcgacugccucggggacaucgccgcgcgggaccugaucugcgcccagaaguucaacggccugaccguccucccgccccugcugaccgacgagaugaucgcccaguacaccagcgcccuccuggccgggaccaucacguccggcuggaccuucggcgcgggggccgcccugcagauccccuucgccaugcagauggcguaccgcuucaacggcaucggggugacccagaacgugcucuacgagaaccagaagcugaucgccaaccaguucaacagcgccaucggcaagauccaggacucccugagcuccaccgccagcgcccucgggaagcugcaggacgucgugaaccagaacgcgcaggcccugaacacgcucgugaagcagcuguccagcaacuucggcgccaucuccagcguccugaacgacauccucucccggcuggacccgcccgaggccgaggugcagaucgaccgccugaucaccggccggcuccagagccugcagaccuacgugacccagcagcugauccgcgccgcggagauccgggccagcgccaaccucgccgccaccaagauguccgagugcguccuggggcagagcaagcgcguggacuucugcggcaagggguaccaccugauguccuucccccagagcgcgccccacggcguggucuuccuccacgugacguacguccccgcccaggagaagaacuucaccaccgccccggccaucugccacgacgggaaggcgcacuucccccgggagggcguguucguguccaacggcacccacugguucgucacgcagcgcaacuucuacgagccccagaucaucaccaccgacaacaccuucgugagcgggaacugcgacguggucaucggcaucgugaacaacacgguguacgacccccugcagccggagcuggacuccuucaaggaggagcucgacaaguacuucaagaaccacaccagccccgacgucgaccugggggacaucuccggcaucaacgccagcguggugaacauccagaaggagaucgaccggcugaacgaggucgccaagaaccucaacgagucccugaucgaccugcaggagcucggcaaguacgagcaguacaucaaguggcccugguacaucuggcugggguucaucgccggccugaucgccaucgugauggugaccaucaugcucugcugcaugaccagcugcugcuccugccugaaggggugcugcagcugcggcuccugcugcaaguucgacgaggacgacagcgagccgguccugaagggggugaagcuccacuacacgugaggacuaguuauaagacugacuagcccgaugggccucccaacgggcccuccuccccuccuugcaccgagauuaauagaucucaaaggcucuuuucagagccaccaaaaaaaaaaaaaaaaaaaaaaaaaaaaaaaaaaaaaaaaaaaaaaaaaaaaaaaaaaaaaaaaaaaaaaaaaaaaaaaaaaaaaaaaaaaaaaaaaaaaa

SEQ ID NO: 24430 - RNA, 4041 nt, Artificial Sequence
  SARS-CoV-2/Wuhan/WIV05/2019__EPI_ISL_402128 spike protein mRNA gc (1-1273)(K986P_V987P_K986P_V987P_E484K_D614G)
aggagaaagcuuaccauguucguguuccugguccuccugccccuggugagcucccagugcgugaaccucaccacccgcacgcagcugccgcccgccuacaccaacagcuucacccggggcgucuacuaccccgacaagguguuccgcuccagcgugcugcacuccacccaggaccucuuccugcccuucuucagcaacgucacgugguuccacgccauccacguguccgggaccaacggcaccaagcgguucgacaacccggugcugcccuucaacgacggggucuacuucgcgagcaccgagaaguccaacaucauccgcggcuggaucuucgggacgacccucgacagcaagacccagucccugcugaucgugaacaacgccaccaacguggucaucaaggugugcgaguuccaguucugcaacgaccccuuccucggcguguacuaccacaagaacaacaagagcuggauggaguccgaguuccgggucuacagcuccgccaacaacugcacguucgaguacgugagccagcccuuccugauggaccuggagggcaagcaggggaacuucaagaaccuccgcgaguucguguucaagaacaucgacggcuacuucaagaucuacuccaagcacaccccgaucaaccugguccgggaccugccccagggguucagcgcccucgagccccugguggaccugcccaucggcaucaacaucacccgcuuccagacccuccuggcccugcaccgguccuaccucacgccgggggacagcagcuccggcuggaccgcgggcgccgccgccuacuacgugggguaccugcagccccgcaccuuccugcucaaguacaacgagaacggcaccaucacggacgcggucgacugcgcccuggacccccugagcgagaccaagugcacccucaaguccuucaccguggagaaggggaucuaccagacgagcaacuuccgggugcagcccaccgaguccaucguccgcuucccgaacaucaccaaccugugccccuucggcgagguguucaacgccacccgguucgccagcgucuacgccuggaaccgcaagcggaucuccaacugcguggcggacuacagcgugcuguacaacuccgccagcuucuccacguucaagugcuacggcgucagccccaccaagcucaacgaccugugcuucaccaacguguacgccgacuccuucgugauccgcggggacgagguccggcagaucgcccccggccagaccgggaagaucgccgacuacaacuacaagcugccggacgacuucacgggcugcgugaucgcguggaacagcaacaaccucgacuccaaggucgggggcaacuacaacuaccuguaccgccuguuccgcaagagcaaccucaagcccuucgagcgggacaucuccaccgagaucuaccaggccggcagcacccccugcaacggggugaagggcuucaacugcuacuucccccugcaguccuacggguuccagccgaccaacggcgugggguaccagcccuaccggguggucgugcugagcuucgagcuccugcacgcccccgccacggugugcggccccaagaaguccaccaaccuggucaagaacaagugcgugaacuucaacuucaacggccucaccgggaccggcgugcugaccgagagcaacaagaaguuccugccguuccagcaguucgggcgcgacaucgccgacacgaccgacgcgguccgcgacccccagacccuggagauccucgacaucacccccugcagcuucggcgggguguccgugaucacgccgggcaccaacaccagcaaccaggucgccgugcuguaccagggcgugaacugcaccgagguccccguggccauccacgccgaccagcugacgcccaccuggcggguguacuccaccgggagcaacgucuuccagacccgcgccggcugccucaucggggcggagcacgugaacaacuccuacgagugcgacauccccaucggcgccggcaucugcgccagcuaccagacgcagaccaacuccccgcggcgcgcccggagcguggcgucccagagcaucaucgccuacaccaugucccugggggccgagaacagcgucgccuacuccaacaacagcaucgccauccccaccaacuucacgaucuccgugaccaccgagauccugcccgugagcaugaccaagacgagcgucgacugcaccauguacaucugcggcgacuccaccgagugcagcaaccuccugcugcaguacggguccuucugcacccagcucaaccgcgcgcugacgggcaucgccguggagcaggacaagaacacccaggagguguucgcccaggucaagcagaucuacaagacgcccccgaucaaggacuucgggggcuucaacuucagccagauccugcccgaccccuccaagcccagcaagcgguccuucaucgaggaccuccuguucaacaaggugacccuggccgacgccggcuucaucaagcaguacggggacugccucggcgacaucgcggcccgcgaccugaucugcgcccagaaguucaacgggcugaccgugcucccgccccugcugaccgacgagaugaucgcccaguacaccagcgcccuccuggcgggcaccaucacguccggguggaccuucggcgccggcgccgcccugcagauccccuucgcgaugcagauggccuaccgguucaacgggaucggcgucacccagaacgugcucuacgagaaccagaagcugaucgccaaccaguucaacagcgccaucgggaagauccaggacucccugagcuccaccgccagcgcgcucggcaagcugcaggacguggucaaccagaacgcccaggcccugaacacgcucgugaagcagcuguccagcaacuucggggccaucuccagcgugcugaacgacauccucucccgccuggacccgcccgaggccgagguccagaucgaccggcugaucaccggccgccuccagagccugcagaccuacgugacccagcagcugauccgggcggccgagauccgcgccagcgccaaccucgccgcgaccaagauguccgagugcgugcugggccagagcaagcgggucgacuucugcgggaagggcuaccaccugauguccuucccccagagcgcgccccacggggugguguuccuccacgucacguacgugcccgcccaggagaagaacuucaccaccgccccggccaucugccacgacggcaaggcccacuucccccgcgagggggucuucguguccaacggcacccacugguucgugacgcagcggaacuucuacgagccccagaucaucaccaccgacaacaccuucgucagcggcaacugcgacguggugaucgggaucgucaacaacacgguguacgacccccugcagccggagcuggacuccuucaaggaggagcucgacaaguacuucaagaaccacaccagccccgacguggaccugggcgacaucuccgggaucaacgccagcgucgugaacauccagaaggagaucgaccgccugaacgagguggccaagaaccucaacgagucccugaucgaccugcaggagcucggcaaguacgagcaguacaucaaguggcccugguacaucuggcugggcuucaucgccgggcugaucgcgaucgucauggugaccaucaugcucugcugcaugaccagcugcugcuccugccugaagggcugcugcagcugcggguccugcugcaaguucgacgaggacgacagcgagccggugcugaagggcgucaagcuccacuacacgugaggacuaguuauaagacugacuagcccgaugggccucccaacgggcccuccuccccuccuugcaccgagauuaauagaucucaaaggcucuuuucagagccaccaaaaaaaaaaaaaaaaaaaaaaaaaaaaaaaaaaaaaaaaaaaaaaaaaaaaaaaaaaaaaaaaaaaaaaaaaaaaaaaaaaaaaaaaaaaaaaaaaaaaa

SEQ ID NO: 24431 - RNA, 4041 nt, Artificial Sequence
  SARS-CoV-2/Wuhan/WIV05/2019__EPI_ISL_402128 spike protein mRNA gc (1-1273)(K986P_V987P_K986P_V987P_L18F_T20N_P26S_D138Y_R190S_K417T _E484K_N501Y_D614G_H655Y_T1027I)
aggagaaagcuuaccauguucguguuccugguccuccugccccuggugagcucccagugcgugaacuucaccaaccgcacccagcucccgagcgccuacacgaacuccuucacccggggcgucuacuaccccgacaagguguuccgcagcuccgugcugcacagcacccaggaccuguuccuccccuucuucuccaacgucaccugguuccacgccauccacgugagcgggacgaacggcaccaagcgguucgacaaccccgugcugccguucaacgacggggucuacuucgcguccaccgagaaguccaacaucauccgcggcuggaucuucgggaccacgcuggacuccaagacccagagccuccugaucgugaacaacgccaccaacguggucaucaaggugugcgaguuccaguucugcaacuaccccuuccugggcguguacuaccacaagaacaacaaguccuggauggagagcgaguuccgggucuacuccagcgccaacaacugcaccuucgaguacgugucccagcccuuccucauggaccuggagggcaagcaggggaacuucaagaaccugagcgaguucguguucaagaacaucgacggcuacuucaagaucuacuccaagcacacgcccaucaaccucguccgcgaccugccgcagggguucagcgcccuggagccccucguggaccugcccaucggcaucaacaucacccgguuccagacccugcucgcccugcaccgcagcuaccugacccccggggacuccagcuccggcuggacggcgggcgccgccgccuacuacgugggguaccuccagccgcggaccuuccugcugaaguacaacgagaacggcaccaucaccgacgcggucgacugcgcccucgacccccugagcgagacgaagugcacccugaaguccuucaccguggagaaggggaucuaccagaccagcaacuuccgcgugcagcccacggaguccaucguccgguuccccaacaucaccaaccucugcccguucggcgagguguucaacgccacccgcuucgccagcgucuacgccuggaaccggaagcgcaucuccaacugcguggcggacuacagcgugcuguacaacuccgccagcuucuccaccuucaagugcuacggcgucagccccacgaagcugaacgaccucugcuucaccaacguguacgccgacuccuucgugauccgcggggacgagguccggcagaucgcccccggccagaccgggaccaucgccgacuacaacuacaagcugcccgacgacuucacgggcugcgugaucgcguggaacagcaacaaccuggacuccaaggucgggggcaacuacaacuaccucuaccggcuguuccgcaagagcaaccugaagccguucgagcgggacaucuccaccgagaucuaccaggccggcagcacccccugcaacggggugaagggcuucaacugcuacuucccccuccagagcuacggguuccagcccaccuacggcgugggguaccagccguaccgcguggucgugcuguccuucgagcugcuccacgcccccgccacggugugcggccccaagaaguccaccaaccuggucaagaacaagugcgugaacuucaacuucaacggccugaccgggaccggcgugcucaccgagagcaacaagaaguuccugcccuuccagcaguucgggcgggacaucgccgacacgaccgacgcgguccgcgacccgcagacccuggagauccuggacaucacccccugcagcuucggcgggguguccgugaucacgcccggcaccaacaccagcaaccaggucgccgugcucuaccagggcgugaacugcaccgaggucccgguggccauccacgccgaccagcugacgcccaccuggcgcguguacuccaccgggagcaacgucuuccagacccgggccggcugccugaucggggcggaguacgugaacaacuccuacgagugcgacauccccaucggcgccggcaucugcgccagcuaccagacgcagaccaacagcccccgccgggcccgcagcguggcgucccagagcaucaucgccuacaccaugucccucggggccgagaacagcgucgccuacuccaacaacagcaucgccaucccgaccaacuucacgaucagcgugaccaccgagauccugcccguguccaugaccaagacgagcgucgacugcaccauguacaucugcggcgacuccaccgagugcagcaaccugcuccugcaguacggguccuucugcacccagcugaaccgggcgcucacgggcaucgccguggagcaggacaagaacacccaggagguguucgcccaggucaagcagaucuacaagaccccgcccaucaaggacuucgggggcuucaacuucagccagauccugcccgaccccuccaagcccagcaagcgcuccuucaucgaggaccuccuguucaacaaggugacccuggccgacgccggcuucaucaagcaguacggggacugccugggcgacaucgcggcccgggaccucaucugcgcccagaaguucaacgggcugacggugcugcccccgcuccugaccgacgagaugaucgcccaguacaccagcgcccugcucgcgggcaccaucacguccggguggaccuucggcgccggcgccgcccugcagauccccuucgcgaugcagauggccuaccgcuucaacgggaucggcgucacccagaacgugcuguacgagaaccagaagcucaucgccaaccaguucaacagcgccaucgggaagauccaggacucccugagcuccaccgccagcgcgcugggcaagcuccaggacguggucaaccagaacgcccaggcccugaacacgcuggugaagcagcucuccagcaacuucggggccaucuccagcgugcugaacgacauccugagccggcucgacccgcccgaggccgagguccagaucgaccgccugaucaccggccggcugcagucccuccagaccuacgugacccagcagcugauccgcgcggccgagauccgggccagcgccaaccuggccgcgaucaagauguccgagugcgugcucggccagagcaagcgcgucgacuucugcgggaagggcuaccaccugauguccuucccccagagcgcgccccacggggugguguuccugcacgucaccuacgugcccgcccaggagaagaacuucacgaccgcccccgccaucugccacgacggcaaggcccacuucccgcgggagggggucuucguguccaacggcacccacugguucgugacccagcgcaacuucuacgagccccagaucaucacgaccgacaacaccuucgucagcggcaacugcgacguggugaucgggaucgucaacaacaccguguacgacccccuccagcccgagcuggacuccuucaaggaggagcuggacaaguacuucaagaaccacacgagcccggacguggaccucggcgacaucuccgggaucaacgccagcgucgugaacauccagaaggagaucgaccggcugaacgagguggccaagaaccugaacgagucccucaucgaccugcaggagcugggcaaguacgagcaguacaucaaguggcccugguacaucuggcucggcuucaucgccgggcugaucgcgaucgucauggugaccaucaugcugugcugcaugaccagcugcugcuccugccucaagggcugcugcagcugcggguccugcugcaaguucgacgaggacgacagcgagcccgugcugaagggcgucaagcugcacuacaccugaggacuaguuauaagacugacuagcccgaugggccucccaacgggcccuccuccccuccuugcaccgagauuaauagaucucaaaggcucuuuucagagccaccaaaaaaaaaaaaaaaaaaaaaaaaaaaaaaaaaaaaaaaaaaaaaaaaaaaaaaaaaaaaaaaaaaaaaaaaaaaaaaaaaaaaaaaaaaaaaaaaaaaaa

SEQ ID NO: 24432 - RNA, 4041 nt, Artificial Sequence
  SARS-CoV-2/Wuhan/WIV05/2019__EPI_ISL_402128 spike protein mRNA gc (1-1273)(K986P_V987P_K986P_V987P_S13I_W152C_L452R_D614G)
aggagaaagcuuaccauguucguguuccugguccuccugccccuggugagcauccagugcgugaaccucaccacccgcacgcagcugccgcccgccuacaccaacuccuucacccggggcgucuacuaccccgacaagguguuccgcagcuccgugcugcacagcacccaggaccucuuccugcccuucuucuccaacgucacgugguuccacgccauccacgugagcgggaccaacggcaccaagcgguucgacaacccggugcugcccuucaacgacggggucuacuucgcguccaccgagaaguccaacaucauccgcggcuggaucuucgggacgacccucgacagcaagacccagagccugcugaucgugaacaacgccaccaacguggucaucaaggugugcgaguuccaguucugcaacgaccccuuccucggcguguacuaccacaagaacaacaaguccugcauggagagcgaguuccgggucuacuccagcgccaacaacugcacguucgaguacgugucccagcccuuccugauggaccuggagggcaagcaggggaacuucaagaaccuccgcgaguucguguucaagaacaucgacggcuacuucaagaucuacagcaagcacaccccgaucaaccugguccgggaccugccccagggguucuccgcccucgagccccugguggaccugcccaucggcaucaacaucacccgcuuccagacccuccuggcccugcaccggagcuaccucacgccgggggacuccagcagcggcuggaccgcgggcgccgccgccuacuacgugggguaccugcagccccgcaccuuccugcucaaguacaacgagaacggcaccaucacggacgcggucgacugcgcccuggacccccuguccgagaccaagugcacccucaagagcuucaccguggagaaggggaucuaccagacguccaacuuccgggugcagcccaccgagagcaucguccgcuucccgaacaucaccaaccugugccccuucggcgagguguucaacgccacccgguucgccuccgucuacgccuggaaccgcaagcggaucagcaacugcguggcggacuacuccgugcuguacaacagcgccuccuucagcacguucaagugcuacggcgucucccccaccaagcucaacgaccugugcuucaccaacguguacgccgacagcuucgugauccgcggggacgagguccggcagaucgcccccggccagaccgggaagaucgccgacuacaacuacaagcugccggacgacuucacgggcugcgugaucgcguggaacuccaacaaccucgacagcaaggucgggggcaacuacaacuaccgcuaccggcuguuccgcaaguccaaccugaagcccuucgagcgggacaucagcaccgagaucuaccaggccggcuccacccccugcaacgggguggagggcuucaacugcuacuucccccuccagagcuacggguuccagccgaccaacggcgugggguaccagcccuaccgcguggucgugcuguccuucgagcugcuccacgcccccgccacggugugcggccccaagaaguccaccaaccuggucaagaacaagugcgugaacuucaacuucaacggccugaccgggaccggcgugcucaccgagagcaacaagaaguuccugccguuccagcaguucgggcgcgacaucgccgacacgaccgacgcgguccgggacccccagacccuggagauccuggacaucacccccugcagcuucggcggggugagcgugaucacgccgggcaccaacaccuccaaccaggucgccgugcucuaccagggcgugaacugcaccgagguccccguggccauccacgccgaccagcugacgcccaccuggcgcguguacagcaccggguccaacgucuuccagacccgggccggcugccugaucggggcggagcacgugaacaacagcuacgagugcgacauccccaucggcgccggcaucugcgccuccuaccagacgcagaccaacagcccgcgccgggcccgcuccguggcgagccaguccaucaucgccuacaccaugagccucggggccgagaacuccgucgccuacagcaacaacuccaucgccauccccaccaacuucacgaucagcgugaccaccgagauccugcccguguccaugaccaagacgagcgucgacugcaccauguacaucugcggcgacagcaccgagugcuccaaccugcuccugcaguacgggagcuucugcacccagcugaaccgggcgcucacgggcaucgccguggagcaggacaagaacacccaggagguguucgcccaggucaagcagaucuacaagacgcccccgaucaaggacuucgggggcuucaacuucucccagauccugcccgaccccagcaagcccuccaagcgcagcuucaucgaggaccuccuguucaacaaggugacccuggccgacgccggcuucaucaagcaguacggggacugccugggcgacaucgcggcccgggaccucaucugcgcccagaaguucaacgggcugaccgugcugccgccccuccugaccgacgagaugaucgcccaguacaccuccgcccugcucgcgggcaccaucacgagcggguggaccuucggcgccggcgccgcccugcagauccccuucgcgaugcagauggccuaccgcuucaacgggaucggcgucacccagaacgugcuguacgagaaccagaagcucaucgccaaccaguucaacuccgccaucgggaagauccaggacagccuguccagcaccgccuccgcgcugggcaagcuccaggacguggucaaccagaacgcccaggcccugaacacgcuggugaagcagcucagcuccaacuucggggccaucagcuccgugcugaacgacauccugagccggcucgacccgcccgaggccgagguccagaucgaccgccugaucaccggccggcugcagucccuccagaccuacgugacccagcagcugauccgcgcggccgagauccgggccagcgccaaccuggccgcgaccaagaugagcgagugcgugcucggccaguccaagcgcgucgacuucugcgggaagggcuaccaccugaugagcuucccccaguccgcgccccacggggugguguuccugcacgucacguacgugcccgcccaggagaagaacuucaccaccgccccggccaucugccacgacggcaaggcccacuucccccgggagggggucuucgugagcaacggcacccacugguucgugacgcagcgcaacuucuacgagccccagaucaucaccaccgacaacaccuucgucuccggcaacugcgacguggugaucgggaucgucaacaacacgguguacgacccccuccagccggagcuggacagcuucaaggaggagcuggacaaguacuucaagaaccacaccucccccgacguggaccucggcgacaucagcgggaucaacgccuccgucgugaacauccagaaggagaucgaccggcugaacgagguggccaagaaccugaacgagagccucaucgaccugcaggagcugggcaaguacgagcaguacaucaaguggcccugguacaucuggcucggcuucaucgccgggcugaucgcgaucgucauggugaccaucaugcugugcugcaugaccuccugcugcagcugccucaagggcugcugcuccugcgggagcugcugcaaguucgacgaggacgacuccgagccggugcugaagggcgucaagcugcacuacacgugaggacuaguuauaagacugacuagcccgaugggccucccaacgggcccuccuccccuccuugcaccgagauuaauagaucucaaaggcucuuuucagagccaccaaaaaaaaaaaaaaaaaaaaaaaaaaaaaaaaaaaaaaaaaaaaaaaaaaaaaaaaaaaaaaaaaaaaaaaaaaaaaaaaaaaaaaaaaaaaaaaaaaaaa

SEQ ID NO: 24433 - RNA, 4041 nt, Artificial Sequence
  SARS-CoV-2/Wuhan/WIV05/2019__EPI_ISL_402128 spike protein mRNA gc (1-1273)(K986P_V987P)
aggagaaagcuuaccauguucguguuccuggugcugcugccccuggugagcagccagugcgugaaccugaccacccggacccagcugccaccagccuacaccaacagcuucacccggggcgucuacuaccccgacaagguguuccggagcagcguccugcacagcacccaggaccuguuccugcccuucuucagcaacgugaccugguuccacgccauccacgugagcggcaccaacggcaccaagcgguucgacaaccccgugcugcccuucaacgacggcguguacuucgccagcaccgagaagagcaacaucauccggggcuggaucuucggcaccacccuggacagcaagacccagagccugcugaucgugaauaacgccaccaacguggugaucaaggugugcgaguuccaguucugcaacgaccccuuccugggcguguacuaccacaagaacaacaagagcuggauggagagcgaguuccggguguacagcagcgccaacaacugcaccuucgaguacgugagccagcccuuccugauggaccuggagggcaagcagggcaacuucaagaaccugcgggaguucguguucaagaacaucgacggcuacuucaagaucuacagcaagcacaccccaaucaaccuggugcgggaucugccccagggcuucucagcccuggagccccugguggaccugcccaucggcaucaacaucacccgguuccagacccugcuggcccugcaccggagcuaccugaccccaggcgacagcagcagcggguggacagcaggcgcggcugcuuacuacgugggcuaccugcagccccggaccuuccugcugaaguacaacgagaacggcaccaucaccgacgccguggacugcgcccuggacccucugagcgagaccaagugcacccugaagagcuucaccguggagaagggcaucuaccagaccagcaacuuccgggugcagcccaccgagagcaucgugcgguuccccaacaucaccaaccugugccccuucggcgagguguucaacgccacccgguucgccagcguguacgccuggaaccggaagcggaucagcaacugcguggccgacuacagcgugcuguacaacagcgccagcuucagcaccuucaagugcuacggcgugagccccaccaagcugaacgaccugugcuucaccaacguguacgccgacagcuucgugauccguggcgacgaggugcggcagaucgcacccggccagacaggcaagaucgccgacuacaacuacaagcugcccgacgacuucaccggcugcgugaucgccuggaacagcaacaaccucgacagcaaggugggcggcaacuacaacuaccuguaccggcuguuccggaagagcaaccugaagcccuucgagcgggacaucagcaccgagaucuaccaagccggcuccaccccuugcaacggcguggagggcuucaacugcuacuucccucugcagagcuacggcuuccagcccaccaacggcgugggcuaccagcccuaccgggugguggugcugagcuucgagcugcugcacgccccagccaccguguguggccccaagaagagcaccaaccuggugaagaacaagugcgugaacuucaacuucaacggccuuaccggcaccggcgugcugaccgagagcaacaagaaauuccugcccuuucagcaguucggccgggacaucgccgacaccaccgacgcugugcgggauccccagacccuggagauccuggacaucaccccuugcagcuucggcggcgugagcgugaucaccccaggcaccaacaccagcaaccagguggccgugcuguaccaggacgugaacugcaccgaggugcccguggccauccacgccgaccagcugacacccaccuggcgggucuacagcaccggcagcaacguguuccagacccgggccgguugccugaucggcgccgagcacgugaacaacagcuacgagugcgacauccccaucggcgccggcaucugugccagcuaccagacccagaccaauucaccccggagggcaaggagcguggccagccagagcaucaucgccuacaccaugagccugggcgccgagaacagcguggccuacagcaacaacagcaucgccauccccaccaacuucaccaucagcgugaccaccgagauucugcccgugagcaugaccaagaccagcguggacugcaccauguacaucugcggcgacagcaccgagugcagcaaccugcugcugcaguacggcagcuucugcacccagcugaaccgggcccugaccggcaucgccguggagcaggacaagaacacccaggagguguucgcccaggugaagcagaucuacaagaccccucccaucaaggacuucggcggcuucaacuucagccagauccugcccgaccccagcaagcccagcaagcggagcuucaucgaggaccugcuguucaacaaggugacccuagccgacgccggcuucaucaagcaguacggcgacugccucggcgacauagccgcccgggaccugaucugcgcccagaaguucaacggccugaccgugcugccuccccugcugaccgacgagaugaucgcccaguacaccagcgcccuguuagccggaaccaucaccagcggcuggacuuucggcgcuggagccgcucugcagauccccuucgccaugcagauggccuaccgguucaacggcaucggcgugacccagaacgugcuguacgagaaccagaagcugaucgccaaccaguucaacagcgccaucggcaagauccaggacagccugagcagcaccgcuagcgcccugggcaagcugcaggacguggugaaccagaacgcccaggcccugaacacccuggugaagcagcugagcagcaacuucggcgccaucagcagcgugcugaacgacauccugagccggcuggacccucccgaggccgaggugcagaucgaccggcugaucacuggccggcugcagagccugcagaccuacgugacccagcagcugauccgggccgccgagauucgggccagcgccaaccuggccgccaccaagaugagcgagugcgugcugggccagagcaagcggguggacuucugcggcaagggcuaccaccugaugagcuuuccccagagcgcaccccacggagugguguuccugcacgugaccuacgugcccgcccaggagaagaacuucaccaccgccccagccaucugccacgacggcaaggcccacuuuccccgggagggcguguucgugagcaacggcacccacugguucgugacccagcggaacuucuacgagccccagaucaucaccaccgacaacaccuucgugagcggcaacugcgacguggugaucggcaucgugaacaacaccguguacgauccccugcagcccgagcuggacagcuucaaggaggagcuggacaaguacuucaagaaucacaccagccccgacguggaccugggcgacaucagcggcaucaacgccagcguggugaacauccagaaggagaucgaucggcugaacgagguggccaagaaccugaacgagagccugaucgaccugcaggagcugggcaaguacgagcaguacaucaaguggcccugguacaucuggcugggcuucaucgccggccugaucgccaucgugauggugaccaucaugcugugcugcaugaccagcugcugcagcugccugaagggcuguugcagcugcggcagcugcugcaaguucgacgaggacgacagcgagcccgugcugaagggcgugaagcugcacuacaccugaggacuaguuauaagacugacuagcccgaugggccucccaacgggcccuccuccccuccuugcaccgagauuaauagaucucaaaggcucuuuucagagccaccaaaaaaaaaaaaaaaaaaaaaaaaaaaaaaaaaaaaaaaaaaaaaaaaaaaaaaaaaaaaaaaaaaaaaaaaaaaaaaaaaaaaaaaaaaaaaaaaaaaaa

SEQ ID NO: 24434 - RNA, 4041 nt, Artificial Sequence
  SARS-CoV-2/Wuhan/WIV05/2019__EPI_ISL_402128 spike protein mRNA gc (1-1273)(K986P_V987P_ D614G)
aggagaaagcuuaccauguucguguuccuggugcugcugccccuggugagcagccagugcgugaaccugaccacccggacccagcugccaccagccuacaccaacagcuucacccggggcgucuacuaccccgacaagguguuccggagcagcguccugcacagcacccaggaccuguuccugcccuucuucagcaacgugaccugguuccacgccauccacgugagcggcaccaacggcaccaagcgguucgacaaccccgugcugcccuucaacgacggcguguacuucgccagcaccgagaagagcaacaucauccggggcuggaucuucggcaccacccuggacagcaagacccagagccugcugaucgugaauaacgccaccaacguggugaucaaggugugcgaguuccaguucugcaacgaccccuuccugggcguguacuaccacaagaacaacaagagcuggauggagagcgaguuccggguguacagcagcgccaacaacugcaccuucgaguacgugagccagcccuuccugauggaccuggagggcaagcagggcaacuucaagaaccugcgggaguucguguucaagaacaucgacggcuacuucaagaucuacagcaagcacaccccaaucaaccuggugcgggaucugccccagggcuucucagcccuggagccccugguggaccugcccaucggcaucaacaucacccgguuccagacccugcuggcccugcaccggagcuaccugaccccaggcgacagcagcagcggguggacagcaggcgcggcugcuuacuacgugggcuaccugcagccccggaccuuccugcugaaguacaacgagaacggcaccaucaccgacgccguggacugcgcccuggacccucugagcgagaccaagugcacccugaagagcuucaccguggagaagggcaucuaccagaccagcaacuuccgggugcagcccaccgagagcaucgugcgguuccccaacaucaccaaccugugccccuucggcgagguguucaacgccacccgguucgccagcguguacgccuggaaccggaagcggaucagcaacugcguggccgacuacagcgugcuguacaacagcgccagcuucagcaccuucaagugcuacggcgugagccccaccaagcugaacgaccugugcuucaccaacguguacgccgacagcuucgugauccguggcgacgaggugcggcagaucgcacccggccagacaggcaagaucgccgacuacaacuacaagcugcccgacgacuucaccggcugcgugaucgccuggaacagcaacaaccucgacagcaaggugggcggcaacuacaacuaccuguaccggcuguuccggaagagcaaccugaagcccuucgagcgggacaucagcaccgagaucuaccaagccggcuccaccccuugcaacggcguggagggcuucaacugcuacuucccucugcagagcuacggcuuccagcccaccaacggcgugggcuaccagcccuaccgggugguggugcugagcuucgagcugcugcacgccccagccaccguguguggccccaagaagagcaccaaccuggugaagaacaagugcgugaacuucaacuucaacggccuuaccggcaccggcgugcugaccgagagcaacaagaaauuccugcccuuucagcaguucggccgggacaucgccgacaccaccgacgcugugcgggauccccagacccuggagauccuggacaucaccccuugcagcuucggcggcgugagcgugaucaccccaggcaccaacaccagcaaccagguggccgugcuguaccagggcgugaacugcaccgaggugcccguggccauccacgccgaccagcugacacccaccuggcgggucuacagcaccggcagcaacguguuccagacccgggccgguugccugaucggcgccgagcacgugaacaacagcuacgagugcgacauccccaucggcgccggcaucugugccagcuaccagacccagaccaauucaccccggagggcaaggagcguggccagccagagcaucaucgccuacaccaugagccugggcgccgagaacagcguggccuacagcaacaacagcaucgccauccccaccaacuucaccaucagcgugaccaccgagauucugcccgugagcaugaccaagaccagcguggacugcaccauguacaucugcggcgacagcaccgagugcagcaaccugcugcugcaguacggcagcuucugcacccagcugaaccgggcccugaccggcaucgccguggagcaggacaagaacacccaggagguguucgcccaggugaagcagaucuacaagaccccucccaucaaggacuucggcggcuucaacuucagccagauccugcccgaccccagcaagcccagcaagcggagcuucaucgaggaccugcuguucaacaaggugacccuagccgacgccggcuucaucaagcaguacggcgacugccucggcgacauagccgcccgggaccugaucugcgcccagaaguucaacggccugaccgugcugccuccccugcugaccgacgagaugaucgcccaguacaccagcgcccuguuagccggaaccaucaccagcggcuggacuuucggcgcuggagccgcucugcagauccccuucgccaugcagauggccuaccgguucaacggcaucggcgugacccagaacgugcuguacgagaaccagaagcugaucgccaaccaguucaacagcgccaucggcaagauccaggacagccugagcagcaccgcuagcgcccugggcaagcugcaggacguggugaaccagaacgcccaggcccugaacacccuggugaagcagcugagcagcaacuucggcgccaucagcagcgugcugaacgacauccugagccggcuggacccucccgaggccgaggugcagaucgaccggcugaucacuggccggcugcagagccugcagaccuacgugacccagcagcugauccgggccgccgagauucgggccagcgccaaccuggccgccaccaagaugagcgagugcgugcugggccagagcaagcggguggacuucugcggcaagggcuaccaccugaugagcuuuccccagagcgcaccccacggagugguguuccugcacgugaccuacgugcccgcccaggagaagaacuucaccaccgccccagccaucugccacgacggcaaggcccacuuuccccgggagggcguguucgugagcaacggcacccacugguucgugacccagcggaacuucuacgagccccagaucaucaccaccgacaacaccuucgugagcggcaacugcgacguggugaucggcaucgugaacaacaccguguacgauccccugcagcccgagcuggacagcuucaaggaggagcuggacaaguacuucaagaaucacaccagccccgacguggaccugggcgacaucagcggcaucaacgccagcguggugaacauccagaaggagaucgaucggcugaacgagguggccaagaaccugaacgagagccugaucgaccugcaggagcugggcaaguacgagcaguacaucaaguggcccugguacaucuggcugggcuucaucgccggccugaucgccaucgugauggugaccaucaugcugugcugcaugaccagcugcugcagcugccugaagggcuguugcagcugcggcagcugcugcaaguucgacgaggacgacagcgagcccgugcugaagggcgugaagcugcacuacaccugaggacuaguuauaagacugacuagcccgaugggccucccaacgggcccuccuccccuccuugcaccgagauuaauagaucucaaaggcucuuuucagagccaccaaaaaaaaaaaaaaaaaaaaaaaaaaaaaaaaaaaaaaaaaaaaaaaaaaaaaaaaaaaaaaaaaaaaaaaaaaaaaaaaaaaaaaaaaaaaaaaaaaaaa

SEQ ID NO: 24435 - RNA, 4041 nt, Artificial Sequence
  SARS-CoV-2/Wuhan/WIV05/2019__EPI_ISL_402128 spike protein mRNA gc (1-1273)(K986P_V987P_A222V_D614G)
aggagaaagcuuaccauguucguguuccuggugcugcugccccuggugagcagccagugcgugaaccugaccacccggacccagcugccaccagccuacaccaacagcuucacccggggcgucuacuaccccgacaagguguuccggagcagcguccugcacagcacccaggaccuguuccugcccuucuucagcaacgugaccugguuccacgccauccacgugagcggcaccaacggcaccaagcgguucgacaaccccgugcugcccuucaacgacggcguguacuucgccagcaccgagaagagcaacaucauccggggcuggaucuucggcaccacccuggacagcaagacccagagccugcugaucgugaauaacgccaccaacguggugaucaaggugugcgaguuccaguucugcaacgaccccuuccugggcguguacuaccacaagaacaacaagagcuggauggagagcgaguuccggguguacagcagcgccaacaacugcaccuucgaguacgugagccagcccuuccugauggaccuggagggcaagcagggcaacuucaagaaccugcgggaguucguguucaagaacaucgacggcuacuucaagaucuacagcaagcacaccccaaucaaccuggugcgggaucugccccagggcuucucagugcuggagccccugguggaccugcccaucggcaucaacaucacccgguuccagacccugcuggcccugcaccggagcuaccugaccccaggcgacagcagcagcggguggacagcaggcgcggcugcuuacuacgugggcuaccugcagccccggaccuuccugcugaaguacaacgagaacggcaccaucaccgacgccguggacugcgcccuggacccucugagcgagaccaagugcacccugaagagcuucaccguggagaagggcaucuaccagaccagcaacuuccgggugcagcccaccgagagcaucgugcgguuccccaacaucaccaaccugugccccuucggcgagguguucaacgccacccgguucgccagcguguacgccuggaaccggaagcggaucagcaacugcguggccgacuacagcgugcuguacaacagcgccagcuucagcaccuucaagugcuacggcgugagccccaccaagcugaacgaccugugcuucaccaacguguacgccgacagcuucgugauccguggcgacgaggugcggcagaucgcacccggccagacaggcaagaucgccgacuacaacuacaagcugcccgacgacuucaccggcugcgugaucgccuggaacagcaacaaccucgacagcaaggugggcggcaacuacaacuaccuguaccggcuguuccggaagagcaaccugaagcccuucgagcgggacaucagcaccgagaucuaccaagccggcuccaccccuugcaacggcguggagggcuucaacugcuacuucccucugcagagcuacggcuuccagcccaccaacggcgugggcuaccagcccuaccgggugguggugcugagcuucgagcugcugcacgccccagccaccguguguggccccaagaagagcaccaaccuggugaagaacaagugcgugaacuucaacuucaacggccuuaccggcaccggcgugcugaccgagagcaacaagaaauuccugcccuuucagcaguucggccgggacaucgccgacaccaccgacgcugugcgggauccccagacccuggagauccuggacaucaccccuugcagcuucggcggcgugagcgugaucaccccaggcaccaacaccagcaaccagguggccgugcuguaccagggcgugaacugcaccgaggugcccguggccauccacgccgaccagcugacacccaccuggcgggucuacagcaccggcagcaacguguuccagacccgggccgguugccugaucggcgccgagcacgugaacaacagcuacgagugcgacauccccaucggcgccggcaucugugccagcuaccagacccagaccaauucaccccggagggcaaggagcguggccagccagagcaucaucgccuacaccaugagccugggcgccgagaacagcguggccuacagcaacaacagcaucgccauccccaccaacuucaccaucagcgugaccaccgagauucugcccgugagcaugaccaagaccagcguggacugcaccauguacaucugcggcgacagcaccgagugcagcaaccugcugcugcaguacggcagcuucugcacccagcugaaccgggcccugaccggcaucgccguggagcaggacaagaacacccaggagguguucgcccaggugaagcagaucuacaagaccccucccaucaaggacuucggcggcuucaacuucagccagauccugcccgaccccagcaagcccagcaagcggagcuucaucgaggaccugcuguucaacaaggugacccuagccgacgccggcuucaucaagcaguacggcgacugccucggcgacauagccgcccgggaccugaucugcgcccagaaguucaacggccugaccgugcugccuccccugcugaccgacgagaugaucgcccaguacaccagcgcccuguuagccggaaccaucaccagcggcuggacuuucggcgcuggagccgcucugcagauccccuucgccaugcagauggccuaccgguucaacggcaucggcgugacccagaacgugcuguacgagaaccagaagcugaucgccaaccaguucaacagcgccaucggcaagauccaggacagccugagcagcaccgcuagcgcccugggcaagcugcaggacguggugaaccagaacgcccaggcccugaacacccuggugaagcagcugagcagcaacuucggcgccaucagcagcgugcugaacgacauccugagccggcuggacccucccgaggccgaggugcagaucgaccggcugaucacuggccggcugcagagccugcagaccuacgugacccagcagcugauccgggccgccgagauucgggccagcgccaaccuggccgccaccaagaugagcgagugcgugcugggccagagcaagcggguggacuucugcggcaagggcuaccaccugaugagcuuuccccagagcgcaccccacggagugguguuccugcacgugaccuacgugcccgcccaggagaagaacuucaccaccgccccagccaucugccacgacggcaaggcccacuuuccccgggagggcguguucgugagcaacggcacccacugguucgugacccagcggaacuucuacgagccccagaucaucaccaccgacaacaccuucgugagcggcaacugcgacguggugaucggcaucgugaacaacaccguguacgauccccugcagcccgagcuggacagcuucaaggaggagcuggacaaguacuucaagaaucacaccagccccgacguggaccugggcgacaucagcggcaucaacgccagcguggugaacauccagaaggagaucgaucggcugaacgagguggccaagaaccugaacgagagccugaucgaccugcaggagcugggcaaguacgagcaguacaucaaguggcccugguacaucuggcugggcuucaucgccggccugaucgccaucgugauggugaccaucaugcugugcugcaugaccagcugcugcagcugccugaagggcuguugcagcugcggcagcugcugcaaguucgacgaggacgacagcgagcccgugcugaagggcgugaagcugcacuacaccugaggacuaguuauaagacugacuagcccgaugggccucccaacgggcccuccuccccuccuugcaccgagauuaauagaucucaaaggcucuuuucagagccaccaaaaaaaaaaaaaaaaaaaaaaaaaaaaaaaaaaaaaaaaaaaaaaaaaaaaaaaaaaaaaaaaaaaaaaaaaaaaaaaaaaaaaaaaaaaaaaaaaaaaa

SEQ ID NO: 24436 - RNA, 4041 nt, Artificial Sequence
  SARS-CoV-2/Wuhan/WIV05/2019__EPI_ISL_402128 spike protein mRNA gc (1-1273)(K986P_V987P_N439K_D614G)
aggagaaagcuuaccauguucguguuccuggugcugcugccccuggugagcagccagugcgugaaccugaccacccggacccagcugccaccagccuacaccaacagcuucacccggggcgucuacuaccccgacaagguguuccggagcagcguccugcacagcacccaggaccuguuccugcccuucuucagcaacgugaccugguuccacgccauccacgugagcggcaccaacggcaccaagcgguucgacaaccccgugcugcccuucaacgacggcguguacuucgccagcaccgagaagagcaacaucauccggggcuggaucuucggcaccacccuggacagcaagacccagagccugcugaucgugaauaacgccaccaacguggugaucaaggugugcgaguuccaguucugcaacgaccccuuccugggcguguacuaccacaagaacaacaagagcuggauggagagcgaguuccggguguacagcagcgccaacaacugcaccuucgaguacgugagccagcccuuccugauggaccuggagggcaagcagggcaacuucaagaaccugcgggaguucguguucaagaacaucgacggcuacuucaagaucuacagcaagcacaccccaaucaaccuggugcgggaucugccccagggcuucucagcccuggagccccugguggaccugcccaucggcaucaacaucacccgguuccagacccugcuggcccugcaccggagcuaccugaccccaggcgacagcagcagcggguggacagcaggcgcggcugcuuacuacgugggcuaccugcagccccggaccuuccugcugaaguacaacgagaacggcaccaucaccgacgccguggacugcgcccuggacccucugagcgagaccaagugcacccugaagagcuucaccguggagaagggcaucuaccagaccagcaacuuccgggugcagcccaccgagagcaucgugcgguuccccaacaucaccaaccugugccccuucggcgagguguucaacgccacccgguucgccagcguguacgccuggaaccggaagcggaucagcaacugcguggccgacuacagcgugcuguacaacagcgccagcuucagcaccuucaagugcuacggcgugagccccaccaagcugaacgaccugugcuucaccaacguguacgccgacagcuucgugauccguggcgacgaggugcggcagaucgcacccggccagacaggcaagaucgccgacuacaacuacaagcugcccgacgacuucaccggcugcgugaucgccuggaacagcaagaaccucgacagcaaggugggcggcaacuacaacuaccuguaccggcuguuccggaagagcaaccugaagcccuucgagcgggacaucagcaccgagaucuaccaagccggcuccaccccuugcaacggcguggagggcuucaacugcuacuucccucugcagagcuacggcuuccagcccaccaacggcgugggcuaccagcccuaccgggugguggugcugagcuucgagcugcugcacgccccagccaccguguguggccccaagaagagcaccaaccuggugaagaacaagugcgugaacuucaacuucaacggccuuaccggcaccggcgugcugaccgagagcaacaagaaauuccugcccuuucagcaguucggccgggacaucgccgacaccaccgacgcugugcgggauccccagacccuggagauccuggacaucaccccuugcagcuucggcggcgugagcgugaucaccccaggcaccaacaccagcaaccagguggccgugcuguaccagggcgugaacugcaccgaggugcccguggccauccacgccgaccagcugacacccaccuggcgggucuacagcaccggcagcaacguguuccagacccgggccgguugccugaucggcgccgagcacgugaacaacagcuacgagugcgacauccccaucggcgccggcaucugugccagcuaccagacccagaccaauucaccccggagggcaaggagcguggccagccagagcaucaucgccuacaccaugagccugggcgccgagaacagcguggccuacagcaacaacagcaucgccauccccaccaacuucaccaucagcgugaccaccgagauucugcccgugagcaugaccaagaccagcguggacugcaccauguacaucugcggcgacagcaccgagugcagcaaccugcugcugcaguacggcagcuucugcacccagcugaaccgggcccugaccggcaucgccguggagcaggacaagaacacccaggagguguucgcccaggugaagcagaucuacaagaccccucccaucaaggacuucggcggcuucaacuucagccagauccugcccgaccccagcaagcccagcaagcggagcuucaucgaggaccugcuguucaacaaggugacccuagccgacgccggcuucaucaagcaguacggcgacugccucggcgacauagccgcccgggaccugaucugcgcccagaaguucaacggccugaccgugcugccuccccugcugaccgacgagaugaucgcccaguacaccagcgcccuguuagccggaaccaucaccagcggcuggacuuucggcgcuggagccgcucugcagauccccuucgccaugcagauggccuaccgguucaacggcaucggcgugacccagaacgugcuguacgagaaccagaagcugaucgccaaccaguucaacagcgccaucggcaagauccaggacagccugagcagcaccgcuagcgcccugggcaagcugcaggacguggugaaccagaacgcccaggcccugaacacccuggugaagcagcugagcagcaacuucggcgccaucagcagcgugcugaacgacauccugagccggcuggacccucccgaggccgaggugcagaucgaccggcugaucacuggccggcugcagagccugcagaccuacgugacccagcagcugauccgggccgccgagauucgggccagcgccaaccuggccgccaccaagaugagcgagugcgugcugggccagagcaagcggguggacuucugcggcaagggcuaccaccugaugagcuuuccccagagcgcaccccacggagugguguuccugcacgugaccuacgugcccgcccaggagaagaacuucaccaccgccccagccaucugccacgacggcaaggcccacuuuccccgggagggcguguucgugagcaacggcacccacugguucgugacccagcggaacuucuacgagccccagaucaucaccaccgacaacaccuucgugagcggcaacugcgacguggugaucggcaucgugaacaacaccguguacgauccccugcagcccgagcuggacagcuucaaggaggagcuggacaaguacuucaagaaucacaccagccccgacguggaccugggcgacaucagcggcaucaacgccagcguggugaacauccagaaggagaucgaucggcugaacgagguggccaagaaccugaacgagagccugaucgaccugcaggagcugggcaaguacgagcaguacaucaaguggcccugguacaucuggcugggcuucaucgccggccugaucgccaucgugauggugaccaucaugcugugcugcaugaccagcugcugcagcugccugaagggcuguugcagcugcggcagcugcugcaaguucgacgaggacgacagcgagcccgugcugaagggcgugaagcugcacuacaccugaggacuaguuauaagacugacuagcccgaugggccucccaacgggcccuccuccccuccuugcaccgagauuaauagaucucaaaggcucuuuucagagccaccaaaaaaaaaaaaaaaaaaaaaaaaaaaaaaaaaaaaaaaaaaaaaaaaaaaaaaaaaaaaaaaaaaaaaaaaaaaaaaaaaaaaaaaaaaaaaaaaaaaaa

SEQ ID NO: 24437 - RNA, 4041 nt, Artificial Sequence
  SARS-CoV-2/Wuhan/WIV05/2019__EPI_ISL_402128 spike protein mRNA gc (1-1273)(K986P_V987P_S477N_D614G)
aggagaaagcuuaccauguucguguuccuggugcugcugccccuggugagcagccagugcgugaaccugaccacccggacccagcugccaccagccuacaccaacagcuucacccggggcgucuacuaccccgacaagguguuccggagcagcguccugcacagcacccaggaccuguuccugcccuucuucagcaacgugaccugguuccacgccauccacgugagcggcaccaacggcaccaagcgguucgacaaccccgugcugcccuucaacgacggcguguacuucgccagcaccgagaagagcaacaucauccggggcuggaucuucggcaccacccuggacagcaagacccagagccugcugaucgugaauaacgccaccaacguggugaucaaggugugcgaguuccaguucugcaacgaccccuuccugggcguguacuaccacaagaacaacaagagcuggauggagagcgaguuccggguguacagcagcgccaacaacugcaccuucgaguacgugagccagcccuuccugauggaccuggagggcaagcagggcaacuucaagaaccugcgggaguucguguucaagaacaucgacggcuacuucaagaucuacagcaagcacaccccaaucaaccuggugcgggaucugccccagggcuucucagcccuggagccccugguggaccugcccaucggcaucaacaucacccgguuccagacccugcuggcccugcaccggagcuaccugaccccaggcgacagcagcagcggguggacagcaggcgcggcugcuuacuacgugggcuaccugcagccccggaccuuccugcugaaguacaacgagaacggcaccaucaccgacgccguggacugcgcccuggacccucugagcgagaccaagugcacccugaagagcuucaccguggagaagggcaucuaccagaccagcaacuuccgggugcagcccaccgagagcaucgugcgguuccccaacaucaccaaccugugccccuucggcgagguguucaacgccacccgguucgccagcguguacgccuggaaccggaagcggaucagcaacugcguggccgacuacagcgugcuguacaacagcgccagcuucagcaccuucaagugcuacggcgugagccccaccaagcugaacgaccugugcuucaccaacguguacgccgacagcuucgugauccguggcgacgaggugcggcagaucgcacccggccagacaggcaagaucgccgacuacaacuacaagcugcccgacgacuucaccggcugcgugaucgccuggaacagcaacaaccucgacagcaaggugggcggcaacuacaacuaccuguaccggcuguuccggaagagcaaccugaagcccuucgagcgggacaucagcaccgagaucuaccaagccggcaacaccccuugcaacggcguggagggcuucaacugcuacuucccucugcagagcuacggcuuccagcccaccaacggcgugggcuaccagcccuaccgggugguggugcugagcuucgagcugcugcacgccccagccaccguguguggccccaagaagagcaccaaccuggugaagaacaagugcgugaacuucaacuucaacggccuuaccggcaccggcgugcugaccgagagcaacaagaaauuccugcccuuucagcaguucggccgggacaucgccgacaccaccgacgcugugcgggauccccagacccuggagauccuggacaucaccccuugcagcuucggcggcgugagcgugaucaccccaggcaccaacaccagcaaccagguggccgugcuguaccagggcgugaacugcaccgaggugcccguggccauccacgccgaccagcugacacccaccuggcgggucuacagcaccggcagcaacguguuccagacccgggccgguugccugaucggcgccgagcacgugaacaacagcuacgagugcgacauccccaucggcgccggcaucugugccagcuaccagacccagaccaauucaccccggagggcaaggagcguggccagccagagcaucaucgccuacaccaugagccugggcgccgagaacagcguggccuacagcaacaacagcaucgccauccccaccaacuucaccaucagcgugaccaccgagauucugcccgugagcaugaccaagaccagcguggacugcaccauguacaucugcggcgacagcaccgagugcagcaaccugcugcugcaguacggcagcuucugcacccagcugaaccgggcccugaccggcaucgccguggagcaggacaagaacacccaggagguguucgcccaggugaagcagaucuacaagaccccucccaucaaggacuucggcggcuucaacuucagccagauccugcccgaccccagcaagcccagcaagcggagcuucaucgaggaccugcuguucaacaaggugacccuagccgacgccggcuucaucaagcaguacggcgacugccucggcgacauagccgcccgggaccugaucugcgcccagaaguucaacggccugaccgugcugccuccccugcugaccgacgagaugaucgcccaguacaccagcgcccuguuagccggaaccaucaccagcggcuggacuuucggcgcuggagccgcucugcagauccccuucgccaugcagauggccuaccgguucaacggcaucggcgugacccagaacgugcuguacgagaaccagaagcugaucgccaaccaguucaacagcgccaucggcaagauccaggacagccugagcagcaccgcuagcgcccugggcaagcugcaggacguggugaaccagaacgcccaggcccugaacacccuggugaagcagcugagcagcaacuucggcgccaucagcagcgugcugaacgacauccugagccggcuggacccucccgaggccgaggugcagaucgaccggcugaucacuggccggcugcagagccugcagaccuacgugacccagcagcugauccgggccgccgagauucgggccagcgccaaccuggccgccaccaagaugagcgagugcgugcugggccagagcaagcggguggacuucugcggcaagggcuaccaccugaugagcuuuccccagagcgcaccccacggagugguguuccugcacgugaccuacgugcccgcccaggagaagaacuucaccaccgccccagccaucugccacgacggcaaggcccacuuuccccgggagggcguguucgugagcaacggcacccacugguucgugacccagcggaacuucuacgagccccagaucaucaccaccgacaacaccuucgugagcggcaacugcgacguggugaucggcaucgugaacaacaccguguacgauccccugcagcccgagcuggacagcuucaaggaggagcuggacaaguacuucaagaaucacaccagccccgacguggaccugggcgacaucagcggcaucaacgccagcguggugaacauccagaaggagaucgaucggcugaacgagguggccaagaaccugaacgagagccugaucgaccugcaggagcugggcaaguacgagcaguacaucaaguggcccugguacaucuggcugggcuucaucgccggccugaucgccaucgugauggugaccaucaugcugugcugcaugaccagcugcugcagcugccugaagggcuguugcagcugcggcagcugcugcaaguucgacgaggacgacagcgagcccgugcugaagggcgugaagcugcacuacaccugaggacuaguuauaagacugacuagcccgaugggccucccaacgggcccuccuccccuccuugcaccgagauuaauagaucucaaaggcucuuuucagagccaccaaaaaaaaaaaaaaaaaaaaaaaaaaaaaaaaaaaaaaaaaaaaaaaaaaaaaaaaaaaaaaaaaaaaaaaaaaaaaaaaaaaaaaaaaaaaaaaaaaaaa

SEQ ID NO: 24438 - RNA, 4041 nt, Artificial Sequence
  SARS-CoV-2/Wuhan/WIV05/2019__EPI_ISL_402128 spike protein mRNA gc (1-1273)(K986P_V987P_N501Y_D614G)
aggagaaagcuuaccauguucguguuccuggugcugcugccccuggugagcagccagugcgugaaccugaccacccggacccagcugccaccagccuacaccaacagcuucacccggggcgucuacuaccccgacaagguguuccggagcagcguccugcacagcacccaggaccuguuccugcccuucuucagcaacgugaccugguuccacgccauccacgugagcggcaccaacggcaccaagcgguucgacaaccccgugcugcccuucaacgacggcguguacuucgccagcaccgagaagagcaacaucauccggggcuggaucuucggcaccacccuggacagcaagacccagagccugcugaucgugaauaacgccaccaacguggugaucaaggugugcgaguuccaguucugcaacgaccccuuccugggcguguacuaccacaagaacaacaagagcuggauggagagcgaguuccggguguacagcagcgccaacaacugcaccuucgaguacgugagccagcccuuccugauggaccuggagggcaagcagggcaacuucaagaaccugcgggaguucguguucaagaacaucgacggcuacuucaagaucuacagcaagcacaccccaaucaaccuggugcgggaucugccccagggcuucucagcccuggagccccugguggaccugcccaucggcaucaacaucacccgguuccagacccugcuggcccugcaccggagcuaccugaccccaggcgacagcagcagcggguggacagcaggcgcggcugcuuacuacgugggcuaccugcagccccggaccuuccugcugaaguacaacgagaacggcaccaucaccgacgccguggacugcgcccuggacccucugagcgagaccaagugcacccugaagagcuucaccguggagaagggcaucuaccagaccagcaacuuccgggugcagcccaccgagagcaucgugcgguuccccaacaucaccaaccugugccccuucggcgagguguucaacgccacccgguucgccagcguguacgccuggaaccggaagcggaucagcaacugcguggccgacuacagcgugcuguacaacagcgccagcuucagcaccuucaagugcuacggcgugagccccaccaagcugaacgaccugugcuucaccaacguguacgccgacagcuucgugauccguggcgacgaggugcggcagaucgcacccggccagacaggcaagaucgccgacuacaacuacaagcugcccgacgacuucaccggcugcgugaucgccuggaacagcaacaaccucgacagcaaggugggcggcaacuacaacuaccuguaccggcuguuccggaagagcaaccugaagcccuucgagcgggacaucagcaccgagaucuaccaagccggcuccaccccuugcaacggcguggagggcuucaacugcuacuucccucugcagagcuacggcuuccagcccaccuacggcgugggcuaccagcccuaccgggugguggugcugagcuucgagcugcugcacgccccagccaccguguguggccccaagaagagcaccaaccuggugaagaacaagugcgugaacuucaacuucaacggccuuaccggcaccggcgugcugaccgagagcaacaagaaauuccugcccuuucagcaguucggccgggacaucgccgacaccaccgacgcugugcgggauccccagacccuggagauccuggacaucaccccuugcagcuucggcggcgugagcgugaucaccccaggcaccaacaccagcaaccagguggccgugcuguaccagggcgugaacugcaccgaggugcccguggccauccacgccgaccagcugacacccaccuggcgggucuacagcaccggcagcaacguguuccagacccgggccgguugccugaucggcgccgagcacgugaacaacagcuacgagugcgacauccccaucggcgccggcaucugugccagcuaccagacccagaccaauucaccccggagggcaaggagcguggccagccagagcaucaucgccuacaccaugagccugggcgccgagaacagcguggccuacagcaacaacagcaucgccauccccaccaacuucaccaucagcgugaccaccgagauucugcccgugagcaugaccaagaccagcguggacugcaccauguacaucugcggcgacagcaccgagugcagcaaccugcugcugcaguacggcagcuucugcacccagcugaaccgggcccugaccggcaucgccguggagcaggacaagaacacccaggagguguucgcccaggugaagcagaucuacaagaccccucccaucaaggacuucggcggcuucaacuucagccagauccugcccgaccccagcaagcccagcaagcggagcuucaucgaggaccugcuguucaacaaggugacccuagccgacgccggcuucaucaagcaguacggcgacugccucggcgacauagccgcccgggaccugaucugcgcccagaaguucaacggccugaccgugcugccuccccugcugaccgacgagaugaucgcccaguacaccagcgcccuguuagccggaaccaucaccagcggcuggacuuucggcgcuggagccgcucugcagauccccuucgccaugcagauggccuaccgguucaacggcaucggcgugacccagaacgugcuguacgagaaccagaagcugaucgccaaccaguucaacagcgccaucggcaagauccaggacagccugagcagcaccgcuagcgcccugggcaagcugcaggacguggugaaccagaacgcccaggcccugaacacccuggugaagcagcugagcagcaacuucggcgccaucagcagcgugcugaacgacauccugagccggcuggacccucccgaggccgaggugcagaucgaccggcugaucacuggccggcugcagagccugcagaccuacgugacccagcagcugauccgggccgccgagauucgggccagcgccaaccuggccgccaccaagaugagcgagugcgugcugggccagagcaagcggguggacuucugcggcaagggcuaccaccugaugagcuuuccccagagcgcaccccacggagugguguuccugcacgugaccuacgugcccgcccaggagaagaacuucaccaccgccccagccaucugccacgacggcaaggcccacuuuccccgggagggcguguucgugagcaacggcacccacugguucgugacccagcggaacuucuacgagccccagaucaucaccaccgacaacaccuucgugagcggcaacugcgacguggugaucggcaucgugaacaacaccguguacgauccccugcagcccgagcuggacagcuucaaggaggagcuggacaaguacuucaagaaucacaccagccccgacguggaccugggcgacaucagcggcaucaacgccagcguggugaacauccagaaggagaucgaucggcugaacgagguggccaagaaccugaacgagagccugaucgaccugcaggagcugggcaaguacgagcaguacaucaaguggcccugguacaucuggcugggcuucaucgccggccugaucgccaucgugauggugaccaucaugcugugcugcaugaccagcugcugcagcugccugaagggcuguugcagcugcggcagcugcugcaaguucgacgaggacgacagcgagcccgugcugaagggcgugaagcugcacuacaccugaggacuaguuauaagacugacuagcccgaugggccucccaacgggcccuccuccccuccuugcaccgagauuaauagaucucaaaggcucuuuucagagccaccaaaaaaaaaaaaaaaaaaaaaaaaaaaaaaaaaaaaaaaaaaaaaaaaaaaaaaaaaaaaaaaaaaaaaaaaaaaaaaaaaaaaaaaaaaaaaaaaaaaaa

SEQ ID NO: 24439 - RNA, 4035 nt, Artificial Sequence
  SARS-CoV-2/Wuhan/WIV05/2019__EPI_ISL_402128 spike protein mRNA gc (1-1273)(K986P_V987P_H69del_V70del_D614G)
aggagaaagcuuaccauguucguguuccuggugcugcugccccuggugagcagccagugcgugaaccugaccacccggacccagcugccaccagccuacaccaacagcuucacccggggcgucuacuaccccgacaagguguuccggagcagcguccugcacagcacccaggaccuguuccugcccuucuucagcaacgugaccugguuccacgccaucagcggcaccaacggcaccaagcgguucgacaaccccgugcugcccuucaacgacggcguguacuucgccagcaccgagaagagcaacaucauccggggcuggaucuucggcaccacccuggacagcaagacccagagccugcugaucgugaauaacgccaccaacguggugaucaaggugugcgaguuccaguucugcaacgaccccuuccugggcguguacuaccacaagaacaacaagagcuggauggagagcgaguuccggguguacagcagcgccaacaacugcaccuucgaguacgugagccagcccuuccugauggaccuggagggcaagcagggcaacuucaagaaccugcgggaguucguguucaagaacaucgacggcuacuucaagaucuacagcaagcacaccccaaucaaccuggugcgggaucugccccagggcuucucagcccuggagccccugguggaccugcccaucggcaucaacaucacccgguuccagacccugcuggcccugcaccggagcuaccugaccccaggcgacagcagcagcggguggacagcaggcgcggcugcuuacuacgugggcuaccugcagccccggaccuuccugcugaaguacaacgagaacggcaccaucaccgacgccguggacugcgcccuggacccucugagcgagaccaagugcacccugaagagcuucaccguggagaagggcaucuaccagaccagcaacuuccgggugcagcccaccgagagcaucgugcgguuccccaacaucaccaaccugugccccuucggcgagguguucaacgccacccgguucgccagcguguacgccuggaaccggaagcggaucagcaacugcguggccgacuacagcgugcuguacaacagcgccagcuucagcaccuucaagugcuacggcgugagccccaccaagcugaacgaccugugcuucaccaacguguacgccgacagcuucgugauccguggcgacgaggugcggcagaucgcacccggccagacaggcaagaucgccgacuacaacuacaagcugcccgacgacuucaccggcugcgugaucgccuggaacagcaacaaccucgacagcaaggugggcggcaacuacaacuaccuguaccggcuguuccggaagagcaaccugaagcccuucgagcgggacaucagcaccgagaucuaccaagccggcuccaccccuugcaacggcguggagggcuucaacugcuacuucccucugcagagcuacggcuuccagcccaccaacggcgugggcuaccagcccuaccgggugguggugcugagcuucgagcugcugcacgccccagccaccguguguggccccaagaagagcaccaaccuggugaagaacaagugcgugaacuucaacuucaacggccuuaccggcaccggcgugcugaccgagagcaacaagaaauuccugcccuuucagcaguucggccgggacaucgccgacaccaccgacgcugugcgggauccccagacccuggagauccuggacaucaccccuugcagcuucggcggcgugagcgugaucaccccaggcaccaacaccagcaaccagguggccgugcuguaccagggcgugaacugcaccgaggugcccguggccauccacgccgaccagcugacacccaccuggcgggucuacagcaccggcagcaacguguuccagacccgggccgguugccugaucggcgccgagcacgugaacaacagcuacgagugcgacauccccaucggcgccggcaucugugccagcuaccagacccagaccaauucaccccggagggcaaggagcguggccagccagagcaucaucgccuacaccaugagccugggcgccgagaacagcguggccuacagcaacaacagcaucgccauccccaccaacuucaccaucagcgugaccaccgagauucugcccgugagcaugaccaagaccagcguggacugcaccauguacaucugcggcgacagcaccgagugcagcaaccugcugcugcaguacggcagcuucugcacccagcugaaccgggcccugaccggcaucgccguggagcaggacaagaacacccaggagguguucgcccaggugaagcagaucuacaagaccccucccaucaaggacuucggcggcuucaacuucagccagauccugcccgaccccagcaagcccagcaagcggagcuucaucgaggaccugcuguucaacaaggugacccuagccgacgccggcuucaucaagcaguacggcgacugccucggcgacauagccgcccgggaccugaucugcgcccagaaguucaacggccugaccgugcugccuccccugcugaccgacgagaugaucgcccaguacaccagcgcccuguuagccggaaccaucaccagcggcuggacuuucggcgcuggagccgcucugcagauccccuucgccaugcagauggccuaccgguucaacggcaucggcgugacccagaacgugcuguacgagaaccagaagcugaucgccaaccaguucaacagcgccaucggcaagauccaggacagccugagcagcaccgcuagcgcccugggcaagcugcaggacguggugaaccagaacgcccaggcccugaacacccuggugaagcagcugagcagcaacuucggcgccaucagcagcgugcugaacgacauccugagccggcuggacccucccgaggccgaggugcagaucgaccggcugaucacuggccggcugcagagccugcagaccuacgugacccagcagcugauccgggccgccgagauucgggccagcgccaaccuggccgccaccaagaugagcgagugcgugcugggccagagcaagcggguggacuucugcggcaagggcuaccaccugaugagcuuuccccagagcgcaccccacggagugguguuccugcacgugaccuacgugcccgcccaggagaagaacuucaccaccgccccagccaucugccacgacggcaaggcccacuuuccccgggagggcguguucgugagcaacggcacccacugguucgugacccagcggaacuucuacgagccccagaucaucaccaccgacaacaccuucgugagcggcaacugcgacguggugaucggcaucgugaacaacaccguguacgauccccugcagcccgagcuggacagcuucaaggaggagcuggacaaguacuucaagaaucacaccagccccgacguggaccugggcgacaucagcggcaucaacgccagcguggugaacauccagaaggagaucgaucggcugaacgagguggccaagaaccugaacgagagccugaucgaccugcaggagcugggcaaguacgagcaguacaucaaguggcccugguacaucuggcugggcuucaucgccggccugaucgccaucgugauggugaccaucaugcugugcugcaugaccagcugcugcagcugccugaagggcuguugcagcugcggcagcugcugcaaguucgacgaggacgacagcgagcccgugcugaagggcgugaagcugcacuacaccugaggacuaguuauaagacugacuagcccgaugggccucccaacgggcccuccuccccuccuugcaccgagauuaauagaucucaaaggcucuuuucagagccaccaaaaaaaaaaaaaaaaaaaaaaaaaaaaaaaaaaaaaaaaaaaaaaaaaaaaaaaaaaaaaaaaaaaaaaaaaaaaaaaaaaaaaaaaaaaaaaaaaaaaa

SEQ ID NO: 24440 - RNA, 4041 nt, Artificial Sequence
  SARS-CoV-2/Wuhan/WIV05/2019__EPI_ISL_402128 spike protein mRNA gc (1-1273)(K986P_V987P_Y453F_D614G)
aggagaaagcuuaccauguucguguuccuggugcugcugccccuggugagcagccagugcgugaaccugaccacccggacccagcugccaccagccuacaccaacagcuucacccggggcgucuacuaccccgacaagguguuccggagcagcguccugcacagcacccaggaccuguuccugcccuucuucagcaacgugaccugguuccacgccauccacgugagcggcaccaacggcaccaagcgguucgacaaccccgugcugcccuucaacgacggcguguacuucgccagcaccgagaagagcaacaucauccggggcuggaucuucggcaccacccuggacagcaagacccagagccugcugaucgugaauaacgccaccaacguggugaucaaggugugcgaguuccaguucugcaacgaccccuuccugggcguguacuaccacaagaacaacaagagcuggauggagagcgaguuccggguguacagcagcgccaacaacugcaccuucgaguacgugagccagcccuuccugauggaccuggagggcaagcagggcaacuucaagaaccugcgggaguucguguucaagaacaucgacggcuacuucaagaucuacagcaagcacaccccaaucaaccuggugcgggaucugccccagggcuucucagcccuggagccccugguggaccugcccaucggcaucaacaucacccgguuccagacccugcuggcccugcaccggagcuaccugaccccaggcgacagcagcagcggguggacagcaggcgcggcugcuuacuacgugggcuaccugcagccccggaccuuccugcugaaguacaacgagaacggcaccaucaccgacgccguggacugcgcccuggacccucugagcgagaccaagugcacccugaagagcuucaccguggagaagggcaucuaccagaccagcaacuuccgggugcagcccaccgagagcaucgugcgguuccccaacaucaccaaccugugccccuucggcgagguguucaacgccacccgguucgccagcguguacgccuggaaccggaagcggaucagcaacugcguggccgacuacagcgugcuguacaacagcgccagcuucagcaccuucaagugcuacggcgugagccccaccaagcugaacgaccugugcuucaccaacguguacgccgacagcuucgugauccguggcgacgaggugcggcagaucgcacccggccagacaggcaagaucgccgacuacaacuacaagcugcccgacgacuucaccggcugcgugaucgccuggaacagcaacaaccucgacagcaaggugggcggcaacuacaacuaccuguuccggcuguuccggaagagcaaccugaagcccuucgagcgggacaucagcaccgagaucuaccaagccggcuccaccccuugcaacggcguggagggcuucaacugcuacuucccucugcagagcuacggcuuccagcccaccaacggcgugggcuaccagcccuaccgggugguggugcugagcuucgagcugcugcacgccccagccaccguguguggccccaagaagagcaccaaccuggugaagaacaagugcgugaacuucaacuucaacggccuuaccggcaccggcgugcugaccgagagcaacaagaaauuccugcccuuucagcaguucggccgggacaucgccgacaccaccgacgcugugcgggauccccagacccuggagauccuggacaucaccccuugcagcuucggcggcgugagcgugaucaccccaggcaccaacaccagcaaccagguggccgugcuguaccagggcgugaacugcaccgaggugcccguggccauccacgccgaccagcugacacccaccuggcgggucuacagcaccggcagcaacguguuccagacccgggccgguugccugaucggcgccgagcacgugaacaacagcuacgagugcgacauccccaucggcgccggcaucugugccagcuaccagacccagaccaauucaccccggagggcaaggagcguggccagccagagcaucaucgccuacaccaugagccugggcgccgagaacagcguggccuacagcaacaacagcaucgccauccccaccaacuucaccaucagcgugaccaccgagauucugcccgugagcaugaccaagaccagcguggacugcaccauguacaucugcggcgacagcaccgagugcagcaaccugcugcugcaguacggcagcuucugcacccagcugaaccgggcccugaccggcaucgccguggagcaggacaagaacacccaggagguguucgcccaggugaagcagaucuacaagaccccucccaucaaggacuucggcggcuucaacuucagccagauccugcccgaccccagcaagcccagcaagcggagcuucaucgaggaccugcuguucaacaaggugacccuagccgacgccggcuucaucaagcaguacggcgacugccucggcgacauagccgcccgggaccugaucugcgcccagaaguucaacggccugaccgugcugccuccccugcugaccgacgagaugaucgcccaguacaccagcgcccuguuagccggaaccaucaccagcggcuggacuuucggcgcuggagccgcucugcagauccccuucgccaugcagauggccuaccgguucaacggcaucggcgugacccagaacgugcuguacgagaaccagaagcugaucgccaaccaguucaacagcgccaucggcaagauccaggacagccugagcagcaccgcuagcgcccugggcaagcugcaggacguggugaaccagaacgcccaggcccugaacacccuggugaagcagcugagcagcaacuucggcgccaucagcagcgugcugaacgacauccugagccggcuggacccucccgaggccgaggugcagaucgaccggcugaucacuggccggcugcagagccugcagaccuacgugacccagcagcugauccgggccgccgagauucgggccagcgccaaccuggccgccaccaagaugagcgagugcgugcugggccagagcaagcggguggacuucugcggcaagggcuaccaccugaugagcuuuccccagagcgcaccccacggagugguguuccugcacgugaccuacgugcccgcccaggagaagaacuucaccaccgccccagccaucugccacgacggcaaggcccacuuuccccgggagggcguguucgugagcaacggcacccacugguucgugacccagcggaacuucuacgagccccagaucaucaccaccgacaacaccuucgugagcggcaacugcgacguggugaucggcaucgugaacaacaccguguacgauccccugcagcccgagcuggacagcuucaaggaggagcuggacaaguacuucaagaaucacaccagccccgacguggaccugggcgacaucagcggcaucaacgccagcguggugaacauccagaaggagaucgaucggcugaacgagguggccaagaaccugaacgagagccugaucgaccugcaggagcugggcaaguacgagcaguacaucaaguggcccugguacaucuggcugggcuucaucgccggccugaucgccaucgugauggugaccaucaugcugugcugcaugaccagcugcugcagcugccugaagggcuguugcagcugcggcagcugcugcaaguucgacgaggacgacagcgagcccgugcugaagggcgugaagcugcacuacaccugaggacuaguuauaagacugacuagcccgaugggccucccaacgggcccuccuccccuccuugcaccgagauuaauagaucucaaaggcucuuuucagagccaccaaaaaaaaaaaaaaaaaaaaaaaaaaaaaaaaaaaaaaaaaaaaaaaaaaaaaaaaaaaaaaaaaaaaaaaaaaaaaaaaaaaaaaaaaaaaaaaaaaaaa

SEQ ID NO: 24441 - RNA, 4041 nt, Artificial Sequence
  SARS-CoV-2/Wuhan/WIV05/2019__EPI_ISL_402128 spike protein mRNA gc (1-1273)(K986P_V987P_D614G_I692V)
aggagaaagcuuaccauguucguguuccuggugcugcugccccuggugagcagccagugcgugaaccugaccacccggacccagcugccaccagccuacaccaacagcuucacccggggcgucuacuaccccgacaagguguuccggagcagcguccugcacagcacccaggaccuguuccugcccuucuucagcaacgugaccugguuccacgccauccacgugagcggcaccaacggcaccaagcgguucgacaaccccgugcugcccuucaacgacggcguguacuucgccagcaccgagaagagcaacaucauccggggcuggaucuucggcaccacccuggacagcaagacccagagccugcugaucgugaauaacgccaccaacguggugaucaaggugugcgaguuccaguucugcaacgaccccuuccugggcguguacuaccacaagaacaacaagagcuggauggagagcgaguuccggguguacagcagcgccaacaacugcaccuucgaguacgugagccagcccuuccugauggaccuggagggcaagcagggcaacuucaagaaccugcgggaguucguguucaagaacaucgacggcuacuucaagaucuacagcaagcacaccccaaucaaccuggugcgggaucugccccagggcuucucagcccuggagccccugguggaccugcccaucggcaucaacaucacccgguuccagacccugcuggcccugcaccggagcuaccugaccccaggcgacagcagcagcggguggacagcaggcgcggcugcuuacuacgugggcuaccugcagccccggaccuuccugcugaaguacaacgagaacggcaccaucaccgacgccguggacugcgcccuggacccucugagcgagaccaagugcacccugaagagcuucaccguggagaagggcaucuaccagaccagcaacuuccgggugcagcccaccgagagcaucgugcgguuccccaacaucaccaaccugugccccuucggcgagguguucaacgccacccgguucgccagcguguacgccuggaaccggaagcggaucagcaacugcguggccgacuacagcgugcuguacaacagcgccagcuucagcaccuucaagugcuacggcgugagccccaccaagcugaacgaccugugcuucaccaacguguacgccgacagcuucgugauccguggcgacgaggugcggcagaucgcacccggccagacaggcaagaucgccgacuacaacuacaagcugcccgacgacuucaccggcugcgugaucgccuggaacagcaacaaccucgacagcaaggugggcggcaacuacaacuaccuguaccggcuguuccggaagagcaaccugaagcccuucgagcgggacaucagcaccgagaucuaccaagccggcuccaccccuugcaacggcguggagggcuucaacugcuacuucccucugcagagcuacggcuuccagcccaccaacggcgugggcuaccagcccuaccgggugguggugcugagcuucgagcugcugcacgccccagccaccguguguggccccaagaagagcaccaaccuggugaagaacaagugcgugaacuucaacuucaacggccuuaccggcaccggcgugcugaccgagagcaacaagaaauuccugcccuuucagcaguucggccgggacaucgccgacaccaccgacgcugugcgggauccccagacccuggagauccuggacaucaccccuugcagcuucggcggcgugagcgugaucaccccaggcaccaacaccagcaaccagguggccgugcuguaccagggcgugaacugcaccgaggugcccguggccauccacgccgaccagcugacacccaccuggcgggucuacagcaccggcagcaacguguuccagacccgggccgguugccugaucggcgccgagcacgugaacaacagcuacgagugcgacauccccaucggcgccggcaucugugccagcuaccagacccagaccaauucaccccggagggcaaggagcguggccagccagagcgugaucgccuacaccaugagccugggcgccgagaacagcguggccuacagcaacaacagcaucgccauccccaccaacuucaccaucagcgugaccaccgagauucugcccgugagcaugaccaagaccagcguggacugcaccauguacaucugcggcgacagcaccgagugcagcaaccugcugcugcaguacggcagcuucugcacccagcugaaccgggcccugaccggcaucgccguggagcaggacaagaacacccaggagguguucgcccaggugaagcagaucuacaagaccccucccaucaaggacuucggcggcuucaacuucagccagauccugcccgaccccagcaagcccagcaagcggagcuucaucgaggaccugcuguucaacaaggugacccuagccgacgccggcuucaucaagcaguacggcgacugccucggcgacauagccgcccgggaccugaucugcgcccagaaguucaacggccugaccgugcugccuccccugcugaccgacgagaugaucgcccaguacaccagcgcccuguuagccggaaccaucaccagcggcuggacuuucggcgcuggagccgcucugcagauccccuucgccaugcagauggccuaccgguucaacggcaucggcgugacccagaacgugcuguacgagaaccagaagcugaucgccaaccaguucaacagcgccaucggcaagauccaggacagccugagcagcaccgcuagcgcccugggcaagcugcaggacguggugaaccagaacgcccaggcccugaacacccuggugaagcagcugagcagcaacuucggcgccaucagcagcgugcugaacgacauccugagccggcuggacccucccgaggccgaggugcagaucgaccggcugaucacuggccggcugcagagccugcagaccuacgugacccagcagcugauccgggccgccgagauucgggccagcgccaaccuggccgccaccaagaugagcgagugcgugcugggccagagcaagcggguggacuucugcggcaagggcuaccaccugaugagcuuuccccagagcgcaccccacggagugguguuccugcacgugaccuacgugcccgcccaggagaagaacuucaccaccgccccagccaucugccacgacggcaaggcccacuuuccccgggagggcguguucgugagcaacggcacccacugguucgugacccagcggaacuucuacgagccccagaucaucaccaccgacaacaccuucgugagcggcaacugcgacguggugaucggcaucgugaacaacaccguguacgauccccugcagcccgagcuggacagcuucaaggaggagcuggacaaguacuucaagaaucacaccagccccgacguggaccugggcgacaucagcggcaucaacgccagcguggugaacauccagaaggagaucgaucggcugaacgagguggccaagaaccugaacgagagccugaucgaccugcaggagcugggcaaguacgagcaguacaucaaguggcccugguacaucuggcugggcuucaucgccggccugaucgccaucgugauggugaccaucaugcugugcugcaugaccagcugcugcagcugccugaagggcuguugcagcugcggcagcugcugcaaguucgacgaggacgacagcgagcccgugcugaagggcgugaagcugcacuacaccugaggacuaguuauaagacugacuagcccgaugggccucccaacgggcccuccuccccuccuugcaccgagauuaauagaucucaaaggcucuuuucagagccaccaaaaaaaaaaaaaaaaaaaaaaaaaaaaaaaaaaaaaaaaaaaaaaaaaaaaaaaaaaaaaaaaaaaaaaaaaaaaaaaaaaaaaaaaaaaaaaaaaaaaa

SEQ ID NO: 24442 - RNA, 4041 nt, Artificial Sequence
  SARS-CoV-2/Wuhan/WIV05/2019__EPI_ISL_402128 spike protein mRNA gc (1-1273)(K986P_V987P_D614G_M1229I)
aggagaaagcuuaccauguucguguuccuggugcugcugccccuggugagcagccagugcgugaaccugaccacccggacccagcugccaccagccuacaccaacagcuucacccggggcgucuacuaccccgacaagguguuccggagcagcguccugcacagcacccaggaccuguuccugcccuucuucagcaacgugaccugguuccacgccauccacgugagcggcaccaacggcaccaagcgguucgacaaccccgugcugcccuucaacgacggcguguacuucgccagcaccgagaagagcaacaucauccggggcuggaucuucggcaccacccuggacagcaagacccagagccugcugaucgugaauaacgccaccaacguggugaucaaggugugcgaguuccaguucugcaacgaccccuuccugggcguguacuaccacaagaacaacaagagcuggauggagagcgaguuccggguguacagcagcgccaacaacugcaccuucgaguacgugagccagcccuuccugauggaccuggagggcaagcagggcaacuucaagaaccugcgggaguucguguucaagaacaucgacggcuacuucaagaucuacagcaagcacaccccaaucaaccuggugcgggaucugccccagggcuucucagcccuggagccccugguggaccugcccaucggcaucaacaucacccgguuccagacccugcuggcccugcaccggagcuaccugaccccaggcgacagcagcagcggguggacagcaggcgcggcugcuuacuacgugggcuaccugcagccccggaccuuccugcugaaguacaacgagaacggcaccaucaccgacgccguggacugcgcccuggacccucugagcgagaccaagugcacccugaagagcuucaccguggagaagggcaucuaccagaccagcaacuuccgggugcagcccaccgagagcaucgugcgguuccccaacaucaccaaccugugccccuucggcgagguguucaacgccacccgguucgccagcguguacgccuggaaccggaagcggaucagcaacugcguggccgacuacagcgugcuguacaacagcgccagcuucagcaccuucaagugcuacggcgugagccccaccaagcugaacgaccugugcuucaccaacguguacgccgacagcuucgugauccguggcgacgaggugcggcagaucgcacccggccagacaggcaagaucgccgacuacaacuacaagcugcccgacgacuucaccggcugcgugaucgccuggaacagcaacaaccucgacagcaaggugggcggcaacuacaacuaccuguaccggcuguuccggaagagcaaccugaagcccuucgagcgggacaucagcaccgagaucuaccaagccggcuccaccccuugcaacggcguggagggcuucaacugcuacuucccucugcagagcuacggcuuccagcccaccaacggcgugggcuaccagcccuaccgggugguggugcugagcuucgagcugcugcacgccccagccaccguguguggccccaagaagagcaccaaccuggugaagaacaagugcgugaacuucaacuucaacggccuuaccggcaccggcgugcugaccgagagcaacaagaaauuccugcccuuucagcaguucggccgggacaucgccgacaccaccgacgcugugcgggauccccagacccuggagauccuggacaucaccccuugcagcuucggcggcgugagcgugaucaccccaggcaccaacaccagcaaccagguggccgugcuguaccagggcgugaacugcaccgaggugcccguggccauccacgccgaccagcugacacccaccuggcgggucuacagcaccggcagcaacguguuccagacccgggccgguugccugaucggcgccgagcacgugaacaacagcuacgagugcgacauccccaucggcgccggcaucugugccagcuaccagacccagaccaauucaccccggagggcaaggagcguggccagccagagcaucaucgccuacaccaugagccugggcgccgagaacagcguggccuacagcaacaacagcaucgccauccccaccaacuucaccaucagcgugaccaccgagauucugcccgugagcaugaccaagaccagcguggacugcaccauguacaucugcggcgacagcaccgagugcagcaaccugcugcugcaguacggcagcuucugcacccagcugaaccgggcccugaccggcaucgccguggagcaggacaagaacacccaggagguguucgcccaggugaagcagaucuacaagaccccucccaucaaggacuucggcggcuucaacuucagccagauccugcccgaccccagcaagcccagcaagcggagcuucaucgaggaccugcuguucaacaaggugacccuagccgacgccggcuucaucaagcaguacggcgacugccucggcgacauagccgcccgggaccugaucugcgcccagaaguucaacggccugaccgugcugccuccccugcugaccgacgagaugaucgcccaguacaccagcgcccuguuagccggaaccaucaccagcggcuggacuuucggcgcuggagccgcucugcagauccccuucgccaugcagauggccuaccgguucaacggcaucggcgugacccagaacgugcuguacgagaaccagaagcugaucgccaaccaguucaacagcgccaucggcaagauccaggacagccugagcagcaccgcuagcgcccugggcaagcugcaggacguggugaaccagaacgcccaggcccugaacacccuggugaagcagcugagcagcaacuucggcgccaucagcagcgugcugaacgacauccugagccggcuggacccucccgaggccgaggugcagaucgaccggcugaucacuggccggcugcagagccugcagaccuacgugacccagcagcugauccgggccgccgagauucgggccagcgccaaccuggccgccaccaagaugagcgagugcgugcugggccagagcaagcggguggacuucugcggcaagggcuaccaccugaugagcuuuccccagagcgcaccccacggagugguguuccugcacgugaccuacgugcccgcccaggagaagaacuucaccaccgccccagccaucugccacgacggcaaggcccacuuuccccgggagggcguguucgugagcaacggcacccacugguucgugacccagcggaacuucuacgagccccagaucaucaccaccgacaacaccuucgugagcggcaacugcgacguggugaucggcaucgugaacaacaccguguacgauccccugcagcccgagcuggacagcuucaaggaggagcuggacaaguacuucaagaaucacaccagccccgacguggaccugggcgacaucagcggcaucaacgccagcguggugaacauccagaaggagaucgaucggcugaacgagguggccaagaaccugaacgagagccugaucgaccugcaggagcugggcaaguacgagcaguacaucaaguggcccugguacaucuggcugggcuucaucgccggccugaucgccaucgugaucgugaccaucaugcugugcugcaugaccagcugcugcagcugccugaagggcuguugcagcugcggcagcugcugcaaguucgacgaggacgacagcgagcccgugcugaagggcgugaagcugcacuacaccugaggacuaguuauaagacugacuagcccgaugggccucccaacgggcccuccuccccuccuugcaccgagauuaauagaucucaaaggcucuuuucagagccaccaaaaaaaaaaaaaaaaaaaaaaaaaaaaaaaaaaaaaaaaaaaaaaaaaaaaaaaaaaaaaaaaaaaaaaaaaaaaaaaaaaaaaaaaaaaaaaaaaaaaa

SEQ ID NO: 24443 - RNA, 4035 nt, Artificial Sequence
  SARS-CoV-2/Wuhan/WIV05/2019__EPI_ISL_402128 spike protein mRNA gc (1-1273)(K986P_V987P_H69del_V70del_A222V_Y453F_S477N_D614G_I692V)
aggagaaagcuuaccauguucguguuccuggugcugcugccccuggugagcagccagugcgugaaccugaccacccggacccagcugccaccagccuacaccaacagcuucacccggggcgucuacuaccccgacaagguguuccggagcagcguccugcacagcacccaggaccuguuccugcccuucuucagcaacgugaccugguuccacgccaucagcggcaccaacggcaccaagcgguucgacaaccccgugcugcccuucaacgacggcguguacuucgccagcaccgagaagagcaacaucauccggggcuggaucuucggcaccacccuggacagcaagacccagagccugcugaucgugaauaacgccaccaacguggugaucaaggugugcgaguuccaguucugcaacgaccccuuccugggcguguacuaccacaagaacaacaagagcuggauggagagcgaguuccggguguacagcagcgccaacaacugcaccuucgaguacgugagccagcccuuccugauggaccuggagggcaagcagggcaacuucaagaaccugcgggaguucguguucaagaacaucgacggcuacuucaagaucuacagcaagcacaccccaaucaaccuggugcgggaucugccccagggcuucucagugcuggagccccugguggaccugcccaucggcaucaacaucacccgguuccagacccugcuggcccugcaccggagcuaccugaccccaggcgacagcagcagcggguggacagcaggcgcggcugcuuacuacgugggcuaccugcagccccggaccuuccugcugaaguacaacgagaacggcaccaucaccgacgccguggacugcgcccuggacccucugagcgagaccaagugcacccugaagagcuucaccguggagaagggcaucuaccagaccagcaacuuccgggugcagcccaccgagagcaucgugcgguuccccaacaucaccaaccugugccccuucggcgagguguucaacgccacccgguucgccagcguguacgccuggaaccggaagcggaucagcaacugcguggccgacuacagcgugcuguacaacagcgccagcuucagcaccuucaagugcuacggcgugagccccaccaagcugaacgaccugugcuucaccaacguguacgccgacagcuucgugauccguggcgacgaggugcggcagaucgcacccggccagacaggcaagaucgccgacuacaacuacaagcugcccgacgacuucaccggcugcgugaucgccuggaacagcaacaaccucgacagcaaggugggcggcaacuacaacuaccuguuccggcuguuccggaagagcaaccugaagcccuucgagcgggacaucagcaccgagaucuaccaagccggcaacaccccuugcaacggcguggagggcuucaacugcuacuucccucugcagagcuacggcuuccagcccaccaacggcgugggcuaccagcccuaccgggugguggugcugagcuucgagcugcugcacgccccagccaccguguguggccccaagaagagcaccaaccuggugaagaacaagugcgugaacuucaacuucaacggccuuaccggcaccggcgugcugaccgagagcaacaagaaauuccugcccuuucagcaguucggccgggacaucgccgacaccaccgacgcugugcgggauccccagacccuggagauccuggacaucaccccuugcagcuucggcggcgugagcgugaucaccccaggcaccaacaccagcaaccagguggccgugcuguaccagggcgugaacugcaccgaggugcccguggccauccacgccgaccagcugacacccaccuggcgggucuacagcaccggcagcaacguguuccagacccgggccgguugccugaucggcgccgagcacgugaacaacagcuacgagugcgacauccccaucggcgccggcaucugugccagcuaccagacccagaccaauucaccccggagggcaaggagcguggccagccagagcgugaucgccuacaccaugagccugggcgccgagaacagcguggccuacagcaacaacagcaucgccauccccaccaacuucaccaucagcgugaccaccgagauucugcccgugagcaugaccaagaccagcguggacugcaccauguacaucugcggcgacagcaccgagugcagcaaccugcugcugcaguacggcagcuucugcacccagcugaaccgggcccugaccggcaucgccguggagcaggacaagaacacccaggagguguucgcccaggugaagcagaucuacaagaccccucccaucaaggacuucggcggcuucaacuucagccagauccugcccgaccccagcaagcccagcaagcggagcuucaucgaggaccugcuguucaacaaggugacccuagccgacgccggcuucaucaagcaguacggcgacugccucggcgacauagccgcccgggaccugaucugcgcccagaaguucaacggccugaccgugcugccuccccugcugaccgacgagaugaucgcccaguacaccagcgcccuguuagccggaaccaucaccagcggcuggacuuucggcgcuggagccgcucugcagauccccuucgccaugcagauggccuaccgguucaacggcaucggcgugacccagaacgugcuguacgagaaccagaagcugaucgccaaccaguucaacagcgccaucggcaagauccaggacagccugagcagcaccgcuagcgcccugggcaagcugcaggacguggugaaccagaacgcccaggcccugaacacccuggugaagcagcugagcagcaacuucggcgccaucagcagcgugcugaacgacauccugagccggcuggacccucccgaggccgaggugcagaucgaccggcugaucacuggccggcugcagagccugcagaccuacgugacccagcagcugauccgggccgccgagauucgggccagcgccaaccuggccgccaccaagaugagcgagugcgugcugggccagagcaagcggguggacuucugcggcaagggcuaccaccugaugagcuuuccccagagcgcaccccacggagugguguuccugcacgugaccuacgugcccgcccaggagaagaacuucaccaccgccccagccaucugccacgacggcaaggcccacuuuccccgggagggcguguucgugagcaacggcacccacugguucgugacccagcggaacuucuacgagccccagaucaucaccaccgacaacaccuucgugagcggcaacugcgacguggugaucggcaucgugaacaacaccguguacgauccccugcagcccgagcuggacagcuucaaggaggagcuggacaaguacuucaagaaucacaccagccccgacguggaccugggcgacaucagcggcaucaacgccagcguggugaacauccagaaggagaucgaucggcugaacgagguggccaagaaccugaacgagagccugaucgaccugcaggagcugggcaaguacgagcaguacaucaaguggcccugguacaucuggcugggcuucaucgccggccugaucgccaucgugauggugaccaucaugcugugcugcaugaccagcugcugcagcugccugaagggcuguugcagcugcggcagcugcugcaaguucgacgaggacgacagcgagcccgugcugaagggcgugaagcugcacuacaccugaggacuaguuauaagacugacuagcccgaugggccucccaacgggcccuccuccccuccuugcaccgagauuaauagaucucaaaggcucuuuucagagccaccaaaaaaaaaaaaaaaaaaaaaaaaaaaaaaaaaaaaaaaaaaaaaaaaaaaaaaaaaaaaaaaaaaaaaaaaaaaaaaaaaaaaaaaaaaaaaaaaaaaaa

SEQ ID NO: 24444 - RNA, 4035 nt, Artificial Sequence
  SARS-CoV-2/Wuhan/WIV05/2019__EPI_ISL_402128 spike protein mRNA gc (1-1273)(K986P_V987P_H69del_V70del_Y453F_D614G_I692V_M1229I)
aggagaaagcuuaccauguucguguuccuggugcugcugccccuggugagcagccagugcgugaaccugaccacccggacccagcugccaccagccuacaccaacagcuucacccggggcgucuacuaccccgacaagguguuccggagcagcguccugcacagcacccaggaccuguuccugcccuucuucagcaacgugaccugguuccacgccaucagcggcaccaacggcaccaagcgguucgacaaccccgugcugcccuucaacgacggcguguacuucgccagcaccgagaagagcaacaucauccggggcuggaucuucggcaccacccuggacagcaagacccagagccugcugaucgugaauaacgccaccaacguggugaucaaggugugcgaguuccaguucugcaacgaccccuuccugggcguguacuaccacaagaacaacaagagcuggauggagagcgaguuccggguguacagcagcgccaacaacugcaccuucgaguacgugagccagcccuuccugauggaccuggagggcaagcagggcaacuucaagaaccugcgggaguucguguucaagaacaucgacggcuacuucaagaucuacagcaagcacaccccaaucaaccuggugcgggaucugccccagggcuucucagcccuggagccccugguggaccugcccaucggcaucaacaucacccgguuccagacccugcuggcccugcaccggagcuaccugaccccaggcgacagcagcagcggguggacagcaggcgcggcugcuuacuacgugggcuaccugcagccccggaccuuccugcugaaguacaacgagaacggcaccaucaccgacgccguggacugcgcccuggacccucugagcgagaccaagugcacccugaagagcuucaccguggagaagggcaucuaccagaccagcaacuuccgggugcagcccaccgagagcaucgugcgguuccccaacaucaccaaccugugccccuucggcgagguguucaacgccacccgguucgccagcguguacgccuggaaccggaagcggaucagcaacugcguggccgacuacagcgugcuguacaacagcgccagcuucagcaccuucaagugcuacggcgugagccccaccaagcugaacgaccugugcuucaccaacguguacgccgacagcuucgugauccguggcgacgaggugcggcagaucgcacccggccagacaggcaagaucgccgacuacaacuacaagcugcccgacgacuucaccggcugcgugaucgccuggaacagcaacaaccucgacagcaaggugggcggcaacuacaacuaccuguuccggcuguuccggaagagcaaccugaagcccuucgagcgggacaucagcaccgagaucuaccaagccggcuccaccccuugcaacggcguggagggcuucaacugcuacuucccucugcagagcuacggcuuccagcccaccaacggcgugggcuaccagcccuaccgggugguggugcugagcuucgagcugcugcacgccccagccaccguguguggccccaagaagagcaccaaccuggugaagaacaagugcgugaacuucaacuucaacggccuuaccggcaccggcgugcugaccgagagcaacaagaaauuccugcccuuucagcaguucggccgggacaucgccgacaccaccgacgcugugcgggauccccagacccuggagauccuggacaucaccccuugcagcuucggcggcgugagcgugaucaccccaggcaccaacaccagcaaccagguggccgugcuguaccagggcgugaacugcaccgaggugcccguggccauccacgccgaccagcugacacccaccuggcgggucuacagcaccggcagcaacguguuccagacccgggccgguugccugaucggcgccgagcacgugaacaacagcuacgagugcgacauccccaucggcgccggcaucugugccagcuaccagacccagaccaauucaccccggagggcaaggagcguggccagccagagcgugaucgccuacaccaugagccugggcgccgagaacagcguggccuacagcaacaacagcaucgccauccccaccaacuucaccaucagcgugaccaccgagauucugcccgugagcaugaccaagaccagcguggacugcaccauguacaucugcggcgacagcaccgagugcagcaaccugcugcugcaguacggcagcuucugcacccagcugaaccgggcccugaccggcaucgccguggagcaggacaagaacacccaggagguguucgcccaggugaagcagaucuacaagaccccucccaucaaggacuucggcggcuucaacuucagccagauccugcccgaccccagcaagcccagcaagcggagcuucaucgaggaccugcuguucaacaaggugacccuagccgacgccggcuucaucaagcaguacggcgacugccucggcgacauagccgcccgggaccugaucugcgcccagaaguucaacggccugaccgugcugccuccccugcugaccgacgagaugaucgcccaguacaccagcgcccuguuagccggaaccaucaccagcggcuggacuuucggcgcuggagccgcucugcagauccccuucgccaugcagauggccuaccgguucaacggcaucggcgugacccagaacgugcuguacgagaaccagaagcugaucgccaaccaguucaacagcgccaucggcaagauccaggacagccugagcagcaccgcuagcgcccugggcaagcugcaggacguggugaaccagaacgcccaggcccugaacacccuggugaagcagcugagcagcaacuucggcgccaucagcagcgugcugaacgacauccugagccggcuggacccucccgaggccgaggugcagaucgaccggcugaucacuggccggcugcagagccugcagaccuacgugacccagcagcugauccgggccgccgagauucgggccagcgccaaccuggccgccaccaagaugagcgagugcgugcugggccagagcaagcggguggacuucugcggcaagggcuaccaccugaugagcuuuccccagagcgcaccccacggagugguguuccugcacgugaccuacgugcccgcccaggagaagaacuucaccaccgccccagccaucugccacgacggcaaggcccacuuuccccgggagggcguguucgugagcaacggcacccacugguucgugacccagcggaacuucuacgagccccagaucaucaccaccgacaacaccuucgugagcggcaacugcgacguggugaucggcaucgugaacaacaccguguacgauccccugcagcccgagcuggacagcuucaaggaggagcuggacaaguacuucaagaaucacaccagccccgacguggaccugggcgacaucagcggcaucaacgccagcguggugaacauccagaaggagaucgaucggcugaacgagguggccaagaaccugaacgagagccugaucgaccugcaggagcugggcaaguacgagcaguacaucaaguggcccugguacaucuggcugggcuucaucgccggccugaucgccaucgugaucgugaccaucaugcugugcugcaugaccagcugcugcagcugccugaagggcuguugcagcugcggcagcugcugcaaguucgacgaggacgacagcgagcccgugcugaagggcgugaagcugcacuacaccugaggacuaguuauaagacugacuagcccgaugggccucccaacgggcccuccuccccuccuugcaccgagauuaauagaucucaaaggcucuuuucagagccaccaaaaaaaaaaaaaaaaaaaaaaaaaaaaaaaaaaaaaaaaaaaaaaaaaaaaaaaaaaaaaaaaaaaaaaaaaaaaaaaaaaaaaaaaaaaaaaaaaaaaa

SEQ ID NO: 24445 - RNA, 4032 nt, Artificial Sequence
  SARS-CoV-2/Wuhan/WIV05/2019__EPI_ISL_402128 spike protein mRNA gc (1-1273)(K986P_V987P_K986P_V987P_H69del_V70del_Y144del_N501Y_A570 D_D614G_P681H_T716I_S982A_D1118H)
aggagaaagcuuaccauguucguguuccuggugcugcugccccuggugagcagccagugcgugaaccugaccacccggacccagcugccaccagccuacaccaacagcuucacccggggcgucuacuaccccgacaagguguuccggagcagcguccugcacagcacccaggaccuguuccugcccuucuucagcaacgugaccugguuccacgccaucagcggcaccaacggcaccaagcgguucgacaaccccgugcugcccuucaacgacggcguguacuucgccagcaccgagaagagcaacaucauccggggcuggaucuucggcaccacccuggacagcaagacccagagccugcugaucgugaauaacgccaccaacguggugaucaaggugugcgaguuccaguucugcaacgaccccuuccugggcguguaccacaagaacaacaagagcuggauggagagcgaguuccggguguacagcagcgccaacaacugcaccuucgaguacgugagccagcccuuccugauggaccuggagggcaagcagggcaacuucaagaaccugcgggaguucguguucaagaacaucgacggcuacuucaagaucuacagcaagcacaccccaaucaaccuggugcgggaucugccccagggcuucucagcccuggagccccugguggaccugcccaucggcaucaacaucacccgguuccagacccugcuggcccugcaccggagcuaccugaccccaggcgacagcagcagcggguggacagcaggcgcggcugcuuacuacgugggcuaccugcagccccggaccuuccugcugaaguacaacgagaacggcaccaucaccgacgccguggacugcgcccuggacccucugagcgagaccaagugcacccugaagagcuucaccguggagaagggcaucuaccagaccagcaacuuccgggugcagcccaccgagagcaucgugcgguuccccaacaucaccaaccugugccccuucggcgagguguucaacgccacccgguucgccagcguguacgccuggaaccggaagcggaucagcaacugcguggccgacuacagcgugcuguacaacagcgccagcuucagcaccuucaagugcuacggcgugagccccaccaagcugaacgaccugugcuucaccaacguguacgccgacagcuucgugauccguggcgacgaggugcggcagaucgcacccggccagacaggcaagaucgccgacuacaacuacaagcugcccgacgacuucaccggcugcgugaucgccuggaacagcaacaaccucgacagcaaggugggcggcaacuacaacuaccuguaccggcuguuccggaagagcaaccugaagcccuucgagcgggacaucagcaccgagaucuaccaagccggcuccaccccuugcaacggcguggagggcuucaacugcuacuucccucugcagagcuacggcuuccagcccaccuacggcgugggcuaccagcccuaccgggugguggugcugagcuucgagcugcugcacgccccagccaccguguguggccccaagaagagcaccaaccuggugaagaacaagugcgugaacuucaacuucaacggccuuaccggcaccggcgugcugaccgagagcaacaagaaauuccugcccuuucagcaguucggccgggacaucgacgacaccaccgacgcugugcgggauccccagacccuggagauccuggacaucaccccuugcagcuucggcggcgugagcgugaucaccccaggcaccaacaccagcaaccagguggccgugcuguaccagggcgugaacugcaccgaggugcccguggccauccacgccgaccagcugacacccaccuggcgggucuacagcaccggcagcaacguguuccagacccgggccgguugccugaucggcgccgagcacgugaacaacagcuacgagugcgacauccccaucggcgccggcaucugugccagcuaccagacccagaccaauucacaccggagggcaaggagcguggccagccagagcaucaucgccuacaccaugagccugggcgccgagaacagcguggccuacagcaacaacagcaucgccauccccaucaacuucaccaucagcgugaccaccgagauucugcccgugagcaugaccaagaccagcguggacugcaccauguacaucugcggcgacagcaccgagugcagcaaccugcugcugcaguacggcagcuucugcacccagcugaaccgggcccugaccggcaucgccguggagcaggacaagaacacccaggagguguucgcccaggugaagcagaucuacaagaccccucccaucaaggacuucggcggcuucaacuucagccagauccugcccgaccccagcaagcccagcaagcggagcuucaucgaggaccugcuguucaacaaggugacccuagccgacgccggcuucaucaagcaguacggcgacugccucggcgacauagccgcccgggaccugaucugcgcccagaaguucaacggccugaccgugcugccuccccugcugaccgacgagaugaucgcccaguacaccagcgcccuguuagccggaaccaucaccagcggcuggacuuucggcgcuggagccgcucugcagauccccuucgccaugcagauggccuaccgguucaacggcaucggcgugacccagaacgugcuguacgagaaccagaagcugaucgccaaccaguucaacagcgccaucggcaagauccaggacagccugagcagcaccgcuagcgcccugggcaagcugcaggacguggugaaccagaacgcccaggcccugaacacccuggugaagcagcugagcagcaacuucggcgccaucagcagcgugcugaacgacauccuggcccggcuggacccucccgaggccgaggugcagaucgaccggcugaucacuggccggcugcagagccugcagaccuacgugacccagcagcugauccgggccgccgagauucgggccagcgccaaccuggccgccaccaagaugagcgagugcgugcugggccagagcaagcggguggacuucugcggcaagggcuaccaccugaugagcuuuccccagagcgcaccccacggagugguguuccugcacgugaccuacgugcccgcccaggagaagaacuucaccaccgccccagccaucugccacgacggcaaggcccacuuuccccgggagggcguguucgugagcaacggcacccacugguucgugacccagcggaacuucuacgagccccagaucaucaccacccacaacaccuucgugagcggcaacugcgacguggugaucggcaucgugaacaacaccguguacgauccccugcagcccgagcuggacagcuucaaggaggagcuggacaaguacuucaagaaucacaccagccccgacguggaccugggcgacaucagcggcaucaacgccagcguggugaacauccagaaggagaucgaucggcugaacgagguggccaagaaccugaacgagagccugaucgaccugcaggagcugggcaaguacgagcaguacaucaaguggcccugguacaucuggcugggcuucaucgccggccugaucgccaucgugauggugaccaucaugcugugcugcaugaccagcugcugcagcugccugaagggcuguugcagcugcggcagcugcugcaaguucgacgaggacgacagcgagcccgugcugaagggcgugaagcugcacuacaccugaggacuaguuauaagacugacuagcccgaugggccucccaacgggcccuccuccccuccuugcaccgagauuaauagaucucaaaggcucuuuucagagccaccaaaaaaaaaaaaaaaaaaaaaaaaaaaaaaaaaaaaaaaaaaaaaaaaaaaaaaaaaaaaaaaaaaaaaaaaaaaaaaaaaaaaaaaaaaaaaaaaaaaaa

SEQ ID NO: 24446 - RNA, 4041 nt, Artificial Sequence
  SARS-CoV-2/Wuhan/WIV05/2019__EPI_ISL_402128 spike protein mRNA gc (1-1273)(K986P_V987P_K986P_V987P_K417N_E484K_N501Y_D614G)
aggagaaagcuuaccauguucguguuccuggugcugcugccccuggugagcagccagugcgugaaccugaccacccggacccagcugccaccagccuacaccaacagcuucacccggggcgucuacuaccccgacaagguguuccggagcagcguccugcacagcacccaggaccuguuccugcccuucuucagcaacgugaccugguuccacgccauccacgugagcggcaccaacggcaccaagcgguucgacaaccccgugcugcccuucaacgacggcguguacuucgccagcaccgagaagagcaacaucauccggggcuggaucuucggcaccacccuggacagcaagacccagagccugcugaucgugaauaacgccaccaacguggugaucaaggugugcgaguuccaguucugcaacgaccccuuccugggcguguacuaccacaagaacaacaagagcuggauggagagcgaguuccggguguacagcagcgccaacaacugcaccuucgaguacgugagccagcccuuccugauggaccuggagggcaagcagggcaacuucaagaaccugcgggaguucguguucaagaacaucgacggcuacuucaagaucuacagcaagcacaccccaaucaaccuggugcgggaucugccccagggcuucucagcccuggagccccugguggaccugcccaucggcaucaacaucacccgguuccagacccugcuggcccugcaccggagcuaccugaccccaggcgacagcagcagcggguggacagcaggcgcggcugcuuacuacgugggcuaccugcagccccggaccuuccugcugaaguacaacgagaacggcaccaucaccgacgccguggacugcgcccuggacccucugagcgagaccaagugcacccugaagagcuucaccguggagaagggcaucuaccagaccagcaacuuccgggugcagcccaccgagagcaucgugcgguuccccaacaucaccaaccugugccccuucggcgagguguucaacgccacccgguucgccagcguguacgccuggaaccggaagcggaucagcaacugcguggccgacuacagcgugcuguacaacagcgccagcuucagcaccuucaagugcuacggcgugagccccaccaagcugaacgaccugugcuucaccaacguguacgccgacagcuucgugauccguggcgacgaggugcggcagaucgcacccggccagacaggcaacaucgccgacuacaacuacaagcugcccgacgacuucaccggcugcgugaucgccuggaacagcaacaaccucgacagcaaggugggcggcaacuacaacuaccuguaccggcuguuccggaagagcaaccugaagcccuucgagcgggacaucagcaccgagaucuaccaagccggcuccaccccuugcaacggcgugaagggcuucaacugcuacuucccucugcagagcuacggcuuccagcccaccuacggcgugggcuaccagcccuaccgggugguggugcugagcuucgagcugcugcacgccccagccaccguguguggccccaagaagagcaccaaccuggugaagaacaagugcgugaacuucaacuucaacggccuuaccggcaccggcgugcugaccgagagcaacaagaaauuccugcccuuucagcaguucggccgggacaucgccgacaccaccgacgcugugcgggauccccagacccuggagauccuggacaucaccccuugcagcuucggcggcgugagcgugaucaccccaggcaccaacaccagcaaccagguggccgugcuguaccagggcgugaacugcaccgaggugcccguggccauccacgccgaccagcugacacccaccuggcgggucuacagcaccggcagcaacguguuccagacccgggccgguugccugaucggcgccgagcacgugaacaacagcuacgagugcgacauccccaucggcgccggcaucugugccagcuaccagacccagaccaauucaccccggagggcaaggagcguggccagccagagcaucaucgccuacaccaugagccugggcgccgagaacagcguggccuacagcaacaacagcaucgccauccccaccaacuucaccaucagcgugaccaccgagauucugcccgugagcaugaccaagaccagcguggacugcaccauguacaucugcggcgacagcaccgagugcagcaaccugcugcugcaguacggcagcuucugcacccagcugaaccgggcccugaccggcaucgccguggagcaggacaagaacacccaggagguguucgcccaggugaagcagaucuacaagaccccucccaucaaggacuucggcggcuucaacuucagccagauccugcccgaccccagcaagcccagcaagcggagcuucaucgaggaccugcuguucaacaaggugacccuagccgacgccggcuucaucaagcaguacggcgacugccucggcgacauagccgcccgggaccugaucugcgcccagaaguucaacggccugaccgugcugccuccccugcugaccgacgagaugaucgcccaguacaccagcgcccuguuagccggaaccaucaccagcggcuggacuuucggcgcuggagccgcucugcagauccccuucgccaugcagauggccuaccgguucaacggcaucggcgugacccagaacgugcuguacgagaaccagaagcugaucgccaaccaguucaacagcgccaucggcaagauccaggacagccugagcagcaccgcuagcgcccugggcaagcugcaggacguggugaaccagaacgcccaggcccugaacacccuggugaagcagcugagcagcaacuucggcgccaucagcagcgugcugaacgacauccugagccggcuggacccucccgaggccgaggugcagaucgaccggcugaucacuggccggcugcagagccugcagaccuacgugacccagcagcugauccgggccgccgagauucgggccagcgccaaccuggccgccaccaagaugagcgagugcgugcugggccagagcaagcggguggacuucugcggcaagggcuaccaccugaugagcuuuccccagagcgcaccccacggagugguguuccugcacgugaccuacgugcccgcccaggagaagaacuucaccaccgccccagccaucugccacgacggcaaggcccacuuuccccgggagggcguguucgugagcaacggcacccacugguucgugacccagcggaacuucuacgagccccagaucaucaccaccgacaacaccuucgugagcggcaacugcgacguggugaucggcaucgugaacaacaccguguacgauccccugcagcccgagcuggacagcuucaaggaggagcuggacaaguacuucaagaaucacaccagccccgacguggaccugggcgacaucagcggcaucaacgccagcguggugaacauccagaaggagaucgaucggcugaacgagguggccaagaaccugaacgagagccugaucgaccugcaggagcugggcaaguacgagcaguacaucaaguggcccugguacaucuggcugggcuucaucgccggccugaucgccaucgugauggugaccaucaugcugugcugcaugaccagcugcugcagcugccugaagggcuguugcagcugcggcagcugcugcaaguucgacgaggacgacagcgagcccgugcugaagggcgugaagcugcacuacaccugaggacuaguuauaagacugacuagcccgaugggccucccaacgggcccuccuccccuccuugcaccgagauuaauagaucucaaaggcucuuuucagagccaccaaaaaaaaaaaaaaaaaaaaaaaaaaaaaaaaaaaaaaaaaaaaaaaaaaaaaaaaaaaaaaaaaaaaaaaaaaaaaaaaaaaaaaaaaaaaaaaaaaaaa

SEQ ID NO: 24447 - RNA, 4032 nt, Artificial Sequence
  SARS-CoV-2/Wuhan/WIV05/2019__EPI_ISL_402128 spike protein mRNA gc (1-1273)(K986P_V987P_K986P_V987P_L18F_D80A_D215G_L242del_A243del_ L244del_R246I_K417N_E484K_N501Y_D614G_A701V)
aggagaaagcuuaccauguucguguuccuggugcugcugccccuggugagcagccagugcgugaacuucaccacccggacccagcugccaccagccuacaccaacagcuucacccggggcgucuacuaccccgacaagguguuccggagcagcguccugcacagcacccaggaccuguuccugcccuucuucagcaacgugaccugguuccacgccauccacgugagcggcaccaacggcaccaagcgguucgccaaccccgugcugcccuucaacgacggcguguacuucgccagcaccgagaagagcaacaucauccggggcuggaucuucggcaccacccuggacagcaagacccagagccugcugaucgugaauaacgccaccaacguggugaucaaggugugcgaguuccaguucugcaacgaccccuuccugggcguguacuaccacaagaacaacaagagcuggauggagagcgaguuccggguguacagcagcgccaacaacugcaccuucgaguacgugagccagcccuuccugauggaccuggagggcaagcagggcaacuucaagaaccugcgggaguucguguucaagaacaucgacggcuacuucaagaucuacagcaagcacaccccaaucaaccuggugcggggccugccccagggcuucucagcccuggagccccugguggaccugcccaucggcaucaacaucacccgguuccagacccugcacaucagcuaccugaccccaggcgacagcagcagcggguggacagcaggcgcggcugcuuacuacgugggcuaccugcagccccggaccuuccugcugaaguacaacgagaacggcaccaucaccgacgccguggacugcgcccuggacccucugagcgagaccaagugcacccugaagagcuucaccguggagaagggcaucuaccagaccagcaacuuccgggugcagcccaccgagagcaucgugcgguuccccaacaucaccaaccugugccccuucggcgagguguucaacgccacccgguucgccagcguguacgccuggaaccggaagcggaucagcaacugcguggccgacuacagcgugcuguacaacagcgccagcuucagcaccuucaagugcuacggcgugagccccaccaagcugaacgaccugugcuucaccaacguguacgccgacagcuucgugauccguggcgacgaggugcggcagaucgcacccggccagacaggcaacaucgccgacuacaacuacaagcugcccgacgacuucaccggcugcgugaucgccuggaacagcaacaaccucgacagcaaggugggcggcaacuacaacuaccuguaccggcuguuccggaagagcaaccugaagcccuucgagcgggacaucagcaccgagaucuaccaagccggcuccaccccuugcaacggcgugaagggcuucaacugcuacuucccucugcagagcuacggcuuccagcccaccuacggcgugggcuaccagcccuaccgggugguggugcugagcuucgagcugcugcacgccccagccaccguguguggccccaagaagagcaccaaccuggugaagaacaagugcgugaacuucaacuucaacggccuuaccggcaccggcgugcugaccgagagcaacaagaaauuccugcccuuucagcaguucggccgggacaucgccgacaccaccgacgcugugcgggauccccagacccuggagauccuggacaucaccccuugcagcuucggcggcgugagcgugaucaccccaggcaccaacaccagcaaccagguggccgugcuguaccagggcgugaacugcaccgaggugcccguggccauccacgccgaccagcugacacccaccuggcgggucuacagcaccggcagcaacguguuccagacccgggccgguugccugaucggcgccgagcacgugaacaacagcuacgagugcgacauccccaucggcgccggcaucugugccagcuaccagacccagaccaauucaccccggagggcaaggagcguggccagccagagcaucaucgccuacaccaugagccugggcguggagaacagcguggccuacagcaacaacagcaucgccauccccaccaacuucaccaucagcgugaccaccgagauucugcccgugagcaugaccaagaccagcguggacugcaccauguacaucugcggcgacagcaccgagugcagcaaccugcugcugcaguacggcagcuucugcacccagcugaaccgggcccugaccggcaucgccguggagcaggacaagaacacccaggagguguucgcccaggugaagcagaucuacaagaccccucccaucaaggacuucggcggcuucaacuucagccagauccugcccgaccccagcaagcccagcaagcggagcuucaucgaggaccugcuguucaacaaggugacccuagccgacgccggcuucaucaagcaguacggcgacugccucggcgacauagccgcccgggaccugaucugcgcccagaaguucaacggccugaccgugcugccuccccugcugaccgacgagaugaucgcccaguacaccagcgcccuguuagccggaaccaucaccagcggcuggacuuucggcgcuggagccgcucugcagauccccuucgccaugcagauggccuaccgguucaacggcaucggcgugacccagaacgugcuguacgagaaccagaagcugaucgccaaccaguucaacagcgccaucggcaagauccaggacagccugagcagcaccgcuagcgcccugggcaagcugcaggacguggugaaccagaacgcccaggcccugaacacccuggugaagcagcugagcagcaacuucggcgccaucagcagcgugcugaacgacauccugagccggcuggacccucccgaggccgaggugcagaucgaccggcugaucacuggccggcugcagagccugcagaccuacgugacccagcagcugauccgggccgccgagauucgggccagcgccaaccuggccgccaccaagaugagcgagugcgugcugggccagagcaagcggguggacuucugcggcaagggcuaccaccugaugagcuuuccccagagcgcaccccacggagugguguuccugcacgugaccuacgugcccgcccaggagaagaacuucaccaccgccccagccaucugccacgacggcaaggcccacuuuccccgggagggcguguucgugagcaacggcacccacugguucgugacccagcggaacuucuacgagccccagaucaucaccaccgacaacaccuucgugagcggcaacugcgacguggugaucggcaucgugaacaacaccguguacgauccccugcagcccgagcuggacagcuucaaggaggagcuggacaaguacuucaagaaucacaccagccccgacguggaccugggcgacaucagcggcaucaacgccagcguggugaacauccagaaggagaucgaucggcugaacgagguggccaagaaccugaacgagagccugaucgaccugcaggagcugggcaaguacgagcaguacaucaaguggcccugguacaucuggcugggcuucaucgccggccugaucgccaucgugauggugaccaucaugcugugcugcaugaccagcugcugcagcugccugaagggcuguugcagcugcggcagcugcugcaaguucgacgaggacgacagcgagcccgugcugaagggcgugaagcugcacuacaccugaggacuaguuauaagacugacuagcccgaugggccucccaacgggcccuccuccccuccuugcaccgagauuaauagaucucaaaggcucuuuucagagccaccaaaaaaaaaaaaaaaaaaaaaaaaaaaaaaaaaaaaaaaaaaaaaaaaaaaaaaaaaaaaaaaaaaaaaaaaaaaaaaaaaaaaaaaaaaaaaaaaaaaaa

SEQ ID NO: 24448 - RNA, 4041 nt, Artificial Sequence
  SARS-CoV-2/Wuhan/WIV05/2019__EPI_ISL_402128 spike protein mRNA gc (1-1273)(K986P_V987P_K986P_V987P_E484K_D614G)
aggagaaagcuuaccauguucguguuccuggugcugcugccccuggugagcagccagugcgugaaccugaccacccggacccagcugccaccagccuacaccaacagcuucacccggggcgucuacuaccccgacaagguguuccggagcagcguccugcacagcacccaggaccuguuccugcccuucuucagcaacgugaccugguuccacgccauccacgugagcggcaccaacggcaccaagcgguucgacaaccccgugcugcccuucaacgacggcguguacuucgccagcaccgagaagagcaacaucauccggggcuggaucuucggcaccacccuggacagcaagacccagagccugcugaucgugaauaacgccaccaacguggugaucaaggugugcgaguuccaguucugcaacgaccccuuccugggcguguacuaccacaagaacaacaagagcuggauggagagcgaguuccggguguacagcagcgccaacaacugcaccuucgaguacgugagccagcccuuccugauggaccuggagggcaagcagggcaacuucaagaaccugcgggaguucguguucaagaacaucgacggcuacuucaagaucuacagcaagcacaccccaaucaaccuggugcgggaucugccccagggcuucucagcccuggagccccugguggaccugcccaucggcaucaacaucacccgguuccagacccugcuggcccugcaccggagcuaccugaccccaggcgacagcagcagcggguggacagcaggcgcggcugcuuacuacgugggcuaccugcagccccggaccuuccugcugaaguacaacgagaacggcaccaucaccgacgccguggacugcgcccuggacccucugagcgagaccaagugcacccugaagagcuucaccguggagaagggcaucuaccagaccagcaacuuccgggugcagcccaccgagagcaucgugcgguuccccaacaucaccaaccugugccccuucggcgagguguucaacgccacccgguucgccagcguguacgccuggaaccggaagcggaucagcaacugcguggccgacuacagcgugcuguacaacagcgccagcuucagcaccuucaagugcuacggcgugagccccaccaagcugaacgaccugugcuucaccaacguguacgccgacagcuucgugauccguggcgacgaggugcggcagaucgcacccggccagacaggcaagaucgccgacuacaacuacaagcugcccgacgacuucaccggcugcgugaucgccuggaacagcaacaaccucgacagcaaggugggcggcaacuacaacuaccuguaccggcuguuccggaagagcaaccugaagcccuucgagcgggacaucagcaccgagaucuaccaagccggcuccaccccuugcaacggcgugaagggcuucaacugcuacuucccucugcagagcuacggcuuccagcccaccaacggcgugggcuaccagcccuaccgggugguggugcugagcuucgagcugcugcacgccccagccaccguguguggccccaagaagagcaccaaccuggugaagaacaagugcgugaacuucaacuucaacggccuuaccggcaccggcgugcugaccgagagcaacaagaaauuccugcccuuucagcaguucggccgggacaucgccgacaccaccgacgcugugcgggauccccagacccuggagauccuggacaucaccccuugcagcuucggcggcgugagcgugaucaccccaggcaccaacaccagcaaccagguggccgugcuguaccagggcgugaacugcaccgaggugcccguggccauccacgccgaccagcugacacccaccuggcgggucuacagcaccggcagcaacguguuccagacccgggccgguugccugaucggcgccgagcacgugaacaacagcuacgagugcgacauccccaucggcgccggcaucugugccagcuaccagacccagaccaauucaccccggagggcaaggagcguggccagccagagcaucaucgccuacaccaugagccugggcgccgagaacagcguggccuacagcaacaacagcaucgccauccccaccaacuucaccaucagcgugaccaccgagauucugcccgugagcaugaccaagaccagcguggacugcaccauguacaucugcggcgacagcaccgagugcagcaaccugcugcugcaguacggcagcuucugcacccagcugaaccgggcccugaccggcaucgccguggagcaggacaagaacacccaggagguguucgcccaggugaagcagaucuacaagaccccucccaucaaggacuucggcggcuucaacuucagccagauccugcccgaccccagcaagcccagcaagcggagcuucaucgaggaccugcuguucaacaaggugacccuagccgacgccggcuucaucaagcaguacggcgacugccucggcgacauagccgcccgggaccugaucugcgcccagaaguucaacggccugaccgugcugccuccccugcugaccgacgagaugaucgcccaguacaccagcgcccuguuagccggaaccaucaccagcggcuggacuuucggcgcuggagccgcucugcagauccccuucgccaugcagauggccuaccgguucaacggcaucggcgugacccagaacgugcuguacgagaaccagaagcugaucgccaaccaguucaacagcgccaucggcaagauccaggacagccugagcagcaccgcuagcgcccugggcaagcugcaggacguggugaaccagaacgcccaggcccugaacacccuggugaagcagcugagcagcaacuucggcgccaucagcagcgugcugaacgacauccugagccggcuggacccucccgaggccgaggugcagaucgaccggcugaucacuggccggcugcagagccugcagaccuacgugacccagcagcugauccgggccgccgagauucgggccagcgccaaccuggccgccaccaagaugagcgagugcgugcugggccagagcaagcggguggacuucugcggcaagggcuaccaccugaugagcuuuccccagagcgcaccccacggagugguguuccugcacgugaccuacgugcccgcccaggagaagaacuucaccaccgccccagccaucugccacgacggcaaggcccacuuuccccgggagggcguguucgugagcaacggcacccacugguucgugacccagcggaacuucuacgagccccagaucaucaccaccgacaacaccuucgugagcggcaacugcgacguggugaucggcaucgugaacaacaccguguacgauccccugcagcccgagcuggacagcuucaaggaggagcuggacaaguacuucaagaaucacaccagccccgacguggaccugggcgacaucagcggcaucaacgccagcguggugaacauccagaaggagaucgaucggcugaacgagguggccaagaaccugaacgagagccugaucgaccugcaggagcugggcaaguacgagcaguacaucaaguggcccugguacaucuggcugggcuucaucgccggccugaucgccaucgugauggugaccaucaugcugugcugcaugaccagcugcugcagcugccugaagggcuguugcagcugcggcagcugcugcaaguucgacgaggacgacagcgagcccgugcugaagggcgugaagcugcacuacaccugaggacuaguuauaagacugacuagcccgaugggccucccaacgggcccuccuccccuccuugcaccgagauuaauagaucucaaaggcucuuuucagagccaccaaaaaaaaaaaaaaaaaaaaaaaaaaaaaaaaaaaaaaaaaaaaaaaaaaaaaaaaaaaaaaaaaaaaaaaaaaaaaaaaaaaaaaaaaaaaaaaaaaaaa

SEQ ID NO: 24449 - RNA, 4041 nt, Artificial Sequence
  SARS-CoV-2/Wuhan/WIV05/2019__EPI_ISL_402128 spike protein mRNA gc (1-1273)(K986P_V987P_K986P_V987P_L18F_T20N_P26S_D138Y_R190S_K417T _E484K_N501Y_D614G_H655Y_T1027I)
aggagaaagcuuaccauguucguguuccuggugcugcugccccuggugagcagccagugcgugaacuucaccaaccggacccagcugccaagcgccuacaccaacagcuucacccggggcgucuacuaccccgacaagguguuccggagcagcguccugcacagcacccaggaccuguuccugcccuucuucagcaacgugaccugguuccacgccauccacgugagcggcaccaacggcaccaagcgguucgacaaccccgugcugcccuucaacgacggcguguacuucgccagcaccgagaagagcaacaucauccggggcuggaucuucggcaccacccuggacagcaagacccagagccugcugaucgugaauaacgccaccaacguggugaucaaggugugcgaguuccaguucugcaacuaccccuuccugggcguguacuaccacaagaacaacaagagcuggauggagagcgaguuccggguguacagcagcgccaacaacugcaccuucgaguacgugagccagcccuuccugauggaccuggagggcaagcagggcaacuucaagaaccugagcgaguucguguucaagaacaucgacggcuacuucaagaucuacagcaagcacaccccaaucaaccuggugcgggaucugccccagggcuucucagcccuggagccccugguggaccugcccaucggcaucaacaucacccgguuccagacccugcuggcccugcaccggagcuaccugaccccaggcgacagcagcagcggguggacagcaggcgcggcugcuuacuacgugggcuaccugcagccccggaccuuccugcugaaguacaacgagaacggcaccaucaccgacgccguggacugcgcccuggacccucugagcgagaccaagugcacccugaagagcuucaccguggagaagggcaucuaccagaccagcaacuuccgggugcagcccaccgagagcaucgugcgguuccccaacaucaccaaccugugccccuucggcgagguguucaacgccacccgguucgccagcguguacgccuggaaccggaagcggaucagcaacugcguggccgacuacagcgugcuguacaacagcgccagcuucagcaccuucaagugcuacggcgugagccccaccaagcugaacgaccugugcuucaccaacguguacgccgacagcuucgugauccguggcgacgaggugcggcagaucgcacccggccagacaggcaccaucgccgacuacaacuacaagcugcccgacgacuucaccggcugcgugaucgccuggaacagcaacaaccucgacagcaaggugggcggcaacuacaacuaccuguaccggcuguuccggaagagcaaccugaagcccuucgagcgggacaucagcaccgagaucuaccaagccggcuccaccccuugcaacggcgugaagggcuucaacugcuacuucccucugcagagcuacggcuuccagcccaccuacggcgugggcuaccagcccuaccgggugguggugcugagcuucgagcugcugcacgccccagccaccguguguggccccaagaagagcaccaaccuggugaagaacaagugcgugaacuucaacuucaacggccuuaccggcaccggcgugcugaccgagagcaacaagaaauuccugcccuuucagcaguucggccgggacaucgccgacaccaccgacgcugugcgggauccccagacccuggagauccuggacaucaccccuugcagcuucggcggcgugagcgugaucaccccaggcaccaacaccagcaaccagguggccgugcuguaccagggcgugaacugcaccgaggugcccguggccauccacgccgaccagcugacacccaccuggcgggucuacagcaccggcagcaacguguuccagacccgggccgguugccugaucggcgccgaguacgugaacaacagcuacgagugcgacauccccaucggcgccggcaucugugccagcuaccagacccagaccaauucaccccggagggcaaggagcguggccagccagagcaucaucgccuacaccaugagccugggcgccgagaacagcguggccuacagcaacaacagcaucgccauccccaccaacuucaccaucagcgugaccaccgagauucugcccgugagcaugaccaagaccagcguggacugcaccauguacaucugcggcgacagcaccgagugcagcaaccugcugcugcaguacggcagcuucugcacccagcugaaccgggcccugaccggcaucgccguggagcaggacaagaacacccaggagguguucgcccaggugaagcagaucuacaagaccccucccaucaaggacuucggcggcuucaacuucagccagauccugcccgaccccagcaagcccagcaagcggagcuucaucgaggaccugcuguucaacaaggugacccuagccgacgccggcuucaucaagcaguacggcgacugccucggcgacauagccgcccgggaccugaucugcgcccagaaguucaacggccugaccgugcugccuccccugcugaccgacgagaugaucgcccaguacaccagcgcccuguuagccggaaccaucaccagcggcuggacuuucggcgcuggagccgcucugcagauccccuucgccaugcagauggccuaccgguucaacggcaucggcgugacccagaacgugcuguacgagaaccagaagcugaucgccaaccaguucaacagcgccaucggcaagauccaggacagccugagcagcaccgcuagcgcccugggcaagcugcaggacguggugaaccagaacgcccaggcccugaacacccuggugaagcagcugagcagcaacuucggcgccaucagcagcgugcugaacgacauccugagccggcuggacccucccgaggccgaggugcagaucgaccggcugaucacuggccggcugcagagccugcagaccuacgugacccagcagcugauccgggccgccgagauucgggccagcgccaaccuggccgccaucaagaugagcgagugcgugcugggccagagcaagcggguggacuucugcggcaagggcuaccaccugaugagcuuuccccagagcgcaccccacggagugguguuccugcacgugaccuacgugcccgcccaggagaagaacuucaccaccgccccagccaucugccacgacggcaaggcccacuuuccccgggagggcguguucgugagcaacggcacccacugguucgugacccagcggaacuucuacgagccccagaucaucaccaccgacaacaccuucgugagcggcaacugcgacguggugaucggcaucgugaacaacaccguguacgauccccugcagcccgagcuggacagcuucaaggaggagcuggacaaguacuucaagaaucacaccagccccgacguggaccugggcgacaucagcggcaucaacgccagcguggugaacauccagaaggagaucgaucggcugaacgagguggccaagaaccugaacgagagccugaucgaccugcaggagcugggcaaguacgagcaguacaucaaguggcccugguacaucuggcugggcuucaucgccggccugaucgccaucgugauggugaccaucaugcugugcugcaugaccagcugcugcagcugccugaagggcuguugcagcugcggcagcugcugcaaguucgacgaggacgacagcgagcccgugcugaagggcgugaagcugcacuacaccugaggacuaguuauaagacugacuagcccgaugggccucccaacgggcccuccuccccuccuugcaccgagauuaauagaucucaaaggcucuuuucagagccaccaaaaaaaaaaaaaaaaaaaaaaaaaaaaaaaaaaaaaaaaaaaaaaaaaaaaaaaaaaaaaaaaaaaaaaaaaaaaaaaaaaaaaaaaaaaaaaaaaaaaa

SEQ ID NO: 24450 - RNA, 4041 nt, Artificial Sequence
  SARS-CoV-2/Wuhan/WIV05/2019__EPI_ISL_402128 spike protein mRNA gc (1-1273)(K986P_V987P_K986P_V987P_S13I_W152C_L452R_D614G)
aggagaaagcuuaccauguucguguuccuggugcugcugccccuggugagcauccagugcgugaaccugaccacccggacccagcugccaccagccuacaccaacagcuucacccggggcgucuacuaccccgacaagguguuccggagcagcguccugcacagcacccaggaccuguuccugcccuucuucagcaacgugaccugguuccacgccauccacgugagcggcaccaacggcaccaagcgguucgacaaccccgugcugcccuucaacgacggcguguacuucgccagcaccgagaagagcaacaucauccggggcuggaucuucggcaccacccuggacagcaagacccagagccugcugaucgugaauaacgccaccaacguggugaucaaggugugcgaguuccaguucugcaacgaccccuuccugggcguguacuaccacaagaacaacaagagcugcauggagagcgaguuccggguguacagcagcgccaacaacugcaccuucgaguacgugagccagcccuuccugauggaccuggagggcaagcagggcaacuucaagaaccugcgggaguucguguucaagaacaucgacggcuacuucaagaucuacagcaagcacaccccaaucaaccuggugcgggaucugccccagggcuucucagcccuggagccccugguggaccugcccaucggcaucaacaucacccgguuccagacccugcuggcccugcaccggagcuaccugaccccaggcgacagcagcagcggguggacagcaggcgcggcugcuuacuacgugggcuaccugcagccccggaccuuccugcugaaguacaacgagaacggcaccaucaccgacgccguggacugcgcccuggacccucugagcgagaccaagugcacccugaagagcuucaccguggagaagggcaucuaccagaccagcaacuuccgggugcagcccaccgagagcaucgugcgguuccccaacaucaccaaccugugccccuucggcgagguguucaacgccacccgguucgccagcguguacgccuggaaccggaagcggaucagcaacugcguggccgacuacagcgugcuguacaacagcgccagcuucagcaccuucaagugcuacggcgugagccccaccaagcugaacgaccugugcuucaccaacguguacgccgacagcuucgugauccguggcgacgaggugcggcagaucgcacccggccagacaggcaagaucgccgacuacaacuacaagcugcccgacgacuucaccggcugcgugaucgccuggaacagcaacaaccucgacagcaaggugggcggcaacuacaacuaccgcuaccggcuguuccggaagagcaaccugaagcccuucgagcgggacaucagcaccgagaucuaccaagccggcuccaccccuugcaacggcguggagggcuucaacugcuacuucccucugcagagcuacggcuuccagcccaccaacggcgugggcuaccagcccuaccgggugguggugcugagcuucgagcugcugcacgccccagccaccguguguggccccaagaagagcaccaaccuggugaagaacaagugcgugaacuucaacuucaacggccuuaccggcaccggcgugcugaccgagagcaacaagaaauuccugcccuuucagcaguucggccgggacaucgccgacaccaccgacgcugugcgggauccccagacccuggagauccuggacaucaccccuugcagcuucggcggcgugagcgugaucaccccaggcaccaacaccagcaaccagguggccgugcuguaccagggcgugaacugcaccgaggugcccguggccauccacgccgaccagcugacacccaccuggcgggucuacagcaccggcagcaacguguuccagacccgggccgguugccugaucggcgccgagcacgugaacaacagcuacgagugcgacauccccaucggcgccggcaucugugccagcuaccagacccagaccaauucaccccggagggcaaggagcguggccagccagagcaucaucgccuacaccaugagccugggcgccgagaacagcguggccuacagcaacaacagcaucgccauccccaccaacuucaccaucagcgugaccaccgagauucugcccgugagcaugaccaagaccagcguggacugcaccauguacaucugcggcgacagcaccgagugcagcaaccugcugcugcaguacggcagcuucugcacccagcugaaccgggcccugaccggcaucgccguggagcaggacaagaacacccaggagguguucgcccaggugaagcagaucuacaagaccccucccaucaaggacuucggcggcuucaacuucagccagauccugcccgaccccagcaagcccagcaagcggagcuucaucgaggaccugcuguucaacaaggugacccuagccgacgccggcuucaucaagcaguacggcgacugccucggcgacauagccgcccgggaccugaucugcgcccagaaguucaacggccugaccgugcugccuccccugcugaccgacgagaugaucgcccaguacaccagcgcccuguuagccggaaccaucaccagcggcuggacuuucggcgcuggagccgcucugcagauccccuucgccaugcagauggccuaccgguucaacggcaucggcgugacccagaacgugcuguacgagaaccagaagcugaucgccaaccaguucaacagcgccaucggcaagauccaggacagccugagcagcaccgcuagcgcccugggcaagcugcaggacguggugaaccagaacgcccaggcccugaacacccuggugaagcagcugagcagcaacuucggcgccaucagcagcgugcugaacgacauccugagccggcuggacccucccgaggccgaggugcagaucgaccggcugaucacuggccggcugcagagccugcagaccuacgugacccagcagcugauccgggccgccgagauucgggccagcgccaaccuggccgccaccaagaugagcgagugcgugcugggccagagcaagcggguggacuucugcggcaagggcuaccaccugaugagcuuuccccagagcgcaccccacggagugguguuccugcacgugaccuacgugcccgcccaggagaagaacuucaccaccgccccagccaucugccacgacggcaaggcccacuuuccccgggagggcguguucgugagcaacggcacccacugguucgugacccagcggaacuucuacgagccccagaucaucaccaccgacaacaccuucgugagcggcaacugcgacguggugaucggcaucgugaacaacaccguguacgauccccugcagcccgagcuggacagcuucaaggaggagcuggacaaguacuucaagaaucacaccagccccgacguggaccugggcgacaucagcggcaucaacgccagcguggugaacauccagaaggagaucgaucggcugaacgagguggccaagaaccugaacgagagccugaucgaccugcaggagcugggcaaguacgagcaguacaucaaguggcccugguacaucuggcugggcuucaucgccggccugaucgccaucgugauggugaccaucaugcugugcugcaugaccagcugcugcagcugccugaagggcuguugcagcugcggcagcugcugcaaguucgacgaggacgacagcgagcccgugcugaagggcgugaagcugcacuacaccugaggacuaguuauaagacugacuagcccgaugggccucccaacgggcccuccuccccuccuugcaccgagauuaauagaucucaaaggcucuuuucagagccaccaaaaaaaaaaaaaaaaaaaaaaaaaaaaaaaaaaaaaaaaaaaaaaaaaaaaaaaaaaaaaaaaaaaaaaaaaaaaaaaaaaaaaaaaaaaaaaaaaaaaa

SEQ ID NO: 24451 - RNA, 4041 nt, Artificial Sequence
  SARS-CoV-2/Wuhan/WIV05/2019__EPI_ISL_402128 spike protein mRNA gc (1-1273)(K986P_V987P)
aggagaaagcuuaccauguucguguuccuggugcugcugccccuggugagcagccagugcgugaaccugaccacccggacccagcugcccccugccuacaccaacagcuucacccggggcguguacuaccccgacaagguguuccggagcagcgugcugcacagcacccaggaccuguuccugcccuucuucagcaacgugaccugguuccacgccauccacgugagcggcaccaacggcaccaagcgguucgacaacccagugcugcccuucaacgacggcguguacuucgccagcaccgagaagucaaacaucauccggggcuggaucuucggcaccacccuggacagcaagacacagagccugcugaucgugaacaacgccaccaacguggugaucaaggugugcgaguuucaguucugcaacgaccccuuccugggcguguacuaccacaagaacaacaagagcuggauggagagcgaguuccgggucuacagcagcgcuaacaauugcaccuucgaguacgugagccagcccuuccugauggaccucgagggcaagcagggcaacuucaagaaccugcgggaguucguguucaagaacaucgauggcuacuucaagaucuacagcaagcacacccccaucaaccuggugcgggaccugccccagggauucagcgcccuggagccucugguggaccugcccaucggcaucaacaucaccagguuccagacccugcuggcccugcaccggagcuaccugacccccggcgacagcagcagcggcuggaccgccggcgccgccgcauacuacgugggcuaccugcagccacggaccuuccugcugaaguacaacgagaacggcaccaucaccgacgccguggacugcgcccuggacccccugagcgagaccaagugcacccuaaagagcuucaccguggagaagggcaucuaccagaccagcaacuuccgggugcagcccacugagagcaucgugcgguuccccaacauuaccaaccugugucccuucggcgagguguucaacgccacccgguucgccagcguguacgccuggaaccggaagcggaucagcaacugcguggccgacuacagcgugcuguacaacagcgccagcuucagcaccuucaagugcuacggcgugagcccuaccaagcugaacgaccugugcuucaccaacguguacgcugacagcuucgugauccggggcgacgaggugcggcagaucgcccccggccagaccggcaagaucgccgacuacaacuacaagcugcccgacgacuucaccggcugcgugaucgccuggaacagcaacaaccuggacagcaaggugggcggcaacuacaacuaccuguaccggcuguuccguaagagcaaccugaagccauucgagcgggacaucagcaccgagaucuaccaggccggcagcacccccugcaacgguguggagggcuuuaacugcuacuucccccugcagagcuacggcuuccagcccaccaacggcgugggcuaccagcccuaccgggugguggugcugagcuucgagcugcugcacgcccccgccaccgugugcggcccuaaaaagagcaccaaccuggugaagaacaagugcgugaacuucaauuucaacggccugaccggcaccggcgugcugaccgagagcaacaagaaguuccugcccuuccagcaguucggccgggauaucgccgacaccaccgacgcagugcgggacccccagacccuggagauccuggacaucaccccaugcagcuucggcggcgugagcgucaucacccccggcacaaacaccagcaaccagguggccgugcuguaccaggacgugaacugcaccgaggugcccguggccauccacgccgaccagcugacccccaccuggcggguguacagcaccggaagcaacguguuccagacccgggccggcugccugaucggcgccgagcacgugaacaacuccuacgagugcgacauccccaucggcgcuggcaucugcgccagcuaccagacccagaccaacagcccccggcgggcccggagcguggccagccagagcaucaucgccuacaccaugagcuuaggcgccgagaacagcguggccuacagcaacaacagcaucgcgaucccuaccaacuucaccaucagcgugaccaccgagauacugcccgugagcaugaccaagaccagcguggacuguaccauguacaucugcggcgacagcaccgagugcagcaaccugcugcugcaguacggcagcuucugcacccagcugaaccgggcccugaccggcaucgccguggagcaggacaagaacacccaagagguguucgcccaggugaagcagaucuacaagacucccccaaucaaggacuucggcggcuucaacuucagccagauccugcccgaccccagcaagcccagcaagcggagcuucaucgaggaccugcuguucaacaaggugacccuggccgacgccggcuucaucaagcaguacggcgauugccugggcgacaucgccgcucgggaccugaucugcgcccagaaguucaacgggcugaccgugcugcccccucugcugaccgacgagaugaucgcccaguacaccagcgcccugcuugccggcaccaucaccagcggcuggaccuucggcgccggcgcagcccugcagauccccuucgccaugcagauggccuaccgguucaacggcaucggcgugacccagaacgugcuguacgagaaccagaagcugaucgccaaccaguucaacagcgccaucggcaagauccaggacagccugagcagcaccgccagcgcccugggcaagcugcaggacguggugaaccagaacgcucaggcccugaacacccuggugaagcagcugagcagcaacuucggcgccaucagcucagugcugaaugacauccugagcaggcuggaucccccagaggccgaggugcagaucgaccggcugaucaccggccggcugcagagccugcagaccuacgugacccagcagcugauccgggccgccgagauccgggccagcgccaaccuggcagccaccaagaugagcgagugcgugcugggccagagcaagcggguggacuuuugcggcaagggcuaccaccugaugagcuucccccagagcgcuccccacggcgugguguuccuccacgugacauacguccccgcccaggagaagaacuucaccaccgcccccgccauuugccacgacggcaaggcccacuucccccgggagggcguguucgugagcaacggaacccacugguucgugacccagcggaacuucuacgagccucagaucaucaccaccgacaacaccuucgugagcggcaacugcgacguggugaucggcaucgugaacaacaccguguacgacccccugcagcccgagcuggacagcuucaaggaggagcuggacaaguacuucaagaaccacaccagcccagacguggaccugggcgacaucagcggcaucaacgccagcguggugaacauccagaaggagaucgaccggcugaacgagguggccaagaaccugaacgagagccugaucgaccugcaggagcugggcaaguacgagcaguacaucaaguggcccugguacaucuggcugggcuucaucgccggccugaucgccaucgugauggugaccaucaugcugugcugcaugaccagcugcuguagcugccugaagggcugcugcagcugcggcagcugcugcaaguucgacgaggacgacagcgagcccgugcugaagggcgugaagcugcacuacaccugaggacuaguuauaagacugacuagcccgaugggccucccaacgggcccuccuccccuccuugcaccgagauuaauagaucucaaaggcucuuuucagagccaccaaaaaaaaaaaaaaaaaaaaaaaaaaaaaaaaaaaaaaaaaaaaaaaaaaaaaaaaaaaaaaaaaaaaaaaaaaaaaaaaaaaaaaaaaaaaaaaaaaaaa

SEQ ID NO: 24452 - RNA, 4041 nt, Artificial Sequence
  SARS-CoV-2/Wuhan/WIV05/2019__EPI_ISL_402128 spike protein mRNA gc (1-1273)(K986P_V987P_ D614G)
aggagaaagcuuaccauguucguguuccuggugcugcugccccuggugagcagccagugcgugaaccugaccacccggacccagcugcccccugccuacaccaacagcuucacccggggcguguacuaccccgacaagguguuccggagcagcgugcugcacagcacccaggaccuguuccugcccuucuucagcaacgugaccugguuccacgccauccacgugagcggcaccaacggcaccaagcgguucgacaacccagugcugcccuucaacgacggcguguacuucgccagcaccgagaagucaaacaucauccggggcuggaucuucggcaccacccuggacagcaagacacagagccugcugaucgugaacaacgccaccaacguggugaucaaggugugcgaguuucaguucugcaacgaccccuuccugggcguguacuaccacaagaacaacaagagcuggauggagagcgaguuccgggucuacagcagcgcuaacaauugcaccuucgaguacgugagccagcccuuccugauggaccucgagggcaagcagggcaacuucaagaaccugcgggaguucguguucaagaacaucgauggcuacuucaagaucuacagcaagcacacccccaucaaccuggugcgggaccugccccagggauucagcgcccuggagccucugguggaccugcccaucggcaucaacaucaccagguuccagacccugcuggcccugcaccggagcuaccugacccccggcgacagcagcagcggcuggaccgccggcgccgccgcauacuacgugggcuaccugcagccacggaccuuccugcugaaguacaacgagaacggcaccaucaccgacgccguggacugcgcccuggacccccugagcgagaccaagugcacccuaaagagcuucaccguggagaagggcaucuaccagaccagcaacuuccgggugcagcccacugagagcaucgugcgguuccccaacauuaccaaccugugucccuucggcgagguguucaacgccacccgguucgccagcguguacgccuggaaccggaagcggaucagcaacugcguggccgacuacagcgugcuguacaacagcgccagcuucagcaccuucaagugcuacggcgugagcccuaccaagcugaacgaccugugcuucaccaacguguacgcugacagcuucgugauccggggcgacgaggugcggcagaucgcccccggccagaccggcaagaucgccgacuacaacuacaagcugcccgacgacuucaccggcugcgugaucgccuggaacagcaacaaccuggacagcaaggugggcggcaacuacaacuaccuguaccggcuguuccguaagagcaaccugaagccauucgagcgggacaucagcaccgagaucuaccaggccggcagcacccccugcaacgguguggagggcuuuaacugcuacuucccccugcagagcuacggcuuccagcccaccaacggcgugggcuaccagcccuaccgggugguggugcugagcuucgagcugcugcacgcccccgccaccgugugcggcccuaaaaagagcaccaaccuggugaagaacaagugcgugaacuucaauuucaacggccugaccggcaccggcgugcugaccgagagcaacaagaaguuccugcccuuccagcaguucggccgggauaucgccgacaccaccgacgcagugcgggacccccagacccuggagauccuggacaucaccccaugcagcuucggcggcgugagcgucaucacccccggcacaaacaccagcaaccagguggccgugcuguaccagggagugaacugcaccgaggugcccguggccauccacgccgaccagcugacccccaccuggcggguguacagcaccggcagcaacguguuccagacccgggccggcugccugaucggcgccgagcacgugaacaacuccuacgagugcgacauccccaucggcgcuggcaucugcgccagcuaccagacccagaccaacagcccccggcgggcccggagcguggccagccagagcaucaucgccuacaccaugagcuuaggcgccgagaacagcguggccuacagcaacaacagcaucgcgaucccuaccaacuucaccaucagcgugaccaccgagauacugcccgugagcaugaccaagaccagcguggacuguaccauguacaucugcggcgacagcaccgagugcagcaaccugcugcugcaguacggcagcuucugcacccagcugaaccgggcccugaccggcaucgccguggagcaggacaagaacacccaagagguguucgcccaggugaagcagaucuacaagacucccccaaucaaggacuucggcggcuucaacuucagccagauccugcccgaccccagcaagcccagcaagcggagcuucaucgaggaccugcuguucaacaaggugacccuggccgacgccggcuucaucaagcaguacggcgacugccugggggauaucgccgcucgggaccugaucugcgcccagaaguucaacggccugaccgugcugcccccucugcugaccgacgagaugaucgcccaguacaccagcgcccugcuugccggcaccaucaccagcggcuggaccuucggcgccggcgcagcccugcagauccccuucgccaugcagauggccuaccgguucaacggcaucggcgugacccagaacgugcuguacgagaaccagaagcugaucgccaaccaguucaacagcgccaucggcaagauccaggacagccugagcagcaccgccagcgcccugggcaagcugcaggacguggugaaccagaacgcucaggcccugaacacccuggugaagcagcugagcagcaacuucggcgccaucagcucagugcugaaugacauccugagcaggcuggaucccccagaggccgaggugcagaucgaccggcugaucaccggccggcugcagagccugcagaccuacgugacccagcagcugauccgggccgccgagauccgggccagcgccaaccuggcagccaccaagaugagcgagugcgugcugggccagagcaagcggguggacuuuugcggcaagggcuaccaccugaugagcuucccccagagcgcuccccacggcgugguguuccuccacgugacauacguccccgcccaggagaagaacuucaccaccgcccccgccauuugccacgacggcaaggcccacuucccccgggagggaguguucgugagcaacggcacccacugguucgugacccagcggaacuucuacgagccucagaucaucaccaccgacaacaccuucgugagcggcaacugcgacguggugaucggcaucgugaacaacaccguguacgacccccugcagcccgagcuggacagcuucaaggaggagcuggacaaguacuucaagaaccacaccagcccagacguggaccugggcgacaucagcggcaucaacgccagcguggugaacauccagaaggagaucgaccggcugaacgagguggccaagaaccugaacgagagccugaucgaccugcaggagcugggcaaguacgagcaguacaucaaguggcccugguacaucuggcugggcuucaucgccggccugaucgccaucgugauggugaccaucaugcugugcugcaugaccagcugcuguagcugccugaagggcugcugcagcugcggcagcugcugcaaguucgacgaggacgacagcgagcccgugcugaagggcgugaagcugcacuacaccugaggacuaguuauaagacugacuagcccgaugggccucccaacgggcccuccuccccuccuugcaccgagauuaauagaucucaaaggcucuuuucagagccaccaaaaaaaaaaaaaaaaaaaaaaaaaaaaaaaaaaaaaaaaaaaaaaaaaaaaaaaaaaaaaaaaaaaaaaaaaaaaaaaaaaaaaaaaaaaaaaaaaaaaa

SEQ ID NO: 24453 - RNA, 4041 nt, Artificial Sequence
  SARS-CoV-2/Wuhan/WIV05/2019__EPI_ISL_402128 spike protein mRNA gc (1-1273)(K986P_V987P_A222V_D614G)
aggagaaagcuuaccauguucguguuccuggugcugcugccccuggugagcagccagugcgugaaccugaccacccggacccagcugcccccugccuacaccaacagcuucacccggggcguguacuaccccgacaagguguuccggagcagcgugcugcacagcacccaggaccuguuccugcccuucuucagcaacgugaccugguuccacgccauccacgugagcggcaccaacggcaccaagcgguucgacaacccagugcugcccuucaacgacggcguguacuucgccagcaccgagaagucaaacaucauccggggcuggaucuucggcaccacccuggacagcaagacacagagccugcugaucgugaacaacgccaccaacguggugaucaaggugugcgaguuucaguucugcaacgaccccuuccugggcguguacuaccacaagaacaacaagagcuggauggagagcgaguuccgggucuacagcagcgcuaacaauugcaccuucgaguacgugagccagcccuuccugauggaccucgagggcaagcagggcaacuucaagaaccugcgggaguucguguucaagaacaucgauggcuacuucaagaucuacagcaagcacacccccaucaaccuggugcgggaccugccccagggauucagcgugcuggagccucugguggaccugcccaucggcaucaacaucaccagguuccagacccugcuggcccugcaccggagcuaccugacccccggcgacagcagcagcggcuggaccgccggcgccgccgccuacuacgugggcuaccugcagccacggaccuuccugcugaaguacaacgagaacggcaccaucaccgacgcaguggacugcgcccuggacccccugagcgagaccaagugcacccuaaagagcuucaccguggagaagggcaucuaccagaccagcaacuuccgggugcagcccacugagagcaucgugcgguuccccaacauuaccaaccugugucccuucggcgagguguucaacgccacccgguucgccagcguguacgccuggaaccggaagcggaucagcaacugcguggccgacuacagcgugcuguacaacagcgccagcuucagcaccuucaagugcuacggcgugagcccuaccaagcugaacgaccugugcuucaccaacguguacgccgacagcuucgugauccggggcgacgaggugcggcagaucgcucccggccagaccggcaagaucgccgacuacaacuacaagcugcccgacgacuucaccggcugcgugaucgccuggaacagcaacaaccuggacagcaaggugggcggcaacuacaacuaccuguaccggcuguuccguaagagcaaccugaagccauucgagcgggacaucagcaccgagaucuaccaggccggcagcacccccugcaacgguguggagggcuuuaacugcuacuucccccugcagagcuacggcuuccagcccaccaacggcgugggcuaccagcccuaccgggugguggugcugagcuucgagcugcugcacgcccccgccaccgugugcggcccuaaaaagagcaccaaccuggugaagaacaagugcgugaacuucaauuucaacggccugaccggcaccggcgugcugaccgagagcaacaagaaguuccugcccuuccagcaguucggccgggauaucgccgacaccaccgacgccgugcgggacccccagacccuggagauccuggacaucaccccaugcagcuucggcggcgucagcgugaucacccccggcacaaacaccagcaaccagguggcagugcuguaccagggagugaacugcaccgaggugcccguggccauccacgccgaccagcugacccccaccuggcggguguacagcaccggcagcaacguguuccagacccgggccggcugccugaucggcgccgagcacgugaacaacuccuacgagugcgacauccccaucggcgccggcaucugcgcuagcuaccagacccagaccaacagcccccggcgggcccggagcguggccagccagagcaucaucgccuacaccaugagcuuaggcgccgagaacagcguggccuacagcaacaacagcaucgccaucccuaccaacuucaccaucagcgugaccaccgagauacugcccgugagcaugaccaagaccagcguggacuguaccauguacaucugcggcgacagcaccgagugcagcaaccugcugcugcaguacggcagcuucugcacccagcugaaccgggcgcugaccggcaucgccguggagcaggacaagaacacccaagagguguucgcccaggugaagcagaucuacaagacucccccaaucaaggacuucggcggcuucaacuucagccagauccugcccgaccccagcaagcccagcaagcggagcuucaucgaggaccugcuguucaacaaggugacccuggccgacgccggcuucaucaagcaguacggcgacugccugggggauaucgccgcccgggaccugaucugcgcucagaaguucaacggccugaccgugcugcccccucugcugaccgacgagaugaucgcccaguacaccagcgcccugcuugccggcaccaucaccagcggcuggaccuucggcgccggcgccgcacugcagauccccuucgccaugcagauggccuaccgguucaacggcaucggcgugacccagaacgugcuguacgagaaccagaagcugaucgccaaccaguucaacagcgccaucggcaagauccaggacagccugagcagcaccgccagcgcccugggcaagcugcaggacguggugaaccagaacgcccaggcucugaacacccuggugaagcagcugagcagcaacuucggcgccaucagcucagugcugaaugacauccugagcaggcuggaucccccagaggccgaggugcagaucgaccggcugaucaccggccggcugcagagccugcagaccuacgugacccagcagcugauccgggccgccgagauccgggccagcgccaaccuggccgcaaccaagaugagcgagugcgugcugggccagagcaagcggguggacuuuugcggcaagggcuaccaccugaugagcuucccccagagcgcuccccacggcgugguguuccuccacgucacauacgugcccgcccaggagaagaacuucaccaccgcccccgccauuugccacgacggcaaggcccacuucccccgggagggaguguucgugagcaacggcacccacugguucgugacccagcggaacuucuacgagccucagaucaucaccaccgacaacaccuucgugagcggcaacugcgacguggugaucggcaucgugaacaacaccguguacgacccccugcagcccgagcuggacagcuucaaggaggagcuggacaaguacuucaagaaccacaccagcccagacguggaccugggcgacaucagcggcaucaacgccagcguggugaacauccagaaggagaucgaccggcugaacgagguggccaagaaccugaacgagagccugaucgaccugcaggagcugggcaaguacgagcaguacaucaaguggcccugguacaucuggcugggcuucaucgccggccugaucgccaucgugauggugaccaucaugcugugcugcaugaccagcugcuguagcugccugaagggcugcugcagcugcggcagcugcugcaaguucgacgaggacgacagcgagcccgugcugaagggcgugaagcugcacuacaccugaggacuaguuauaagacugacuagcccgaugggccucccaacgggcccuccuccccuccuugcaccgagauuaauagaucucaaaggcucuuuucagagccaccaaaaaaaaaaaaaaaaaaaaaaaaaaaaaaaaaaaaaaaaaaaaaaaaaaaaaaaaaaaaaaaaaaaaaaaaaaaaaaaaaaaaaaaaaaaaaaaaaaaaa

SEQ ID NO: 24454 - RNA, 4041 nt, Artificial Sequence
  SARS-CoV-2/Wuhan/WIV05/2019__EPI_ISL_402128 spike protein mRNA gc (1-1273)(K986P_V987P_N439K_D614G)
aggagaaagcuuaccauguucguguuccuggugcugcugccccuggugagcagccagugcgugaaccugaccacccggacccagcugcccccugccuacaccaacagcuucacccggggcguguacuaccccgacaagguguuccggagcagcgugcugcacagcacccaggaccuguuccugcccuucuucagcaacgugaccugguuccacgccauccacgugagcggcaccaacggcaccaagcgguucgacaacccagugcugcccuucaacgacggcguguacuucgccagcaccgagaagucaaacaucauccggggcuggaucuucggcaccacccuggacagcaagacacagagccugcugaucgugaacaacgccaccaacguggugaucaaggugugcgaguuucaguucugcaacgaccccuuccugggcguguacuaccacaagaacaacaagagcuggauggagagcgaguuccgggucuacagcagcgcuaacaauugcaccuucgaguacgugagccagcccuuccugauggaccucgagggcaagcagggcaacuucaagaaccugcgggaguucguguucaagaacaucgauggcuacuucaagaucuacagcaagcacacccccaucaaccuggugcgggaccugccccagggauucagcgcccuggagccucugguggaccugcccaucggcaucaacaucaccagguuccagacccugcuggcccugcaccggagcuaccugacccccggcgacagcagcagcggcuggaccgccggcgccgccgcauacuacgugggcuaccugcagccacggaccuuccugcugaaguacaacgagaacggcaccaucaccgacgccguggacugcgcccuggacccccugagcgagaccaagugcacccuaaagagcuucaccguggagaagggcaucuaccagaccagcaacuuccgggugcagcccacugagagcaucgugcgguuccccaacauuaccaaccugugucccuucggcgagguguucaacgccacccgguucgccagcguguacgccuggaaccggaagcggaucagcaacugcguggccgacuacagcgugcuguacaacagcgccagcuucagcaccuucaagugcuacggcgugagcccuaccaagcugaacgaccugugcuucaccaacguguacgcugacagcuucgugauccggggcgacgaggugcggcagaucgcccccggccagaccggcaagaucgccgacuacaacuacaagcugcccgacgacuucaccggcugcgugaucgccuggaacagcaagaaccuggacagcaaggugggcggcaacuacaacuaccuguaccggcuguuccguaagagcaaccugaagccauucgagcgggacaucagcaccgagaucuaccaggccggcagcacccccugcaacgguguggagggcuuuaacugcuacuucccccugcagagcuacggcuuccagcccaccaacggcgugggcuaccagcccuaccgggugguggugcugagcuucgagcugcugcacgcccccgccaccgugugcggcccuaaaaagagcaccaaccuggugaagaacaagugcgugaacuucaacuucaauggccugaccggcaccggcgugcugaccgagagcaacaagaaguuccugcccuuccagcaguucggccgggauaucgccgacaccaccgacgcagugcgggacccccagacccuggagauccuggacaucaccccaugcagcuucggcggcgugagcgucaucacccccggcacaaacaccagcaaccagguggccgugcuguaccagggagugaacugcaccgaggugcccguggccauccacgccgaccagcugacccccaccuggcggguguacagcaccggcagcaacguguuccagacccgggccggcugccugaucggcgccgagcacgugaacaacuccuacgagugcgacauccccaucggcgcuggcaucugcgccagcuaccagacccagaccaacagcccccggcgggcccggagcguggccagccagagcaucaucgccuacaccaugagcuuaggcgccgagaacagcguggccuacagcaacaacagcaucgcgaucccuaccaacuucaccaucagcgugaccaccgagauacugcccgugagcaugaccaagaccagcguggacuguaccauguacaucugcggcgacagcaccgagugcagcaaccugcugcugcaguacggcagcuucugcacccagcugaaccgggcccugaccggcaucgccguggagcaggacaagaacacccaagagguguucgcccaggugaagcagaucuacaagacucccccaaucaaggacuucggcggcuucaacuucagccagauccugcccgaccccagcaagcccagcaagcggagcuucaucgaggaccugcuguucaacaaggugacccuggccgacgccggcuucaucaagcaguacggcgacugccugggggauaucgccgcucgggaccugaucugcgcccagaaguucaacggccugaccgugcugcccccucugcugaccgacgagaugaucgcccaguacaccagcgcccugcuugccggcaccaucaccagcggcuggaccuucggcgccggcgcagcccugcagauccccuucgccaugcagauggccuaccgguucaacggcaucggcgugacccagaacgugcuguacgagaaccagaagcugaucgccaaccaguucaacagcgccaucggcaagauccaggacagccugagcagcaccgccagcgcccugggcaagcugcaggacguggugaaccagaacgcucaggcccugaacacccuggugaagcagcugagcagcaacuucggcgccaucagcucagugcugaacgacauccugagcaggcuggaucccccagaggccgaggugcagaucgaccggcugaucaccggccggcugcagagccugcagaccuacgugacccagcagcugauccgggccgccgagauccgggccagcgccaaucuggcagccaccaagaugagcgagugcgugcugggccagagcaagcggguggacuuuugcggcaagggcuaccaccugaugagcuucccccagagcgcuccccacggcgugguguuccuccacgugacauacguccccgcccaggagaagaacuucaccaccgcccccgccauuugccacgacggcaaggcccacuucccccgggagggaguguucgugagcaacggcacccacugguucgugacccagcggaacuucuacgagccucagaucaucaccaccgacaacaccuucgugagcggcaacugcgacguggugaucggcaucgugaacaacaccguguacgacccccugcagcccgagcuggacagcuucaaggaggagcuggacaaguacuucaagaaccacaccagcccagacguggaccugggcgacaucagcggcaucaacgccagcguggugaacauccagaaggagaucgaccggcugaacgagguggccaagaaccugaacgagagccugaucgaccugcaggagcugggcaaguacgagcaguacaucaaguggcccugguacaucuggcugggcuucaucgccggccugaucgccaucgugauggugaccaucaugcugugcugcaugaccagcugcuguagcugccugaagggcugcugcagcugcggcagcugcugcaaguucgacgaggacgacagcgagcccgugcugaagggcgugaagcugcacuacaccugaggacuaguuauaagacugacuagcccgaugggccucccaacgggcccuccuccccuccuugcaccgagauuaauagaucucaaaggcucuuuucagagccaccaaaaaaaaaaaaaaaaaaaaaaaaaaaaaaaaaaaaaaaaaaaaaaaaaaaaaaaaaaaaaaaaaaaaaaaaaaaaaaaaaaaaaaaaaaaaaaaaaaaaa

SEQ ID NO: 24455 - RNA, 4041 nt, Artificial Sequence
  SARS-CoV-2/Wuhan/WIV05/2019__EPI_ISL_402128 spike protein mRNA gc (1-1273)(K986P_V987P_S477N_D614G)
aggagaaagcuuaccauguucguguuccuggugcugcugccccuggugagcagccagugcgugaaccugaccacccggacccagcugcccccugccuacaccaacagcuucacccggggcguguacuaccccgacaagguguuccggagcagcgugcugcacagcacccaggaccuguuccugcccuucuucagcaacgugaccugguuccacgccauccacgugagcggcaccaacggcaccaagcgguucgacaacccagugcugcccuucaacgacggcguguacuucgccagcaccgagaagucaaacaucauccggggcuggaucuucggcaccacccuggacagcaagacacagagccugcugaucgugaacaacgccaccaacguggugaucaaggugugcgaguuucaguucugcaacgaccccuuccugggcguguacuaccacaagaacaacaagagcuggauggagagcgaguuccgggucuacagcagcgcuaacaauugcaccuucgaguacgugagccagcccuuccugauggaccucgagggcaagcagggcaacuucaagaaccugcgggaguucguguucaagaacaucgauggcuacuucaagaucuacagcaagcacacccccaucaaccuggugcgggaccugccccagggauucagcgcccuggagccucugguggaccugcccaucggcaucaacaucaccagguuccagacccugcuggcccugcaccggagcuaccugacccccggcgacagcagcagcggcuggaccgccggcgccgccgcauacuacgugggcuaccugcagccacggaccuuccugcugaaguacaacgagaacggcaccaucaccgacgccguggacugcgcccuggacccccugagcgagaccaagugcacccuaaagagcuucaccguggagaagggcaucuaccagaccagcaacuuccgggugcagcccacugagagcaucgugcgguuccccaacauuaccaaccugugucccuucggcgagguguucaacgccacccgguucgccagcguguacgccuggaaccggaagcggaucagcaacugcguggccgacuacagcgugcuguacaacagcgccagcuucagcaccuucaagugcuacggcgugagcccuaccaagcugaacgaccugugcuucaccaacguguacgcugacagcuucgugauccggggcgacgaggugcggcagaucgcccccggccagaccggcaagaucgccgacuacaacuacaagcugcccgacgacuucaccggcugcgugaucgccuggaacagcaacaaccuggacagcaaggugggcggcaacuacaacuaccuguaccggcuguuccguaagagcaaccugaagccauucgagcgggacaucagcaccgagaucuaccaggccggcaacacccccugcaacgguguggagggcuuuaacugcuacuucccccugcagagcuacggcuuccagcccaccaacggcgugggcuaccagcccuaccgggugguggugcugagcuucgagcugcugcacgcccccgccaccgugugcggcccuaaaaagagcaccaaccuggugaagaacaagugcgugaauuucaacuucaacggccugaccggcaccggcgugcugaccgagagcaacaagaaguuccugcccuuccagcaguucggccgggauaucgccgacaccaccgacgcagugcgggacccccagacccuggagauccuggacaucaccccaugcagcuucggcggcgugagcgucaucacccccggcacaaacaccagcaaccagguggccgugcuguaccagggagugaacugcaccgaggugcccguggccauccacgccgaccagcugacccccaccuggcggguguacagcaccggcagcaacguguuccagacccgggccggcugccugaucggcgccgagcacgugaacaacagcuacgagugcgacauccccaucggcgcuggcaucugcgccuccuaccagacccagaccaacagcccccggcgggcccggagcguggccagccagagcaucaucgccuacaccaugagcuuaggcgccgagaacagcguggccuacagcaacaacagcaucgcgaucccuaccaacuucaccaucagcgugaccaccgagauacugcccgugagcaugaccaagaccagcguggacuguaccauguacaucugcggcgacagcaccgagugcagcaaccugcugcugcaguacggcagcuucugcacccagcugaaccgggcccugaccggcaucgccguggagcaggacaagaacacccaagagguguucgcccaggugaagcagaucuacaagacucccccaaucaaggacuucggcggcuucaacuucagccagauccugcccgaccccagcaagcccagcaagcggagcuucaucgaggaccugcuguucaacaaggugacccuggccgacgccggcuucaucaagcaguacggcgacugccugggggauaucgccgcucgggaccugaucugcgcccagaaguucaacggccugaccgugcugcccccucugcugaccgacgagaugaucgcccaguacaccagcgcccugcuugccggcaccaucaccagcggcuggaccuucggcgccggcgcagcccugcagauccccuucgccaugcagauggccuaccgguucaacggcaucggcgugacccagaacgugcuguacgagaaccagaagcugaucgccaaccaguucaacagcgccaucggcaagauccaggacagccugagcagcaccgccagcgcccugggcaagcugcaggacguggugaaccagaacgcucaggcccugaacacccuggugaagcagcugagcagcaauuucggcgccaucagcagcgugcugaacgacauccugucaaggcuggaucccccagaggccgaggugcagaucgaccggcugaucaccggccggcugcagagccugcagaccuacgugacccagcagcugauccgggccgccgagauccgggccagcgccaaccuggcagccaccaagaugagcgagugcgugcugggccagagcaagcggguggacuuuugcggcaagggcuaccaccugaugagcuucccccagagcgcuccccacggcgugguguuccuccacgugacauacguccccgcccaggagaagaacuucaccaccgcccccgccauuugccacgacggcaaggcccacuucccccgggagggaguguucgugagcaacggcacccacugguucgugacccagcggaacuucuacgagccucagaucaucaccaccgacaacaccuucgugagcggcaacugcgacguggugaucggcaucgugaacaacaccguguacgacccccugcagcccgagcuggacagcuucaaggaggagcuggacaaguacuucaagaaccacaccagcccagacguggaccugggcgacaucagcggcaucaacgccagcguggugaacauccagaaggagaucgaccggcugaacgagguggccaagaaccugaacgagagccugaucgaccugcaggagcugggcaaguacgagcaguacaucaaguggcccugguacaucuggcugggcuucaucgccggccugaucgccaucgugauggugaccaucaugcugugcugcaugaccagcugcuguagcugccugaagggcugcugcagcugcggcagcugcugcaaguucgacgaggacgacagcgagcccgugcugaagggcgugaagcugcacuacaccugaggacuaguuauaagacugacuagcccgaugggccucccaacgggcccuccuccccuccuugcaccgagauuaauagaucucaaaggcucuuuucagagccaccaaaaaaaaaaaaaaaaaaaaaaaaaaaaaaaaaaaaaaaaaaaaaaaaaaaaaaaaaaaaaaaaaaaaaaaaaaaaaaaaaaaaaaaaaaaaaaaaaaaaa

SEQ ID NO: 24456 - RNA, 4041 nt, Artificial Sequence
  SARS-CoV-2/Wuhan/WIV05/2019__EPI_ISL_402128 spike protein mRNA gc (1-1273)(K986P_V987P_N501Y_D614G)
aggagaaagcuuaccauguucguguuccuggugcugcugccccuggugagcagccagugcgugaaccugaccacccggacccagcugcccccugccuacaccaacagcuucacccggggcguguacuaccccgacaagguguuccggagcagcgugcugcacagcacccaggaccuguuccugcccuucuucagcaacgugaccugguuccacgccauccacgugagcggcaccaacggcaccaagcgguucgacaacccagugcugcccuucaacgacggcguguacuucgccagcaccgagaagucaaacaucauccggggcuggaucuucggcaccacccuggacagcaagacacagagccugcugaucgugaacaacgccaccaacguggugaucaaggugugcgaguuucaguucugcaacgaccccuuccugggcguguacuaccacaagaacaacaagagcuggauggagagcgaguuccgggucuacagcagcgcuaacaauugcaccuucgaguacgugagccagcccuuccugauggaccucgagggcaagcagggcaacuucaagaaccugcgggaguucguguucaagaacaucgauggcuacuucaagaucuacagcaagcacacccccaucaaccuggugcgggaccugccccagggauucagcgcccuggagccucugguggaccugcccaucggcaucaacaucaccagguuccagacccugcuggcccugcaccggagcuaccugacccccggcgacagcagcagcggcuggaccgccggcgccgccgcauacuacgugggcuaccugcagccacggaccuuccugcugaaguacaacgagaacggcaccaucaccgacgccguggacugcgcccuggacccccugagcgagaccaagugcacccuaaagagcuucaccguggagaagggcaucuaccagaccagcaacuuccgggugcagcccacugagagcaucgugcgguuccccaacauuaccaaccugugucccuucggcgagguguucaacgccacccgguucgccagcguguacgccuggaaccggaagcggaucagcaacugcguggccgacuacagcgugcuguacaacagcgccagcuucagcaccuucaagugcuacggcgugagcccuaccaagcugaacgaccugugcuucaccaacguguacgcugacagcuucgugauccggggcgacgaggugcggcagaucgcccccggccagaccggcaagaucgccgacuacaacuacaagcugcccgacgacuucaccggcugcgugaucgccuggaacagcaacaaccuggacagcaaggugggcggcaacuacaacuaccuguaccggcuguuccguaagagcaaccugaagccauucgagcgggacaucagcaccgagaucuaccaggccggcagcacccccugcaacgguguggagggcuuuaacugcuacuucccccugcagagcuacggcuuccagcccaccuacggcgugggcuaccagcccuaccgggugguggugcugagcuucgagcugcugcacgcccccgccaccgugugcggcccuaaaaagagcaccaaccuggugaagaacaagugcgugaacuucaacuucaauggccugaccggcaccggcgugcugaccgagagcaacaagaaguuccugcccuuccagcaguucggccgggauaucgccgacaccaccgacgcagugcgggacccccagacccuggagauccuggacaucaccccaugcagcuucggcggcgugagcgucaucacccccggcacaaacaccagcaaccagguggccgugcuguaccagggagugaacugcaccgaggugcccguggccauccacgccgaccagcugacccccaccuggcggguguacagcaccggcagcaacguguuccagacccgggccggcugccugaucggcgccgagcacgugaacaacuccuacgagugcgacauccccaucggcgcuggcaucugcgccagcuaccagacccagaccaacagcccccggcgggcccggagcguggccagccagagcaucaucgccuacaccaugagcuuaggcgccgagaacagcguggccuacagcaacaacagcaucgcgaucccuaccaacuucaccaucagcgugaccaccgagauacugcccgugagcaugaccaagaccagcguggacuguaccauguacaucugcggcgacagcaccgagugcagcaaccugcugcugcaguacggcagcuucugcacccagcugaaccgggcccugaccggcaucgccguggagcaggacaagaacacccaagagguguucgcccaggugaagcagaucuacaagacucccccaaucaaggacuucggcggcuucaacuucagccagauccugcccgaccccagcaagcccagcaagcggagcuucaucgaggaccugcuguucaacaaggugacccuggccgacgccggcuucaucaagcaguacggcgacugccugggggauaucgccgcucgggaccugaucugcgcccagaaguucaacggccugaccgugcugcccccucugcugaccgacgagaugaucgcccaguacaccagcgcccugcuugccggcaccaucaccagcggcuggaccuucggcgccggcgcagcccugcagauccccuucgccaugcagauggccuaccgguucaacggcaucggcgugacccagaacgugcuguacgagaaccagaagcugaucgccaaccaguucaacagcgccaucggcaagauccaggacagccugagcagcaccgccagcgcccugggcaagcugcaggacguggugaaccagaacgcucaggcccugaacacccuggugaagcagcugagcagcaacuucggcgccaucagcucagugcugaacgacauccugagcaggcuggaucccccagaggccgaggugcagaucgaccggcugaucaccggccggcugcagagccugcagaccuacgugacccagcagcugauccgggccgccgagauccgggccagcgccaaucuggcagccaccaagaugagcgagugcgugcugggccagagcaagcggguggacuuuugcggcaagggcuaccaccugaugagcuucccccagagcgcuccccacggcgugguguuccuccacgugacauacguccccgcccaggagaagaacuucaccaccgcccccgccauuugccacgacggcaaggcccacuucccccgggagggaguguucgugagcaacggcacccacugguucgugacccagcggaacuucuacgagccucagaucaucaccaccgacaacaccuucgugagcggcaacugcgacguggugaucggcaucgugaacaacaccguguacgacccccugcagcccgagcuggacagcuucaaggaggagcuggacaaguacuucaagaaccacaccagcccagacguggaccugggcgacaucagcggcaucaacgccagcguggugaacauccagaaggagaucgaccggcugaacgagguggccaagaaccugaacgagagccugaucgaccugcaggagcugggcaaguacgagcaguacaucaaguggcccugguacaucuggcugggcuucaucgccggccugaucgccaucgugauggugaccaucaugcugugcugcaugaccagcugcuguagcugccugaagggcugcugcagcugcggcagcugcugcaaguucgacgaggacgacagcgagcccgugcugaagggcgugaagcugcacuacaccugaggacuaguuauaagacugacuagcccgaugggccucccaacgggcccuccuccccuccuugcaccgagauuaauagaucucaaaggcucuuuucagagccaccaaaaaaaaaaaaaaaaaaaaaaaaaaaaaaaaaaaaaaaaaaaaaaaaaaaaaaaaaaaaaaaaaaaaaaaaaaaaaaaaaaaaaaaaaaaaaaaaaaaaa

SEQ ID NO: 24457 - RNA, 4035 nt, Artificial Sequence
  SARS-CoV-2/Wuhan/WIV05/2019__EPI_ISL_402128 spike protein mRNA gc (1-1273)(K986P_V987P_H69del_V70del_D614G)
aggagaaagcuuaccauguucguguuccuggugcugcugccccuggugagcagccagugcgugaaccugaccacccggacccagcugcccccugccuacaccaacagcuucacccggggcguguacuaccccgacaagguguuccggagcagcgugcugcacagcacccaggaccuguuccugcccuucuucagcaacgugaccugguuccacgccaucagcggcaccaacggcaccaagcgguucgacaacccagugcugcccuucaacgacggcguguacuucgccagcaccgagaagucaaacaucauccggggcuggaucuucggcaccacccuggacagcaagacacagagccugcugaucgugaacaacgccaccaacguggugaucaaggugugcgaguuucaguucugcaacgaccccuuccugggcguguacuaccacaagaacaacaagagcuggauggagagcgaguuccggguguacagcagcgcuaacaauugcaccuucgaguacgucagccagcccuuccugauggaccucgagggcaagcagggcaacuucaagaaccugcgggaguucguguucaagaacaucgauggcuacuucaagaucuacagcaagcacacccccaucaaccuggugcgggaccugccccagggauucagcgcccuggagccucugguggaccugcccaucggcaucaacaucaccagguuccagacccugcuggcccugcaccggagcuaccugacccccggcgacagcagcagcggcuggaccgccggcgccgccgcauacuacgugggcuaccugcagccacggaccuuccugcugaaguacaacgagaacggcaccaucaccgacgccguggacugcgcccuggacccccugagcgagaccaagugcacccuaaagagcuucaccguggagaagggcaucuaccagaccagcaacuuccgggugcagcccacugagagcaucgugcgguuccccaacauuaccaaccugugucccuucggcgagguguucaacgccacccgguucgccagcguguacgccuggaaccggaagcggaucagcaacugcguggccgacuacagcgugcuguacaacagcgccagcuucagcaccuucaagugcuacggcgugagcccuaccaagcugaacgaccugugcuucaccaacguguacgcugacagcuucgugauccggggcgacgaggugcggcagaucgcccccggccagaccggcaagaucgccgacuacaacuacaagcugcccgacgacuucaccggcugcgugaucgccuggaacagcaacaaccuggacagcaaggugggcggcaacuacaacuaccuguaccggcuguuccguaagagcaaccugaagccauucgagcgggacaucagcaccgagaucuaccaggccggcagcacccccugcaacgguguggagggcuuuaacugcuacuucccccugcagagcuacggcuuccagcccaccaacggcgugggcuaccagcccuaccgggugguggugcugagcuucgagcugcugcacgcccccgccaccgugugcggcccuaaaaagagcaccaaccuggugaagaacaagugcgugaacuucaauuucaacggccugaccggcaccggcgugcugaccgagagcaacaagaaguuccugcccuuccagcaguucggccgggauaucgccgacaccaccgacgcagugcgggacccccagacccuggagauccuggacaucaccccaugcagcuucggcggcgugagcgugaucacccccggcacaaacaccagcaaccaggucgccgugcuguaccagggagugaacugcaccgaggugcccguggccauccacgccgaccagcugacccccaccuggcggguguacagcaccggcagcaacguguuccagacccgggccggcugccugaucggcgccgagcacgugaacaacuccuacgagugcgacauccccaucggcgcuggcaucugcgccagcuaccagacccagaccaacagcccccggcgggcccggagcguggccagccagagcaucaucgccuacaccaugagcuuaggcgccgagaacagcguggccuacagcaacaacagcaucgcgaucccuaccaacuucaccaucagcgugaccaccgagauacugcccgugagcaugaccaagaccagcguggacuguaccauguacaucugcggcgacagcaccgagugcagcaaccugcugcugcaguacggcagcuucugcacccagcugaaccgggcccugaccggcaucgccguggagcaggacaagaacacccaagagguguucgcccaggugaagcagaucuacaagacucccccaaucaaggacuucggcggcuucaacuucagccagauccugcccgaccccagcaagcccagcaagcggagcuucaucgaggaccugcuguucaacaaggugacccuggccgacgccggcuucaucaagcaguacggcgacugccugggggauaucgccgcucgggaccugaucugcgcccagaaguucaacggccugaccgugcugcccccucugcugaccgacgagaugaucgcccaguacaccagcgcccugcuugccggcaccaucaccagcggcuggaccuucggcgccggcgcagcccugcagauccccuucgccaugcagauggccuaccgguucaacggcaucggcgugacccagaacgugcuguacgagaaccagaagcugaucgccaaccaguucaacagcgccaucggcaagauccaggacagccugagcagcaccgccagcgcccugggcaagcugcaggacguggugaaccagaacgcucaggcccugaacacccuggugaagcagcugagcagcaacuucggcgccaucagcucagugcugaaugacauccugagcaggcuggaucccccagaggccgaggugcagaucgaccggcugaucaccggccggcugcagagccugcagaccuacgugacccagcagcugauccgggccgccgagauccgggccagcgccaaccuggcagccaccaagaugagcgagugcgugcugggccagagcaagcggguggacuuuugcggcaagggcuaccaccugaugagcuucccccagagcgcuccccacggcgugguguuccuccacgugacauacgugcccgcccaggagaagaacuucaccaccgcccccgccauuugccacgacggcaaggcccacuucccccgggagggagucuucgugagcaacggcacccacugguucgugacccagcggaacuucuacgagccucagaucaucaccaccgacaacaccuucgugagcggcaacugcgacguggugaucggcaucgugaacaacaccguguacgacccccugcagcccgagcuggacagcuucaaggaggagcuggacaaguacuucaagaaccacaccagcccagacguggaccugggcgacaucagcggcaucaacgccagcguggugaacauccagaaggagaucgaccggcugaacgagguggccaagaaccugaacgagagccugaucgaccugcaggagcugggcaaguacgagcaguacaucaaguggcccugguacaucuggcugggcuucaucgccggccugaucgccaucgugauggugaccaucaugcugugcugcaugaccagcugcuguagcugccugaagggcugcugcagcugcggcagcugcugcaaguucgacgaggacgacagcgagcccgugcugaagggcgugaagcugcacuacaccugaggacuaguuauaagacugacuagcccgaugggccucccaacgggcccuccuccccuccuugcaccgagauuaauagaucucaaaggcucuuuucagagccaccaaaaaaaaaaaaaaaaaaaaaaaaaaaaaaaaaaaaaaaaaaaaaaaaaaaaaaaaaaaaaaaaaaaaaaaaaaaaaaaaaaaaaaaaaaaaaaaaaaaaa

SEQ ID NO: 24458 - RNA, 4041 nt, Artificial Sequence
  SARS-CoV-2/Wuhan/WIV05/2019__EPI_ISL_402128 spike protein mRNA gc (1-1273)(K986P_V987P_Y453F_D614G)
aggagaaagcuuaccauguucguguuccuggugcugcugccccuggugagcagccagugcgugaaccugaccacccggacccagcugcccccugccuacaccaacagcuucacccggggcguguacuaccccgacaagguguuccggagcagcgugcugcacagcacccaggaccuguuccugcccuucuucagcaacgugaccugguuccacgccauccacgugagcggcaccaacggcaccaagcgguucgacaacccagugcugcccuucaacgacggcguguacuucgccagcaccgagaagucaaacaucauccggggcuggaucuucggcaccacccuggacagcaagacacagagccugcugaucgugaacaacgccaccaacguggugaucaaggugugcgaguuucaguucugcaacgaccccuuccugggcguguacuaccacaagaacaacaagagcuggauggagagcgaguuccgggucuacagcagcgcuaacaauugcaccuucgaguacgugagccagcccuuccugauggaccucgagggcaagcagggcaacuucaagaaccugcgggaguucguguucaagaacaucgauggcuacuucaagaucuacagcaagcacacccccaucaaccuggugcgggaccugccccagggauucagcgcccuggagccucugguggaccugcccaucggcaucaacaucaccagguuccagacccugcuggcccugcaccggagcuaccugacccccggcgacagcagcagcggcuggaccgccggcgccgccgcauacuacgugggcuaccugcagccacggaccuuccugcugaaguacaacgagaacggcaccaucaccgacgccguggacugcgcccuggacccccugagcgagaccaagugcacccuaaagagcuucaccguggagaagggcaucuaccagaccagcaacuuccgggugcagcccacugagagcaucgugcgguuccccaacauuaccaaccugugucccuucggcgagguguucaacgccacccgguucgccagcguguacgccuggaaccggaagcggaucagcaacugcguggccgacuacagcgugcuguacaacagcgccagcuucagcaccuucaagugcuacggcgugagcccuaccaagcugaacgaccugugcuucaccaacguguacgcugacagcuucgugauccggggcgacgaggugcggcagaucgcccccggccagaccggcaagaucgccgacuacaacuacaagcugcccgacgacuucaccggcugcgugaucgccuggaacagcaacaaccuggacagcaaggugggcggcaacuacaacuaccuguuccggcuguuccguaagagcaaccugaagccauuugagcgggacaucagcaccgagaucuaccaggccggcagcacccccugcaacgguguggagggcuucaacugcuacuucccccugcagagcuacggcuuccagcccaccaacggcgugggcuaccagcccuaccgggugguggugcugagcuucgagcugcugcacgcccccgccaccgugugcggcccuaaaaagagcaccaaccuggugaagaacaagugcgugaacuucaauuucaacggccugaccggcaccggcgugcugaccgagagcaacaagaaguuccugcccuuccagcaguucggccgggauaucgccgacaccaccgacgcagugcgggacccccagacccuggagauccuggacaucaccccaugcagcuucggcggcgugagcgucaucacccccggcacaaacaccagcaaccagguggccgugcuguaccagggagugaacugcaccgaggugcccguggccauccacgccgaccagcugacccccaccuggcggguguacagcaccggcagcaacguguuccagacccgggccggcugccugaucggcgccgagcacgugaacaacuccuacgagugcgacauccccaucggcgcuggcaucugcgccagcuaccagacccagaccaacagcccccggcgggcccggagcguggccagccagagcaucaucgccuacaccaugagcuuaggcgccgagaacagcguggccuacagcaacaacagcaucgcgaucccuaccaacuucaccaucagcgugaccaccgagauacugcccgugagcaugaccaagaccagcguggacuguaccauguacaucugcggcgacagcaccgagugcagcaaccugcugcugcaguacggcagcuucugcacccagcugaaccgggcccugaccggcaucgccguggagcaggacaagaacacccaagagguguucgcccaggugaagcagaucuacaagacucccccaaucaaggacuucggcggcuucaacuucagccagauccugcccgaccccagcaagcccagcaagcggagcuucaucgaggaccugcuguucaacaaggugacccuggccgacgccggcuucaucaagcaguacggcgacugccugggggauaucgccgcucgggaccugaucugcgcccagaaguucaacggccugaccgugcugcccccucugcugaccgacgagaugaucgcccaguacaccagcgcccugcuugccggcaccaucaccagcggcuggaccuucggcgccggcgcagcccugcagauccccuucgccaugcagauggccuaccgguucaacggcaucggcgugacccagaacgugcuguacgagaaccagaagcugaucgccaaccaguucaacagcgccaucggcaagauccaggacagccugagcagcaccgccagcgcccugggcaagcugcaggacguggugaaccagaacgcucaggcccugaacacccuggugaagcagcugagcagcaacuuuggcgccaucagcucagugcugaaugacauccugagcaggcuggaucccccagaggccgaggugcagaucgaccggcugaucaccggccggcugcagagccugcagaccuacgugacccagcagcugauccgggccgccgagauccgggccagcgccaaccuggcagccaccaagaugagcgagugcgugcugggccagagcaagcggguggacuucugcggcaagggcuaccaccugaugagcuucccccagagcgcuccccacggcgugguguuccuccacgugacauacguccccgcccaggagaagaacuucaccaccgcccccgccauuugccacgacggcaaggcccacuucccccgggagggaguguucgugagcaacggcacccacugguucgugacccagcggaacuucuacgagccucagaucaucaccaccgacaacaccuucgugagcggcaacugcgacguggugaucggcaucgugaacaacaccguguacgacccccugcagcccgagcuggacagcuucaaggaggagcuggacaaguacuucaagaaccacaccagcccagacguggaccugggcgacaucagcggcaucaacgccagcguggugaacauccagaaggagaucgaccggcugaacgagguggccaagaaccugaacgagagccugaucgaccugcaggagcugggcaaguacgagcaguacaucaaguggcccugguacaucuggcugggcuucaucgccggccugaucgccaucgugauggugaccaucaugcugugcugcaugaccagcugcuguagcugccugaagggcugcugcagcugcggcagcugcugcaaguucgacgaggacgacagcgagcccgugcugaagggcgugaagcugcacuacaccugaggacuaguuauaagacugacuagcccgaugggccucccaacgggcccuccuccccuccuugcaccgagauuaauagaucucaaaggcucuuuucagagccaccaaaaaaaaaaaaaaaaaaaaaaaaaaaaaaaaaaaaaaaaaaaaaaaaaaaaaaaaaaaaaaaaaaaaaaaaaaaaaaaaaaaaaaaaaaaaaaaaaaaaa

SEQ ID NO: 24459 - RNA, 4041 nt, Artificial Sequence
  SARS-CoV-2/Wuhan/WIV05/2019__EPI_ISL_402128 spike protein mRNA gc (1-1273)(K986P_V987P_D614G_I692V)
aggagaaagcuuaccauguucguguuccuggugcugcugccccuggugagcagccagugcgugaaccugaccacccggacccagcugcccccugccuacaccaacagcuucacccggggcguguacuaccccgacaagguguuccggagcagcgugcugcacagcacccaggaccuguuccugcccuucuucagcaacgugaccugguuccacgccauccacgugagcggcaccaacggcaccaagcgguucgacaacccagugcugcccuucaacgacggcguguacuucgccagcaccgagaagucaaacaucauccggggcuggaucuucggcaccacccuggacagcaagacacagagccugcugaucgugaacaacgccaccaacguggugaucaaggugugcgaguuucaguucugcaacgaccccuuccugggcguguacuaccacaagaacaacaagagcuggauggagagcgaguuccgggucuacagcagcgcuaacaauugcaccuucgaguacgugagccagcccuuccugauggaccucgagggcaagcagggcaacuucaagaaccugcgggaguucguguucaagaacaucgauggcuacuucaagaucuacagcaagcacacccccaucaaccuggugcgggaccugccccagggauucagcgcccuggagccucugguggaccugcccaucggcaucaacaucaccagguuccagacccugcuggcccugcaccggagcuaccugacccccggcgacagcagcagcggcuggaccgccggcgccgccgcauacuacgugggcuaccugcagccacggaccuuccugcugaaguacaacgagaacggcaccaucaccgacgccguggacugcgcccuggacccccugagcgagaccaagugcacccuaaagagcuucaccguggagaagggcaucuaccagaccagcaacuuccgggugcagcccacugagagcaucgugcgguuccccaacauuaccaaccugugucccuucggcgagguguucaacgccacccgguucgccagcguguacgccuggaaccggaagcggaucagcaacugcguggccgacuacagcgugcuguacaacagcgccagcuucagcaccuucaagugcuacggcgugagcccuaccaagcugaacgaccugugcuucaccaacguguacgcugacagcuucgugauccggggcgacgaggugcggcagaucgcccccggccagaccggcaagaucgccgacuacaacuacaagcugcccgacgacuucaccggcugcgugaucgccuggaacagcaacaaccuggacagcaaggugggcggcaacuacaacuaccuguaccggcuguuccguaagagcaaccugaagccauucgagcgggacaucagcaccgagaucuaccaggccggcagcacccccugcaacgguguggagggcuuuaacugcuacuucccccugcagagcuacggcuuccagcccaccaacggcgugggcuaccagcccuaccgggugguggugcugagcuucgagcugcugcacgcccccgccaccgugugcggcccuaaaaagagcaccaaccuggugaagaacaagugcgugaacuucaauuucaacggccugaccggcaccggcgugcugaccgagagcaacaagaaguuccugcccuuccagcaguucggccgggauaucgccgacaccaccgacgcagugcgggacccccagacccuggagauccuggacaucaccccaugcagcuucggcggcgugagcgucaucacccccggcacaaacaccagcaaccagguggccgugcuguaccagggagugaacugcaccgaggugcccguggccauccacgccgaccagcugacccccaccuggcggguguacagcaccggcagcaacguguuccagacccgggccggcugccugaucggcgccgagcacgugaacaacuccuacgagugcgacauccccaucggcgcuggcaucugcgccagcuaccagacccagaccaacagcccccggcgggcccggagcguggccagccagagcgugaucgccuacaccaugagcuuaggcgccgagaacagcguggccuacagcaacaacagcaucgcgaucccuaccaacuucaccaucagcgugaccaccgagauccugcccgugagcaugaccaagaccagcguggacuguaccauguacauaugcggcgacagcaccgagugcagcaaccugcugcugcaguacggcagcuucugcacccagcugaaccgggcccugaccggcaucgccguggagcaggacaagaacacccaagagguguucgcccaggugaagcagaucuacaagacucccccaaucaaggacuucggcggcuucaacuucagccagauccugcccgaccccagcaagcccagcaagcggagcuucaucgaggaccugcuguucaacaaggugacccuggccgacgccggcuucaucaagcaguacggcgacugccugggggauaucgccgcucgggaccugaucugcgcccagaaguucaacggccugaccgugcugcccccucugcugaccgacgagaugaucgcccaguacaccagcgcccugcuugccggcaccaucaccagcggcuggaccuucggcgccggcgcagcccugcagauccccuucgccaugcagauggccuaccgguucaacggcaucggcgugacccagaacgugcuguacgagaaccagaagcugaucgccaaccaguucaacagcgccaucggcaagauccaggacagccugagcagcaccgccagcgcccugggcaagcugcaggacguggugaaccagaacgcucaggcccugaacacccuggugaagcagcugagcagcaacuucggcgccaucagcucagugcugaaugacauccugagcaggcuggaucccccagaggccgaggugcagaucgaccggcugaucaccggccggcugcagagccugcagaccuacgugacccagcagcugauccgggccgccgagauccgggccagcgccaaccuggcagccaccaagaugagcgagugcgugcugggccagagcaagcggguggacuuuugcggcaagggcuaccaccugaugagcuucccccagagcgcuccccacggcgugguguuccuccacgucacauacgugcccgcccaggagaagaacuucaccaccgcccccgccaucugccacgacggcaaggcccacuucccccgggagggaguguucgugagcaacggcacccacugguucgugacccagcggaacuucuacgagccucagauuaucaccaccgacaacaccuucgugagcggcaacugcgacguggugaucggcaucgugaacaacaccguguacgacccccugcagcccgagcuggacagcuucaaggaggagcuggacaaguacuucaagaaccacaccagcccagacguggaccugggcgacaucagcggcaucaacgccagcguggugaacauccagaaggagaucgaccggcugaacgagguggccaagaaccugaacgagagccugaucgaccugcaggagcugggcaaguacgagcaguacaucaaguggcccugguacaucuggcugggcuucaucgccggccugaucgccaucgugauggugaccaucaugcugugcugcaugaccagcugcuguagcugccugaagggcugcugcagcugcggcagcugcugcaaguucgacgaggacgacagcgagcccgugcugaagggcgugaagcugcacuacaccugaggacuaguuauaagacugacuagcccgaugggccucccaacgggcccuccuccccuccuugcaccgagauuaauagaucucaaaggcucuuuucagagccaccaaaaaaaaaaaaaaaaaaaaaaaaaaaaaaaaaaaaaaaaaaaaaaaaaaaaaaaaaaaaaaaaaaaaaaaaaaaaaaaaaaaaaaaaaaaaaaaaaaaaa

SEQ ID NO: 24460 - RNA, 4041 nt, Artificial Sequence
  SARS-CoV-2/Wuhan/WIV05/2019__EPI_ISL_402128 spike protein mRNA gc (1-1273)(K986P_V987P_D614G_M1229I)
aggagaaagcuuaccauguucguguuccuggugcugcugccccuggugagcagccagugcgugaaccugaccacccggacccagcugcccccugccuacaccaacagcuucacccggggcguguacuaccccgacaagguguuccggagcagcgugcugcacagcacccaggaccuguuccugcccuucuucagcaacgugaccugguuccacgccauccacgugagcggcaccaacggcaccaagcgguucgacaacccagugcugcccuucaacgacggcguguacuucgccagcaccgagaagucaaacaucauccggggcuggaucuucggcaccacccuggacagcaagacacagagccugcugaucgugaacaacgccaccaacguggugaucaaggugugcgaguuucaguucugcaacgaccccuuccugggcguguacuaccacaagaacaacaagagcuggauggagagcgaguuccgggucuacagcagcgcuaacaauugcaccuucgaguacgugagccagcccuuccugauggaccucgagggcaagcagggcaacuucaagaaccugcgggaguucguguucaagaacaucgauggcuacuucaagaucuacagcaagcacacccccaucaaccuggugcgggaccugccccagggauucagcgcccuggagccucugguggaccugcccaucggcaucaacaucaccagguuccagacccugcuggcccugcaccggagcuaccugacccccggcgacagcagcagcggcuggaccgccggcgccgccgcauacuacgugggcuaccugcagccacggaccuuccugcugaaguacaacgagaacggcaccaucaccgacgccguggacugcgcccuggacccccugagcgagaccaagugcacccuaaagagcuucaccguggagaagggcaucuaccagaccagcaacuuccgggugcagcccacugagagcaucgugcgguuccccaacauuaccaaccugugucccuucggcgagguguucaacgccacccgguucgccagcguguacgccuggaaccggaagcggaucagcaacugcguggccgacuacagcgugcuguacaacagcgccagcuucagcaccuucaagugcuacggcgugagcccuaccaagcugaacgaccugugcuucaccaacguguacgcugacagcuucgugauccggggcgacgaggugcggcagaucgcccccggccagaccggcaagaucgccgacuacaacuacaagcugcccgacgacuucaccggcugcgugaucgccuggaacagcaacaaccuggacagcaaggugggcggcaacuacaacuaccuguaccggcuguuccguaagagcaaccugaagccauucgagcgggacaucagcaccgagaucuaccaggccggcagcacccccugcaacgguguggagggcuuuaacugcuacuucccccugcagagcuacggcuuccagcccaccaacggcgugggcuaccagcccuaccgggugguggugcugagcuucgagcugcugcacgcccccgccaccgugugcggcccuaaaaagagcaccaaccuggugaagaacaagugcgugaacuucaauuucaacggccugaccggcaccggcgugcugaccgagagcaacaagaaguuccugcccuuccagcaguucggccgggauaucgccgacaccaccgacgcagugcgggacccccagacccuggagauccuggacaucaccccaugcagcuucggcggcgugagcgucaucacccccggcacaaacaccagcaaccagguggccgugcuguaccagggagugaacugcaccgaggugcccguggccauccacgccgaccagcugacccccaccuggcggguguacagcaccggcagcaacguguuccagacccgggccggcugccugaucggcgccgagcacgugaacaacuccuacgagugcgacauccccaucggcgcuggcaucugcgccagcuaccagacccagaccaacagcccccggcgggcccggagcguggccagccagagcaucaucgccuacaccaugagcuuaggcgccgagaacagcguggccuacagcaacaacagcaucgcgaucccuaccaacuucaccaucagcgugaccaccgagauacugcccgugagcaugaccaagaccagcguggacuguaccauguacaucugcggcgacagcaccgagugcagcaaccugcugcugcaguacggcagcuucugcacccagcugaaccgggcccugaccggcaucgccguggagcaggacaagaacacccaagagguguucgcccaggugaagcagaucuacaagacucccccaaucaaggacuucggcggcuucaacuucagccagauccugcccgaccccagcaagcccagcaagcggagcuucaucgaggaccugcuguucaacaaggugacccuggccgacgccggcuucaucaagcaguacggcgacugccugggggauaucgccgcucgggaccugaucugcgcccagaaguucaacggccugaccgugcugcccccucugcugaccgacgagaugaucgcccaguacaccagcgcccugcuugccggcaccaucaccagcggcuggaccuucggcgccggcgcagcccugcagauccccuucgccaugcagauggccuaccgguucaacggcaucggcgugacccagaacgugcuguacgagaaccagaagcugaucgccaaccaguucaacagcgccaucggcaagauccaggacagccugagcagcaccgccagcgcccugggcaagcugcaggacguggugaaccagaacgcucaggcccugaacacccuggugaagcagcugagcagcaacuucggcgccaucagcucagugcugaaugacauccugagcaggcuggaucccccagaggccgaggugcagaucgaccggcugaucaccggccggcugcagagccugcagaccuacgugacccagcagcugauccgggccgccgagauccgggccagcgccaaccuggcagccaccaagaugagcgagugcgugcugggccagagcaagcggguggacuuuugcggcaagggcuaccaccugaugagcuucccccagagcgcuccccacggcgugguguuccuccacgugacauacguccccgcccaggagaagaacuucaccaccgcccccgccauuugccacgacggcaaggcccacuucccccgggagggaguguucgugagcaacggcacccacugguucgugacccagcggaacuucuacgagccucagaucaucaccaccgacaacaccuucgugagcggcaacugcgacguggugaucggcaucgugaacaacaccguguacgacccccugcagcccgagcuggacagcuucaaggaggagcuggacaaguacuucaagaaccacaccagcccagacguggaccugggcgacaucagcggcaucaacgccagcguggugaacauccagaaggagaucgaccggcugaacgagguggccaagaaccugaacgagagccugaucgaccugcaggagcugggcaaguacgagcaguacaucaaguggcccugguacaucuggcugggcuucaucgccggccugaucgccaucgugaucgugaccaucaugcugugcugcaugaccagcugcuguagcugccugaagggcugcugcagcugcggcagcugcugcaaguucgacgaggacgacagcgagcccgugcugaagggcgugaagcugcacuacaccugaggacuaguuauaagacugacuagcccgaugggccucccaacgggcccuccuccccuccuugcaccgagauuaauagaucucaaaggcucuuuucagagccaccaaaaaaaaaaaaaaaaaaaaaaaaaaaaaaaaaaaaaaaaaaaaaaaaaaaaaaaaaaaaaaaaaaaaaaaaaaaaaaaaaaaaaaaaaaaaaaaaaaaaa

SEQ ID NO: 24461 - RNA, 4035 nt, Artificial Sequence
  SARS-CoV-2/Wuhan/WIV05/2019__EPI_ISL_402128 spike protein mRNA gc (1-1273)(K986P_V987P_H69del_V70del_A222V_Y453F_S477N_D614G_I692V)
aggagaaagcuuaccauguucguguuccuggugcugcugccccuggugagcagccagugcgugaaccugaccacccggacccagcugcccccugccuacaccaacagcuucacccggggcguguacuaccccgacaagguguuccggagcagcgugcugcacagcacccaggaccuguuccugcccuucuucagcaacgugaccugguuccacgccaucagcggcaccaacggcaccaagcgguucgacaacccagugcugcccuucaacgacggcguguacuucgccagcaccgagaagucaaacaucauccggggcuggaucuucggcaccacccuggacagcaagacacagagccugcugaucgugaacaacgccaccaacguggugaucaaggugugcgaguuucaguucugcaacgaccccuuccugggcguguacuaccacaagaacaacaagagcuggauggagagcgaguuccggguguacagcagcgcuaacaauugcaccuucgaguacgucagccagcccuuccugauggaccucgagggcaagcagggcaacuucaagaaccugcgggaguucguguucaagaacaucgauggcuacuucaagaucuacagcaagcacacccccaucaaccuggugcgggaccugccccagggauucagcgugcuggagccucugguggaccugcccaucggcaucaacaucaccagguuccagacccugcuggcccugcaccggagcuaccugacccccggcgacagcagcagcggcuggaccgccggcgccgccgccuacuacgugggcuaccugcagccacggaccuuccugcugaaguacaacgagaacggcaccaucaccgacgcaguggacugcgcccuggacccccugagcgagaccaagugcacccuaaagagcuucaccguggagaagggcaucuaccagaccagcaacuuccgggugcagcccacugagagcaucgugcgguuccccaacauuaccaaccugugucccuucggcgagguguucaacgccacccgguucgccagcguguacgccuggaaccggaagcggaucagcaacugcguggccgacuacagcgugcuguacaacagcgccagcuucagcaccuucaagugcuacggcgugagcccuaccaagcugaacgaccugugcuucaccaacguguacgccgacagcuucgugauccggggcgacgaggugcggcagaucgcucccggccagaccggcaagaucgccgacuacaacuacaagcugcccgacgacuucaccggcugcgugaucgccuggaacagcaacaaccuggacagcaaggugggcggcaacuacaacuaccuguuccggcuguuccguaagagcaaccugaagccauuugagcgggacaucagcaccgagaucuaccaggccggcaacacccccugcaacgguguggagggcuucaacugcuacuucccccugcagagcuacggcuuccagcccaccaacggcgugggcuaccagcccuaccgggugguggugcugagcuucgagcugcugcacgcccccgccaccgugugcggcccuaaaaagagcaccaaccuggugaagaacaagugcgugaauuucaacuucaacggccugaccggcaccggcgugcugaccgagagcaacaagaaguuccugcccuuccagcaguucggccgggauaucgccgacaccaccgacgccgugcgggacccccagacccuggagauccuggacaucaccccaugcagcuucggcggcgugagcgucaucacccccggcacaaacaccagcaaccagguggcagugcuguaccagggagugaacugcaccgaggugcccguggccauccacgccgaccagcugacccccaccuggcggguguacagcaccggcagcaacguguuccagacccgggccggcugccugaucggcgccgagcacgugaacaacagcuacgagugcgacauccccaucggcgccggcaucugcgcuuccuaccagacccagaccaacagcccccggcgggcccggagcguggccagccagagcgugaucgccuacaccaugagcuuaggcgccgagaacagcguggccuacagcaacaacagcaucgccaucccuaccaacuucaccaucagcgugaccaccgagauccugcccgugagcaugaccaagaccagcguggacuguaccauguacauaugcggcgacagcaccgagugcagcaaccugcugcugcaguacggcagcuucugcacccagcugaaccgggcgcugaccggcaucgccguggagcaggacaagaacacccaagagguguucgcccaggugaagcagaucuacaagacucccccaaucaaggacuucggcggcuucaacuucagccagauccugcccgaccccagcaagcccagcaagcggagcuucaucgaggaccugcuguucaacaaggugacccuggccgacgccggcuucaucaagcaguacggcgacugccugggggauaucgccgcccgggaccugaucugcgcucagaaguucaacggccugaccgugcugcccccucugcugaccgacgagaugaucgcccaguacaccagcgcccugcuugccggcaccaucaccagcggcuggaccuucggcgccggcgccgcacugcagauccccuucgccaugcagauggccuaccgguucaacggcaucggcgugacccagaacgugcuguacgagaaccagaagcugaucgccaaccaguucaacagcgccaucggcaagauccaggacagccugagcagcaccgccagcgcccugggcaagcugcaggacguggugaaccagaacgcccaggcucugaacacccuggugaagcagcugagcagcaauuuuggcgccaucagcagcgugcugaacgacauccugucaaggcuggaucccccagaggccgaggugcagaucgaccggcugaucaccggccggcugcagagccugcagaccuacgugacccagcagcugauccgggccgccgagauccgggccagcgccaaccuggccgcaaccaagaugagcgagugcgugcugggccagagcaagcggguggacuucugcggcaagggcuaccaccugaugagcuucccccagagcgcuccccacggcgugguguuccuccacgucacauacgugcccgcccaggagaagaacuucaccaccgcccccgccaucugccacgacggcaaggcccacuucccccgggagggaguguucgugagcaacggcacccacugguucgugacccagcggaacuucuacgagccucagauuaucaccaccgacaacaccuucgugagcggcaacugcgacguggugaucggcaucgugaacaacaccguguacgacccccugcagcccgagcuggacagcuucaaggaggagcuggacaaguacuucaagaaccacaccagcccagacguggaccugggcgacaucagcggcaucaacgccagcguggugaacauccagaaggagaucgaccggcugaacgagguggccaagaaccugaacgagagccugaucgaccugcaggagcugggcaaguacgagcaguacaucaaguggcccugguacaucuggcugggcuucaucgccggccugaucgccaucgugauggugaccaucaugcugugcugcaugaccagcugcuguagcugccugaagggcugcugcagcugcggcagcugcugcaaguucgacgaggacgacagcgagcccgugcugaagggcgugaagcugcacuacaccugaggacuaguuauaagacugacuagcccgaugggccucccaacgggcccuccuccccuccuugcaccgagauuaauagaucucaaaggcucuuuucagagccaccaaaaaaaaaaaaaaaaaaaaaaaaaaaaaaaaaaaaaaaaaaaaaaaaaaaaaaaaaaaaaaaaaaaaaaaaaaaaaaaaaaaaaaaaaaaaaaaaaaaaa

SEQ ID NO: 24462 - RNA, 4035 nt, Artificial Sequence
  SARS-CoV-2/Wuhan/WIV05/2019__EPI_ISL_402128 spike protein mRNA gc (1-1273)(K986P_V987P_H69del_V70del_Y453F_D614G_I692V_M1229I)
aggagaaagcuuaccauguucguguuccuggugcugcugccccuggugagcagccagugcgugaaccugaccacccggacccagcugcccccugccuacaccaacagcuucacccggggcguguacuaccccgacaagguguuccggagcagcgugcugcacagcacccaggaccuguuccugcccuucuucagcaacgugaccugguuccacgccaucagcggcaccaacggcaccaagcgguucgacaacccagugcugcccuucaacgacggcguguacuucgccagcaccgagaagucaaacaucauccggggcuggaucuucggcaccacccuggacagcaagacacagagccugcugaucgugaacaacgccaccaacguggugaucaaggugugcgaguuucaguucugcaacgaccccuuccugggcguguacuaccacaagaacaacaagagcuggauggagagcgaguuccggguguacagcagcgcuaacaauugcaccuucgaguacgucagccagcccuuccugauggaccucgagggcaagcagggcaacuucaagaaccugcgggaguucguguucaagaacaucgauggcuacuucaagaucuacagcaagcacacccccaucaaccuggugcgggaccugccccagggauucagcgcccuggagccucugguggaccugcccaucggcaucaacaucaccagguuccagacccugcuggcccugcaccggagcuaccugacccccggcgacagcagcagcggcuggaccgccggcgccgccgcauacuacgugggcuaccugcagccacggaccuuccugcugaaguacaacgagaacggcaccaucaccgacgccguggacugcgcccuggacccccugagcgagaccaagugcacccuaaagagcuucaccguggagaagggcaucuaccagaccagcaacuuccgggugcagcccacugagagcaucgugcgguuccccaacauuaccaaccugugucccuucggcgagguguucaacgccacccgguucgccagcguguacgccuggaaccggaagcggaucagcaacugcguggccgacuacagcgugcuguacaacagcgccagcuucagcaccuucaagugcuacggcgugagcccuaccaagcugaacgaccugugcuucaccaacguguacgcugacagcuucgugauccggggcgacgaggugcggcagaucgcccccggccagaccggcaagaucgccgacuacaacuacaagcugcccgacgacuucaccggcugcgugaucgccuggaacagcaacaaccuggacagcaaggugggcggcaacuacaacuaccuguuccggcuguuccguaagagcaaccugaagccauuugagcgggacaucagcaccgagaucuaccaggccggcagcacccccugcaacgguguggagggcuucaacugcuacuucccccugcagagcuacggcuuccagcccaccaacggcgugggcuaccagcccuaccgggugguggugcugagcuucgagcugcugcacgcccccgccaccgugugcggcccuaaaaagagcaccaaccuggugaagaacaagugcgugaacuucaauuucaacggccugaccggcaccggcgugcugaccgagagcaacaagaaguuccugcccuuccagcaguucggccgggauaucgccgacaccaccgacgcagugcgggacccccagacccuggagauccuggacaucaccccaugcagcuucggcggcgugagcgugaucacccccggcacaaacaccagcaaccaggucgccgugcuguaccagggagugaacugcaccgaggugcccguggccauccacgccgaccagcugacccccaccuggcggguguacagcaccggcagcaacguguuccagacccgggccggcugccugaucggcgccgagcacgugaacaacuccuacgagugcgacauccccaucggcgcuggcaucugcgccagcuaccagacccagaccaacagcccccggcgggcccggagcguggccagccagagcgugaucgccuacaccaugagcuuaggcgccgagaacagcguggccuacagcaacaacagcaucgcgaucccuaccaacuucaccaucagcgugaccaccgagauccugcccgugagcaugaccaagaccagcguggacuguaccauguacauaugcggcgacagcaccgagugcagcaaccugcugcugcaguacggcagcuucugcacccagcugaaccgggcccugaccggcaucgccguggagcaggacaagaacacccaagagguguucgcccaggugaagcagaucuacaagacucccccaaucaaggacuucggcggcuucaacuucagccagauccugcccgaccccagcaagcccagcaagcggagcuucaucgaggaccugcuguucaacaaggugacccuggccgacgccggcuucaucaagcaguacggcgacugccugggggauaucgccgcucgggaccugaucugcgcccagaaguucaacggccugaccgugcugcccccucugcugaccgacgagaugaucgcccaguacaccagcgcccugcuugccggcaccaucaccagcggcuggaccuucggcgccggcgcagcccugcagauccccuucgccaugcagauggccuaccgguucaacggcaucggcgugacccagaacgugcuguacgagaaccagaagcugaucgccaaccaguucaacagcgccaucggcaagauccaggacagccugagcagcaccgccagcgcccugggcaagcugcaggacguggugaaccagaacgcucaggcccugaacacccuggugaagcagcugagcagcaacuuuggcgccaucagcucagugcugaaugacauccugagcaggcuggaucccccagaggccgaggugcagaucgaccggcugaucaccggccggcugcagagccugcagaccuacgugacccagcagcugauccgggccgccgagauccgggccagcgccaaccuggcagccaccaagaugagcgagugcgugcugggccagagcaagcggguggacuucugcggcaagggcuaccaccugaugagcuucccccagagcgcuccccacggcgugguguuccuccacgugacauacguccccgcccaggagaagaacuucaccaccgcccccgccaucugccacgacggcaaggcccacuucccccgggagggaguguucgugagcaacggcacccacugguucgugacccagcggaacuucuacgagccucagauuaucaccaccgacaacaccuucgugagcggcaacugcgacguggugaucggcaucgugaacaacaccguguacgacccccugcagcccgagcuggacagcuucaaggaggagcuggacaaguacuucaagaaccacaccagcccagacguggaccugggcgacaucagcggcaucaacgccagcguggugaacauccagaaggagaucgaccggcugaacgagguggccaagaaccugaacgagagccugaucgaccugcaggagcugggcaaguacgagcaguacaucaaguggcccugguacaucuggcugggcuucaucgccggccugaucgccaucgugaucgugaccaucaugcugugcugcaugaccagcugcuguagcugccugaagggcugcugcagcugcggcagcugcugcaaguucgacgaggacgacagcgagcccgugcugaagggcgugaagcugcacuacaccugaggacuaguuauaagacugacuagcccgaugggccucccaacgggcccuccuccccuccuugcaccgagauuaauagaucucaaaggcucuuuucagagccaccaaaaaaaaaaaaaaaaaaaaaaaaaaaaaaaaaaaaaaaaaaaaaaaaaaaaaaaaaaaaaaaaaaaaaaaaaaaaaaaaaaaaaaaaaaaaaaaaaaaaa

SEQ ID NO: 24463 - RNA, 4032 nt, Artificial Sequence
  SARS-CoV-2/Wuhan/WIV05/2019__EPI_ISL_402128 spike protein mRNA gc (1-1273)(K986P_V987P_K986P_V987P_H69del_V70del_Y144del_N501Y_A570 D_D614G_P681H_T716I_S982A_D1118H)
aggagaaagcuuaccauguucguguuccuggugcugcugccccuggugagcagccagugcgugaaccugaccacccggacccagcugcccccugccuacaccaacagcuucacccggggcguguacuaccccgacaagguguuccggagcagcgugcugcacagcacccaggaccuguuccugcccuucuucagcaacgugaccugguuccacgccaucagcggcaccaacggcaccaagcgguucgacaacccagugcugcccuucaacgacggcguguacuucgccagcaccgagaagucaaacaucauccggggcuggaucuucggcaccacccuggacagcaagacacagagccugcugaucgugaacaacgccaccaacguggugaucaaggugugcgaguuucaguucugcaacgaccccuuccugggcguguaccacaagaacaacaagagcuggauggagagcgaguuccggguguacagcagcgcuaacaauugcaccuucgaguacgucagccagcccuuccugauggaccucgagggcaagcagggcaacuucaagaaccugcgggaguucguguucaagaacaucgauggcuacuucaagaucuacagcaagcacacccccaucaaccuggugcgggaccugccccagggauucagcgcccuggagccucugguggaccugcccaucggcaucaacaucaccagguuccagacccugcuggcccugcaccggagcuaccugacccccggcgacagcagcagcggcuggaccgccggcgccgccgcauacuacgugggcuaccugcagccacggaccuuccugcugaaguacaacgagaacggcaccaucaccgacgccguggacugcgcccuggacccccugagcgagaccaagugcacccuaaagagcuucaccguggagaagggcaucuaccagaccagcaacuuccgggugcagcccacugagagcaucgugcgguuccccaacauuaccaaccugugucccuucggcgagguguucaacgccacccgguucgccagcguguacgccuggaaccggaagcggaucagcaacugcguggccgacuacagcgugcuguacaacagcgccagcuucagcaccuucaagugcuacggcgugagcccuaccaagcugaacgaccugugcuucaccaacguguacgcugacagcuucgugauccggggcgacgaggugcggcagaucgcccccggccagaccggcaagaucgccgacuacaacuacaagcugcccgacgacuucaccggcugcgugaucgccuggaacagcaacaaccuggacagcaaggugggcggcaacuacaacuaccuguaccggcuguuccguaagagcaaccugaagccauucgagcgggacaucagcaccgagaucuaccaggccggcagcacccccugcaacgguguggagggcuuuaacugcuacuucccccugcagagcuacggcuuccagcccaccuacggcgugggcuaccagcccuaccgggugguggugcugagcuucgagcugcugcacgcccccgccaccgugugcggcccuaaaaagagcaccaaccuggugaagaacaagugcgugaacuucaacuucaauggccugaccggcaccggcgugcugaccgagagcaacaagaaguuccugcccuuccagcaguucggccgggauaucgacgacaccaccgacgccgugcgggacccccagacccuggagauccuggacaucaccccaugcagcuucggcggcgugagcgugaucacccccggcacaaacaccagcaaccaggucgcagugcuguaccagggagugaacugcaccgaggugcccguggccauccacgccgaccagcugacccccaccuggcggguguacagcaccggcagcaacguguuccagacccgggccggcugccugaucggcgccgagcacgugaacaacuccuacgagugcgacauccccaucggcgccggcaucugcgcuagcuaccagacccagaccaacagccaccggcgggcccggagcguggccagccagagcaucaucgccuacaccaugagcuuaggcgccgagaacagcguggccuacagcaacaacagcaucgccauccccaucaacuucaccauaagcgugaccaccgagauccugccugugagcaugaccaagaccagcguggacuguaccauguacaucugcggcgacagcaccgagugcagcaaccugcugcugcaguacggcagcuucugcacccagcugaaccgggcgcugaccggcaucgccguggagcaggacaagaacacccaagagguguucgcccaggugaagcagaucuacaagaccccacccaucaaggacuucggcggcuucaacuucagccagauccugcccgaccccagcaagcccagcaagcggagcuucaucgaggaccugcuguucaacaaggugacucuggccgacgccggcuucaucaagcaguacggcgauugccugggggacaucgccgcccgggaccugaucugcgcucagaaguucaacggccugaccgugcugccuccccugcugaccgacgagaugaucgcccaguacaccagcgcccugcuugccggcaccaucaccagcggcuggaccuucggcgccggcgccgcacugcagauccccuucgccaugcagauggccuaccgguucaacggcaucggcgugacccagaacgugcuguacgagaaccagaagcugaucgccaaccaguucaacagcgccaucggcaagauccaggacagccugagcagcaccgccagcgcccugggcaagcugcaggacguggugaaccagaacgcccaggcucugaacacccuggugaagcagcugagcagcaacuucggcgccaucagcucagugcugaacgacauccuggccaggcuggacccacccgaggccgaggugcagaucgaccggcugaucaccggccggcugcagagccugcagaccuacgugacccagcagcugauccgggccgccgagauucgggccagcgccaaucuggcagccaccaagaugagcgagugcgugcugggccagagcaagcggguggacuuuugcggcaagggcuaccaccugaugagcuucccccagagcgcuccccacggcgugguguuccuccacgugaccuacgugcccgcccaggagaagaacuucacaaccgcccccgccaucugccacgacggcaaggcccacuucccccgggagggagucuucgugagcaacggcacccacugguucgugacccagcggaacuucuacgagccccagaucaucaccacccacaacaccuucgugagcggcaacugcgacguggugaucggcaucgugaacaacaccguguacgacccucugcagcccgagcuggacagcuucaaggaggagcuggacaaguacuucaagaaccacaccagccccgacguggaucugggcgacaucagcggcaucaacgccagcguggugaacauccagaaggagaucgaccggcugaacgagguggccaagaaccugaacgagagccugaucgaccugcaggagcugggcaaguacgagcaguacaucaaguggccaugguacaucuggcugggcuucaucgccggccugaucgccaucgugauggugaccaucaugcugugcugcaugaccagcugcuguagcugccugaagggcugcugcagcugcggcagcugcugcaaguucgacgaggacgacagcgagcccgugcugaagggcgugaagcugcacuacaccugaggacuaguuauaagacugacuagcccgaugggccucccaacgggcccuccuccccuccuugcaccgagauuaauagaucucaaaggcucuuuucagagccaccaaaaaaaaaaaaaaaaaaaaaaaaaaaaaaaaaaaaaaaaaaaaaaaaaaaaaaaaaaaaaaaaaaaaaaaaaaaaaaaaaaaaaaaaaaaaaaaaaaaaa

SEQ ID NO: 24464 - RNA, 4041 nt, Artificial Sequence
  SARS-CoV-2/Wuhan/WIV05/2019__EPI_ISL_402128 spike protein mRNA gc (1-1273)(K986P_V987P_K986P_V987P_K417N_E484K_N501Y_D614G)
aggagaaagcuuaccauguucguguuccuggugcugcugccccuggugagcagccagugcgugaaccugaccacccggacccagcugcccccugccuacaccaacagcuucacccggggcguguacuaccccgacaagguguuccggagcagcgugcugcacagcacccaggaccuguuccugcccuucuucagcaacgugaccugguuccacgccauccacgugagcggcaccaacggcaccaagcgguucgacaacccagugcugcccuucaacgacggcguguacuucgccagcaccgagaagucaaacaucauccggggcuggaucuucggcaccacccuggacagcaagacacagagccugcugaucgugaacaacgccaccaacguggugaucaaggugugcgaguuucaguucugcaacgaccccuuccugggcguguacuaccacaagaacaacaagagcuggauggagagcgaguuccgggucuacagcagcgcuaacaauugcaccuucgaguacgugagccagcccuuccugauggaccucgagggcaagcagggcaacuucaagaaccugcgggaguucguguucaagaacaucgauggcuacuucaagaucuacagcaagcacacccccaucaaccuggugcgggaccugccccagggauucagcgcccuggagccucugguggaccugcccaucggcaucaacaucaccagguuccagacccugcuggcccugcaccggagcuaccugacccccggcgacagcagcagcggcuggaccgccggcgccgccgcauacuacgugggcuaccugcagccacggaccuuccugcugaaguacaacgagaacggcaccaucaccgacgccguggacugcgcccuggacccccugagcgagaccaagugcacccuaaagagcuucaccguggagaagggcaucuaccagaccagcaacuuccgggugcagcccacugagagcaucgugcgguuccccaacauuaccaaccugugucccuucggcgagguguucaacgccacccgguucgccagcguguacgccuggaaccggaagcggaucagcaacugcguggccgacuacagcgugcuguacaacagcgccagcuucagcaccuucaagugcuacggcgugagcccuaccaagcugaacgaccugugcuucaccaacguguacgcugacagcuucgugauccggggcgacgaggugcggcagaucgcccccggccagaccggcaacaucgccgacuacaacuacaagcugcccgacgacuucaccggcugcgugaucgccuggaacagcaacaaccuggacagcaaggugggcggcaacuacaacuaccuguaccggcuguuccguaagagcaaccugaagccauucgagcgggacaucagcaccgagaucuaccaggccggcagcacccccugcaacggugugaagggcuuuaacugcuacuucccccugcagagcuacggcuuccagcccaccuacggcgugggcuaccagcccuaccgggugguggugcugagcuucgagcugcugcacgcccccgccaccgugugcggcccuaaaaagagcaccaaccuggugaagaacaagugcgugaacuucaauuucaacggccugaccggcaccggcgugcugaccgagagcaacaagaaguuccugcccuuccagcaguucggccgggauaucgccgacaccaccgacgcagugcgggacccccagacccuggagauccuggacaucaccccaugcagcuucggcggcgugagcgucaucacccccggcacaaacaccagcaaccagguggccgugcuguaccagggagugaacugcaccgaggugcccguggccauccacgccgaccagcugacccccaccuggcggguguacagcaccggcagcaacguguuccagacccgggccggcugccugaucggcgccgagcacgugaacaacuccuacgagugcgacauccccaucggcgcuggcaucugcgccagcuaccagacccagaccaacagcccccggcgggcccggagcguggccagccagagcaucaucgccuacaccaugagcuuaggcgccgagaacagcguggccuacagcaacaacagcaucgcgaucccuaccaacuucaccaucagcgugaccaccgagauacugcccgugagcaugaccaagaccagcguggacuguaccauguacaucugcggcgacagcaccgagugcagcaaccugcugcugcaguacggcagcuucugcacccagcugaaccgggcccugaccggcaucgccguggagcaggacaagaacacccaagagguguucgcccaggugaagcagaucuacaagacucccccaaucaaggacuucggcggcuucaacuucagccagauccugcccgaccccagcaagcccagcaagcggagcuucaucgaggaccugcuguucaacaaggugacccuggccgacgccggcuucaucaagcaguacggcgacugccugggggauaucgccgcucgggaccugaucugcgcccagaaguucaacggccugaccgugcugcccccucugcugaccgacgagaugaucgcccaguacaccagcgcccugcuugccggcaccaucaccagcggcuggaccuucggcgccggcgcagcccugcagauccccuucgccaugcagauggccuaccgguucaacggcaucggcgugacccagaacgugcuguacgagaaccagaagcugaucgccaaccaguucaacagcgccaucggcaagauccaggacagccugagcagcaccgccagcgcccugggcaagcugcaggacguggugaaccagaacgcucaggcccugaacacccuggugaagcagcugagcagcaacuucggcgccaucagcucagugcugaaugacauccugagcaggcuggaucccccagaggccgaggugcagaucgaccggcugaucaccggccggcugcagagccugcagaccuacgugacccagcagcugauccgggccgccgagauccgggccagcgccaaccuggcagccaccaagaugagcgagugcgugcugggccagagcaagcggguggacuuuugcggcaagggcuaccaccugaugagcuucccccagagcgcuccccacggcgugguguuccuccacgugacauacguccccgcccaggagaagaacuucaccaccgcccccgccauuugccacgacggcaaggcccacuucccccgggagggaguguucgugagcaacggcacccacugguucgugacccagcggaacuucuacgagccucagaucaucaccaccgacaacaccuucgugagcggcaacugcgacguggugaucggcaucgugaacaacaccguguacgacccccugcagcccgagcuggacagcuucaaggaggagcuggacaaguacuucaagaaccacaccagcccagacguggaccugggcgacaucagcggcaucaacgccagcguggugaacauccagaaggagaucgaccggcugaacgagguggccaagaaccugaacgagagccugaucgaccugcaggagcugggcaaguacgagcaguacaucaaguggcccugguacaucuggcugggcuucaucgccggccugaucgccaucgugauggugaccaucaugcugugcugcaugaccagcugcuguagcugccugaagggcugcugcagcugcggcagcugcugcaaguucgacgaggacgacagcgagcccgugcugaagggcgugaagcugcacuacaccugaggacuaguuauaagacugacuagcccgaugggccucccaacgggcccuccuccccuccuugcaccgagauuaauagaucucaaaggcucuuuucagagccaccaaaaaaaaaaaaaaaaaaaaaaaaaaaaaaaaaaaaaaaaaaaaaaaaaaaaaaaaaaaaaaaaaaaaaaaaaaaaaaaaaaaaaaaaaaaaaaaaaaaaa

SEQ ID NO: 24465 - RNA, 4032 nt, Artificial Sequence
  SARS-CoV-2/Wuhan/WIV05/2019__EPI_ISL_402128 spike protein mRNA gc (1-1273)(K986P_V987P_K986P_V987P_L18F_D80A_D215G_L242del_A243del_ L244del_R246I_K417N_E484K_N501Y_D614G_A701V)
aggagaaagcuuaccauguucguguuccuggugcugcugccccuggugagcagccagugcgugaacuucaccacccggacccagcugcccccugccuacaccaacagcuucacccggggcguguacuaccccgacaagguguuccggagcagcgugcugcacagcacccaggaccuguuccugcccuucuucagcaacgugaccugguuccacgccauccacgugagcggcaccaacggcaccaagcgguucgccaacccagugcugcccuucaacgacggcguguacuucgccagcaccgagaagucaaacaucauccggggcuggaucuuuggcaccacccuggacagcaagacacagagccugcugaucgugaacaacgcuaccaacguggugaucaaggugugcgaguuccaguucugcaacgaccccuuccugggcguguacuaccacaagaacaacaagagcuggauggagagcgaguuccgggucuacagcagcgccaacaauugcaccuucgaguacgugagccagcccuuccugauggaccuggagggcaagcagggcaacuucaagaaccuccgggaguucguguucaagaacaucgacggcuacuucaagaucuacagcaagcacacccccaucaaccuggugcggggacugccccagggcuucagcgcccuggagccucugguggaucugcccaucggcaucaacaucaccagguuccagacccugcacaucagcuaccugacccccggcgacagcagcagcggcuggaccgccggcgccgccgcauacuacgugggcuaccugcagccacggaccuuccugcugaaguacaacgagaacggcaccaucaccgacgccguggacugcgcccuggacccccugagcgagaccaagugcacccuuaagagcuucaccguggagaagggcaucuaccagaccagcaacuuccgggugcagcccacugagagcauugugcgguuccccaacaucaccaaccugugucccuucggcgagguguucaacgccacccgguucgccagcguguacgccuggaaccggaagcggaucagcaacugcguggccgacuacagcgugcuguacaacagcgccagcuucagcaccuucaagugcuacggcgugagcccuaccaagcugaacgaccugugcuucaccaacguguacgcugacagcuucgugauccggggcgacgaggugcggcagaucgcccccggccagaccggcaacaucgccgacuacaacuacaagcugcccgacgacuucaccggcugcgugaucgccuggaacagcaacaaccuggacagcaaggugggcggcaacuacaacuaccuguaccggcuauuccguaagagcaaccugaagccauuugagcgggacaucagcaccgagaucuaccaggccgguagcacccccugcaacggcgugaagggcuucaacugcuacuucccccugcagagcuacggcuuccagcccaccuacggcgugggcuaccagcccuaccgggugguggugcugagcuucgagcugcugcacgcccccgccaccgugugcggcccuaaaaagagcaccaaccuggugaagaacaagugcgugaacuucaauuucaacggccugaccggcaccggcgugcugaccgagagcaacaagaaguuccugcccuuccagcaguucggccgggacaucgccgacaccaccgaugcagugcgggacccccagacccuggagauccuggacaucaccccaugcagcuucggcggcgugagcgucaucacccccggaacaaacaccagcaaccagguggccgugcuguaccagggcgugaacugcaccgaggugcccguggccauccacgccgaccagcugacccccaccuggcggguguacagcaccggcagcaacguguuccagacccgggccggcugccugaucggcgccgagcacgugaacaacuccuacgagugcgacauccccaucggcgcuggcaucugcgccagcuaccagacccagaccaacagcccccggcgggcccggagcguggccagccagagcaucaucgccuacaccaugagccugggcguggagaacagcguggccuacagcaacaacagcaucgccaucccuaccaacuucaccauaagcgugaccaccgagauccugcccgugagcaugaccaagaccagcguggacuguaccauguacaucugcggcgacagcaccgagugcagcaaccuguuacugcaguacggcagcuucugcacccagcugaaccgggcgcugaccggcaucgccguggagcaggacaagaacacccaagagguguucgcccaggugaagcagaucuacaagacucccccaaucaaggacuucggcggcuucaacuucagccagauccugcccgaccccagcaagcccagcaagcggagcuucaucgaggaccugcuguucaacaaggugacccuggccgacgccggcuucaucaagcaguacggggacugccugggcgacaucgccgcccgggaccugaucugcgcucagaaguucaacggccugaccgugcugcccccucugcugaccgaugagaugaucgcccaguacaccagcgcccugcuggccggcaccaucaccagcggcuggaccuucggcgccggcgccgcacugcagauccccuucgccaugcagauggccuaccgguucaacggcaucggcgugacccagaacgugcuguacgagaaccagaagcugaucgccaaccaguucaacagcgccaucggcaagauccaggacagccugagcagcaccgccagcgcccugggcaagcugcaggacguggugaaccagaacgcccaggcucugaacacccuggugaagcagcugagcagcaacuuuggcgccaucagcucagugcugaaugacauccugagccggcuggaucccccagaggccgaggugcagaucgacaggcugaucaccggccggcugcagagccugcagaccuacgugacccagcagcugauccgggccgccgagauucgggccagcgccaaccuggccgcaaccaagaugagcgagugcgugcugggccagagcaagcggguggacuucugcggcaagggcuaccaccugaugagcuucccccagagcgcuccccacggcgugguguuccugcacgucacauacgugcccgcccaggagaagaacuucaccaccgcccccgccaucugccacgacggaaaggcccacuucccccgggagggcguguucgugagcaacggcacccacugguucgugacccagcggaacuucuacgagccucagaucaucaccaccgacaacaccuucgugagcggcaacugcgacguggugaucggcaucgugaacaacaccguguacgacccccugcagcccgagcuggacagcuucaaggaggagcucgacaaguacuucaagaaccacaccagcccagacguggaccugggcgacaucagcggcaucaacgccagcguggugaacauccagaaggagaucgaccggcugaacgagguggccaagaaccugaacgagagccugaucgaccugcaggagcugggcaaguacgagcaguacaucaaguggcccugguacaucuggcugggcuucaucgccggccugaucgccaucgugauggugaccaucaugcugugcugcaugaccagcugcuguagcugccugaagggcugcugcagcugcggcagcugcugcaaguucgacgaggacgacagcgagcccgugcugaagggcgugaagcugcacuacaccugaggacuaguuauaagacugacuagcccgaugggccucccaacgggcccuccuccccuccuugcaccgagauuaauagaucucaaaggcucuuuucagagccaccaaaaaaaaaaaaaaaaaaaaaaaaaaaaaaaaaaaaaaaaaaaaaaaaaaaaaaaaaaaaaaaaaaaaaaaaaaaaaaaaaaaaaaaaaaaaaaaaaaaaa

SEQ ID NO: 24466 - RNA, 4041 nt, Artificial Sequence
  SARS-CoV-2/Wuhan/WIV05/2019__EPI_ISL_402128 spike protein mRNA gc (1-1273)(K986P_V987P_K986P_V987P_E484K_D614G)
aggagaaagcuuaccauguucguguuccuggugcugcugccccuggugagcagccagugcgugaaccugaccacccggacccagcugcccccugccuacaccaacagcuucacccggggcguguacuaccccgacaagguguuccggagcagcgugcugcacagcacccaggaccuguuccugcccuucuucagcaacgugaccugguuccacgccauccacgugagcggcaccaacggcaccaagcgguucgacaacccagugcugcccuucaacgacggcguguacuucgccagcaccgagaagucaaacaucauccggggcuggaucuucggcaccacccuggacagcaagacacagagccugcugaucgugaacaacgccaccaacguggugaucaaggugugcgaguuucaguucugcaacgaccccuuccugggcguguacuaccacaagaacaacaagagcuggauggagagcgaguuccgggucuacagcagcgcuaacaauugcaccuucgaguacgugagccagcccuuccugauggaccucgagggcaagcagggcaacuucaagaaccugcgggaguucguguucaagaacaucgauggcuacuucaagaucuacagcaagcacacccccaucaaccuggugcgggaccugccccagggauucagcgcccuggagccucugguggaccugcccaucggcaucaacaucaccagguuccagacccugcuggcccugcaccggagcuaccugacccccggcgacagcagcagcggcuggaccgccggcgccgccgcauacuacgugggcuaccugcagccacggaccuuccugcugaaguacaacgagaacggcaccaucaccgacgccguggacugcgcccuggacccccugagcgagaccaagugcacccuaaagagcuucaccguggagaagggcaucuaccagaccagcaacuuccgggugcagcccacugagagcaucgugcgguuccccaacauuaccaaccugugucccuucggcgagguguucaacgccacccgguucgccagcguguacgccuggaaccggaagcggaucagcaacugcguggccgacuacagcgugcuguacaacagcgccagcuucagcaccuucaagugcuacggcgugagcccuaccaagcugaacgaccugugcuucaccaacguguacgcugacagcuucgugauccggggcgacgaggugcggcagaucgcccccggccagaccggcaagaucgccgacuacaacuacaagcugcccgacgacuucaccggcugcgugaucgccuggaacagcaacaaccuggacagcaaggugggcggcaacuacaacuaccuguaccggcuguuccguaagagcaaccugaagccauucgagcgggacaucagcaccgagaucuaccaggccggcagcacccccugcaacggugugaagggcuuuaacugcuacuucccccugcagagcuacggcuuccagcccaccaacggcgugggcuaccagcccuaccgggugguggugcugagcuucgagcugcugcacgcccccgccaccgugugcggcccuaaaaagagcaccaaccuggugaagaacaagugcgugaacuucaauuucaacggccugaccggcaccggcgugcugaccgagagcaacaagaaguuccugcccuuccagcaguucggccgggauaucgccgacaccaccgacgcagugcgggacccccagacccuggagauccuggacaucaccccaugcagcuucggcggcgugagcgucaucacccccggcacaaacaccagcaaccagguggccgugcuguaccagggagugaacugcaccgaggugcccguggccauccacgccgaccagcugacccccaccuggcggguguacagcaccggcagcaacguguuccagacccgggccggcugccugaucggcgccgagcacgugaacaacuccuacgagugcgacauccccaucggcgcuggcaucugcgccagcuaccagacccagaccaacagcccccggcgggcccggagcguggccagccagagcaucaucgccuacaccaugagcuuaggcgccgagaacagcguggccuacagcaacaacagcaucgcgaucccuaccaacuucaccaucagcgugaccaccgagauacugcccgugagcaugaccaagaccagcguggacuguaccauguacaucugcggcgacagcaccgagugcagcaaccugcugcugcaguacggcagcuucugcacccagcugaaccgggcccugaccggcaucgccguggagcaggacaagaacacccaagagguguucgcccaggugaagcagaucuacaagacucccccaaucaaggacuucggcggcuucaacuucagccagauccugcccgaccccagcaagcccagcaagcggagcuucaucgaggaccugcuguucaacaaggugacccuggccgacgccggcuucaucaagcaguacggcgacugccugggggauaucgccgcucgggaccugaucugcgcccagaaguucaacggccugaccgugcugcccccucugcugaccgacgagaugaucgcccaguacaccagcgcccugcuugccggcaccaucaccagcggcuggaccuucggcgccggcgcagcccugcagauccccuucgccaugcagauggccuaccgguucaacggcaucggcgugacccagaacgugcuguacgagaaccagaagcugaucgccaaccaguucaacagcgccaucggcaagauccaggacagccugagcagcaccgccagcgcccugggcaagcugcaggacguggugaaccagaacgcucaggcccugaacacccuggugaagcagcugagcagcaacuucggcgccaucagcucagugcugaaugacauccugagcaggcuggaucccccagaggccgaggugcagaucgaccggcugaucaccggccggcugcagagccugcagaccuacgugacccagcagcugauccgggccgccgagauccgggccagcgccaaccuggcagccaccaagaugagcgagugcgugcugggccagagcaagcggguggacuuuugcggcaagggcuaccaccugaugagcuucccccagagcgcuccccacggcgugguguuccuccacgugacauacguccccgcccaggagaagaacuucaccaccgcccccgccauuugccacgacggcaaggcccacuucccccgggagggaguguucgugagcaacggcacccacugguucgugacccagcggaacuucuacgagccucagaucaucaccaccgacaacaccuucgugagcggcaacugcgacguggugaucggcaucgugaacaacaccguguacgacccccugcagcccgagcuggacagcuucaaggaggagcuggacaaguacuucaagaaccacaccagcccagacguggaccugggcgacaucagcggcaucaacgccagcguggugaacauccagaaggagaucgaccggcugaacgagguggccaagaaccugaacgagagccugaucgaccugcaggagcugggcaaguacgagcaguacaucaaguggcccugguacaucuggcugggcuucaucgccggccugaucgccaucgugauggugaccaucaugcugugcugcaugaccagcugcuguagcugccugaagggcugcugcagcugcggcagcugcugcaaguucgacgaggacgacagcgagcccgugcugaagggcgugaagcugcacuacaccugaggacuaguuauaagacugacuagcccgaugggccucccaacgggcccuccuccccuccuugcaccgagauuaauagaucucaaaggcucuuuucagagccaccaaaaaaaaaaaaaaaaaaaaaaaaaaaaaaaaaaaaaaaaaaaaaaaaaaaaaaaaaaaaaaaaaaaaaaaaaaaaaaaaaaaaaaaaaaaaaaaaaaaaa

SEQ ID NO: 24467 - RNA, 4041 nt, Artificial Sequence
  SARS-CoV-2/Wuhan/WIV05/2019__EPI_ISL_402128 spike protein mRNA gc (1-1273)(K986P_V987P_K986P_V987P_L18F_T20N_P26S_D138Y_R190S_K417T _E484K_N501Y_D614G_H655Y_T1027I)
aggagaaagcuuaccauguucguguuccuggugcugcugccccuggugagcagccagugcgugaacuucaccaaccggacccagcugcccagcgccuacaccaacagcuucacccggggcguguacuacccugacaagguguuccggagcagcgugcugcacagcacccaggaccuguuccugcccuucuucagcaacgugaccugguuccacgccauccacgugagcggcaccaacggcaccaagcgguucgacaaccccgugcugccauucaacgacggcguguacuucgccagcaccgagaagucaaacaucauccggggcuggaucuuuggcaccacccuggacagcaagacccagagccugcugaucgugaacaacgccacaaacguggugaucaaggugugcgaguuccaguucugcaacuaccccuuccugggcguguacuaccacaagaacaacaagagcuggauggagagcgaguuccgggucuacagcagcgcuaauaacugcaccuucgaguacgugagccagcccuuccugauggaccuggagggcaagcagggcaacuucaagaaccucagcgaguucguguucaagaacaucgacggcuacuucaagaucuacagcaagcacacccccaucaaccuggugcgggaucugccccagggauucagcgcccuggagccccugguggaccugccuaucggcaucaacaucacccgguuccagacccugcuggcccugcacaggagcuaccugacccccggcgacagcagcagcggcuggaccgccggcgccgccgcauacuacgugggcuaccugcagccccggaccuuccugcugaaguacaacgagaacggcaccaucaccgacgccguggacugcgcccuggacccacugagcgagaccaagugcacccuaaagagcuucaccguggagaagggcaucuaccagaccagcaacuuccgggugcagcccaccgagagcaucgugcgguuccccaacauuacuaaccugugucccuucggcgagguguucaacgccacccgguucgccagcguguacgccuggaaccggaagcggaucagcaacugcguggccgacuacagcgugcuguacaacagcgccagcuucagcaccuucaagugcuacggcgugagccccaccaagcugaacgaccugugcuucaccaacguguacgcugacagcuucgugauccggggcgacgaggugcggcagaucgccccuggccagaccggcaccaucgccgacuacaacuacaagcugcccgacgacuucaccggcugcgugaucgccuggaacagcaacaaccuggacagcaaggugggcggcaacuacaacuaccuguaccggcuguuccguaagagcaaccugaagcccuuugagcgggacaucagcaccgagaucuaccaggccggcagcaccccaugcaacggugugaagggcuucaacugcuacuucccccugcagagcuacggcuuccagcccaccuacggcgugggcuaccagcccuaccgggugguggugcugagcuucgagcugcugcacgcccccgccaccgugugcggccccaaaaagagcaccaaccuggugaagaacaagugcgugaacuucaauuucaacggccugaccggcaccggcgugcugaccgagagcaacaagaaguuccugccuuuccagcaguucggccgggacaucgccgauaccaccgacgcagugcgggacccccagacccuggagauccuggacaucacccccugcagcuucggcggcgugagcgucaucaccccaggcacaaacaccagcaaccagguggccgugcuguaccagggagugaacugcaccgaggugcccguggccauccacgccgaccagcugacccccaccuggcggguguacuccaccggcagcaacguguuccagacccgggccggcugccugaucggcgccgaguacgugaacaacagcuacgagugcgacauccccaucggcgcuggcaucugcgccagcuaccagacccagaccaacagcccccggcgggcccggagcguggccagccagagcaucaucgccuacaccaugagccugggcgccgagaacagcguggccuacagcaacaacagcaucgcgauccccaccaacuucaccaucagcgugaccaccgagauauuaccugugagcaugaccaagaccagcguggacuguaccauguacaucugcggcgacagcaccgagugcagcaaccugcugcugcaguacggcagcuucugcacccagcugaaccgggcccugaccggcaucgccguggagcaggacaagaacacccaagagguguucgcccaggugaagcagaucuacaagacuccacccaucaaggacuucggcggcuucaacuucagccagauccugcccgaccccagcaagcccagcaagcggagcuucaucgaggaccugcuguucaacaaggugacccuggccgacgccggcuucaucaagcaguacggcgacugccugggggacaucgccgcucgggaucugaucugcgcccagaaguucaacggccugaccgugcugccuccccugcugaccgacgagaugaucgcccaguacaccagcgcccugcuggccggcaccaucaccagcggcuggaccuucggcgccggcgcagcccuucagauccccuucgccaugcagauggccuaccgguucaacggcaucggcgugacccagaacgugcuguacgagaaccagaagcugaucgccaaccaguucaacagcgccaucggcaagauccaggacagccugagcagcaccgccagcgcccugggcaagcugcaggacguggugaaccagaacgcucaggcccugaacacccuggugaagcagcugagcucaaacuuuggcgccaucagcagcgugcugaaugacauccugagccggcuggacccacccgaggccgaggugcagaucgacaggcugaucaccggccggcugcagagccugcagaccuacgugacccagcagcugauccgggccgccgagauccgggccagcgccaaccuggcagccauuaagaugagcgagugcgugcugggccagagcaagcggguggacuucugcggcaagggcuaccaccugaugagcuucccccagagcgcuccccacggcgugguguuccugcacgugaccuacguccccgcccaggagaagaacuucacaaccgcccccgccaucugccacgacggcaaggcccacuucccccgggagggaguguucgugagcaacggcacccacugguucgugacccagcggaacuucuacgagccccagaucaucaccaccgacaacaccuucgugagcggcaacugcgacguggugaucggcaucgugaacaacaccguguacgacccucuccagcccgagcuggacagcuucaaggaggagcuggacaaguacuucaagaaccacaccagccccgacguggaccugggcgauaucagcggcaucaacgccagcguggugaacauccagaaggagaucgaccggcugaacgagguggccaagaaccugaacgagagccugaucgaccugcaggagcugggcaaguacgagcaguacaucaaguggccaugguacaucuggcugggcuucaucgccggccugaucgccaucgugauggugaccaucaugcugugcugcaugaccagcugcuguagcugccugaagggcugcugcagcugcggcagcugcugcaaguucgacgaggacgacagcgagcccgugcugaagggcgugaagcugcacuacaccugaggacuaguuauaagacugacuagcccgaugggccucccaacgggcccuccuccccuccuugcaccgagauuaauagaucucaaaggcucuuuucagagccaccaaaaaaaaaaaaaaaaaaaaaaaaaaaaaaaaaaaaaaaaaaaaaaaaaaaaaaaaaaaaaaaaaaaaaaaaaaaaaaaaaaaaaaaaaaaaaaaaaaaaa

SEQ ID NO: 24468 - RNA, 4041 nt, Artificial Sequence
  SARS-CoV-2/Wuhan/WIV05/2019__EPI_ISL_402128 spike protein mRNA gc (1-1273)(K986P_V987P_K986P_V987P_S13I_W152C_L452R_D614G)
aggagaaagcuuaccauguucguguuccuggugcugcugccccuggugagcauccagugcgugaaccugaccacccggacccagcugcccccugccuacaccaacagcuucacccggggcguguacuaccccgacaagguguuccggagcagcgugcugcacagcacccaggaccuguuccugcccuucuucagcaacgugaccugguuccacgccauccacgugagcggcaccaacggcaccaagcgguucgacaacccagugcugcccuucaacgacggcguguacuucgccagcaccgagaagucaaacaucauccggggcuggaucuucggcaccacccuggacagcaagacacagagccugcugaucgugaacaacgccaccaacguggugaucaaggugugcgaguuucaguucugcaacgaccccuuccugggcguguacuaccacaagaacaacaagagcugcauggagagcgaguuccgggucuacagcagcgcuaacaauugcaccuucgaguacgugagccagcccuuccugauggaccucgagggcaagcagggcaacuucaagaaccugcgggaguucguguucaagaacaucgauggcuacuucaagaucuacagcaagcacacccccaucaaccuggugcgggaccugccccagggauucagcgcccuggagccucugguggaccugcccaucggcaucaacaucaccagguuccagacccugcuggcccugcaccggagcuaccugacccccggcgacagcagcagcggcuggaccgccggcgccgccgcauacuacgugggcuaccugcagccacggaccuuccugcugaaguacaacgagaacggcaccaucaccgacgccguggacugcgcccuggacccccugagcgagaccaaguguacccuaaagagcuucaccguggagaagggcaucuaccagaccagcaacuuccgggugcagcccacugagagcauugugcgguuccccaacaucaccaaccugugccccuucggcgagguguucaacgccacccgguucgccagcguguacgccuggaaccggaagcggaucagcaacugcguggccgacuacagcgugcuguacaacagcgccagcuucagcaccuucaagugcuacggcgugagcccuaccaagcugaacgaccugugcuucaccaacguguacgcugacagcuucgugauccggggcgacgaggugcggcagaucgcccccggccagaccggcaagaucgccgacuacaacuacaagcugcccgacgacuucaccggcugcgugaucgccuggaacagcaacaaccuggacagcaaggugggcggcaacuacaacuaccgguaccggcuguuccguaagagcaaccugaagccauucgagcgggacaucagcaccgagaucuaccaggccggcagcacccccugcaacgguguggagggcuuuaacugcuacuucccccugcagagcuacggcuuccagcccaccaacggcgugggcuaccagcccuaccgggugguggugcugagcuucgagcugcugcacgcccccgccaccgugugcggcccuaaaaagagcaccaaccuggugaagaacaagugcgugaacuucaauuucaacggccugaccggcaccggcgugcugaccgagagcaacaagaaguuccugcccuuccagcaguucggccgggauaucgccgacaccaccgacgcagugcgggacccccagacccuggagauccuggacaucaccccaugcagcuucggcggcgugagcgucaucacccccggcacaaacaccagcaaccagguggccgugcuguaccagggagugaacugcaccgaggugcccguggccauccacgccgaccagcugacccccaccuggcggguguacagcaccggcagcaacguguuccagacccgggccggcugccugaucggcgccgagcacgugaacaacagcuacgagugcgacauccccaucggcgcuggcaucugugccuccuaccagacccagaccaacagcccccggcgggcccggagcguggccagccagagcaucaucgccuacaccaugagccugggcgccgagaacagcguggccuacagcaacaacagcaucgcgaucccuaccaacuucaccauaagcgugaccaccgagaucuuacccgugagcaugaccaagaccagcguggacugcaccauguacaucugcggcgacagcaccgagugcagcaaccugcugcugcaguacggcagcuucugcacccagcugaaccgggcccugaccggcaucgccguggagcaggacaagaacacccaagagguguucgcccaggugaagcagaucuacaagacucccccaaucaaggacuucggcggcuucaacuucagccagauccugcccgaccccagcaagcccagcaagcggagcuucaucgaggaccugcuguucaacaaggugacccuggccgacgccggcuucaucaagcaguacggcgacugccugggggauaucgccgcucgggaccugaucugcgcccagaaguucaacggccugaccgugcugcccccucugcugaccgacgagaugaucgcccaguacaccagcgcccugcuggccggcaccaucaccagcggcuggaccuucggcgccggcgcagcccuucagauccccuucgccaugcagauggccuacagguucaacggcaucggcgugacccagaacgugcuguacgagaaccagaagcugaucgccaaccaguucaacagcgccaucggcaagauccaggacagccugagcagcaccgccagcgcccugggcaagcugcaggacguggugaaccagaacgcucaggcccugaacacccuggugaagcagcugagcagcaacuucggcgccaucagcagcgugcugaaugacauccugucacggcuggaucccccagaggccgaggugcagaucgaccggcugaucaccggccggcugcagagccugcagaccuacgugacccagcagcugauccgggccgccgagauucgggccagcgccaaccuggcagccaccaagaugagcgagugcgugcugggccagagcaagcggguggacuuuugcggcaagggcuaccaccugaugagcuucccccagagcgcuccccacggcgugguguuccugcacgugacauacguccccgcccaggagaagaacuucaccaccgcccccgccaucugccacgacggcaaggcccacuucccccgggagggaguguucgugagcaacggcacccacugguucgugacccagcggaacuucuacgagccucagaucaucaccaccgacaacaccuucgugagcggcaacugcgacguggugaucggcaucgugaacaacaccguguacgacccccuccagcccgagcuggacagcuucaaggaggagcuggacaaguacuucaagaaccacaccagcccagacguggaccugggcgacaucagcggcaucaacgccagcguggugaacauccagaaggagaucgaccggcugaacgagguggccaagaaccugaacgagagccugaucgaccugcaggagcugggcaaguacgagcaguacaucaaguggcccugguacaucuggcugggcuucaucgccggccugaucgccaucgugauggugaccaucaugcugugcugcaugaccagcuguugcagcugccugaagggcugcugcagcugcggcagcugcugcaaguucgacgaggacgacagcgagcccgugcugaagggcgugaagcugcacuacaccugaggacuaguuauaagacugacuagcccgaugggccucccaacgggcccuccuccccuccuugcaccgagauuaauagaucucaaaggcucuuuucagagccaccaaaaaaaaaaaaaaaaaaaaaaaaaaaaaaaaaaaaaaaaaaaaaaaaaaaaaaaaaaaaaaaaaaaaaaaaaaaaaaaaaaaaaaaaaaaaaaaaaaaaa

SEQ ID NO: 24469 - RNA, 4041 nt, Artificial Sequence
  SARS-CoV-2/Wuhan/WIV05/2019__EPI_ISL_402128 spike protein mRNA gc mod (1-1273)(K986P_V987P)
aggagaaagcuuaccauguucguguuucuggugcugcugccccugguguccagccagugugugaaccugaccaccagaacacagcugccuccagccuacaccaacagcuucaccagaggcguguacuaccccgacaagguguucagauccagcgugcugcacucuacccaggaccuguuccugccuuucuucagcaacgugaccugguuccacgccauccacguguccggcaccaauggcaccaagagauucgacaaccccgugcugcccuucaacgacgggguguacuuugccagcaccgagaaguccaacaucaucagaggcuggaucuucggcaccacacuggacagcaagacccagagccugcugaucgugaacaacgccaccaacguggucaucaaagugugcgaguuccaguucugcaacgaccccuuccugggcgucuacuaccacaagaacaacaagagcuggauggaaagcgaguuccggguguacagcagcgccaacaacugcaccuucgaguacgugucccagccuuuccugauggaccuggaaggcaagcagggcaacuucaagaaccugcgcgaguucguguucaagaacaucgacggcuacuucaaaaucuacagcaagcacaccccuaucaaccucgugcgggaucugccucagggcuucucugcucuggaaccccugguggaucugcccaucggcaucaacaucacccgguuucagacacugcuggcccugcacagaagcuaccugacaccuggcgauagcagcagcggauggacagcuggugccgccgcuuacuaugugggcuaccugcagccuagaaccuuccugcugaaguacaacgagaacggcaccaucaccgacgccguggauugugcucuggauccucugagcgagacaaagugcacccugaaguccuucaccguggaaaagggcaucuaccagaccagcaacuuccgggugcagcccaccgaauccaucgugcgguuccccaauaucaccaaucugugccccuucggcgagguguucaaugccaccagauucgccucuguguacgccuggaaccggaagcggaucagcaauugcguggccgacuacuccgugcuguacaacuccgccagcuucagcaccuucaagugcuacggcguguccccuaccaagcugaacgaccugugcuucacaaacguguacgccgacagcuucgugauccggggagaugaagugcggcagauugccccuggacagacaggcaagaucgccgacuacaacuacaagcugcccgacgacuucaccggcugugugauugccuggaacagcaacaaccuggacuccaaagucggcggcaacuacaauuaccuguaccggcuguuccggaaguccaaucugaagcccuucgagcgggacaucagcaccgaaaucuaucaggccggcagcaccccuugcaacggcguggaaggcuucaacugcuacuucccacugcaguccuacggcuuucagcccacaaauggcgugggcuaucagcccuacagagugguggugcugagcuucgaacugcugcaugcuccugccacagugugcggcccuaagaaaagcaccaaucucgugaagaacaaaugcgugaacuucaacuucaacggccugaccggcaccggcgugcugacagagagcaacaagaaguuccugccauuccagcaguuuggccgggauaucgccgauaccacagacgccguuagagauccccagacacuggaaauccuggacaucaccccaugcagcuucggcggagugucugugaucaccccuggcaccaacaccagcaaucagguggcagugcuguaccaggacgugaacuguaccgaagugcccguggccauucacgccgaucagcugacaccuacauggcggguguacuccaccggcagcaauguguuucagaccagagccggcugucugaucggagccgagcacgugaacaauagcuacgagugcgacauccccaucggcgcuggcaucugugccagcuaccagacacagacaaacagccccagacgggcuagaagcguggccagccagagcaucauugccuacacaaugucucugggcgccgagaacagcguggccuacuccaacaacucuaucgcuauccccaccaacuucaccaucagcgugaccaccgagauccugccuguguccaugaccaagaccagcguggacugcaccauguacaucugcggcgauuccaccgagugcuccaaccugcugcugcaguacggcagcuucugcacccagcugaauagagcccugacagggaucgccguggaacaggacaagaacacccaagagguguucgcccaagugaagcaaaucuacaagaccccuccuaucaaggacuucggcggcuucaauuucagccagauucugcccgauccuagcaagcccagcaagcggagcuucaucgaggaccugcuguucaacaaagugacacuggccgacgccggcuucaucaagcaguauggcgauugucugggcgacauugccgccagggaucugauuugcgcccagaaguuuaacggacugacagugcugccuccucugcugaccgaugagaugaucgcccaguacacaucugcccugcuggccggcacaaucacaagcggcuggacauuuggagcuggcgccgcucugcagauccccuuugcuaugcagauggccuaccgguucaacggcaucggagugacccagaaugugcuguacgagaaccagaagcugaucgccaaccaguucaacagcgccaucggcaagauccaggacagccugagcagcacagcaagcgcccugggaaagcugcaggacguggucaaccagaaugcccaggcacugaacacccuggucaagcagcuguccuccaacuucggcgccaucagcucugugcugaacgauauccugagcagacuggacccuccugaggccgaggugcagaucgacagacugaucacaggcagacugcagagccuccagacauacgugacccagcagcugaucagagccgccgagauuagagccucugccaaucuggccgccaccaagaugucugagugugugcugggccagagcaagagaguggacuuuugcggcaagggcuaccaccugaugagcuucccucagucugccccucacggcgugguguuucugcacgugacauaugugcccgcucaagagaagaauuucaccaccgcuccagccaucugccacgacggcaaagcccacuuuccuagagaaggcguguucguguccaacggcacccauugguucgugacacagcggaacuucuacgagccccagaucaucaccaccgacaacaccuucgugucuggcaacugcgacguugugaucggcauugugaacaauaccguguacgacccucugcagcccgagcuggacagcuucaaagaggaacuggacaaguacuuuaagaaccacacaagccccgacguggaccugggcgauaucagcggaaucaaugccagcgucgugaacauccagaaagagaucgaccggcugaacgagguggccaagaaucugaacgagagccugaucgaccugcaagaacuggggaaguacgagcaguacaucaaguggcccugguacaucuggcugggcuuuaucgccggacugauugccaucgugauggucacaaucaugcuguguugcaugaccagcugcuguagcugccugaagggcuguuguagcuguggcagcugcugcaaguucgacgaggacgauucugagcccgugcugaagggcgugaaacugcacuacaccugaggacuaguuauaagacugacuagcccgaugggccucccaacgggcccuccuccccuccuugcaccgagauuaauagaucucaaaggcucuuuucagagccaccaaaaaaaaaaaaaaaaaaaaaaaaaaaaaaaaaaaaaaaaaaaaaaaaaaaaaaaaaaaaaaaaaaaaaaaaaaaaaaaaaaaaaaaaaaaaaaaaaaaaa

SEQ ID NO: 24470 - RNA, 4041 nt, Artificial Sequence
  SARS-CoV-2/Wuhan/WIV05/2019__EPI_ISL_402128 spike protein mRNA gc mod (1-1273)(K986P_V987P_ D614G)
aggagaaagcuuaccauguucguguuucuggugcugcugccccugguguccagccagugugugaaccugaccaccagaacacagcugccuccagccuacaccaacagcuucaccagaggcguguacuaccccgacaagguguucagauccagcgugcugcacucuacccaggaccuguuccugccuuucuucagcaacgugaccugguuccacgccauccacguguccggcaccaauggcaccaagagauucgacaaccccgugcugcccuucaacgacgggguguacuuugccagcaccgagaaguccaacaucaucagaggcuggaucuucggcaccacacuggacagcaagacccagagccugcugaucgugaacaacgccaccaacguggucaucaaagugugcgaguuccaguucugcaacgaccccuuccugggcgucuacuaccacaagaacaacaagagcuggauggaaagcgaguuccggguguacagcagcgccaacaacugcaccuucgaguacgugucccagccuuuccugauggaccuggaaggcaagcagggcaacuucaagaaccugcgcgaguucguguucaagaacaucgacggcuacuucaaaaucuacagcaagcacaccccuaucaaccucgugcgggaucugccucagggcuucucugcucuggaaccccugguggaucugcccaucggcaucaacaucacccgguuucagacacugcuggcccugcacagaagcuaccugacaccuggcgauagcagcagcggauggacagcuggugccgccgcuuacuaugugggcuaccugcagccuagaaccuuccugcugaaguacaacgagaacggcaccaucaccgacgccguggauugugcucuggauccucugagcgagacaaagugcacccugaaguccuucaccguggaaaagggcaucuaccagaccagcaacuuccgggugcagcccaccgaauccaucgugcgguuccccaauaucaccaaucugugccccuucggcgagguguucaaugccaccagauucgccucuguguacgccuggaaccggaagcggaucagcaauugcguggccgacuacuccgugcuguacaacuccgccagcuucagcaccuucaagugcuacggcguguccccuaccaagcugaacgaccugugcuucacaaacguguacgccgacagcuucgugauccggggagaugaagugcggcagauugccccuggacagacaggcaagaucgccgacuacaacuacaagcugcccgacgacuucaccggcugugugauugccuggaacagcaacaaccuggacuccaaagucggcggcaacuacaauuaccuguaccggcuguuccggaaguccaaucugaagcccuucgagcgggacaucagcaccgaaaucuaucaggccggcagcaccccuugcaacggcguggaaggcuucaacugcuacuucccacugcaguccuacggcuuucagcccacaaauggcgugggcuaucagcccuacagagugguggugcugagcuucgaacugcugcaugcuccugccacagugugcggcccuaagaaaagcaccaaucucgugaagaacaaaugcgugaacuucaacuucaacggccugaccggcaccggcgugcugacagagagcaacaagaaguuccugccauuccagcaguuuggccgggauaucgccgauaccacagacgccguuagagauccccagacacuggaaauccuggacaucaccccaugcagcuucggcggagugucugugaucaccccuggcaccaacaccagcaaucagguggcagugcuguaccagggcgugaacuguaccgaagugcccguggccauucacgccgaucagcugacaccuacauggcggguguacuccaccggcagcaauguguuucagaccagagccggcugucugaucggagccgagcacgugaacaauagcuacgagugcgacauccccaucggcgcuggcaucugugccagcuaccagacacagacaaacagccccagacgggcuagaagcguggccagccagagcaucauugccuacacaaugucucugggcgccgagaacagcguggccuacuccaacaacucuaucgcuauccccaccaacuucaccaucagcgugaccaccgagauccugccuguguccaugaccaagaccagcguggacugcaccauguacaucugcggcgauuccaccgagugcuccaaccugcugcugcaguacggcagcuucugcacccagcugaauagagcccugacagggaucgccguggaacaggacaagaacacccaagagguguucgcccaagugaagcaaaucuacaagaccccuccuaucaaggacuucggcggcuucaauuucagccagauucugcccgauccuagcaagcccagcaagcggagcuucaucgaggaccugcuguucaacaaagugacacuggccgacgccggcuucaucaagcaguauggcgauugucugggcgacauugccgccagggaucugauuugcgcccagaaguuuaacggacugacagugcugccuccucugcugaccgaugagaugaucgcccaguacacaucugcccugcuggccggcacaaucacaagcggcuggacauuuggagcuggcgccgcucugcagauccccuuugcuaugcagauggccuaccgguucaacggcaucggagugacccagaaugugcuguacgagaaccagaagcugaucgccaaccaguucaacagcgccaucggcaagauccaggacagccugagcagcacagcaagcgcccugggaaagcugcaggacguggucaaccagaaugcccaggcacugaacacccuggucaagcagcuguccuccaacuucggcgccaucagcucugugcugaacgauauccugagcagacuggacccuccugaggccgaggugcagaucgacagacugaucacaggcagacugcagagccuccagacauacgugacccagcagcugaucagagccgccgagauuagagccucugccaaucuggccgccaccaagaugucugagugugugcugggccagagcaagagaguggacuuuugcggcaagggcuaccaccugaugagcuucccucagucugccccucacggcgugguguuucugcacgugacauaugugcccgcucaagagaagaauuucaccaccgcuccagccaucugccacgacggcaaagcccacuuuccuagagaaggcguguucguguccaacggcacccauugguucgugacacagcggaacuucuacgagccccagaucaucaccaccgacaacaccuucgugucuggcaacugcgacguugugaucggcauugugaacaauaccguguacgacccucugcagcccgagcuggacagcuucaaagaggaacuggacaaguacuuuaagaaccacacaagccccgacguggaccugggcgauaucagcggaaucaaugccagcgucgugaacauccagaaagagaucgaccggcugaacgagguggccaagaaucugaacgagagccugaucgaccugcaagaacuggggaaguacgagcaguacaucaaguggcccugguacaucuggcugggcuuuaucgccggacugauugccaucgugauggucacaaucaugcuguguugcaugaccagcugcuguagcugccugaagggcuguuguagcuguggcagcugcugcaaguucgacgaggacgauucugagcccgugcugaagggcgugaaacugcacuacaccugaggacuaguuauaagacugacuagcccgaugggccucccaacgggcccuccuccccuccuugcaccgagauuaauagaucucaaaggcucuuuucagagccaccaaaaaaaaaaaaaaaaaaaaaaaaaaaaaaaaaaaaaaaaaaaaaaaaaaaaaaaaaaaaaaaaaaaaaaaaaaaaaaaaaaaaaaaaaaaaaaaaaaaaa

SEQ ID NO: 24471 - RNA, 4041 nt, Artificial Sequence
  SARS-CoV-2/Wuhan/WIV05/2019__EPI_ISL_402128 spike protein mRNA gc mod (1-1273)(K986P_V987P_A222V_D614G)
aggagaaagcuuaccauguucguguuucuggugcugcugccccugguguccagccagugugugaaccugaccaccagaacacagcugccuccagccuacaccaacagcuucaccagaggcguguacuaccccgacaagguguucagauccagcgugcugcacucuacccaggaccuguuccugccuuucuucagcaacgugaccugguuccacgccauccacguguccggcaccaauggcaccaagagauucgacaaccccgugcugcccuucaacgacgggguguacuuugccagcaccgagaaguccaacaucaucagaggcuggaucuucggcaccacacuggacagcaagacccagagccugcugaucgugaacaacgccaccaacguggucaucaaagugugcgaguuccaguucugcaacgaccccuuccugggcgucuacuaccacaagaacaacaagagcuggauggaaagcgaguuccggguguacagcagcgccaacaacugcaccuucgaguacgugucccagccuuuccugauggaccuggaaggcaagcagggcaacuucaagaaccugcgcgaguucguguucaagaacaucgacggcuacuucaaaaucuacagcaagcacaccccuaucaaccucgugcgggaucugccucagggcuucucugugcuggaaccccugguggaucugcccaucggcaucaacaucacccgguuucagacacugcuggcccugcacagaagcuaccugacaccuggcgauagcagcagcggauggacagcuggugccgccgcuuacuaugugggcuaccugcagccuagaaccuuccugcugaaguacaacgagaacggcaccaucaccgacgccguggauugugcucuggauccucugagcgagacaaagugcacccugaaguccuucaccguggaaaagggcaucuaccagaccagcaacuuccgggugcagcccaccgaauccaucgugcgguuccccaauaucaccaaucugugccccuucggcgagguguucaaugccaccagauucgccucuguguacgccuggaaccggaagcggaucagcaauugcguggccgacuacuccgugcuguacaacuccgccagcuucagcaccuucaagugcuacggcguguccccuaccaagcugaacgaccugugcuucacaaacguguacgccgacagcuucgugauccggggagaugaagugcggcagauugccccuggacagacaggcaagaucgccgacuacaacuacaagcugcccgacgacuucaccggcugugugauugccuggaacagcaacaaccuggacuccaaagucggcggcaacuacaauuaccuguaccggcuguuccggaaguccaaucugaagcccuucgagcgggacaucagcaccgaaaucuaucaggccggcagcaccccuugcaacggcguggaaggcuucaacugcuacuucccacugcaguccuacggcuuucagcccacaaauggcgugggcuaucagcccuacagagugguggugcugagcuucgaacugcugcaugcuccugccacagugugcggcccuaagaaaagcaccaaucucgugaagaacaaaugcgugaacuucaacuucaacggccugaccggcaccggcgugcugacagagagcaacaagaaguuccugccauuccagcaguuuggccgggauaucgccgauaccacagacgccguuagagauccccagacacuggaaauccuggacaucaccccaugcagcuucggcggagugucugugaucaccccuggcaccaacaccagcaaucagguggcagugcuguaccagggcgugaacuguaccgaagugcccguggccauucacgccgaucagcugacaccuacauggcggguguacuccaccggcagcaauguguuucagaccagagccggcugucugaucggagccgagcacgugaacaauagcuacgagugcgacauccccaucggcgcuggcaucugugccagcuaccagacacagacaaacagccccagacgggcuagaagcguggccagccagagcaucauugccuacacaaugucucugggcgccgagaacagcguggccuacuccaacaacucuaucgcuauccccaccaacuucaccaucagcgugaccaccgagauccugccuguguccaugaccaagaccagcguggacugcaccauguacaucugcggcgauuccaccgagugcuccaaccugcugcugcaguacggcagcuucugcacccagcugaauagagcccugacagggaucgccguggaacaggacaagaacacccaagagguguucgcccaagugaagcaaaucuacaagaccccuccuaucaaggacuucggcggcuucaauuucagccagauucugcccgauccuagcaagcccagcaagcggagcuucaucgaggaccugcuguucaacaaagugacacuggccgacgccggcuucaucaagcaguauggcgauugucugggcgacauugccgccagggaucugauuugcgcccagaaguuuaacggacugacagugcugccuccucugcugaccgaugagaugaucgcccaguacacaucugcccugcuggccggcacaaucacaagcggcuggacauuuggagcuggcgccgcucugcagauccccuuugcuaugcagauggccuaccgguucaacggcaucggagugacccagaaugugcuguacgagaaccagaagcugaucgccaaccaguucaacagcgccaucggcaagauccaggacagccugagcagcacagcaagcgcccugggaaagcugcaggacguggucaaccagaaugcccaggcacugaacacccuggucaagcagcuguccuccaacuucggcgccaucagcucugugcugaacgauauccugagcagacuggacccuccugaggccgaggugcagaucgacagacugaucacaggcagacugcagagccuccagacauacgugacccagcagcugaucagagccgccgagauuagagccucugccaaucuggccgccaccaagaugucugagugugugcugggccagagcaagagaguggacuuuugcggcaagggcuaccaccugaugagcuucccucagucugccccucacggcgugguguuucugcacgugacauaugugcccgcucaagagaagaauuucaccaccgcuccagccaucugccacgacggcaaagcccacuuuccuagagaaggcguguucguguccaacggcacccauugguucgugacacagcggaacuucuacgagccccagaucaucaccaccgacaacaccuucgugucuggcaacugcgacguugugaucggcauugugaacaauaccguguacgacccucugcagcccgagcuggacagcuucaaagaggaacuggacaaguacuuuaagaaccacacaagccccgacguggaccugggcgauaucagcggaaucaaugccagcgucgugaacauccagaaagagaucgaccggcugaacgagguggccaagaaucugaacgagagccugaucgaccugcaagaacuggggaaguacgagcaguacaucaaguggcccugguacaucuggcugggcuuuaucgccggacugauugccaucgugauggucacaaucaugcuguguugcaugaccagcugcuguagcugccugaagggcuguuguagcuguggcagcugcugcaaguucgacgaggacgauucugagcccgugcugaagggcgugaaacugcacuacaccugaggacuaguuauaagacugacuagcccgaugggccucccaacgggcccuccuccccuccuugcaccgagauuaauagaucucaaaggcucuuuucagagccaccaaaaaaaaaaaaaaaaaaaaaaaaaaaaaaaaaaaaaaaaaaaaaaaaaaaaaaaaaaaaaaaaaaaaaaaaaaaaaaaaaaaaaaaaaaaaaaaaaaaaa

SEQ ID NO: 24472 - RNA, 4041 nt, Artificial Sequence
  SARS-CoV-2/Wuhan/WIV05/2019__EPI_ISL_402128 spike protein mRNA gc mod (1-1273)(K986P_V987P_N439K_D614G)
aggagaaagcuuaccauguucguguuucuggugcugcugccccugguguccagccagugugugaaccugaccaccagaacacagcugccuccagccuacaccaacagcuucaccagaggcguguacuaccccgacaagguguucagauccagcgugcugcacucuacccaggaccuguuccugccuuucuucagcaacgugaccugguuccacgccauccacguguccggcaccaauggcaccaagagauucgacaaccccgugcugcccuucaacgacgggguguacuuugccagcaccgagaaguccaacaucaucagaggcuggaucuucggcaccacacuggacagcaagacccagagccugcugaucgugaacaacgccaccaacguggucaucaaagugugcgaguuccaguucugcaacgaccccuuccugggcgucuacuaccacaagaacaacaagagcuggauggaaagcgaguuccggguguacagcagcgccaacaacugcaccuucgaguacgugucccagccuuuccugauggaccuggaaggcaagcagggcaacuucaagaaccugcgcgaguucguguucaagaacaucgacggcuacuucaaaaucuacagcaagcacaccccuaucaaccucgugcgggaucugccucagggcuucucugcucuggaaccccugguggaucugcccaucggcaucaacaucacccgguuucagacacugcuggcccugcacagaagcuaccugacaccuggcgauagcagcagcggauggacagcuggugccgccgcuuacuaugugggcuaccugcagccuagaaccuuccugcugaaguacaacgagaacggcaccaucaccgacgccguggauugugcucuggauccucugagcgagacaaagugcacccugaaguccuucaccguggaaaagggcaucuaccagaccagcaacuuccgggugcagcccaccgaauccaucgugcgguuccccaauaucaccaaucugugccccuucggcgagguguucaaugccaccagauucgccucuguguacgccuggaaccggaagcggaucagcaauugcguggccgacuacuccgugcuguacaacuccgccagcuucagcaccuucaagugcuacggcguguccccuaccaagcugaacgaccugugcuucacaaacguguacgccgacagcuucgugauccggggagaugaagugcggcagauugccccuggacagacaggcaagaucgccgacuacaacuacaagcugcccgacgacuucaccggcugugugauugccuggaacagcaagaaccuggacuccaaagucggcggcaacuacaauuaccuguaccggcuguuccggaaguccaaucugaagcccuucgagcgggacaucagcaccgaaaucuaucaggccggcagcaccccuugcaacggcguggaaggcuucaacugcuacuucccacugcaguccuacggcuuucagcccacaaauggcgugggcuaucagcccuacagagugguggugcugagcuucgaacugcugcaugcuccugccacagugugcggcccuaagaaaagcaccaaucucgugaagaacaaaugcgugaacuucaacuucaacggccugaccggcaccggcgugcugacagagagcaacaagaaguuccugccauuccagcaguuuggccgggauaucgccgauaccacagacgccguuagagauccccagacacuggaaauccuggacaucaccccaugcagcuucggcggagugucugugaucaccccuggcaccaacaccagcaaucagguggcagugcuguaccagggcgugaacuguaccgaagugcccguggccauucacgccgaucagcugacaccuacauggcggguguacuccaccggcagcaauguguuucagaccagagccggcugucugaucggagccgagcacgugaacaauagcuacgagugcgacauccccaucggcgcuggcaucugugccagcuaccagacacagacaaacagccccagacgggcuagaagcguggccagccagagcaucauugccuacacaaugucucugggcgccgagaacagcguggccuacuccaacaacucuaucgcuauccccaccaacuucaccaucagcgugaccaccgagauccugccuguguccaugaccaagaccagcguggacugcaccauguacaucugcggcgauuccaccgagugcuccaaccugcugcugcaguacggcagcuucugcacccagcugaauagagcccugacagggaucgccguggaacaggacaagaacacccaagagguguucgcccaagugaagcaaaucuacaagaccccuccuaucaaggacuucggcggcuucaauuucagccagauucugcccgauccuagcaagcccagcaagcggagcuucaucgaggaccugcuguucaacaaagugacacuggccgacgccggcuucaucaagcaguauggcgauugucugggcgacauugccgccagggaucugauuugcgcccagaaguuuaacggacugacagugcugccuccucugcugaccgaugagaugaucgcccaguacacaucugcccugcuggccggcacaaucacaagcggcuggacauuuggagcuggcgccgcucugcagauccccuuugcuaugcagauggccuaccgguucaacggcaucggagugacccagaaugugcuguacgagaaccagaagcugaucgccaaccaguucaacagcgccaucggcaagauccaggacagccugagcagcacagcaagcgcccugggaaagcugcaggacguggucaaccagaaugcccaggcacugaacacccuggucaagcagcuguccuccaacuucggcgccaucagcucugugcugaacgauauccugagcagacuggacccuccugaggccgaggugcagaucgacagacugaucacaggcagacugcagagccuccagacauacgugacccagcagcugaucagagccgccgagauuagagccucugccaaucuggccgccaccaagaugucugagugugugcugggccagagcaagagaguggacuuuugcggcaagggcuaccaccugaugagcuucccucagucugccccucacggcgugguguuucugcacgugacauaugugcccgcucaagagaagaauuucaccaccgcuccagccaucugccacgacggcaaagcccacuuuccuagagaaggcguguucguguccaacggcacccauugguucgugacacagcggaacuucuacgagccccagaucaucaccaccgacaacaccuucgugucuggcaacugcgacguugugaucggcauugugaacaauaccguguacgacccucugcagcccgagcuggacagcuucaaagaggaacuggacaaguacuuuaagaaccacacaagccccgacguggaccugggcgauaucagcggaaucaaugccagcgucgugaacauccagaaagagaucgaccggcugaacgagguggccaagaaucugaacgagagccugaucgaccugcaagaacuggggaaguacgagcaguacaucaaguggcccugguacaucuggcugggcuuuaucgccggacugauugccaucgugauggucacaaucaugcuguguugcaugaccagcugcuguagcugccugaagggcuguuguagcuguggcagcugcugcaaguucgacgaggacgauucugagcccgugcugaagggcgugaaacugcacuacaccugaggacuaguuauaagacugacuagcccgaugggccucccaacgggcccuccuccccuccuugcaccgagauuaauagaucucaaaggcucuuuucagagccaccaaaaaaaaaaaaaaaaaaaaaaaaaaaaaaaaaaaaaaaaaaaaaaaaaaaaaaaaaaaaaaaaaaaaaaaaaaaaaaaaaaaaaaaaaaaaaaaaaaaaa

SEQ ID NO: 24473 - RNA, 4041 nt, Artificial Sequence
  SARS-CoV-2/Wuhan/WIV05/2019__EPI_ISL_402128 spike protein mRNA gc mod (1-1273)(K986P_V987P_S477N_D614G)
aggagaaagcuuaccauguucguguuucuggugcugcugccccugguguccagccagugugugaaccugaccaccagaacacagcugccuccagccuacaccaacagcuucaccagaggcguguacuaccccgacaagguguucagauccagcgugcugcacucuacccaggaccuguuccugccuuucuucagcaacgugaccugguuccacgccauccacguguccggcaccaauggcaccaagagauucgacaaccccgugcugcccuucaacgacgggguguacuuugccagcaccgagaaguccaacaucaucagaggcuggaucuucggcaccacacuggacagcaagacccagagccugcugaucgugaacaacgccaccaacguggucaucaaagugugcgaguuccaguucugcaacgaccccuuccugggcgucuacuaccacaagaacaacaagagcuggauggaaagcgaguuccggguguacagcagcgccaacaacugcaccuucgaguacgugucccagccuuuccugauggaccuggaaggcaagcagggcaacuucaagaaccugcgcgaguucguguucaagaacaucgacggcuacuucaaaaucuacagcaagcacaccccuaucaaccucgugcgggaucugccucagggcuucucugcucuggaaccccugguggaucugcccaucggcaucaacaucacccgguuucagacacugcuggcccugcacagaagcuaccugacaccuggcgauagcagcagcggauggacagcuggugccgccgcuuacuaugugggcuaccugcagccuagaaccuuccugcugaaguacaacgagaacggcaccaucaccgacgccguggauugugcucuggauccucugagcgagacaaagugcacccugaaguccuucaccguggaaaagggcaucuaccagaccagcaacuuccgggugcagcccaccgaauccaucgugcgguuccccaauaucaccaaucugugccccuucggcgagguguucaaugccaccagauucgccucuguguacgccuggaaccggaagcggaucagcaauugcguggccgacuacuccgugcuguacaacuccgccagcuucagcaccuucaagugcuacggcguguccccuaccaagcugaacgaccugugcuucacaaacguguacgccgacagcuucgugauccggggagaugaagugcggcagauugccccuggacagacaggcaagaucgccgacuacaacuacaagcugcccgacgacuucaccggcugugugauugccuggaacagcaacaaccuggacuccaaagucggcggcaacuacaauuaccuguaccggcuguuccggaaguccaaucugaagcccuucgagcgggacaucagcaccgaaaucuaucaggccggcaacaccccuugcaacggcguggaaggcuucaacugcuacuucccacugcaguccuacggcuuucagcccacaaauggcgugggcuaucagcccuacagagugguggugcugagcuucgaacugcugcaugcuccugccacagugugcggcccuaagaaaagcaccaaucucgugaagaacaaaugcgugaacuucaacuucaacggccugaccggcaccggcgugcugacagagagcaacaagaaguuccugccauuccagcaguuuggccgggauaucgccgauaccacagacgccguuagagauccccagacacuggaaauccuggacaucaccccaugcagcuucggcggagugucugugaucaccccuggcaccaacaccagcaaucagguggcagugcuguaccagggcgugaacuguaccgaagugcccguggccauucacgccgaucagcugacaccuacauggcggguguacuccaccggcagcaauguguuucagaccagagccggcugucugaucggagccgagcacgugaacaauagcuacgagugcgacauccccaucggcgcuggcaucugugccagcuaccagacacagacaaacagccccagacgggcuagaagcguggccagccagagcaucauugccuacacaaugucucugggcgccgagaacagcguggccuacuccaacaacucuaucgcuauccccaccaacuucaccaucagcgugaccaccgagauccugccuguguccaugaccaagaccagcguggacugcaccauguacaucugcggcgauuccaccgagugcuccaaccugcugcugcaguacggcagcuucugcacccagcugaauagagcccugacagggaucgccguggaacaggacaagaacacccaagagguguucgcccaagugaagcaaaucuacaagaccccuccuaucaaggacuucggcggcuucaauuucagccagauucugcccgauccuagcaagcccagcaagcggagcuucaucgaggaccugcuguucaacaaagugacacuggccgacgccggcuucaucaagcaguauggcgauugucugggcgacauugccgccagggaucugauuugcgcccagaaguuuaacggacugacagugcugccuccucugcugaccgaugagaugaucgcccaguacacaucugcccugcuggccggcacaaucacaagcggcuggacauuuggagcuggcgccgcucugcagauccccuuugcuaugcagauggccuaccgguucaacggcaucggagugacccagaaugugcuguacgagaaccagaagcugaucgccaaccaguucaacagcgccaucggcaagauccaggacagccugagcagcacagcaagcgcccugggaaagcugcaggacguggucaaccagaaugcccaggcacugaacacccuggucaagcagcuguccuccaacuucggcgccaucagcucugugcugaacgauauccugagcagacuggacccuccugaggccgaggugcagaucgacagacugaucacaggcagacugcagagccuccagacauacgugacccagcagcugaucagagccgccgagauuagagccucugccaaucuggccgccaccaagaugucugagugugugcugggccagagcaagagaguggacuuuugcggcaagggcuaccaccugaugagcuucccucagucugccccucacggcgugguguuucugcacgugacauaugugcccgcucaagagaagaauuucaccaccgcuccagccaucugccacgacggcaaagcccacuuuccuagagaaggcguguucguguccaacggcacccauugguucgugacacagcggaacuucuacgagccccagaucaucaccaccgacaacaccuucgugucuggcaacugcgacguugugaucggcauugugaacaauaccguguacgacccucugcagcccgagcuggacagcuucaaagaggaacuggacaaguacuuuaagaaccacacaagccccgacguggaccugggcgauaucagcggaaucaaugccagcgucgugaacauccagaaagagaucgaccggcugaacgagguggccaagaaucugaacgagagccugaucgaccugcaagaacuggggaaguacgagcaguacaucaaguggcccugguacaucuggcugggcuuuaucgccggacugauugccaucgugauggucacaaucaugcuguguugcaugaccagcugcuguagcugccugaagggcuguuguagcuguggcagcugcugcaaguucgacgaggacgauucugagcccgugcugaagggcgugaaacugcacuacaccugaggacuaguuauaagacugacuagcccgaugggccucccaacgggcccuccuccccuccuugcaccgagauuaauagaucucaaaggcucuuuucagagccaccaaaaaaaaaaaaaaaaaaaaaaaaaaaaaaaaaaaaaaaaaaaaaaaaaaaaaaaaaaaaaaaaaaaaaaaaaaaaaaaaaaaaaaaaaaaaaaaaaaaaa

SEQ ID NO: 24474 - RNA, 4041 nt, Artificial Sequence
  SARS-CoV-2/Wuhan/WIV05/2019__EPI_ISL_402128 spike protein mRNA gc mod (1-1273)(K986P_V987P_N501Y_D614G)
aggagaaagcuuaccauguucguguuucuggugcugcugccccugguguccagccagugugugaaccugaccaccagaacacagcugccuccagccuacaccaacagcuucaccagaggcguguacuaccccgacaagguguucagauccagcgugcugcacucuacccaggaccuguuccugccuuucuucagcaacgugaccugguuccacgccauccacguguccggcaccaauggcaccaagagauucgacaaccccgugcugcccuucaacgacgggguguacuuugccagcaccgagaaguccaacaucaucagaggcuggaucuucggcaccacacuggacagcaagacccagagccugcugaucgugaacaacgccaccaacguggucaucaaagugugcgaguuccaguucugcaacgaccccuuccugggcgucuacuaccacaagaacaacaagagcuggauggaaagcgaguuccggguguacagcagcgccaacaacugcaccuucgaguacgugucccagccuuuccugauggaccuggaaggcaagcagggcaacuucaagaaccugcgcgaguucguguucaagaacaucgacggcuacuucaaaaucuacagcaagcacaccccuaucaaccucgugcgggaucugccucagggcuucucugcucuggaaccccugguggaucugcccaucggcaucaacaucacccgguuucagacacugcuggcccugcacagaagcuaccugacaccuggcgauagcagcagcggauggacagcuggugccgccgcuuacuaugugggcuaccugcagccuagaaccuuccugcugaaguacaacgagaacggcaccaucaccgacgccguggauugugcucuggauccucugagcgagacaaagugcacccugaaguccuucaccguggaaaagggcaucuaccagaccagcaacuuccgggugcagcccaccgaauccaucgugcgguuccccaauaucaccaaucugugccccuucggcgagguguucaaugccaccagauucgccucuguguacgccuggaaccggaagcggaucagcaauugcguggccgacuacuccgugcuguacaacuccgccagcuucagcaccuucaagugcuacggcguguccccuaccaagcugaacgaccugugcuucacaaacguguacgccgacagcuucgugauccggggagaugaagugcggcagauugccccuggacagacaggcaagaucgccgacuacaacuacaagcugcccgacgacuucaccggcugugugauugccuggaacagcaacaaccuggacuccaaagucggcggcaacuacaauuaccuguaccggcuguuccggaaguccaaucugaagcccuucgagcgggacaucagcaccgaaaucuaucaggccggcagcaccccuugcaacggcguggaaggcuucaacugcuacuucccacugcaguccuacggcuuucagcccacauacggcgugggcuaucagcccuacagagugguggugcugagcuucgaacugcugcaugcuccugccacagugugcggcccuaagaaaagcaccaaucucgugaagaacaaaugcgugaacuucaacuucaacggccugaccggcaccggcgugcugacagagagcaacaagaaguuccugccauuccagcaguuuggccgggauaucgccgauaccacagacgccguuagagauccccagacacuggaaauccuggacaucaccccaugcagcuucggcggagugucugugaucaccccuggcaccaacaccagcaaucagguggcagugcuguaccagggcgugaacuguaccgaagugcccguggccauucacgccgaucagcugacaccuacauggcggguguacuccaccggcagcaauguguuucagaccagagccggcugucugaucggagccgagcacgugaacaauagcuacgagugcgacauccccaucggcgcuggcaucugugccagcuaccagacacagacaaacagccccagacgggcuagaagcguggccagccagagcaucauugccuacacaaugucucugggcgccgagaacagcguggccuacuccaacaacucuaucgcuauccccaccaacuucaccaucagcgugaccaccgagauccugccuguguccaugaccaagaccagcguggacugcaccauguacaucugcggcgauuccaccgagugcuccaaccugcugcugcaguacggcagcuucugcacccagcugaauagagcccugacagggaucgccguggaacaggacaagaacacccaagagguguucgcccaagugaagcaaaucuacaagaccccuccuaucaaggacuucggcggcuucaauuucagccagauucugcccgauccuagcaagcccagcaagcggagcuucaucgaggaccugcuguucaacaaagugacacuggccgacgccggcuucaucaagcaguauggcgauugucugggcgacauugccgccagggaucugauuugcgcccagaaguuuaacggacugacagugcugccuccucugcugaccgaugagaugaucgcccaguacacaucugcccugcuggccggcacaaucacaagcggcuggacauuuggagcuggcgccgcucugcagauccccuuugcuaugcagauggccuaccgguucaacggcaucggagugacccagaaugugcuguacgagaaccagaagcugaucgccaaccaguucaacagcgccaucggcaagauccaggacagccugagcagcacagcaagcgcccugggaaagcugcaggacguggucaaccagaaugcccaggcacugaacacccuggucaagcagcuguccuccaacuucggcgccaucagcucugugcugaacgauauccugagcagacuggacccuccugaggccgaggugcagaucgacagacugaucacaggcagacugcagagccuccagacauacgugacccagcagcugaucagagccgccgagauuagagccucugccaaucuggccgccaccaagaugucugagugugugcugggccagagcaagagaguggacuuuugcggcaagggcuaccaccugaugagcuucccucagucugccccucacggcgugguguuucugcacgugacauaugugcccgcucaagagaagaauuucaccaccgcuccagccaucugccacgacggcaaagcccacuuuccuagagaaggcguguucguguccaacggcacccauugguucgugacacagcggaacuucuacgagccccagaucaucaccaccgacaacaccuucgugucuggcaacugcgacguugugaucggcauugugaacaauaccguguacgacccucugcagcccgagcuggacagcuucaaagaggaacuggacaaguacuuuaagaaccacacaagccccgacguggaccugggcgauaucagcggaaucaaugccagcgucgugaacauccagaaagagaucgaccggcugaacgagguggccaagaaucugaacgagagccugaucgaccugcaagaacuggggaaguacgagcaguacaucaaguggcccugguacaucuggcugggcuuuaucgccggacugauugccaucgugauggucacaaucaugcuguguugcaugaccagcugcuguagcugccugaagggcuguuguagcuguggcagcugcugcaaguucgacgaggacgauucugagcccgugcugaagggcgugaaacugcacuacaccugaggacuaguuauaagacugacuagcccgaugggccucccaacgggcccuccuccccuccuugcaccgagauuaauagaucucaaaggcucuuuucagagccaccaaaaaaaaaaaaaaaaaaaaaaaaaaaaaaaaaaaaaaaaaaaaaaaaaaaaaaaaaaaaaaaaaaaaaaaaaaaaaaaaaaaaaaaaaaaaaaaaaaaaa

SEQ ID NO: 24475 - RNA, 4035 nt, Artificial Sequence
  SARS-CoV-2/Wuhan/WIV05/2019__EPI_ISL_402128 spike protein mRNA gc mod (1-1273)(K986P_V987P_H69del_V70del_D614G)
aggagaaagcuuaccauguucguguuucuggugcugcugccccugguguccagccagugugugaaccugaccaccagaacacagcugccuccagccuacaccaacagcuucaccagaggcguguacuaccccgacaagguguucagauccagcgugcugcacucuacccaggaccuguuccugccuuucuucagcaacgugaccugguuccacgccaucuccggcaccaauggcaccaagagauucgacaaccccgugcugcccuucaacgacgggguguacuuugccagcaccgagaaguccaacaucaucagaggcuggaucuucggcaccacacuggacagcaagacccagagccugcugaucgugaacaacgccaccaacguggucaucaaagugugcgaguuccaguucugcaacgaccccuuccugggcgucuacuaccacaagaacaacaagagcuggauggaaagcgaguuccggguguacagcagcgccaacaacugcaccuucgaguacgugucccagccuuuccugauggaccuggaaggcaagcagggcaacuucaagaaccugcgcgaguucguguucaagaacaucgacggcuacuucaaaaucuacagcaagcacaccccuaucaaccucgugcgggaucugccucagggcuucucugcucuggaaccccugguggaucugcccaucggcaucaacaucacccgguuucagacacugcuggcccugcacagaagcuaccugacaccuggcgauagcagcagcggauggacagcuggugccgccgcuuacuaugugggcuaccugcagccuagaaccuuccugcugaaguacaacgagaacggcaccaucaccgacgccguggauugugcucuggauccucugagcgagacaaagugcacccugaaguccuucaccguggaaaagggcaucuaccagaccagcaacuuccgggugcagcccaccgaauccaucgugcgguuccccaauaucaccaaucugugccccuucggcgagguguucaaugccaccagauucgccucuguguacgccuggaaccggaagcggaucagcaauugcguggccgacuacuccgugcuguacaacuccgccagcuucagcaccuucaagugcuacggcguguccccuaccaagcugaacgaccugugcuucacaaacguguacgccgacagcuucgugauccggggagaugaagugcggcagauugccccuggacagacaggcaagaucgccgacuacaacuacaagcugcccgacgacuucaccggcugugugauugccuggaacagcaacaaccuggacuccaaagucggcggcaacuacaauuaccuguaccggcuguuccggaaguccaaucugaagcccuucgagcgggacaucagcaccgaaaucuaucaggccggcagcaccccuugcaacggcguggaaggcuucaacugcuacuucccacugcaguccuacggcuuucagcccacaaauggcgugggcuaucagcccuacagagugguggugcugagcuucgaacugcugcaugcuccugccacagugugcggcccuaagaaaagcaccaaucucgugaagaacaaaugcgugaacuucaacuucaacggccugaccggcaccggcgugcugacagagagcaacaagaaguuccugccauuccagcaguuuggccgggauaucgccgauaccacagacgccguuagagauccccagacacuggaaauccuggacaucaccccaugcagcuucggcggagugucugugaucaccccuggcaccaacaccagcaaucagguggcagugcuguaccagggcgugaacuguaccgaagugcccguggccauucacgccgaucagcugacaccuacauggcggguguacuccaccggcagcaauguguuucagaccagagccggcugucugaucggagccgagcacgugaacaauagcuacgagugcgacauccccaucggcgcuggcaucugugccagcuaccagacacagacaaacagccccagacgggcuagaagcguggccagccagagcaucauugccuacacaaugucucugggcgccgagaacagcguggccuacuccaacaacucuaucgcuauccccaccaacuucaccaucagcgugaccaccgagauccugccuguguccaugaccaagaccagcguggacugcaccauguacaucugcggcgauuccaccgagugcuccaaccugcugcugcaguacggcagcuucugcacccagcugaauagagcccugacagggaucgccguggaacaggacaagaacacccaagagguguucgcccaagugaagcaaaucuacaagaccccuccuaucaaggacuucggcggcuucaauuucagccagauucugcccgauccuagcaagcccagcaagcggagcuucaucgaggaccugcuguucaacaaagugacacuggccgacgccggcuucaucaagcaguauggcgauugucugggcgacauugccgccagggaucugauuugcgcccagaaguuuaacggacugacagugcugccuccucugcugaccgaugagaugaucgcccaguacacaucugcccugcuggccggcacaaucacaagcggcuggacauuuggagcuggcgccgcucugcagauccccuuugcuaugcagauggccuaccgguucaacggcaucggagugacccagaaugugcuguacgagaaccagaagcugaucgccaaccaguucaacagcgccaucggcaagauccaggacagccugagcagcacagcaagcgcccugggaaagcugcaggacguggucaaccagaaugcccaggcacugaacacccuggucaagcagcuguccuccaacuucggcgccaucagcucugugcugaacgauauccugagcagacuggacccuccugaggccgaggugcagaucgacagacugaucacaggcagacugcagagccuccagacauacgugacccagcagcugaucagagccgccgagauuagagccucugccaaucuggccgccaccaagaugucugagugugugcugggccagagcaagagaguggacuuuugcggcaagggcuaccaccugaugagcuucccucagucugccccucacggcgugguguuucugcacgugacauaugugcccgcucaagagaagaauuucaccaccgcuccagccaucugccacgacggcaaagcccacuuuccuagagaaggcguguucguguccaacggcacccauugguucgugacacagcggaacuucuacgagccccagaucaucaccaccgacaacaccuucgugucuggcaacugcgacguugugaucggcauugugaacaauaccguguacgacccucugcagcccgagcuggacagcuucaaagaggaacuggacaaguacuuuaagaaccacacaagccccgacguggaccugggcgauaucagcggaaucaaugccagcgucgugaacauccagaaagagaucgaccggcugaacgagguggccaagaaucugaacgagagccugaucgaccugcaagaacuggggaaguacgagcaguacaucaaguggcccugguacaucuggcugggcuuuaucgccggacugauugccaucgugauggucacaaucaugcuguguugcaugaccagcugcuguagcugccugaagggcuguuguagcuguggcagcugcugcaaguucgacgaggacgauucugagcccgugcugaagggcgugaaacugcacuacaccugaggacuaguuauaagacugacuagcccgaugggccucccaacgggcccuccuccccuccuugcaccgagauuaauagaucucaaaggcucuuuucagagccaccaaaaaaaaaaaaaaaaaaaaaaaaaaaaaaaaaaaaaaaaaaaaaaaaaaaaaaaaaaaaaaaaaaaaaaaaaaaaaaaaaaaaaaaaaaaaaaaaaaaaa

SEQ ID NO: 24476 - RNA, 4041 nt, Artificial Sequence
  SARS-CoV-2/Wuhan/WIV05/2019__EPI_ISL_402128 spike protein mRNA gc mod (1-1273)(K986P_V987P_Y453F_D614G)
aggagaaagcuuaccauguucguguuucuggugcugcugccccugguguccagccagugugugaaccugaccaccagaacacagcugccuccagccuacaccaacagcuucaccagaggcguguacuaccccgacaagguguucagauccagcgugcugcacucuacccaggaccuguuccugccuuucuucagcaacgugaccugguuccacgccauccacguguccggcaccaauggcaccaagagauucgacaaccccgugcugcccuucaacgacgggguguacuuugccagcaccgagaaguccaacaucaucagaggcuggaucuucggcaccacacuggacagcaagacccagagccugcugaucgugaacaacgccaccaacguggucaucaaagugugcgaguuccaguucugcaacgaccccuuccugggcgucuacuaccacaagaacaacaagagcuggauggaaagcgaguuccggguguacagcagcgccaacaacugcaccuucgaguacgugucccagccuuuccugauggaccuggaaggcaagcagggcaacuucaagaaccugcgcgaguucguguucaagaacaucgacggcuacuucaaaaucuacagcaagcacaccccuaucaaccucgugcgggaucugccucagggcuucucugcucuggaaccccugguggaucugcccaucggcaucaacaucacccgguuucagacacugcuggcccugcacagaagcuaccugacaccuggcgauagcagcagcggauggacagcuggugccgccgcuuacuaugugggcuaccugcagccuagaaccuuccugcugaaguacaacgagaacggcaccaucaccgacgccguggauugugcucuggauccucugagcgagacaaagugcacccugaaguccuucaccguggaaaagggcaucuaccagaccagcaacuuccgggugcagcccaccgaauccaucgugcgguuccccaauaucaccaaucugugccccuucggcgagguguucaaugccaccagauucgccucuguguacgccuggaaccggaagcggaucagcaauugcguggccgacuacuccgugcuguacaacuccgccagcuucagcaccuucaagugcuacggcguguccccuaccaagcugaacgaccugugcuucacaaacguguacgccgacagcuucgugauccggggagaugaagugcggcagauugccccuggacagacaggcaagaucgccgacuacaacuacaagcugcccgacgacuucaccggcugugugauugccuggaacagcaacaaccuggacuccaaagucggcggcaacuacaauuaccuguuccggcuguuccggaaguccaaucugaagcccuucgagcgggacaucagcaccgaaaucuaucaggccggcagcaccccuugcaacggcguggaaggcuucaacugcuacuucccacugcaguccuacggcuuucagcccacaaauggcgugggcuaucagcccuacagagugguggugcugagcuucgaacugcugcaugcuccugccacagugugcggcccuaagaaaagcaccaaucucgugaagaacaaaugcgugaacuucaacuucaacggccugaccggcaccggcgugcugacagagagcaacaagaaguuccugccauuccagcaguuuggccgggauaucgccgauaccacagacgccguuagagauccccagacacuggaaauccuggacaucaccccaugcagcuucggcggagugucugugaucaccccuggcaccaacaccagcaaucagguggcagugcuguaccagggcgugaacuguaccgaagugcccguggccauucacgccgaucagcugacaccuacauggcggguguacuccaccggcagcaauguguuucagaccagagccggcugucugaucggagccgagcacgugaacaauagcuacgagugcgacauccccaucggcgcuggcaucugugccagcuaccagacacagacaaacagccccagacgggcuagaagcguggccagccagagcaucauugccuacacaaugucucugggcgccgagaacagcguggccuacuccaacaacucuaucgcuauccccaccaacuucaccaucagcgugaccaccgagauccugccuguguccaugaccaagaccagcguggacugcaccauguacaucugcggcgauuccaccgagugcuccaaccugcugcugcaguacggcagcuucugcacccagcugaauagagcccugacagggaucgccguggaacaggacaagaacacccaagagguguucgcccaagugaagcaaaucuacaagaccccuccuaucaaggacuucggcggcuucaauuucagccagauucugcccgauccuagcaagcccagcaagcggagcuucaucgaggaccugcuguucaacaaagugacacuggccgacgccggcuucaucaagcaguauggcgauugucugggcgacauugccgccagggaucugauuugcgcccagaaguuuaacggacugacagugcugccuccucugcugaccgaugagaugaucgcccaguacacaucugcccugcuggccggcacaaucacaagcggcuggacauuuggagcuggcgccgcucugcagauccccuuugcuaugcagauggccuaccgguucaacggcaucggagugacccagaaugugcuguacgagaaccagaagcugaucgccaaccaguucaacagcgccaucggcaagauccaggacagccugagcagcacagcaagcgcccugggaaagcugcaggacguggucaaccagaaugcccaggcacugaacacccuggucaagcagcuguccuccaacuucggcgccaucagcucugugcugaacgauauccugagcagacuggacccuccugaggccgaggugcagaucgacagacugaucacaggcagacugcagagccuccagacauacgugacccagcagcugaucagagccgccgagauuagagccucugccaaucuggccgccaccaagaugucugagugugugcugggccagagcaagagaguggacuuuugcggcaagggcuaccaccugaugagcuucccucagucugccccucacggcgugguguuucugcacgugacauaugugcccgcucaagagaagaauuucaccaccgcuccagccaucugccacgacggcaaagcccacuuuccuagagaaggcguguucguguccaacggcacccauugguucgugacacagcggaacuucuacgagccccagaucaucaccaccgacaacaccuucgugucuggcaacugcgacguugugaucggcauugugaacaauaccguguacgacccucugcagcccgagcuggacagcuucaaagaggaacuggacaaguacuuuaagaaccacacaagccccgacguggaccugggcgauaucagcggaaucaaugccagcgucgugaacauccagaaagagaucgaccggcugaacgagguggccaagaaucugaacgagagccugaucgaccugcaagaacuggggaaguacgagcaguacaucaaguggcccugguacaucuggcugggcuuuaucgccggacugauugccaucgugauggucacaaucaugcuguguugcaugaccagcugcuguagcugccugaagggcuguuguagcuguggcagcugcugcaaguucgacgaggacgauucugagcccgugcugaagggcgugaaacugcacuacaccugaggacuaguuauaagacugacuagcccgaugggccucccaacgggcccuccuccccuccuugcaccgagauuaauagaucucaaaggcucuuuucagagccaccaaaaaaaaaaaaaaaaaaaaaaaaaaaaaaaaaaaaaaaaaaaaaaaaaaaaaaaaaaaaaaaaaaaaaaaaaaaaaaaaaaaaaaaaaaaaaaaaaaaaa

SEQ ID NO: 24477 - RNA, 4041 nt, Artificial Sequence
  SARS-CoV-2/Wuhan/WIV05/2019__EPI_ISL_402128 spike protein mRNA gc mod (1-1273)(K986P_V987P_D614G_I692V)
aggagaaagcuuaccauguucguguuucuggugcugcugccccugguguccagccagugugugaaccugaccaccagaacacagcugccuccagccuacaccaacagcuucaccagaggcguguacuaccccgacaagguguucagauccagcgugcugcacucuacccaggaccuguuccugccuuucuucagcaacgugaccugguuccacgccauccacguguccggcaccaauggcaccaagagauucgacaaccccgugcugcccuucaacgacgggguguacuuugccagcaccgagaaguccaacaucaucagaggcuggaucuucggcaccacacuggacagcaagacccagagccugcugaucgugaacaacgccaccaacguggucaucaaagugugcgaguuccaguucugcaacgaccccuuccugggcgucuacuaccacaagaacaacaagagcuggauggaaagcgaguuccggguguacagcagcgccaacaacugcaccuucgaguacgugucccagccuuuccugauggaccuggaaggcaagcagggcaacuucaagaaccugcgcgaguucguguucaagaacaucgacggcuacuucaaaaucuacagcaagcacaccccuaucaaccucgugcgggaucugccucagggcuucucugcucuggaaccccugguggaucugcccaucggcaucaacaucacccgguuucagacacugcuggcccugcacagaagcuaccugacaccuggcgauagcagcagcggauggacagcuggugccgccgcuuacuaugugggcuaccugcagccuagaaccuuccugcugaaguacaacgagaacggcaccaucaccgacgccguggauugugcucuggauccucugagcgagacaaagugcacccugaaguccuucaccguggaaaagggcaucuaccagaccagcaacuuccgggugcagcccaccgaauccaucgugcgguuccccaauaucaccaaucugugccccuucggcgagguguucaaugccaccagauucgccucuguguacgccuggaaccggaagcggaucagcaauugcguggccgacuacuccgugcuguacaacuccgccagcuucagcaccuucaagugcuacggcguguccccuaccaagcugaacgaccugugcuucacaaacguguacgccgacagcuucgugauccggggagaugaagugcggcagauugccccuggacagacaggcaagaucgccgacuacaacuacaagcugcccgacgacuucaccggcugugugauugccuggaacagcaacaaccuggacuccaaagucggcggcaacuacaauuaccuguaccggcuguuccggaaguccaaucugaagcccuucgagcgggacaucagcaccgaaaucuaucaggccggcagcaccccuugcaacggcguggaaggcuucaacugcuacuucccacugcaguccuacggcuuucagcccacaaauggcgugggcuaucagcccuacagagugguggugcugagcuucgaacugcugcaugcuccugccacagugugcggcccuaagaaaagcaccaaucucgugaagaacaaaugcgugaacuucaacuucaacggccugaccggcaccggcgugcugacagagagcaacaagaaguuccugccauuccagcaguuuggccgggauaucgccgauaccacagacgccguuagagauccccagacacuggaaauccuggacaucaccccaugcagcuucggcggagugucugugaucaccccuggcaccaacaccagcaaucagguggcagugcuguaccagggcgugaacuguaccgaagugcccguggccauucacgccgaucagcugacaccuacauggcggguguacuccaccggcagcaauguguuucagaccagagccggcugucugaucggagccgagcacgugaacaauagcuacgagugcgacauccccaucggcgcuggcaucugugccagcuaccagacacagacaaacagccccagacgggcuagaagcguggccagccagagcgugauugccuacacaaugucucugggcgccgagaacagcguggccuacuccaacaacucuaucgcuauccccaccaacuucaccaucagcgugaccaccgagauccugccuguguccaugaccaagaccagcguggacugcaccauguacaucugcggcgauuccaccgagugcuccaaccugcugcugcaguacggcagcuucugcacccagcugaauagagcccugacagggaucgccguggaacaggacaagaacacccaagagguguucgcccaagugaagcaaaucuacaagaccccuccuaucaaggacuucggcggcuucaauuucagccagauucugcccgauccuagcaagcccagcaagcggagcuucaucgaggaccugcuguucaacaaagugacacuggccgacgccggcuucaucaagcaguauggcgauugucugggcgacauugccgccagggaucugauuugcgcccagaaguuuaacggacugacagugcugccuccucugcugaccgaugagaugaucgcccaguacacaucugcccugcuggccggcacaaucacaagcggcuggacauuuggagcuggcgccgcucugcagauccccuuugcuaugcagauggccuaccgguucaacggcaucggagugacccagaaugugcuguacgagaaccagaagcugaucgccaaccaguucaacagcgccaucggcaagauccaggacagccugagcagcacagcaagcgcccugggaaagcugcaggacguggucaaccagaaugcccaggcacugaacacccuggucaagcagcuguccuccaacuucggcgccaucagcucugugcugaacgauauccugagcagacuggacccuccugaggccgaggugcagaucgacagacugaucacaggcagacugcagagccuccagacauacgugacccagcagcugaucagagccgccgagauuagagccucugccaaucuggccgccaccaagaugucugagugugugcugggccagagcaagagaguggacuuuugcggcaagggcuaccaccugaugagcuucccucagucugccccucacggcgugguguuucugcacgugacauaugugcccgcucaagagaagaauuucaccaccgcuccagccaucugccacgacggcaaagcccacuuuccuagagaaggcguguucguguccaacggcacccauugguucgugacacagcggaacuucuacgagccccagaucaucaccaccgacaacaccuucgugucuggcaacugcgacguugugaucggcauugugaacaauaccguguacgacccucugcagcccgagcuggacagcuucaaagaggaacuggacaaguacuuuaagaaccacacaagccccgacguggaccugggcgauaucagcggaaucaaugccagcgucgugaacauccagaaagagaucgaccggcugaacgagguggccaagaaucugaacgagagccugaucgaccugcaagaacuggggaaguacgagcaguacaucaaguggcccugguacaucuggcugggcuuuaucgccggacugauugccaucgugauggucacaaucaugcuguguugcaugaccagcugcuguagcugccugaagggcuguuguagcuguggcagcugcugcaaguucgacgaggacgauucugagcccgugcugaagggcgugaaacugcacuacaccugaggacuaguuauaagacugacuagcccgaugggccucccaacgggcccuccuccccuccuugcaccgagauuaauagaucucaaaggcucuuuucagagccaccaaaaaaaaaaaaaaaaaaaaaaaaaaaaaaaaaaaaaaaaaaaaaaaaaaaaaaaaaaaaaaaaaaaaaaaaaaaaaaaaaaaaaaaaaaaaaaaaaaaaa

SEQ ID NO: 24478 - RNA, 4041 nt, Artificial Sequence
  SARS-CoV-2/Wuhan/WIV05/2019__EPI_ISL_402128 spike protein mRNA gc mod (1-1273)(K986P_V987P_D614G_M1229I)
aggagaaagcuuaccauguucguguuucuggugcugcugccccugguguccagccagugugugaaccugaccaccagaacacagcugccuccagccuacaccaacagcuucaccagaggcguguacuaccccgacaagguguucagauccagcgugcugcacucuacccaggaccuguuccugccuuucuucagcaacgugaccugguuccacgccauccacguguccggcaccaauggcaccaagagauucgacaaccccgugcugcccuucaacgacgggguguacuuugccagcaccgagaaguccaacaucaucagaggcuggaucuucggcaccacacuggacagcaagacccagagccugcugaucgugaacaacgccaccaacguggucaucaaagugugcgaguuccaguucugcaacgaccccuuccugggcgucuacuaccacaagaacaacaagagcuggauggaaagcgaguuccggguguacagcagcgccaacaacugcaccuucgaguacgugucccagccuuuccugauggaccuggaaggcaagcagggcaacuucaagaaccugcgcgaguucguguucaagaacaucgacggcuacuucaaaaucuacagcaagcacaccccuaucaaccucgugcgggaucugccucagggcuucucugcucuggaaccccugguggaucugcccaucggcaucaacaucacccgguuucagacacugcuggcccugcacagaagcuaccugacaccuggcgauagcagcagcggauggacagcuggugccgccgcuuacuaugugggcuaccugcagccuagaaccuuccugcugaaguacaacgagaacggcaccaucaccgacgccguggauugugcucuggauccucugagcgagacaaagugcacccugaaguccuucaccguggaaaagggcaucuaccagaccagcaacuuccgggugcagcccaccgaauccaucgugcgguuccccaauaucaccaaucugugccccuucggcgagguguucaaugccaccagauucgccucuguguacgccuggaaccggaagcggaucagcaauugcguggccgacuacuccgugcuguacaacuccgccagcuucagcaccuucaagugcuacggcguguccccuaccaagcugaacgaccugugcuucacaaacguguacgccgacagcuucgugauccggggagaugaagugcggcagauugccccuggacagacaggcaagaucgccgacuacaacuacaagcugcccgacgacuucaccggcugugugauugccuggaacagcaacaaccuggacuccaaagucggcggcaacuacaauuaccuguaccggcuguuccggaaguccaaucugaagcccuucgagcgggacaucagcaccgaaaucuaucaggccggcagcaccccuugcaacggcguggaaggcuucaacugcuacuucccacugcaguccuacggcuuucagcccacaaauggcgugggcuaucagcccuacagagugguggugcugagcuucgaacugcugcaugcuccugccacagugugcggcccuaagaaaagcaccaaucucgugaagaacaaaugcgugaacuucaacuucaacggccugaccggcaccggcgugcugacagagagcaacaagaaguuccugccauuccagcaguuuggccgggauaucgccgauaccacagacgccguuagagauccccagacacuggaaauccuggacaucaccccaugcagcuucggcggagugucugugaucaccccuggcaccaacaccagcaaucagguggcagugcuguaccagggcgugaacuguaccgaagugcccguggccauucacgccgaucagcugacaccuacauggcggguguacuccaccggcagcaauguguuucagaccagagccggcugucugaucggagccgagcacgugaacaauagcuacgagugcgacauccccaucggcgcuggcaucugugccagcuaccagacacagacaaacagccccagacgggcuagaagcguggccagccagagcaucauugccuacacaaugucucugggcgccgagaacagcguggccuacuccaacaacucuaucgcuauccccaccaacuucaccaucagcgugaccaccgagauccugccuguguccaugaccaagaccagcguggacugcaccauguacaucugcggcgauuccaccgagugcuccaaccugcugcugcaguacggcagcuucugcacccagcugaauagagcccugacagggaucgccguggaacaggacaagaacacccaagagguguucgcccaagugaagcaaaucuacaagaccccuccuaucaaggacuucggcggcuucaauuucagccagauucugcccgauccuagcaagcccagcaagcggagcuucaucgaggaccugcuguucaacaaagugacacuggccgacgccggcuucaucaagcaguauggcgauugucugggcgacauugccgccagggaucugauuugcgcccagaaguuuaacggacugacagugcugccuccucugcugaccgaugagaugaucgcccaguacacaucugcccugcuggccggcacaaucacaagcggcuggacauuuggagcuggcgccgcucugcagauccccuuugcuaugcagauggccuaccgguucaacggcaucggagugacccagaaugugcuguacgagaaccagaagcugaucgccaaccaguucaacagcgccaucggcaagauccaggacagccugagcagcacagcaagcgcccugggaaagcugcaggacguggucaaccagaaugcccaggcacugaacacccuggucaagcagcuguccuccaacuucggcgccaucagcucugugcugaacgauauccugagcagacuggacccuccugaggccgaggugcagaucgacagacugaucacaggcagacugcagagccuccagacauacgugacccagcagcugaucagagccgccgagauuagagccucugccaaucuggccgccaccaagaugucugagugugugcugggccagagcaagagaguggacuuuugcggcaagggcuaccaccugaugagcuucccucagucugccccucacggcgugguguuucugcacgugacauaugugcccgcucaagagaagaauuucaccaccgcuccagccaucugccacgacggcaaagcccacuuuccuagagaaggcguguucguguccaacggcacccauugguucgugacacagcggaacuucuacgagccccagaucaucaccaccgacaacaccuucgugucuggcaacugcgacguugugaucggcauugugaacaauaccguguacgacccucugcagcccgagcuggacagcuucaaagaggaacuggacaaguacuuuaagaaccacacaagccccgacguggaccugggcgauaucagcggaaucaaugccagcgucgugaacauccagaaagagaucgaccggcugaacgagguggccaagaaucugaacgagagccugaucgaccugcaagaacuggggaaguacgagcaguacaucaaguggcccugguacaucuggcugggcuuuaucgccggacugauugccaucgugaucgucacaaucaugcuguguugcaugaccagcugcuguagcugccugaagggcuguuguagcuguggcagcugcugcaaguucgacgaggacgauucugagcccgugcugaagggcgugaaacugcacuacaccugaggacuaguuauaagacugacuagcccgaugggccucccaacgggcccuccuccccuccuugcaccgagauuaauagaucucaaaggcucuuuucagagccaccaaaaaaaaaaaaaaaaaaaaaaaaaaaaaaaaaaaaaaaaaaaaaaaaaaaaaaaaaaaaaaaaaaaaaaaaaaaaaaaaaaaaaaaaaaaaaaaaaaaaa

SEQ ID NO: 24479 - RNA, 4035 nt, Artificial Sequence
  SARS-CoV-2/Wuhan/WIV05/2019__EPI_ISL_402128 spike protein mRNA gc mod (1-1273)(K986P_V987P_H69del_V70del_A222V_Y453F_S477N_D614G_I692V)
aggagaaagcuuaccauguucguguuucuggugcugcugccccugguguccagccagugugugaaccugaccaccagaacacagcugccuccagccuacaccaacagcuucaccagaggcguguacuaccccgacaagguguucagauccagcgugcugcacucuacccaggaccuguuccugccuuucuucagcaacgugaccugguuccacgccaucuccggcaccaauggcaccaagagauucgacaaccccgugcugcccuucaacgacgggguguacuuugccagcaccgagaaguccaacaucaucagaggcuggaucuucggcaccacacuggacagcaagacccagagccugcugaucgugaacaacgccaccaacguggucaucaaagugugcgaguuccaguucugcaacgaccccuuccugggcgucuacuaccacaagaacaacaagagcuggauggaaagcgaguuccggguguacagcagcgccaacaacugcaccuucgaguacgugucccagccuuuccugauggaccuggaaggcaagcagggcaacuucaagaaccugcgcgaguucguguucaagaacaucgacggcuacuucaaaaucuacagcaagcacaccccuaucaaccucgugcgggaucugccucagggcuucucugugcuggaaccccugguggaucugcccaucggcaucaacaucacccgguuucagacacugcuggcccugcacagaagcuaccugacaccuggcgauagcagcagcggauggacagcuggugccgccgcuuacuaugugggcuaccugcagccuagaaccuuccugcugaaguacaacgagaacggcaccaucaccgacgccguggauugugcucuggauccucugagcgagacaaagugcacccugaaguccuucaccguggaaaagggcaucuaccagaccagcaacuuccgggugcagcccaccgaauccaucgugcgguuccccaauaucaccaaucugugccccuucggcgagguguucaaugccaccagauucgccucuguguacgccuggaaccggaagcggaucagcaauugcguggccgacuacuccgugcuguacaacuccgccagcuucagcaccuucaagugcuacggcguguccccuaccaagcugaacgaccugugcuucacaaacguguacgccgacagcuucgugauccggggagaugaagugcggcagauugccccuggacagacaggcaagaucgccgacuacaacuacaagcugcccgacgacuucaccggcugugugauugccuggaacagcaacaaccuggacuccaaagucggcggcaacuacaauuaccuguuccggcuguuccggaaguccaaucugaagcccuucgagcgggacaucagcaccgaaaucuaucaggccggcaacaccccuugcaacggcguggaaggcuucaacugcuacuucccacugcaguccuacggcuuucagcccacaaauggcgugggcuaucagcccuacagagugguggugcugagcuucgaacugcugcaugcuccugccacagugugcggcccuaagaaaagcaccaaucucgugaagaacaaaugcgugaacuucaacuucaacggccugaccggcaccggcgugcugacagagagcaacaagaaguuccugccauuccagcaguuuggccgggauaucgccgauaccacagacgccguuagagauccccagacacuggaaauccuggacaucaccccaugcagcuucggcggagugucugugaucaccccuggcaccaacaccagcaaucagguggcagugcuguaccagggcgugaacuguaccgaagugcccguggccauucacgccgaucagcugacaccuacauggcggguguacuccaccggcagcaauguguuucagaccagagccggcugucugaucggagccgagcacgugaacaauagcuacgagugcgacauccccaucggcgcuggcaucugugccagcuaccagacacagacaaacagccccagacgggcuagaagcguggccagccagagcgugauugccuacacaaugucucugggcgccgagaacagcguggccuacuccaacaacucuaucgcuauccccaccaacuucaccaucagcgugaccaccgagauccugccuguguccaugaccaagaccagcguggacugcaccauguacaucugcggcgauuccaccgagugcuccaaccugcugcugcaguacggcagcuucugcacccagcugaauagagcccugacagggaucgccguggaacaggacaagaacacccaagagguguucgcccaagugaagcaaaucuacaagaccccuccuaucaaggacuucggcggcuucaauuucagccagauucugcccgauccuagcaagcccagcaagcggagcuucaucgaggaccugcuguucaacaaagugacacuggccgacgccggcuucaucaagcaguauggcgauugucugggcgacauugccgccagggaucugauuugcgcccagaaguuuaacggacugacagugcugccuccucugcugaccgaugagaugaucgcccaguacacaucugcccugcuggccggcacaaucacaagcggcuggacauuuggagcuggcgccgcucugcagauccccuuugcuaugcagauggccuaccgguucaacggcaucggagugacccagaaugugcuguacgagaaccagaagcugaucgccaaccaguucaacagcgccaucggcaagauccaggacagccugagcagcacagcaagcgcccugggaaagcugcaggacguggucaaccagaaugcccaggcacugaacacccuggucaagcagcuguccuccaacuucggcgccaucagcucugugcugaacgauauccugagcagacuggacccuccugaggccgaggugcagaucgacagacugaucacaggcagacugcagagccuccagacauacgugacccagcagcugaucagagccgccgagauuagagccucugccaaucuggccgccaccaagaugucugagugugugcugggccagagcaagagaguggacuuuugcggcaagggcuaccaccugaugagcuucccucagucugccccucacggcgugguguuucugcacgugacauaugugcccgcucaagagaagaauuucaccaccgcuccagccaucugccacgacggcaaagcccacuuuccuagagaaggcguguucguguccaacggcacccauugguucgugacacagcggaacuucuacgagccccagaucaucaccaccgacaacaccuucgugucuggcaacugcgacguugugaucggcauugugaacaauaccguguacgacccucugcagcccgagcuggacagcuucaaagaggaacuggacaaguacuuuaagaaccacacaagccccgacguggaccugggcgauaucagcggaaucaaugccagcgucgugaacauccagaaagagaucgaccggcugaacgagguggccaagaaucugaacgagagccugaucgaccugcaagaacuggggaaguacgagcaguacaucaaguggcccugguacaucuggcugggcuuuaucgccggacugauugccaucgugauggucacaaucaugcuguguugcaugaccagcugcuguagcugccugaagggcuguuguagcuguggcagcugcugcaaguucgacgaggacgauucugagcccgugcugaagggcgugaaacugcacuacaccugaggacuaguuauaagacugacuagcccgaugggccucccaacgggcccuccuccccuccuugcaccgagauuaauagaucucaaaggcucuuuucagagccaccaaaaaaaaaaaaaaaaaaaaaaaaaaaaaaaaaaaaaaaaaaaaaaaaaaaaaaaaaaaaaaaaaaaaaaaaaaaaaaaaaaaaaaaaaaaaaaaaaaaaa

SEQ ID NO: 24480 - RNA, 4035 nt, Artificial Sequence
  SARS-CoV-2/Wuhan/WIV05/2019__EPI_ISL_402128 spike protein mRNA gc mod (1-1273)(K986P_V987P_H69del_V70del_Y453F_D614G_I692V_M1229I)
aggagaaagcuuaccauguucguguuucuggugcugcugccccugguguccagccagugugugaaccugaccaccagaacacagcugccuccagccuacaccaacagcuucaccagaggcguguacuaccccgacaagguguucagauccagcgugcugcacucuacccaggaccuguuccugccuuucuucagcaacgugaccugguuccacgccaucuccggcaccaauggcaccaagagauucgacaaccccgugcugcccuucaacgacgggguguacuuugccagcaccgagaaguccaacaucaucagaggcuggaucuucggcaccacacuggacagcaagacccagagccugcugaucgugaacaacgccaccaacguggucaucaaagugugcgaguuccaguucugcaacgaccccuuccugggcgucuacuaccacaagaacaacaagagcuggauggaaagcgaguuccggguguacagcagcgccaacaacugcaccuucgaguacgugucccagccuuuccugauggaccuggaaggcaagcagggcaacuucaagaaccugcgcgaguucguguucaagaacaucgacggcuacuucaaaaucuacagcaagcacaccccuaucaaccucgugcgggaucugccucagggcuucucugcucuggaaccccugguggaucugcccaucggcaucaacaucacccgguuucagacacugcuggcccugcacagaagcuaccugacaccuggcgauagcagcagcggauggacagcuggugccgccgcuuacuaugugggcuaccugcagccuagaaccuuccugcugaaguacaacgagaacggcaccaucaccgacgccguggauugugcucuggauccucugagcgagacaaagugcacccugaaguccuucaccguggaaaagggcaucuaccagaccagcaacuuccgggugcagcccaccgaauccaucgugcgguuccccaauaucaccaaucugugccccuucggcgagguguucaaugccaccagauucgccucuguguacgccuggaaccggaagcggaucagcaauugcguggccgacuacuccgugcuguacaacuccgccagcuucagcaccuucaagugcuacggcguguccccuaccaagcugaacgaccugugcuucacaaacguguacgccgacagcuucgugauccggggagaugaagugcggcagauugccccuggacagacaggcaagaucgccgacuacaacuacaagcugcccgacgacuucaccggcugugugauugccuggaacagcaacaaccuggacuccaaagucggcggcaacuacaauuaccuguuccggcuguuccggaaguccaaucugaagcccuucgagcgggacaucagcaccgaaaucuaucaggccggcagcaccccuugcaacggcguggaaggcuucaacugcuacuucccacugcaguccuacggcuuucagcccacaaauggcgugggcuaucagcccuacagagugguggugcugagcuucgaacugcugcaugcuccugccacagugugcggcccuaagaaaagcaccaaucucgugaagaacaaaugcgugaacuucaacuucaacggccugaccggcaccggcgugcugacagagagcaacaagaaguuccugccauuccagcaguuuggccgggauaucgccgauaccacagacgccguuagagauccccagacacuggaaauccuggacaucaccccaugcagcuucggcggagugucugugaucaccccuggcaccaacaccagcaaucagguggcagugcuguaccagggcgugaacuguaccgaagugcccguggccauucacgccgaucagcugacaccuacauggcggguguacuccaccggcagcaauguguuucagaccagagccggcugucugaucggagccgagcacgugaacaauagcuacgagugcgacauccccaucggcgcuggcaucugugccagcuaccagacacagacaaacagccccagacgggcuagaagcguggccagccagagcgugauugccuacacaaugucucugggcgccgagaacagcguggccuacuccaacaacucuaucgcuauccccaccaacuucaccaucagcgugaccaccgagauccugccuguguccaugaccaagaccagcguggacugcaccauguacaucugcggcgauuccaccgagugcuccaaccugcugcugcaguacggcagcuucugcacccagcugaauagagcccugacagggaucgccguggaacaggacaagaacacccaagagguguucgcccaagugaagcaaaucuacaagaccccuccuaucaaggacuucggcggcuucaauuucagccagauucugcccgauccuagcaagcccagcaagcggagcuucaucgaggaccugcuguucaacaaagugacacuggccgacgccggcuucaucaagcaguauggcgauugucugggcgacauugccgccagggaucugauuugcgcccagaaguuuaacggacugacagugcugccuccucugcugaccgaugagaugaucgcccaguacacaucugcccugcuggccggcacaaucacaagcggcuggacauuuggagcuggcgccgcucugcagauccccuuugcuaugcagauggccuaccgguucaacggcaucggagugacccagaaugugcuguacgagaaccagaagcugaucgccaaccaguucaacagcgccaucggcaagauccaggacagccugagcagcacagcaagcgcccugggaaagcugcaggacguggucaaccagaaugcccaggcacugaacacccuggucaagcagcuguccuccaacuucggcgccaucagcucugugcugaacgauauccugagcagacuggacccuccugaggccgaggugcagaucgacagacugaucacaggcagacugcagagccuccagacauacgugacccagcagcugaucagagccgccgagauuagagccucugccaaucuggccgccaccaagaugucugagugugugcugggccagagcaagagaguggacuuuugcggcaagggcuaccaccugaugagcuucccucagucugccccucacggcgugguguuucugcacgugacauaugugcccgcucaagagaagaauuucaccaccgcuccagccaucugccacgacggcaaagcccacuuuccuagagaaggcguguucguguccaacggcacccauugguucgugacacagcggaacuucuacgagccccagaucaucaccaccgacaacaccuucgugucuggcaacugcgacguugugaucggcauugugaacaauaccguguacgacccucugcagcccgagcuggacagcuucaaagaggaacuggacaaguacuuuaagaaccacacaagccccgacguggaccugggcgauaucagcggaaucaaugccagcgucgugaacauccagaaagagaucgaccggcugaacgagguggccaagaaucugaacgagagccugaucgaccugcaagaacuggggaaguacgagcaguacaucaaguggcccugguacaucuggcugggcuuuaucgccggacugauugccaucgugaucgucacaaucaugcuguguugcaugaccagcugcuguagcugccugaagggcuguuguagcuguggcagcugcugcaaguucgacgaggacgauucugagcccgugcugaagggcgugaaacugcacuacaccugaggacuaguuauaagacugacuagcccgaugggccucccaacgggcccuccuccccuccuugcaccgagauuaauagaucucaaaggcucuuuucagagccaccaaaaaaaaaaaaaaaaaaaaaaaaaaaaaaaaaaaaaaaaaaaaaaaaaaaaaaaaaaaaaaaaaaaaaaaaaaaaaaaaaaaaaaaaaaaaaaaaaaaaa

SEQ ID NO: 24481 - RNA, 4032 nt, Artificial Sequence
  SARS-CoV-2/Wuhan/WIV05/2019__EPI_ISL_402128 spike protein mRNA gc mod (1-1273)(K986P_V987P_K986P_V987P_H69del_V70del_Y144del_N501Y_A570 D_D614G_P681H_T716I_S982A_D1118H)
aggagaaagcuuaccauguucguguuucuggugcugcugccccugguguccagccagugugugaaccugaccaccagaacacagcugccuccagccuacaccaacagcuucaccagaggcguguacuaccccgacaagguguucagauccagcgugcugcacucuacccaggaccuguuccugccuuucuucagcaacgugaccugguuccacgccaucuccggcaccaauggcaccaagagauucgacaaccccgugcugcccuucaacgacgggguguacuuugccagcaccgagaaguccaacaucaucagaggcuggaucuucggcaccacacuggacagcaagacccagagccugcugaucgugaacaacgccaccaacguggucaucaaagugugcgaguuccaguucugcaacgaccccuuccugggcgucuaccacaagaacaacaagagcuggauggaaagcgaguuccggguguacagcagcgccaacaacugcaccuucgaguacgugucccagccuuuccugauggaccuggaaggcaagcagggcaacuucaagaaccugcgcgaguucguguucaagaacaucgacggcuacuucaaaaucuacagcaagcacaccccuaucaaccucgugcgggaucugccucagggcuucucugcucuggaaccccugguggaucugcccaucggcaucaacaucacccgguuucagacacugcuggcccugcacagaagcuaccugacaccuggcgauagcagcagcggauggacagcuggugccgccgcuuacuaugugggcuaccugcagccuagaaccuuccugcugaaguacaacgagaacggcaccaucaccgacgccguggauugugcucuggauccucugagcgagacaaagugcacccugaaguccuucaccguggaaaagggcaucuaccagaccagcaacuuccgggugcagcccaccgaauccaucgugcgguuccccaauaucaccaaucugugccccuucggcgagguguucaaugccaccagauucgccucuguguacgccuggaaccggaagcggaucagcaauugcguggccgacuacuccgugcuguacaacuccgccagcuucagcaccuucaagugcuacggcguguccccuaccaagcugaacgaccugugcuucacaaacguguacgccgacagcuucgugauccggggagaugaagugcggcagauugccccuggacagacaggcaagaucgccgacuacaacuacaagcugcccgacgacuucaccggcugugugauugccuggaacagcaacaaccuggacuccaaagucggcggcaacuacaauuaccuguaccggcuguuccggaaguccaaucugaagcccuucgagcgggacaucagcaccgaaaucuaucaggccggcagcaccccuugcaacggcguggaaggcuucaacugcuacuucccacugcaguccuacggcuuucagcccacauacggcgugggcuaucagcccuacagagugguggugcugagcuucgaacugcugcaugcuccugccacagugugcggcccuaagaaaagcaccaaucucgugaagaacaaaugcgugaacuucaacuucaacggccugaccggcaccggcgugcugacagagagcaacaagaaguuccugccauuccagcaguuuggccgggauaucgacgauaccacagacgccguuagagauccccagacacuggaaauccuggacaucaccccaugcagcuucggcggagugucugugaucaccccuggcaccaacaccagcaaucagguggcagugcuguaccagggcgugaacuguaccgaagugcccguggccauucacgccgaucagcugacaccuacauggcggguguacuccaccggcagcaauguguuucagaccagagccggcugucugaucggagccgagcacgugaacaauagcuacgagugcgacauccccaucggcgcuggcaucugugccagcuaccagacacagacaaacagccacagacgggcuagaagcguggccagccagagcaucauugccuacacaaugucucugggcgccgagaacagcguggccuacuccaacaacucuaucgcuauccccaucaacuucaccaucagcgugaccaccgagauccugccuguguccaugaccaagaccagcguggacugcaccauguacaucugcggcgauuccaccgagugcuccaaccugcugcugcaguacggcagcuucugcacccagcugaauagagcccugacagggaucgccguggaacaggacaagaacacccaagagguguucgcccaagugaagcaaaucuacaagaccccuccuaucaaggacuucggcggcuucaauuucagccagauucugcccgauccuagcaagcccagcaagcggagcuucaucgaggaccugcuguucaacaaagugacacuggccgacgccggcuucaucaagcaguauggcgauugucugggcgacauugccgccagggaucugauuugcgcccagaaguuuaacggacugacagugcugccuccucugcugaccgaugagaugaucgcccaguacacaucugcccugcuggccggcacaaucacaagcggcuggacauuuggagcuggcgccgcucugcagauccccuuugcuaugcagauggccuaccgguucaacggcaucggagugacccagaaugugcuguacgagaaccagaagcugaucgccaaccaguucaacagcgccaucggcaagauccaggacagccugagcagcacagcaagcgcccugggaaagcugcaggacguggucaaccagaaugcccaggcacugaacacccuggucaagcagcuguccuccaacuucggcgccaucagcucugugcugaacgauauccuggccagacuggacccuccugaggccgaggugcagaucgacagacugaucacaggcagacugcagagccuccagacauacgugacccagcagcugaucagagccgccgagauuagagccucugccaaucuggccgccaccaagaugucugagugugugcugggccagagcaagagaguggacuuuugcggcaagggcuaccaccugaugagcuucccucagucugccccucacggcgugguguuucugcacgugacauaugugcccgcucaagagaagaauuucaccaccgcuccagccaucugccacgacggcaaagcccacuuuccuagagaaggcguguucguguccaacggcacccauugguucgugacacagcggaacuucuacgagccccagaucaucaccacccacaacaccuucgugucuggcaacugcgacguugugaucggcauugugaacaauaccguguacgacccucugcagcccgagcuggacagcuucaaagaggaacuggacaaguacuuuaagaaccacacaagccccgacguggaccugggcgauaucagcggaaucaaugccagcgucgugaacauccagaaagagaucgaccggcugaacgagguggccaagaaucugaacgagagccugaucgaccugcaagaacuggggaaguacgagcaguacaucaaguggcccugguacaucuggcugggcuuuaucgccggacugauugccaucgugauggucacaaucaugcuguguugcaugaccagcugcuguagcugccugaagggcuguuguagcuguggcagcugcugcaaguucgacgaggacgauucugagcccgugcugaagggcgugaaacugcacuacaccugaggacuaguuauaagacugacuagcccgaugggccucccaacgggcccuccuccccuccuugcaccgagauuaauagaucucaaaggcucuuuucagagccaccaaaaaaaaaaaaaaaaaaaaaaaaaaaaaaaaaaaaaaaaaaaaaaaaaaaaaaaaaaaaaaaaaaaaaaaaaaaaaaaaaaaaaaaaaaaaaaaaaaaaa

SEQ ID NO: 24482 - RNA, 4041 nt, Artificial Sequence
  SARS-CoV-2/Wuhan/WIV05/2019__EPI_ISL_402128 spike protein mRNA gc mod (1-1273)(K986P_V987P_K986P_V987P_K417N_E484K_N501Y_D614G)
aggagaaagcuuaccauguucguguuucuggugcugcugccccugguguccagccagugugugaaccugaccaccagaacacagcugccuccagccuacaccaacagcuucaccagaggcguguacuaccccgacaagguguucagauccagcgugcugcacucuacccaggaccuguuccugccuuucuucagcaacgugaccugguuccacgccauccacguguccggcaccaauggcaccaagagauucgacaaccccgugcugcccuucaacgacgggguguacuuugccagcaccgagaaguccaacaucaucagaggcuggaucuucggcaccacacuggacagcaagacccagagccugcugaucgugaacaacgccaccaacguggucaucaaagugugcgaguuccaguucugcaacgaccccuuccugggcgucuacuaccacaagaacaacaagagcuggauggaaagcgaguuccggguguacagcagcgccaacaacugcaccuucgaguacgugucccagccuuuccugauggaccuggaaggcaagcagggcaacuucaagaaccugcgcgaguucguguucaagaacaucgacggcuacuucaaaaucuacagcaagcacaccccuaucaaccucgugcgggaucugccucagggcuucucugcucuggaaccccugguggaucugcccaucggcaucaacaucacccgguuucagacacugcuggcccugcacagaagcuaccugacaccuggcgauagcagcagcggauggacagcuggugccgccgcuuacuaugugggcuaccugcagccuagaaccuuccugcugaaguacaacgagaacggcaccaucaccgacgccguggauugugcucuggauccucugagcgagacaaagugcacccugaaguccuucaccguggaaaagggcaucuaccagaccagcaacuuccgggugcagcccaccgaauccaucgugcgguuccccaauaucaccaaucugugccccuucggcgagguguucaaugccaccagauucgccucuguguacgccuggaaccggaagcggaucagcaauugcguggccgacuacuccgugcuguacaacuccgccagcuucagcaccuucaagugcuacggcguguccccuaccaagcugaacgaccugugcuucacaaacguguacgccgacagcuucgugauccggggagaugaagugcggcagauugccccuggacagacaggcaacaucgccgacuacaacuacaagcugcccgacgacuucaccggcugugugauugccuggaacagcaacaaccuggacuccaaagucggcggcaacuacaauuaccuguaccggcuguuccggaaguccaaucugaagcccuucgagcgggacaucagcaccgaaaucuaucaggccggcagcaccccuugcaacggcgugaagggcuucaacugcuacuucccacugcaguccuacggcuuucagcccacauacggcgugggcuaucagcccuacagagugguggugcugagcuucgaacugcugcaugcuccugccacagugugcggcccuaagaaaagcaccaaucucgugaagaacaaaugcgugaacuucaacuucaacggccugaccggcaccggcgugcugacagagagcaacaagaaguuccugccauuccagcaguuuggccgggauaucgccgauaccacagacgccguuagagauccccagacacuggaaauccuggacaucaccccaugcagcuucggcggagugucugugaucaccccuggcaccaacaccagcaaucagguggcagugcuguaccagggcgugaacuguaccgaagugcccguggccauucacgccgaucagcugacaccuacauggcggguguacuccaccggcagcaauguguuucagaccagagccggcugucugaucggagccgagcacgugaacaauagcuacgagugcgacauccccaucggcgcuggcaucugugccagcuaccagacacagacaaacagccccagacgggcuagaagcguggccagccagagcaucauugccuacacaaugucucugggcgccgagaacagcguggccuacuccaacaacucuaucgcuauccccaccaacuucaccaucagcgugaccaccgagauccugccuguguccaugaccaagaccagcguggacugcaccauguacaucugcggcgauuccaccgagugcuccaaccugcugcugcaguacggcagcuucugcacccagcugaauagagcccugacagggaucgccguggaacaggacaagaacacccaagagguguucgcccaagugaagcaaaucuacaagaccccuccuaucaaggacuucggcggcuucaauuucagccagauucugcccgauccuagcaagcccagcaagcggagcuucaucgaggaccugcuguucaacaaagugacacuggccgacgccggcuucaucaagcaguauggcgauugucugggcgacauugccgccagggaucugauuugcgcccagaaguuuaacggacugacagugcugccuccucugcugaccgaugagaugaucgcccaguacacaucugcccugcuggccggcacaaucacaagcggcuggacauuuggagcuggcgccgcucugcagauccccuuugcuaugcagauggccuaccgguucaacggcaucggagugacccagaaugugcuguacgagaaccagaagcugaucgccaaccaguucaacagcgccaucggcaagauccaggacagccugagcagcacagcaagcgcccugggaaagcugcaggacguggucaaccagaaugcccaggcacugaacacccuggucaagcagcuguccuccaacuucggcgccaucagcucugugcugaacgauauccugagcagacuggacccuccugaggccgaggugcagaucgacagacugaucacaggcagacugcagagccuccagacauacgugacccagcagcugaucagagccgccgagauuagagccucugccaaucuggccgccaccaagaugucugagugugugcugggccagagcaagagaguggacuuuugcggcaagggcuaccaccugaugagcuucccucagucugccccucacggcgugguguuucugcacgugacauaugugcccgcucaagagaagaauuucaccaccgcuccagccaucugccacgacggcaaagcccacuuuccuagagaaggcguguucguguccaacggcacccauugguucgugacacagcggaacuucuacgagccccagaucaucaccaccgacaacaccuucgugucuggcaacugcgacguugugaucggcauugugaacaauaccguguacgacccucugcagcccgagcuggacagcuucaaagaggaacuggacaaguacuuuaagaaccacacaagccccgacguggaccugggcgauaucagcggaaucaaugccagcgucgugaacauccagaaagagaucgaccggcugaacgagguggccaagaaucugaacgagagccugaucgaccugcaagaacuggggaaguacgagcaguacaucaaguggcccugguacaucuggcugggcuuuaucgccggacugauugccaucgugauggucacaaucaugcuguguugcaugaccagcugcuguagcugccugaagggcuguuguagcuguggcagcugcugcaaguucgacgaggacgauucugagcccgugcugaagggcgugaaacugcacuacaccugaggacuaguuauaagacugacuagcccgaugggccucccaacgggcccuccuccccuccuugcaccgagauuaauagaucucaaaggcucuuuucagagccaccaaaaaaaaaaaaaaaaaaaaaaaaaaaaaaaaaaaaaaaaaaaaaaaaaaaaaaaaaaaaaaaaaaaaaaaaaaaaaaaaaaaaaaaaaaaaaaaaaaaaa

SEQ ID NO: 24483 - RNA, 4032 nt, Artificial Sequence
  SARS-CoV-2/Wuhan/WIV05/2019__EPI_ISL_402128 spike protein mRNA gc mod (1-1273)(K986P_V987P_K986P_V987P_L18F_D80A_D215G_L242del_A243del_ L244del_R246I_K417N_E484K_N501Y_D614G_A701V)
aggagaaagcuuaccauguucguguuucuggugcugcugccccugguguccagccagugugugaacuucaccaccagaacacagcugccuccagccuacaccaacagcuucaccagaggcguguacuaccccgacaagguguucagauccagcgugcugcacucuacccaggaccuguuccugccuuucuucagcaacgugaccugguuccacgccauccacguguccggcaccaauggcaccaagagauucgccaaccccgugcugcccuucaacgacgggguguacuuugccagcaccgagaaguccaacaucaucagaggcuggaucuucggcaccacacuggacagcaagacccagagccugcugaucgugaacaacgccaccaacguggucaucaaagugugcgaguuccaguucugcaacgaccccuuccugggcgucuacuaccacaagaacaacaagagcuggauggaaagcgaguuccggguguacagcagcgccaacaacugcaccuucgaguacgugucccagccuuuccugauggaccuggaaggcaagcagggcaacuucaagaaccugcgcgaguucguguucaagaacaucgacggcuacuucaaaaucuacagcaagcacaccccuaucaaccucgugcggggccugccucagggcuucucugcucuggaaccccugguggaucugcccaucggcaucaacaucacccgguuucagacacugcacaucagcuaccugacaccuggcgauagcagcagcggauggacagcuggugccgccgcuuacuaugugggcuaccugcagccuagaaccuuccugcugaaguacaacgagaacggcaccaucaccgacgccguggauugugcucuggauccucugagcgagacaaagugcacccugaaguccuucaccguggaaaagggcaucuaccagaccagcaacuuccgggugcagcccaccgaauccaucgugcgguuccccaauaucaccaaucugugccccuucggcgagguguucaaugccaccagauucgccucuguguacgccuggaaccggaagcggaucagcaauugcguggccgacuacuccgugcuguacaacuccgccagcuucagcaccuucaagugcuacggcguguccccuaccaagcugaacgaccugugcuucacaaacguguacgccgacagcuucgugauccggggagaugaagugcggcagauugccccuggacagacaggcaacaucgccgacuacaacuacaagcugcccgacgacuucaccggcugugugauugccuggaacagcaacaaccuggacuccaaagucggcggcaacuacaauuaccuguaccggcuguuccggaaguccaaucugaagcccuucgagcgggacaucagcaccgaaaucuaucaggccggcagcaccccuugcaacggcgugaagggcuucaacugcuacuucccacugcaguccuacggcuuucagcccacauacggcgugggcuaucagcccuacagagugguggugcugagcuucgaacugcugcaugcuccugccacagugugcggcccuaagaaaagcaccaaucucgugaagaacaaaugcgugaacuucaacuucaacggccugaccggcaccggcgugcugacagagagcaacaagaaguuccugccauuccagcaguuuggccgggauaucgccgauaccacagacgccguuagagauccccagacacuggaaauccuggacaucaccccaugcagcuucggcggagugucugugaucaccccuggcaccaacaccagcaaucagguggcagugcuguaccagggcgugaacuguaccgaagugcccguggccauucacgccgaucagcugacaccuacauggcggguguacuccaccggcagcaauguguuucagaccagagccggcugucugaucggagccgagcacgugaacaauagcuacgagugcgacauccccaucggcgcuggcaucugugccagcuaccagacacagacaaacagccccagacgggcuagaagcguggccagccagagcaucauugccuacacaaugucucugggcguggagaacagcguggccuacuccaacaacucuaucgcuauccccaccaacuucaccaucagcgugaccaccgagauccugccuguguccaugaccaagaccagcguggacugcaccauguacaucugcggcgauuccaccgagugcuccaaccugcugcugcaguacggcagcuucugcacccagcugaauagagcccugacagggaucgccguggaacaggacaagaacacccaagagguguucgcccaagugaagcaaaucuacaagaccccuccuaucaaggacuucggcggcuucaauuucagccagauucugcccgauccuagcaagcccagcaagcggagcuucaucgaggaccugcuguucaacaaagugacacuggccgacgccggcuucaucaagcaguauggcgauugucugggcgacauugccgccagggaucugauuugcgcccagaaguuuaacggacugacagugcugccuccucugcugaccgaugagaugaucgcccaguacacaucugcccugcuggccggcacaaucacaagcggcuggacauuuggagcuggcgccgcucugcagauccccuuugcuaugcagauggccuaccgguucaacggcaucggagugacccagaaugugcuguacgagaaccagaagcugaucgccaaccaguucaacagcgccaucggcaagauccaggacagccugagcagcacagcaagcgcccugggaaagcugcaggacguggucaaccagaaugcccaggcacugaacacccuggucaagcagcuguccuccaacuucggcgccaucagcucugugcugaacgauauccugagcagacuggacccuccugaggccgaggugcagaucgacagacugaucacaggcagacugcagagccuccagacauacgugacccagcagcugaucagagccgccgagauuagagccucugccaaucuggccgccaccaagaugucugagugugugcugggccagagcaagagaguggacuuuugcggcaagggcuaccaccugaugagcuucccucagucugccccucacggcgugguguuucugcacgugacauaugugcccgcucaagagaagaauuucaccaccgcuccagccaucugccacgacggcaaagcccacuuuccuagagaaggcguguucguguccaacggcacccauugguucgugacacagcggaacuucuacgagccccagaucaucaccaccgacaacaccuucgugucuggcaacugcgacguugugaucggcauugugaacaauaccguguacgacccucugcagcccgagcuggacagcuucaaagaggaacuggacaaguacuuuaagaaccacacaagccccgacguggaccugggcgauaucagcggaaucaaugccagcgucgugaacauccagaaagagaucgaccggcugaacgagguggccaagaaucugaacgagagccugaucgaccugcaagaacuggggaaguacgagcaguacaucaaguggcccugguacaucuggcugggcuuuaucgccggacugauugccaucgugauggucacaaucaugcuguguugcaugaccagcugcuguagcugccugaagggcuguuguagcuguggcagcugcugcaaguucgacgaggacgauucugagcccgugcugaagggcgugaaacugcacuacaccugaggacuaguuauaagacugacuagcccgaugggccucccaacgggcccuccuccccuccuugcaccgagauuaauagaucucaaaggcucuuuucagagccaccaaaaaaaaaaaaaaaaaaaaaaaaaaaaaaaaaaaaaaaaaaaaaaaaaaaaaaaaaaaaaaaaaaaaaaaaaaaaaaaaaaaaaaaaaaaaaaaaaaaaa

SEQ ID NO: 24484 - RNA, 4041 nt, Artificial Sequence
  SARS-CoV-2/Wuhan/WIV05/2019__EPI_ISL_402128 spike protein mRNA gc mod (1-1273)(K986P_V987P_K986P_V987P_E484K_D614G)
aggagaaagcuuaccauguucguguuucuggugcugcugccccugguguccagccagugugugaaccugaccaccagaacacagcugccuccagccuacaccaacagcuucaccagaggcguguacuaccccgacaagguguucagauccagcgugcugcacucuacccaggaccuguuccugccuuucuucagcaacgugaccugguuccacgccauccacguguccggcaccaauggcaccaagagauucgacaaccccgugcugcccuucaacgacgggguguacuuugccagcaccgagaaguccaacaucaucagaggcuggaucuucggcaccacacuggacagcaagacccagagccugcugaucgugaacaacgccaccaacguggucaucaaagugugcgaguuccaguucugcaacgaccccuuccugggcgucuacuaccacaagaacaacaagagcuggauggaaagcgaguuccggguguacagcagcgccaacaacugcaccuucgaguacgugucccagccuuuccugauggaccuggaaggcaagcagggcaacuucaagaaccugcgcgaguucguguucaagaacaucgacggcuacuucaaaaucuacagcaagcacaccccuaucaaccucgugcgggaucugccucagggcuucucugcucuggaaccccugguggaucugcccaucggcaucaacaucacccgguuucagacacugcuggcccugcacagaagcuaccugacaccuggcgauagcagcagcggauggacagcuggugccgccgcuuacuaugugggcuaccugcagccuagaaccuuccugcugaaguacaacgagaacggcaccaucaccgacgccguggauugugcucuggauccucugagcgagacaaagugcacccugaaguccuucaccguggaaaagggcaucuaccagaccagcaacuuccgggugcagcccaccgaauccaucgugcgguuccccaauaucaccaaucugugccccuucggcgagguguucaaugccaccagauucgccucuguguacgccuggaaccggaagcggaucagcaauugcguggccgacuacuccgugcuguacaacuccgccagcuucagcaccuucaagugcuacggcguguccccuaccaagcugaacgaccugugcuucacaaacguguacgccgacagcuucgugauccggggagaugaagugcggcagauugccccuggacagacaggcaagaucgccgacuacaacuacaagcugcccgacgacuucaccggcugugugauugccuggaacagcaacaaccuggacuccaaagucggcggcaacuacaauuaccuguaccggcuguuccggaaguccaaucugaagcccuucgagcgggacaucagcaccgaaaucuaucaggccggcagcaccccuugcaacggcgugaagggcuucaacugcuacuucccacugcaguccuacggcuuucagcccacaaauggcgugggcuaucagcccuacagagugguggugcugagcuucgaacugcugcaugcuccugccacagugugcggcccuaagaaaagcaccaaucucgugaagaacaaaugcgugaacuucaacuucaacggccugaccggcaccggcgugcugacagagagcaacaagaaguuccugccauuccagcaguuuggccgggauaucgccgauaccacagacgccguuagagauccccagacacuggaaauccuggacaucaccccaugcagcuucggcggagugucugugaucaccccuggcaccaacaccagcaaucagguggcagugcuguaccagggcgugaacuguaccgaagugcccguggccauucacgccgaucagcugacaccuacauggcggguguacuccaccggcagcaauguguuucagaccagagccggcugucugaucggagccgagcacgugaacaauagcuacgagugcgacauccccaucggcgcuggcaucugugccagcuaccagacacagacaaacagccccagacgggcuagaagcguggccagccagagcaucauugccuacacaaugucucugggcgccgagaacagcguggccuacuccaacaacucuaucgcuauccccaccaacuucaccaucagcgugaccaccgagauccugccuguguccaugaccaagaccagcguggacugcaccauguacaucugcggcgauuccaccgagugcuccaaccugcugcugcaguacggcagcuucugcacccagcugaauagagcccugacagggaucgccguggaacaggacaagaacacccaagagguguucgcccaagugaagcaaaucuacaagaccccuccuaucaaggacuucggcggcuucaauuucagccagauucugcccgauccuagcaagcccagcaagcggagcuucaucgaggaccugcuguucaacaaagugacacuggccgacgccggcuucaucaagcaguauggcgauugucugggcgacauugccgccagggaucugauuugcgcccagaaguuuaacggacugacagugcugccuccucugcugaccgaugagaugaucgcccaguacacaucugcccugcuggccggcacaaucacaagcggcuggacauuuggagcuggcgccgcucugcagauccccuuugcuaugcagauggccuaccgguucaacggcaucggagugacccagaaugugcuguacgagaaccagaagcugaucgccaaccaguucaacagcgccaucggcaagauccaggacagccugagcagcacagcaagcgcccugggaaagcugcaggacguggucaaccagaaugcccaggcacugaacacccuggucaagcagcuguccuccaacuucggcgccaucagcucugugcugaacgauauccugagcagacuggacccuccugaggccgaggugcagaucgacagacugaucacaggcagacugcagagccuccagacauacgugacccagcagcugaucagagccgccgagauuagagccucugccaaucuggccgccaccaagaugucugagugugugcugggccagagcaagagaguggacuuuugcggcaagggcuaccaccugaugagcuucccucagucugccccucacggcgugguguuucugcacgugacauaugugcccgcucaagagaagaauuucaccaccgcuccagccaucugccacgacggcaaagcccacuuuccuagagaaggcguguucguguccaacggcacccauugguucgugacacagcggaacuucuacgagccccagaucaucaccaccgacaacaccuucgugucuggcaacugcgacguugugaucggcauugugaacaauaccguguacgacccucugcagcccgagcuggacagcuucaaagaggaacuggacaaguacuuuaagaaccacacaagccccgacguggaccugggcgauaucagcggaaucaaugccagcgucgugaacauccagaaagagaucgaccggcugaacgagguggccaagaaucugaacgagagccugaucgaccugcaagaacuggggaaguacgagcaguacaucaaguggcccugguacaucuggcugggcuuuaucgccggacugauugccaucgugauggucacaaucaugcuguguugcaugaccagcugcuguagcugccugaagggcuguuguagcuguggcagcugcugcaaguucgacgaggacgauucugagcccgugcugaagggcgugaaacugcacuacaccugaggacuaguuauaagacugacuagcccgaugggccucccaacgggcccuccuccccuccuugcaccgagauuaauagaucucaaaggcucuuuucagagccaccaaaaaaaaaaaaaaaaaaaaaaaaaaaaaaaaaaaaaaaaaaaaaaaaaaaaaaaaaaaaaaaaaaaaaaaaaaaaaaaaaaaaaaaaaaaaaaaaaaaaa

SEQ ID NO: 24485 - RNA, 4041 nt, Artificial Sequence
  SARS-CoV-2/Wuhan/WIV05/2019__EPI_ISL_402128 spike protein mRNA gc mod (1-1273)(K986P_V987P_K986P_V987P_L18F_T20N_P26S_D138Y_R190S_K417T _E484K_N501Y_D614G_H655Y_T1027I)
aggagaaagcuuaccauguucguguuucuggugcugcugccccugguguccagccagugugugaacuucaccaacagaacacagcugccuagcgccuacaccaacagcuucaccagaggcguguacuaccccgacaagguguucagauccagcgugcugcacucuacccaggaccuguuccugccuuucuucagcaacgugaccugguuccacgccauccacguguccggcaccaauggcaccaagagauucgacaaccccgugcugcccuucaacgacgggguguacuuugccagcaccgagaaguccaacaucaucagaggcuggaucuucggcaccacacuggacagcaagacccagagccugcugaucgugaacaacgccaccaacguggucaucaaagugugcgaguuccaguucugcaacuaccccuuccugggcgucuacuaccacaagaacaacaagagcuggauggaaagcgaguuccggguguacagcagcgccaacaacugcaccuucgaguacgugucccagccuuuccugauggaccuggaaggcaagcagggcaacuucaagaaccugagcgaguucguguucaagaacaucgacggcuacuucaaaaucuacagcaagcacaccccuaucaaccucgugcgggaucugccucagggcuucucugcucuggaaccccugguggaucugcccaucggcaucaacaucacccgguuucagacacugcuggcccugcacagaagcuaccugacaccuggcgauagcagcagcggauggacagcuggugccgccgcuuacuaugugggcuaccugcagccuagaaccuuccugcugaaguacaacgagaacggcaccaucaccgacgccguggauugugcucuggauccucugagcgagacaaagugcacccugaaguccuucaccguggaaaagggcaucuaccagaccagcaacuuccgggugcagcccaccgaauccaucgugcgguuccccaauaucaccaaucugugccccuucggcgagguguucaaugccaccagauucgccucuguguacgccuggaaccggaagcggaucagcaauugcguggccgacuacuccgugcuguacaacuccgccagcuucagcaccuucaagugcuacggcguguccccuaccaagcugaacgaccugugcuucacaaacguguacgccgacagcuucgugauccggggagaugaagugcggcagauugccccuggacagacaggcaccaucgccgacuacaacuacaagcugcccgacgacuucaccggcugugugauugccuggaacagcaacaaccuggacuccaaagucggcggcaacuacaauuaccuguaccggcuguuccggaaguccaaucugaagcccuucgagcgggacaucagcaccgaaaucuaucaggccggcagcaccccuugcaacggcgugaagggcuucaacugcuacuucccacugcaguccuacggcuuucagcccacauacggcgugggcuaucagcccuacagagugguggugcugagcuucgaacugcugcaugcuccugccacagugugcggcccuaagaaaagcaccaaucucgugaagaacaaaugcgugaacuucaacuucaacggccugaccggcaccggcgugcugacagagagcaacaagaaguuccugccauuccagcaguuuggccgggauaucgccgauaccacagacgccguuagagauccccagacacuggaaauccuggacaucaccccaugcagcuucggcggagugucugugaucaccccuggcaccaacaccagcaaucagguggcagugcuguaccagggcgugaacuguaccgaagugcccguggccauucacgccgaucagcugacaccuacauggcggguguacuccaccggcagcaauguguuucagaccagagccggcugucugaucggagccgaguacgugaacaauagcuacgagugcgacauccccaucggcgcuggcaucugugccagcuaccagacacagacaaacagccccagacgggcuagaagcguggccagccagagcaucauugccuacacaaugucucugggcgccgagaacagcguggccuacuccaacaacucuaucgcuauccccaccaacuucaccaucagcgugaccaccgagauccugccuguguccaugaccaagaccagcguggacugcaccauguacaucugcggcgauuccaccgagugcuccaaccugcugcugcaguacggcagcuucugcacccagcugaauagagcccugacagggaucgccguggaacaggacaagaacacccaagagguguucgcccaagugaagcaaaucuacaagaccccuccuaucaaggacuucggcggcuucaauuucagccagauucugcccgauccuagcaagcccagcaagcggagcuucaucgaggaccugcuguucaacaaagugacacuggccgacgccggcuucaucaagcaguauggcgauugucugggcgacauugccgccagggaucugauuugcgcccagaaguuuaacggacugacagugcugccuccucugcugaccgaugagaugaucgcccaguacacaucugcccugcuggccggcacaaucacaagcggcuggacauuuggagcuggcgccgcucugcagauccccuuugcuaugcagauggccuaccgguucaacggcaucggagugacccagaaugugcuguacgagaaccagaagcugaucgccaaccaguucaacagcgccaucggcaagauccaggacagccugagcagcacagcaagcgcccugggaaagcugcaggacguggucaaccagaaugcccaggcacugaacacccuggucaagcagcuguccuccaacuucggcgccaucagcucugugcugaacgauauccugagcagacuggacccuccugaggccgaggugcagaucgacagacugaucacaggcagacugcagagccuccagacauacgugacccagcagcugaucagagccgccgagauuagagccucugccaaucuggccgccaucaagaugucugagugugugcugggccagagcaagagaguggacuuuugcggcaagggcuaccaccugaugagcuucccucagucugccccucacggcgugguguuucugcacgugacauaugugcccgcucaagagaagaauuucaccaccgcuccagccaucugccacgacggcaaagcccacuuuccuagagaaggcguguucguguccaacggcacccauugguucgugacacagcggaacuucuacgagccccagaucaucaccaccgacaacaccuucgugucuggcaacugcgacguugugaucggcauugugaacaauaccguguacgacccucugcagcccgagcuggacagcuucaaagaggaacuggacaaguacuuuaagaaccacacaagccccgacguggaccugggcgauaucagcggaaucaaugccagcgucgugaacauccagaaagagaucgaccggcugaacgagguggccaagaaucugaacgagagccugaucgaccugcaagaacuggggaaguacgagcaguacaucaaguggcccugguacaucuggcugggcuuuaucgccggacugauugccaucgugauggucacaaucaugcuguguugcaugaccagcugcuguagcugccugaagggcuguuguagcuguggcagcugcugcaaguucgacgaggacgauucugagcccgugcugaagggcgugaaacugcacuacaccugaggacuaguuauaagacugacuagcccgaugggccucccaacgggcccuccuccccuccuugcaccgagauuaauagaucucaaaggcucuuuucagagccaccaaaaaaaaaaaaaaaaaaaaaaaaaaaaaaaaaaaaaaaaaaaaaaaaaaaaaaaaaaaaaaaaaaaaaaaaaaaaaaaaaaaaaaaaaaaaaaaaaaaaa

SEQ ID NO: 24486 - RNA, 4041 nt, Artificial Sequence
  SARS-CoV-2/Wuhan/WIV05/2019__EPI_ISL_402128 spike protein mRNA gc mod (1-1273)(K986P_V987P_K986P_V987P_S13I_W152C_L452R_D614G)
aggagaaagcuuaccauguucguguuucuggugcugcugccccugguguccauccagugugugaaccugaccaccagaacacagcugccuccagccuacaccaacagcuucaccagaggcguguacuaccccgacaagguguucagauccagcgugcugcacucuacccaggaccuguuccugccuuucuucagcaacgugaccugguuccacgccauccacguguccggcaccaauggcaccaagagauucgacaaccccgugcugcccuucaacgacgggguguacuuugccagcaccgagaaguccaacaucaucagaggcuggaucuucggcaccacacuggacagcaagacccagagccugcugaucgugaacaacgccaccaacguggucaucaaagugugcgaguuccaguucugcaacgaccccuuccugggcgucuacuaccacaagaacaacaagagcugcauggaaagcgaguuccggguguacagcagcgccaacaacugcaccuucgaguacgugucccagccuuuccugauggaccuggaaggcaagcagggcaacuucaagaaccugcgcgaguucguguucaagaacaucgacggcuacuucaaaaucuacagcaagcacaccccuaucaaccucgugcgggaucugccucagggcuucucugcucuggaaccccugguggaucugcccaucggcaucaacaucacccgguuucagacacugcuggcccugcacagaagcuaccugacaccuggcgauagcagcagcggauggacagcuggugccgccgcuuacuaugugggcuaccugcagccuagaaccuuccugcugaaguacaacgagaacggcaccaucaccgacgccguggauugugcucuggauccucugagcgagacaaagugcacccugaaguccuucaccguggaaaagggcaucuaccagaccagcaacuuccgggugcagcccaccgaauccaucgugcgguuccccaauaucaccaaucugugccccuucggcgagguguucaaugccaccagauucgccucuguguacgccuggaaccggaagcggaucagcaauugcguggccgacuacuccgugcuguacaacuccgccagcuucagcaccuucaagugcuacggcguguccccuaccaagcugaacgaccugugcuucacaaacguguacgccgacagcuucgugauccggggagaugaagugcggcagauugccccuggacagacaggcaagaucgccgacuacaacuacaagcugcccgacgacuucaccggcugugugauugccuggaacagcaacaaccuggacuccaaagucggcggcaacuacaauuaccgcuaccggcuguuccggaaguccaaucugaagcccuucgagcgggacaucagcaccgaaaucuaucaggccggcagcaccccuugcaacggcguggaaggcuucaacugcuacuucccacugcaguccuacggcuuucagcccacaaauggcgugggcuaucagcccuacagagugguggugcugagcuucgaacugcugcaugcuccugccacagugugcggcccuaagaaaagcaccaaucucgugaagaacaaaugcgugaacuucaacuucaacggccugaccggcaccggcgugcugacagagagcaacaagaaguuccugccauuccagcaguuuggccgggauaucgccgauaccacagacgccguuagagauccccagacacuggaaauccuggacaucaccccaugcagcuucggcggagugucugugaucaccccuggcaccaacaccagcaaucagguggcagugcuguaccagggcgugaacuguaccgaagugcccguggccauucacgccgaucagcugacaccuacauggcggguguacuccaccggcagcaauguguuucagaccagagccggcugucugaucggagccgagcacgugaacaauagcuacgagugcgacauccccaucggcgcuggcaucugugccagcuaccagacacagacaaacagccccagacgggcuagaagcguggccagccagagcaucauugccuacacaaugucucugggcgccgagaacagcguggccuacuccaacaacucuaucgcuauccccaccaacuucaccaucagcgugaccaccgagauccugccuguguccaugaccaagaccagcguggacugcaccauguacaucugcggcgauuccaccgagugcuccaaccugcugcugcaguacggcagcuucugcacccagcugaauagagcccugacagggaucgccguggaacaggacaagaacacccaagagguguucgcccaagugaagcaaaucuacaagaccccuccuaucaaggacuucggcggcuucaauuucagccagauucugcccgauccuagcaagcccagcaagcggagcuucaucgaggaccugcuguucaacaaagugacacuggccgacgccggcuucaucaagcaguauggcgauugucugggcgacauugccgccagggaucugauuugcgcccagaaguuuaacggacugacagugcugccuccucugcugaccgaugagaugaucgcccaguacacaucugcccugcuggccggcacaaucacaagcggcuggacauuuggagcuggcgccgcucugcagauccccuuugcuaugcagauggccuaccgguucaacggcaucggagugacccagaaugugcuguacgagaaccagaagcugaucgccaaccaguucaacagcgccaucggcaagauccaggacagccugagcagcacagcaagcgcccugggaaagcugcaggacguggucaaccagaaugcccaggcacugaacacccuggucaagcagcuguccuccaacuucggcgccaucagcucugugcugaacgauauccugagcagacuggacccuccugaggccgaggugcagaucgacagacugaucacaggcagacugcagagccuccagacauacgugacccagcagcugaucagagccgccgagauuagagccucugccaaucuggccgccaccaagaugucugagugugugcugggccagagcaagagaguggacuuuugcggcaagggcuaccaccugaugagcuucccucagucugccccucacggcgugguguuucugcacgugacauaugugcccgcucaagagaagaauuucaccaccgcuccagccaucugccacgacggcaaagcccacuuuccuagagaaggcguguucguguccaacggcacccauugguucgugacacagcggaacuucuacgagccccagaucaucaccaccgacaacaccuucgugucuggcaacugcgacguugugaucggcauugugaacaauaccguguacgacccucugcagcccgagcuggacagcuucaaagaggaacuggacaaguacuuuaagaaccacacaagccccgacguggaccugggcgauaucagcggaaucaaugccagcgucgugaacauccagaaagagaucgaccggcugaacgagguggccaagaaucugaacgagagccugaucgaccugcaagaacuggggaaguacgagcaguacaucaaguggcccugguacaucuggcugggcuuuaucgccggacugauugccaucgugauggucacaaucaugcuguguugcaugaccagcugcuguagcugccugaagggcuguuguagcuguggcagcugcugcaaguucgacgaggacgauucugagcccgugcugaagggcgugaaacugcacuacaccugaggacuaguuauaagacugacuagcccgaugggccucccaacgggcccuccuccccuccuugcaccgagauuaauagaucucaaaggcucuuuucagagccaccaaaaaaaaaaaaaaaaaaaaaaaaaaaaaaaaaaaaaaaaaaaaaaaaaaaaaaaaaaaaaaaaaaaaaaaaaaaaaaaaaaaaaaaaaaaaaaaaaaaaa

SEQ ID NO: 24487 - RNA, 4041 nt, Artificial Sequence
  SARS-CoV-2/Wuhan/WIV05/2019__EPI_ISL_402128 spike protein mRNA gc mod (1-1273)(K986P_V987P)
aggagaaagcuuaccauguucguguuccuggugcugcugccucugguguccagccagugugugaaccugaccaccagaacacagcugccuccagccuacaccaacagcuuuaccagaggcguguacuaccccgacaagguguucagauccagcgugcugcacucuacccaggaccuguuccugccuuucuucagcaacgugaccugguuccacgccauccacguguccggcaccaauggcaccaagagauucgacaaccccgugcugcccuucaacgacgggguguacuuugccagcaccgagaaguccaacaucaucagaggcuggaucuucggcaccacacuggacagcaagacccagagccugcugaucgugaacaacgccaccaacguggucaucaaagugugcgaguuccaguucugcaacgaccccuuccugggcgucuacuaccacaagaacaacaagagcuggauggaaagcgaguuccggguguacagcagcgccaacaacugcaccuucgaguacgugucccagccuuuccugauggaccuggaaggcaagcagggcaacuucaagaaccugcgcgaguucguguuuaagaacaucgacggcuacuucaagaucuacagcaagcacaccccuaucaaccucgugcgggaucugccucagggcuucucugcucuggaaccccugguggaucugcccaucggcaucaacaucacccgguuucagacacugcuggcccugcacagaagcuaccugacaccuggcgauagcagcagcggauggacagcuggugccgccgcuuacuaugugggcuaccugcagccuagaaccuuccugcugaaguacaacgagaacggcaccaucaccgacgccguggauugugcucuggauccucugagcgagacaaagugcacccugaaguccuucaccguggaaaagggcaucuaccagaccagcaacuuccgggugcagcccaccgaauccaucgugcgguuccccaauaucaccaaucugugccccuucggcgagguguucaaugccaccagauucgccucuguguacgccuggaaccggaagcggaucagcaauugcguggccgacuacuccgugcuguacaacuccgccagcuucagcaccuucaagugcuacggcguguccccuaccaagcugaacgaccugugcuucacaaacguguacgccgacagcuucgugauccggggagaugaagugcggcagauugccccuggacagacaggcaagaucgccgacuacaacuacaagcugcccgacgacuucaccggcugugugauugccuggaacagcaacaaccuggacuccaaagucggcggcaacuacaauuaccuguaccggcuguuccggaaguccaaucugaagcccuucgagcgggacaucuccaccgagaucuaucaggccggcagcaccccuuguaacggcguggaaggcuucaacugcuacuucccacugcaguccuacggcuuucagcccacaaauggcgugggcuaucagcccuacagagugguggugcugagcuucgaacugcugcaugccccugccacagugugcggcccuaagaaaagcaccaaucucgugaagaacaaaugcgugaacuucaacuucaacggccugaccggcaccggcgugcugacagagagcaacaagaaguuccugccauuccagcaguuuggccgggauaucgccgauaccacagacgccguuagagauccccagacacuggaaauccuggacaucaccccuugcagcuucggcggagugucugugaucaccccuggcaccaacaccagcaaucagguggcagugcuguaccaggacgugaacuguaccgaagugcccguggccauucacgccgaucagcugacaccuacauggcggguguacuccaccggcagcaauguguuucagaccagagccggcugucugaucggagccgagcacgugaacaauagcuacgagugcgacauccccaucggcgcuggaaucugcgccagcuaccagacacagacaaacagcccucggagagccagaagcguggccagccagagcaucauugccuacacaaugucucugggcgccgagaacagcguggccuacuccaacaacucuaucgcuauccccaccaacuucaccaucagcgugaccacagagauccugccuguguccaugaccaagaccagcguggacugcaccauguacaucugcggcgauuccaccgagugcuccaaccugcugcugcaguacggcagcuucugcacccagcugaauagagcccugacagggaucgccguggaacaggacaagaacacccaagagguguucgcccaagugaagcagaucuacaagaccccuccuaucaaggacuucggcggcuucaauuucagccagauucugcccgauccuagcaagcccagcaagcggagcuucaucgaggaccugcuguucaacaaagugacacuggccgacgccggcuucaucaagcaguauggcgauugucugggcgacauugccgccagggaucugauuugcgcccagaaguuuaacggacugacagugcugccuccucugcugaccgaugagaugaucgcccaguacacaucugcccugcuggccggcacaaucacaagcggcuggacauuuggagcaggcgccgcucugcagauccccuuugcuaugcagauggccuaccgguucaacggcaucggagugacccagaaugugcuguacgagaaccagaagcugaucgccaaccaguucaacagcgccaucggcaagauccaggacagccugagcagcacagcaagcgcccugggaaagcugcaggacguggucaaccagaaugcccaggcacugaacacccuggucaagcagcuguccuccaacuucggcgccaucagcucugugcugaacgauauccugagcagacuggacccuccugaggccgaggugcagaucgacagacugaucacaggcagacugcagagccuccagacauacgugacccagcagcugaucagagccgccgagauuagagccucugccaaucuggccgccaccaagaugucugagugugugcugggccagagcaagagaguggacuuuugcggcaagggcuaccaccugaugagcuucccucagucugccccucacggcgugguguuucugcacgugacauaugugcccgcucaagagaagaauuucaccaccgcuccagccaucugccacgacggcaaagcccacuuuccuagagaaggcguguucguguccaacggcacccauugguucgugacacagcggaacuucuacgagccccagaucaucaccaccgacaacaccuucgugucuggcaacugcgacgucgugaucggcauugugaacaauaccguguacgacccucugcagcccgagcuggacagcuucaaagaggaacuggacaaguacuuuaagaaccacacaagccccgacguggaccugggcgauaucagcggaaucaaugccagcgucgugaacauccagaaagagaucgaccggcugaacgagguggccaagaaucugaacgagagccugaucgaccugcaagaacuggggaaguacgagcaguacaucaaguggcccugguacaucuggcugggcuuuaucgccggacugauugccaucgugauggucacaaucaugcuguguugcaugaccagcugcuguagcugccugaagggcuguuguagcuguggcagcugcugcaaguucgacgaggacgauucugagcccgugcugaagggcgugaaacugcacuacacaugaggacuaguuauaagacugacuagcccgaugggccucccaacgggcccuccuccccuccuugcaccgagauuaauagaucucaaaggcucuuuucagagccaccaaaaaaaaaaaaaaaaaaaaaaaaaaaaaaaaaaaaaaaaaaaaaaaaaaaaaaaaaaaaaaaaaaaaaaaaaaaaaaaaaaaaaaaaaaaaaaaaaaaaa

SEQ ID NO: 24488 - RNA, 4041 nt, Artificial Sequence
  SARS-CoV-2/Wuhan/WIV05/2019__EPI_ISL_402128 spike protein mRNA gc mod (1-1273)(K986P_V987P_ D614G)
aggagaaagcuuaccauguucguguuccuggugcugcugccucugguguccagccagugugugaaccugaccaccagaacacagcugccuccagccuacaccaacagcuuuaccagaggcguguacuaccccgacaagguguucagauccagcgugcugcacucuacccaggaccuguuccugccuuucuucagcaacgugaccugguuccacgccauccacguguccggcaccaauggcaccaagagauucgacaaccccgugcugcccuucaacgacgggguguacuuugccagcaccgagaaguccaacaucaucagaggcuggaucuucggcaccacacuggacagcaagacccagagccugcugaucgugaacaacgccaccaacguggucaucaaagugugcgaguuccaguucugcaacgaccccuuccugggcgucuacuaccacaagaacaacaagagcuggauggaaagcgaguuccggguguacagcagcgccaacaacugcaccuucgaguacgugucccagccuuuccugauggaccuggaaggcaagcagggcaacuucaagaaccugcgcgaguucguguuuaagaacaucgacggcuacuucaagaucuacagcaagcacaccccuaucaaccucgugcgggaucugccucagggcuucucugcucuggaaccccugguggaucugcccaucggcaucaacaucacccgguuucagacacugcuggcccugcacagaagcuaccugacaccuggcgauagcagcagcggauggacagcuggugccgccgcuuacuaugugggcuaccugcagccuagaaccuuccugcugaaguacaacgagaacggcaccaucaccgacgccguggauugugcucuggauccucugagcgagacaaagugcacccugaaguccuucaccguggaaaagggcaucuaccagaccagcaacuuccgggugcagcccaccgaauccaucgugcgguuccccaauaucaccaaucugugccccuucggcgagguguucaaugccaccagauucgccucuguguacgccuggaaccggaagcggaucagcaauugcguggccgacuacuccgugcuguacaacuccgccagcuucagcaccuucaagugcuacggcguguccccuaccaagcugaacgaccugugcuucacaaacguguacgccgacagcuucgugauccggggagaugaagugcggcagauugccccuggacagacaggcaagaucgccgacuacaacuacaagcugcccgacgacuucaccggcugugugauugccuggaacagcaacaaccuggacuccaaagucggcggcaacuacaauuaccuguaccggcuguuccggaaguccaaucugaagcccuucgagcgggacaucuccaccgagaucuaucaggccggcagcaccccuuguaacggcguggaaggcuucaacugcuacuucccacugcaguccuacggcuuucagcccacaaauggcgugggcuaucagcccuacagagugguggugcugagcuucgaacugcugcaugccccugccacagugugcggcccuaagaaaagcaccaaucucgugaagaacaaaugcgugaacuucaacuucaacggccugaccggcaccggcgugcugacagagagcaacaagaaguuccugccauuccagcaguuuggccgggauaucgccgauaccacagacgccguuagagauccccagacacuggaaauccuggacaucaccccuugcagcuucggcggagugucugugaucaccccuggcaccaacaccagcaaucagguggcagugcuguaccagggcgugaacuguaccgaagugcccguggccauucacgccgaucagcugacaccuacauggcggguguacuccaccggcagcaauguguuucagaccagagccggcugucugaucggagccgagcacgugaacaauagcuacgagugcgacauccccaucggcgcuggaaucugcgccagcuaccagacacagacaaacagcccucggagagccagaagcguggccagccagagcaucauugccuacacaaugucucugggcgccgagaacagcguggccuacuccaacaacucuaucgcuauccccaccaacuucaccaucagcgugaccacagagauccugccuguguccaugaccaagaccagcguggacugcaccauguacaucugcggcgauuccaccgagugcuccaaccugcugcugcaguacggcagcuucugcacccagcugaauagagcccugacagggaucgccguggaacaggacaagaacacccaagagguguucgcccaagugaagcagaucuacaagaccccuccuaucaaggacuucggcggcuucaauuucagccagauucugcccgauccuagcaagcccagcaagcggagcuucaucgaggaccugcuguucaacaaagugacacuggccgacgccggcuucaucaagcaguauggcgauugucugggcgacauugccgccagggaucugauuugcgcccagaaguuuaacggacugacagugcugccuccucugcugaccgaugagaugaucgcccaguacacaucugcccugcuggccggcacaaucacaagcggcuggacauuuggagcaggcgccgcucugcagauccccuuugcuaugcagauggccuaccgguucaacggcaucggagugacccagaaugugcuguacgagaaccagaagcugaucgccaaccaguucaacagcgccaucggcaagauccaggacagccugagcagcacagcaagcgcccugggaaagcugcaggacguggucaaccagaaugcccaggcacugaacacccuggucaagcagcuguccuccaacuucggcgccaucagcucugugcugaacgauauccugagcagacuggacccuccugaggccgaggugcagaucgacagacugaucacaggcagacugcagagccuccagacauacgugacccagcagcugaucagagccgccgagauuagagccucugccaaucuggccgccaccaagaugucugagugugugcugggccagagcaagagaguggacuuuugcggcaagggcuaccaccugaugagcuucccucagucugccccucacggcgugguguuucugcacgugacauaugugcccgcucaagagaagaauuucaccaccgcuccagccaucugccacgacggcaaagcccacuuuccuagagaaggcguguucguguccaacggcacccauugguucgugacacagcggaacuucuacgagccccagaucaucaccaccgacaacaccuucgugucuggcaacugcgacgucgugaucggcauugugaacaauaccguguacgacccucugcagcccgagcuggacagcuucaaagaggaacuggacaaguacuuuaagaaccacacaagccccgacguggaccugggcgauaucagcggaaucaaugccagcgucgugaacauccagaaagagaucgaccggcugaacgagguggccaagaaucugaacgagagccugaucgaccugcaagaacuggggaaguacgagcaguacaucaaguggcccugguacaucuggcugggcuuuaucgccggacugauugccaucgugauggucacaaucaugcuguguugcaugaccagcugcuguagcugccugaagggcuguuguagcuguggcagcugcugcaaguucgacgaggacgauucugagcccgugcugaagggcgugaaacugcacuacacaugaggacuaguuauaagacugacuagcccgaugggccucccaacgggcccuccuccccuccuugcaccgagauuaauagaucucaaaggcucuuuucagagccaccaaaaaaaaaaaaaaaaaaaaaaaaaaaaaaaaaaaaaaaaaaaaaaaaaaaaaaaaaaaaaaaaaaaaaaaaaaaaaaaaaaaaaaaaaaaaaaaaaaaaa

SEQ ID NO: 24489 - RNA, 4041 nt, Artificial Sequence
  SARS-CoV-2/Wuhan/WIV05/2019__EPI_ISL_402128 spike protein mRNA gc mod (1-1273)(K986P_V987P_A222V_D614G)
aggagaaagcuuaccauguucguguuccuggugcugcugccucugguguccagccagugugugaaccugaccaccagaacacagcugccuccagccuacaccaacagcuuuaccagaggcguguacuaccccgacaagguguucagauccagcgugcugcacucuacccaggaccuguuccugccuuucuucagcaacgugaccugguuccacgccauccacguguccggcaccaauggcaccaagagauucgacaaccccgugcugcccuucaacgacgggguguacuuugccagcaccgagaaguccaacaucaucagaggcuggaucuucggcaccacacuggacagcaagacccagagccugcugaucgugaacaacgccaccaacguggucaucaaagugugcgaguuccaguucugcaacgaccccuuccugggcgucuacuaccacaagaacaacaagagcuggauggaaagcgaguuccggguguacagcagcgccaacaacugcaccuucgaguacgugucccagccuuuccugauggaccuggaaggcaagcagggcaacuucaagaaccugcgcgaguucguguuuaagaacaucgacggcuacuucaagaucuacagcaagcacaccccuaucaaccucgugcgggaucugccucagggcuucucugugcuggaaccccugguggaucugcccaucggcaucaacaucacccgguuucagacacugcuggcccugcacagaagcuaccugacaccuggcgauagcagcagcggauggacagcuggugccgccgcuuacuaugugggcuaccugcagccuagaaccuuccugcugaaguacaacgagaacggcaccaucaccgacgccguggauugugcucuggauccucugagcgagacaaagugcacccugaaguccuucaccguggaaaagggcaucuaccagaccagcaacuuccgggugcagcccaccgaauccaucgugcgguuccccaauaucaccaaucugugccccuucggcgagguguucaaugccaccagauucgccucuguguacgccuggaaccggaagcggaucagcaauugcguggccgacuacuccgugcuguacaacuccgccagcuucagcaccuucaagugcuacggcguguccccuaccaagcugaacgaccugugcuucacaaacguguacgccgacagcuucgugauccggggagaugaagugcggcagauugccccuggacagacaggcaagaucgccgacuacaacuacaagcugcccgacgacuucaccggcugugugauugccuggaacagcaacaaccuggacuccaaagucggcggcaacuacaauuaccuguaccggcuguuccggaaguccaaucugaagcccuucgagcgggacaucuccaccgagaucuaucaggccggcagcaccccuuguaacggcguggaaggcuucaacugcuacuucccacugcaguccuacggcuuucagcccacaaauggcgugggcuaucagcccuacagagugguggugcugagcuucgaacugcugcaugccccugccacagugugcggcccuaagaaaagcaccaaucucgugaagaacaaaugcgugaacuucaacuucaacggccugaccggcaccggcgugcugacagagagcaacaagaaguuccugccauuccagcaguuuggccgggauaucgccgauaccacagacgccguuagagauccccagacacuggaaauccuggacaucaccccuugcagcuucggcggagugucugugaucaccccuggcaccaacaccagcaaucagguggcagugcuguaccagggcgugaacuguaccgaagugcccguggccauucacgccgaucagcugacaccuacauggcggguguacuccaccggcagcaauguguuucagaccagagccggcugucugaucggagccgagcacgugaacaauagcuacgagugcgacauccccaucggcgcuggaaucugcgccagcuaccagacacagacaaacagcccucggagagccagaagcguggccagccagagcaucauugccuacacaaugucucugggcgccgagaacagcguggccuacuccaacaacucuaucgcuauccccaccaacuucaccaucagcgugaccacagagauccugccuguguccaugaccaagaccagcguggacugcaccauguacaucugcggcgauuccaccgagugcuccaaccugcugcugcaguacggcagcuucugcacccagcugaauagagcccugacagggaucgccguggaacaggacaagaacacccaagagguguucgcccaagugaagcagaucuacaagaccccuccuaucaaggacuucggcggcuucaauuucagccagauucugcccgauccuagcaagcccagcaagcggagcuucaucgaggaccugcuguucaacaaagugacacuggccgacgccggcuucaucaagcaguauggcgauugucugggcgacauugccgccagggaucugauuugcgcccagaaguuuaacggacugacagugcugccuccucugcugaccgaugagaugaucgcccaguacacaucugcccugcuggccggcacaaucacaagcggcuggacauuuggagcaggcgccgcucugcagauccccuuugcuaugcagauggccuaccgguucaacggcaucggagugacccagaaugugcuguacgagaaccagaagcugaucgccaaccaguucaacagcgccaucggcaagauccaggacagccugagcagcacagcaagcgcccugggaaagcugcaggacguggucaaccagaaugcccaggcacugaacacccuggucaagcagcuguccuccaacuucggcgccaucagcucugugcugaacgauauccugagcagacuggacccuccugaggccgaggugcagaucgacagacugaucacaggcagacugcagagccuccagacauacgugacccagcagcugaucagagccgccgagauuagagccucugccaaucuggccgccaccaagaugucugagugugugcugggccagagcaagagaguggacuuuugcggcaagggcuaccaccugaugagcuucccucagucugccccucacggcgugguguuucugcacgugacauaugugcccgcucaagagaagaauuucaccaccgcuccagccaucugccacgacggcaaagcccacuuuccuagagaaggcguguucguguccaacggcacccauugguucgugacacagcggaacuucuacgagccccagaucaucaccaccgacaacaccuucgugucuggcaacugcgacgucgugaucggcauugugaacaauaccguguacgacccucugcagcccgagcuggacagcuucaaagaggaacuggacaaguacuuuaagaaccacacaagccccgacguggaccugggcgauaucagcggaaucaaugccagcgucgugaacauccagaaagagaucgaccggcugaacgagguggccaagaaucugaacgagagccugaucgaccugcaagaacuggggaaguacgagcaguacaucaaguggcccugguacaucuggcugggcuuuaucgccggacugauugccaucgugauggucacaaucaugcuguguugcaugaccagcugcuguagcugccugaagggcuguuguagcuguggcagcugcugcaaguucgacgaggacgauucugagcccgugcugaagggcgugaaacugcacuacacaugaggacuaguuauaagacugacuagcccgaugggccucccaacgggcccuccuccccuccuugcaccgagauuaauagaucucaaaggcucuuuucagagccaccaaaaaaaaaaaaaaaaaaaaaaaaaaaaaaaaaaaaaaaaaaaaaaaaaaaaaaaaaaaaaaaaaaaaaaaaaaaaaaaaaaaaaaaaaaaaaaaaaaaaa

SEQ ID NO: 24490 - RNA, 4041 nt, Artificial Sequence
  SARS-CoV-2/Wuhan/WIV05/2019__EPI_ISL_402128 spike protein mRNA gc mod (1-1273)(K986P_V987P_N439K_D614G)
aggagaaagcuuaccauguucguguuccuggugcugcugccucugguguccagccagugugugaaccugaccaccagaacacagcugccuccagccuacaccaacagcuuuaccagaggcguguacuaccccgacaagguguucagauccagcgugcugcacucuacccaggaccuguuccugccuuucuucagcaacgugaccugguuccacgccauccacguguccggcaccaauggcaccaagagauucgacaaccccgugcugcccuucaacgacgggguguacuuugccagcaccgagaaguccaacaucaucagaggcuggaucuucggcaccacacuggacagcaagacccagagccugcugaucgugaacaacgccaccaacguggucaucaaagugugcgaguuccaguucugcaacgaccccuuccugggcgucuacuaccacaagaacaacaagagcuggauggaaagcgaguuccggguguacagcagcgccaacaacugcaccuucgaguacgugucccagccuuuccugauggaccuggaaggcaagcagggcaacuucaagaaccugcgcgaguucguguuuaagaacaucgacggcuacuucaagaucuacagcaagcacaccccuaucaaccucgugcgggaucugccucagggcuucucugcucuggaaccccugguggaucugcccaucggcaucaacaucacccgguuucagacacugcuggcccugcacagaagcuaccugacaccuggcgauagcagcagcggauggacagcuggugccgccgcuuacuaugugggcuaccugcagccuagaaccuuccugcugaaguacaacgagaacggcaccaucaccgacgccguggauugugcucuggauccucugagcgagacaaagugcacccugaaguccuucaccguggaaaagggcaucuaccagaccagcaacuuccgggugcagcccaccgaauccaucgugcgguuccccaauaucaccaaucugugccccuucggcgagguguucaaugccaccagauucgccucuguguacgccuggaaccggaagcggaucagcaauugcguggccgacuacuccgugcuguacaacuccgccagcuucagcaccuucaagugcuacggcguguccccuaccaagcugaacgaccugugcuucacaaacguguacgccgacagcuucgugauccggggagaugaagugcggcagauugccccuggacagacaggcaagaucgccgacuacaacuacaagcugcccgacgacuucaccggcugugugauugccuggaacagcaagaaccuggacuccaaagucggcggcaacuacaauuaccuguaccggcuguuccggaaguccaaucugaagcccuucgagcgggacaucuccaccgagaucuaucaggccggcagcaccccuuguaacggcguggaaggcuucaacugcuacuucccacugcaguccuacggcuuucagcccacaaauggcgugggcuaucagcccuacagagugguggugcugagcuucgaacugcugcaugccccugccacagugugcggcccuaagaaaagcaccaaucucgugaagaacaaaugcgugaacuucaacuucaacggccugaccggcaccggcgugcugacagagagcaacaagaaguuccugccauuccagcaguuuggccgggauaucgccgauaccacagacgccguuagagauccccagacacuggaaauccuggacaucaccccuugcagcuucggcggagugucugugaucaccccuggcaccaacaccagcaaucagguggcagugcuguaccagggcgugaacuguaccgaagugcccguggccauucacgccgaucagcugacaccuacauggcggguguacuccaccggcagcaauguguuucagaccagagccggcugucugaucggagccgagcacgugaacaauagcuacgagugcgacauccccaucggcgcuggaaucugcgccagcuaccagacacagacaaacagcccucggagagccagaagcguggccagccagagcaucauugccuacacaaugucucugggcgccgagaacagcguggccuacuccaacaacucuaucgcuauccccaccaacuucaccaucagcgugaccacagagauccugccuguguccaugaccaagaccagcguggacugcaccauguacaucugcggcgauuccaccgagugcuccaaccugcugcugcaguacggcagcuucugcacccagcugaauagagcccugacagggaucgccguggaacaggacaagaacacccaagagguguucgcccaagugaagcagaucuacaagaccccuccuaucaaggacuucggcggcuucaauuucagccagauucugcccgauccuagcaagcccagcaagcggagcuucaucgaggaccugcuguucaacaaagugacacuggccgacgccggcuucaucaagcaguauggcgauugucugggcgacauugccgccagggaucugauuugcgcccagaaguuuaacggacugacagugcugccuccucugcugaccgaugagaugaucgcccaguacacaucugcccugcuggccggcacaaucacaagcggcuggacauuuggagcaggcgccgcucugcagauccccuuugcuaugcagauggccuaccgguucaacggcaucggagugacccagaaugugcuguacgagaaccagaagcugaucgccaaccaguucaacagcgccaucggcaagauccaggacagccugagcagcacagcaagcgcccugggaaagcugcaggacguggucaaccagaaugcccaggcacugaacacccuggucaagcagcuguccuccaacuucggcgccaucagcucugugcugaacgauauccugagcagacuggacccuccugaggccgaggugcagaucgacagacugaucacaggcagacugcagagccuccagacauacgugacccagcagcugaucagagccgccgagauuagagccucugccaaucuggccgccaccaagaugucugagugugugcugggccagagcaagagaguggacuuuugcggcaagggcuaccaccugaugagcuucccucagucugccccucacggcgugguguuucugcacgugacauaugugcccgcucaagagaagaauuucaccaccgcuccagccaucugccacgacggcaaagcccacuuuccuagagaaggcguguucguguccaacggcacccauugguucgugacacagcggaacuucuacgagccccagaucaucaccaccgacaacaccuucgugucuggcaacugcgacgucgugaucggcauugugaacaauaccguguacgacccucugcagcccgagcuggacagcuucaaagaggaacuggacaaguacuuuaagaaccacacaagccccgacguggaccugggcgauaucagcggaaucaaugccagcgucgugaacauccagaaagagaucgaccggcugaacgagguggccaagaaucugaacgagagccugaucgaccugcaagaacuggggaaguacgagcaguacaucaaguggcccugguacaucuggcugggcuuuaucgccggacugauugccaucgugauggucacaaucaugcuguguugcaugaccagcugcuguagcugccugaagggcuguuguagcuguggcagcugcugcaaguucgacgaggacgauucugagcccgugcugaagggcgugaaacugcacuacacaugaggacuaguuauaagacugacuagcccgaugggccucccaacgggcccuccuccccuccuugcaccgagauuaauagaucucaaaggcucuuuucagagccaccaaaaaaaaaaaaaaaaaaaaaaaaaaaaaaaaaaaaaaaaaaaaaaaaaaaaaaaaaaaaaaaaaaaaaaaaaaaaaaaaaaaaaaaaaaaaaaaaaaaaa

SEQ ID NO: 24491 - RNA, 4041 nt, Artificial Sequence
  SARS-CoV-2/Wuhan/WIV05/2019__EPI_ISL_402128 spike protein mRNA gc mod (1-1273)(K986P_V987P_S477N_D614G)
aggagaaagcuuaccauguucguguuccuggugcugcugccucugguguccagccagugugugaaccugaccaccagaacacagcugccuccagccuacaccaacagcuuuaccagaggcguguacuaccccgacaagguguucagauccagcgugcugcacucuacccaggaccuguuccugccuuucuucagcaacgugaccugguuccacgccauccacguguccggcaccaauggcaccaagagauucgacaaccccgugcugcccuucaacgacgggguguacuuugccagcaccgagaaguccaacaucaucagaggcuggaucuucggcaccacacuggacagcaagacccagagccugcugaucgugaacaacgccaccaacguggucaucaaagugugcgaguuccaguucugcaacgaccccuuccugggcgucuacuaccacaagaacaacaagagcuggauggaaagcgaguuccggguguacagcagcgccaacaacugcaccuucgaguacgugucccagccuuuccugauggaccuggaaggcaagcagggcaacuucaagaaccugcgcgaguucguguuuaagaacaucgacggcuacuucaagaucuacagcaagcacaccccuaucaaccucgugcgggaucugccucagggcuucucugcucuggaaccccugguggaucugcccaucggcaucaacaucacccgguuucagacacugcuggcccugcacagaagcuaccugacaccuggcgauagcagcagcggauggacagcuggugccgccgcuuacuaugugggcuaccugcagccuagaaccuuccugcugaaguacaacgagaacggcaccaucaccgacgccguggauugugcucuggauccucugagcgagacaaagugcacccugaaguccuucaccguggaaaagggcaucuaccagaccagcaacuuccgggugcagcccaccgaauccaucgugcgguuccccaauaucaccaaucugugccccuucggcgagguguucaaugccaccagauucgccucuguguacgccuggaaccggaagcggaucagcaauugcguggccgacuacuccgugcuguacaacuccgccagcuucagcaccuucaagugcuacggcguguccccuaccaagcugaacgaccugugcuucacaaacguguacgccgacagcuucgugauccggggagaugaagugcggcagauugccccuggacagacaggcaagaucgccgacuacaacuacaagcugcccgacgacuucaccggcugugugauugccuggaacagcaacaaccuggacuccaaagucggcggcaacuacaauuaccuguaccggcuguuccggaaguccaaucugaagcccuucgagcgggacaucuccaccgagaucuaucaggccggcaacaccccuuguaacggcguggaaggcuucaacugcuacuucccacugcaguccuacggcuuucagcccacaaauggcgugggcuaucagcccuacagagugguggugcugagcuucgaacugcugcaugccccugccacagugugcggcccuaagaaaagcaccaaucucgugaagaacaaaugcgugaacuucaacuucaacggccugaccggcaccggcgugcugacagagagcaacaagaaguuccugccauuccagcaguuuggccgggauaucgccgauaccacagacgccguuagagauccccagacacuggaaauccuggacaucaccccuugcagcuucggcggagugucugugaucaccccuggcaccaacaccagcaaucagguggcagugcuguaccagggcgugaacuguaccgaagugcccguggccauucacgccgaucagcugacaccuacauggcggguguacuccaccggcagcaauguguuucagaccagagccggcugucugaucggagccgagcacgugaacaauagcuacgagugcgacauccccaucggcgcuggaaucugcgccagcuaccagacacagacaaacagcccucggagagccagaagcguggccagccagagcaucauugccuacacaaugucucugggcgccgagaacagcguggccuacuccaacaacucuaucgcuauccccaccaacuucaccaucagcgugaccacagagauccugccuguguccaugaccaagaccagcguggacugcaccauguacaucugcggcgauuccaccgagugcuccaaccugcugcugcaguacggcagcuucugcacccagcugaauagagcccugacagggaucgccguggaacaggacaagaacacccaagagguguucgcccaagugaagcagaucuacaagaccccuccuaucaaggacuucggcggcuucaauuucagccagauucugcccgauccuagcaagcccagcaagcggagcuucaucgaggaccugcuguucaacaaagugacacuggccgacgccggcuucaucaagcaguauggcgauugucugggcgacauugccgccagggaucugauuugcgcccagaaguuuaacggacugacagugcugccuccucugcugaccgaugagaugaucgcccaguacacaucugcccugcuggccggcacaaucacaagcggcuggacauuuggagcaggcgccgcucugcagauccccuuugcuaugcagauggccuaccgguucaacggcaucggagugacccagaaugugcuguacgagaaccagaagcugaucgccaaccaguucaacagcgccaucggcaagauccaggacagccugagcagcacagcaagcgcccugggaaagcugcaggacguggucaaccagaaugcccaggcacugaacacccuggucaagcagcuguccuccaacuucggcgccaucagcucugugcugaacgauauccugagcagacuggacccuccugaggccgaggugcagaucgacagacugaucacaggcagacugcagagccuccagacauacgugacccagcagcugaucagagccgccgagauuagagccucugccaaucuggccgccaccaagaugucugagugugugcugggccagagcaagagaguggacuuuugcggcaagggcuaccaccugaugagcuucccucagucugccccucacggcgugguguuucugcacgugacauaugugcccgcucaagagaagaauuucaccaccgcuccagccaucugccacgacggcaaagcccacuuuccuagagaaggcguguucguguccaacggcacccauugguucgugacacagcggaacuucuacgagccccagaucaucaccaccgacaacaccuucgugucuggcaacugcgacgucgugaucggcauugugaacaauaccguguacgacccucugcagcccgagcuggacagcuucaaagaggaacuggacaaguacuuuaagaaccacacaagccccgacguggaccugggcgauaucagcggaaucaaugccagcgucgugaacauccagaaagagaucgaccggcugaacgagguggccaagaaucugaacgagagccugaucgaccugcaagaacuggggaaguacgagcaguacaucaaguggcccugguacaucuggcugggcuuuaucgccggacugauugccaucgugauggucacaaucaugcuguguugcaugaccagcugcuguagcugccugaagggcuguuguagcuguggcagcugcugcaaguucgacgaggacgauucugagcccgugcugaagggcgugaaacugcacuacacaugaggacuaguuauaagacugacuagcccgaugggccucccaacgggcccuccuccccuccuugcaccgagauuaauagaucucaaaggcucuuuucagagccaccaaaaaaaaaaaaaaaaaaaaaaaaaaaaaaaaaaaaaaaaaaaaaaaaaaaaaaaaaaaaaaaaaaaaaaaaaaaaaaaaaaaaaaaaaaaaaaaaaaaaa

SEQ ID NO: 24492 - RNA, 4041 nt, Artificial Sequence
  SARS-CoV-2/Wuhan/WIV05/2019__EPI_ISL_402128 spike protein mRNA gc mod (1-1273)(K986P_V987P_N501Y_D614G)
aggagaaagcuuaccauguucguguuccuggugcugcugccucugguguccagccagugugugaaccugaccaccagaacacagcugccuccagccuacaccaacagcuuuaccagaggcguguacuaccccgacaagguguucagauccagcgugcugcacucuacccaggaccuguuccugccuuucuucagcaacgugaccugguuccacgccauccacguguccggcaccaauggcaccaagagauucgacaaccccgugcugcccuucaacgacgggguguacuuugccagcaccgagaaguccaacaucaucagaggcuggaucuucggcaccacacuggacagcaagacccagagccugcugaucgugaacaacgccaccaacguggucaucaaagugugcgaguuccaguucugcaacgaccccuuccugggcgucuacuaccacaagaacaacaagagcuggauggaaagcgaguuccggguguacagcagcgccaacaacugcaccuucgaguacgugucccagccuuuccugauggaccuggaaggcaagcagggcaacuucaagaaccugcgcgaguucguguuuaagaacaucgacggcuacuucaagaucuacagcaagcacaccccuaucaaccucgugcgggaucugccucagggcuucucugcucuggaaccccugguggaucugcccaucggcaucaacaucacccgguuucagacacugcuggcccugcacagaagcuaccugacaccuggcgauagcagcagcggauggacagcuggugccgccgcuuacuaugugggcuaccugcagccuagaaccuuccugcugaaguacaacgagaacggcaccaucaccgacgccguggauugugcucuggauccucugagcgagacaaagugcacccugaaguccuucaccguggaaaagggcaucuaccagaccagcaacuuccgggugcagcccaccgaauccaucgugcgguuccccaauaucaccaaucugugccccuucggcgagguguucaaugccaccagauucgccucuguguacgccuggaaccggaagcggaucagcaauugcguggccgacuacuccgugcuguacaacuccgccagcuucagcaccuucaagugcuacggcguguccccuaccaagcugaacgaccugugcuucacaaacguguacgccgacagcuucgugauccggggagaugaagugcggcagauugccccuggacagacaggcaagaucgccgacuacaacuacaagcugcccgacgacuucaccggcugugugauugccuggaacagcaacaaccuggacuccaaagucggcggcaacuacaauuaccuguaccggcuguuccggaaguccaaucugaagcccuucgagcgggacaucuccaccgagaucuaucaggccggcagcaccccuuguaacggcguggaaggcuucaacugcuacuucccacugcaguccuacggcuuucagcccacauacggcgugggcuaucagcccuacagagugguggugcugagcuucgaacugcugcaugccccugccacagugugcggcccuaagaaaagcaccaaucucgugaagaacaaaugcgugaacuucaacuucaacggccugaccggcaccggcgugcugacagagagcaacaagaaguuccugccauuccagcaguuuggccgggauaucgccgauaccacagacgccguuagagauccccagacacuggaaauccuggacaucaccccuugcagcuucggcggagugucugugaucaccccuggcaccaacaccagcaaucagguggcagugcuguaccagggcgugaacuguaccgaagugcccguggccauucacgccgaucagcugacaccuacauggcggguguacuccaccggcagcaauguguuucagaccagagccggcugucugaucggagccgagcacgugaacaauagcuacgagugcgacauccccaucggcgcuggaaucugcgccagcuaccagacacagacaaacagcccucggagagccagaagcguggccagccagagcaucauugccuacacaaugucucugggcgccgagaacagcguggccuacuccaacaacucuaucgcuauccccaccaacuucaccaucagcgugaccacagagauccugccuguguccaugaccaagaccagcguggacugcaccauguacaucugcggcgauuccaccgagugcuccaaccugcugcugcaguacggcagcuucugcacccagcugaauagagcccugacagggaucgccguggaacaggacaagaacacccaagagguguucgcccaagugaagcagaucuacaagaccccuccuaucaaggacuucggcggcuucaauuucagccagauucugcccgauccuagcaagcccagcaagcggagcuucaucgaggaccugcuguucaacaaagugacacuggccgacgccggcuucaucaagcaguauggcgauugucugggcgacauugccgccagggaucugauuugcgcccagaaguuuaacggacugacagugcugccuccucugcugaccgaugagaugaucgcccaguacacaucugcccugcuggccggcacaaucacaagcggcuggacauuuggagcaggcgccgcucugcagauccccuuugcuaugcagauggccuaccgguucaacggcaucggagugacccagaaugugcuguacgagaaccagaagcugaucgccaaccaguucaacagcgccaucggcaagauccaggacagccugagcagcacagcaagcgcccugggaaagcugcaggacguggucaaccagaaugcccaggcacugaacacccuggucaagcagcuguccuccaacuucggcgccaucagcucugugcugaacgauauccugagcagacuggacccuccugaggccgaggugcagaucgacagacugaucacaggcagacugcagagccuccagacauacgugacccagcagcugaucagagccgccgagauuagagccucugccaaucuggccgccaccaagaugucugagugugugcugggccagagcaagagaguggacuuuugcggcaagggcuaccaccugaugagcuucccucagucugccccucacggcgugguguuucugcacgugacauaugugcccgcucaagagaagaauuucaccaccgcuccagccaucugccacgacggcaaagcccacuuuccuagagaaggcguguucguguccaacggcacccauugguucgugacacagcggaacuucuacgagccccagaucaucaccaccgacaacaccuucgugucuggcaacugcgacgucgugaucggcauugugaacaauaccguguacgacccucugcagcccgagcuggacagcuucaaagaggaacuggacaaguacuuuaagaaccacacaagccccgacguggaccugggcgauaucagcggaaucaaugccagcgucgugaacauccagaaagagaucgaccggcugaacgagguggccaagaaucugaacgagagccugaucgaccugcaagaacuggggaaguacgagcaguacaucaaguggcccugguacaucuggcugggcuuuaucgccggacugauugccaucgugauggucacaaucaugcuguguugcaugaccagcugcuguagcugccugaagggcuguuguagcuguggcagcugcugcaaguucgacgaggacgauucugagcccgugcugaagggcgugaaacugcacuacacaugaggacuaguuauaagacugacuagcccgaugggccucccaacgggcccuccuccccuccuugcaccgagauuaauagaucucaaaggcucuuuucagagccaccaaaaaaaaaaaaaaaaaaaaaaaaaaaaaaaaaaaaaaaaaaaaaaaaaaaaaaaaaaaaaaaaaaaaaaaaaaaaaaaaaaaaaaaaaaaaaaaaaaaaa

SEQ ID NO: 24493 - RNA, 4035 nt, Artificial Sequence
  SARS-CoV-2/Wuhan/WIV05/2019__EPI_ISL_402128 spike protein mRNA gc mod (1-1273)(K986P_V987P_H69del_V70del_D614G)
aggagaaagcuuaccauguucguguuccuggugcugcugccucugguguccagccagugugugaaccugaccaccagaacacagcugccuccagccuacaccaacagcuuuaccagaggcguguacuaccccgacaagguguucagauccagcgugcugcacucuacccaggaccuguuccugccuuucuucagcaacgugaccugguuccacgccaucuccggcaccaauggcaccaagagauucgacaaccccgugcugcccuucaacgacgggguguacuuugccagcaccgagaaguccaacaucaucagaggcuggaucuucggcaccacacuggacagcaagacccagagccugcugaucgugaacaacgccaccaacguggucaucaaagugugcgaguuccaguucugcaacgaccccuuccugggcgucuacuaccacaagaacaacaagagcuggauggaaagcgaguuccggguguacagcagcgccaacaacugcaccuucgaguacgugucccagccuuuccugauggaccuggaaggcaagcagggcaacuucaagaaccugcgcgaguucguguuuaagaacaucgacggcuacuucaagaucuacagcaagcacaccccuaucaaccucgugcgggaucugccucagggcuucucugcucuggaaccccugguggaucugcccaucggcaucaacaucacccgguuucagacacugcuggcccugcacagaagcuaccugacaccuggcgauagcagcagcggauggacagcuggugccgccgcuuacuaugugggcuaccugcagccuagaaccuuccugcugaaguacaacgagaacggcaccaucaccgacgccguggauugugcucuggauccucugagcgagacaaagugcacccugaaguccuucaccguggaaaagggcaucuaccagaccagcaacuuccgggugcagcccaccgaauccaucgugcgguuccccaauaucaccaaucugugccccuucggcgagguguucaaugccaccagauucgccucuguguacgccuggaaccggaagcggaucagcaauugcguggccgacuacuccgugcuguacaacuccgccagcuucagcaccuucaagugcuacggcguguccccuaccaagcugaacgaccugugcuucacaaacguguacgccgacagcuucgugauccggggagaugaagugcggcagauugccccuggacagacaggcaagaucgccgacuacaacuacaagcugcccgacgacuucaccggcugugugauugccuggaacagcaacaaccuggacuccaaagucggcggcaacuacaauuaccuguaccggcuguuccggaaguccaaucugaagcccuucgagcgggacaucuccaccgagaucuaucaggccggcagcaccccuuguaacggcguggaaggcuucaacugcuacuucccacugcaguccuacggcuuucagcccacaaauggcgugggcuaucagcccuacagagugguggugcugagcuucgaacugcugcaugccccugccacagugugcggcccuaagaaaagcaccaaucucgugaagaacaaaugcgugaacuucaacuucaacggccugaccggcaccggcgugcugacagagagcaacaagaaguuccugccauuccagcaguuuggccgggauaucgccgauaccacagacgccguuagagauccccagacacuggaaauccuggacaucaccccuugcagcuucggcggagugucugugaucaccccuggcaccaacaccagcaaucagguggcagugcuguaccagggcgugaacuguaccgaagugcccguggccauucacgccgaucagcugacaccuacauggcggguguacuccaccggcagcaauguguuucagaccagagccggcugucugaucggagccgagcacgugaacaauagcuacgagugcgacauccccaucggcgcuggaaucugcgccagcuaccagacacagacaaacagcccucggagagccagaagcguggccagccagagcaucauugccuacacaaugucucugggcgccgagaacagcguggccuacuccaacaacucuaucgcuauccccaccaacuucaccaucagcgugaccacagagauccugccuguguccaugaccaagaccagcguggacugcaccauguacaucugcggcgauuccaccgagugcuccaaccugcugcugcaguacggcagcuucugcacccagcugaauagagcccugacagggaucgccguggaacaggacaagaacacccaagagguguucgcccaagugaagcagaucuacaagaccccuccuaucaaggacuucggcggcuucaauuucagccagauucugcccgauccuagcaagcccagcaagcggagcuucaucgaggaccugcuguucaacaaagugacacuggccgacgccggcuucaucaagcaguauggcgauugucugggcgacauugccgccagggaucugauuugcgcccagaaguuuaacggacugacagugcugccuccucugcugaccgaugagaugaucgcccaguacacaucugcccugcuggccggcacaaucacaagcggcuggacauuuggagcaggcgccgcucugcagauccccuuugcuaugcagauggccuaccgguucaacggcaucggagugacccagaaugugcuguacgagaaccagaagcugaucgccaaccaguucaacagcgccaucggcaagauccaggacagccugagcagcacagcaagcgcccugggaaagcugcaggacguggucaaccagaaugcccaggcacugaacacccuggucaagcagcuguccuccaacuucggcgccaucagcucugugcugaacgauauccugagcagacuggacccuccugaggccgaggugcagaucgacagacugaucacaggcagacugcagagccuccagacauacgugacccagcagcugaucagagccgccgagauuagagccucugccaaucuggccgccaccaagaugucugagugugugcugggccagagcaagagaguggacuuuugcggcaagggcuaccaccugaugagcuucccucagucugccccucacggcgugguguuucugcacgugacauaugugcccgcucaagagaagaauuucaccaccgcuccagccaucugccacgacggcaaagcccacuuuccuagagaaggcguguucguguccaacggcacccauugguucgugacacagcggaacuucuacgagccccagaucaucaccaccgacaacaccuucgugucuggcaacugcgacgucgugaucggcauugugaacaauaccguguacgacccucugcagcccgagcuggacagcuucaaagaggaacuggacaaguacuuuaagaaccacacaagccccgacguggaccugggcgauaucagcggaaucaaugccagcgucgugaacauccagaaagagaucgaccggcugaacgagguggccaagaaucugaacgagagccugaucgaccugcaagaacuggggaaguacgagcaguacaucaaguggcccugguacaucuggcugggcuuuaucgccggacugauugccaucgugauggucacaaucaugcuguguugcaugaccagcugcuguagcugccugaagggcuguuguagcuguggcagcugcugcaaguucgacgaggacgauucugagcccgugcugaagggcgugaaacugcacuacacaugaggacuaguuauaagacugacuagcccgaugggccucccaacgggcccuccuccccuccuugcaccgagauuaauagaucucaaaggcucuuuucagagccaccaaaaaaaaaaaaaaaaaaaaaaaaaaaaaaaaaaaaaaaaaaaaaaaaaaaaaaaaaaaaaaaaaaaaaaaaaaaaaaaaaaaaaaaaaaaaaaaaaaaaa

SEQ ID NO: 24494 - RNA, 4041 nt, Artificial Sequence
  SARS-CoV-2/Wuhan/WIV05/2019__EPI_ISL_402128 spike protein mRNA gc mod (1-1273)(K986P_V987P_Y453F_D614G)
aggagaaagcuuaccauguucguguuccuggugcugcugccucugguguccagccagugugugaaccugaccaccagaacacagcugccuccagccuacaccaacagcuuuaccagaggcguguacuaccccgacaagguguucagauccagcgugcugcacucuacccaggaccuguuccugccuuucuucagcaacgugaccugguuccacgccauccacguguccggcaccaauggcaccaagagauucgacaaccccgugcugcccuucaacgacgggguguacuuugccagcaccgagaaguccaacaucaucagaggcuggaucuucggcaccacacuggacagcaagacccagagccugcugaucgugaacaacgccaccaacguggucaucaaagugugcgaguuccaguucugcaacgaccccuuccugggcgucuacuaccacaagaacaacaagagcuggauggaaagcgaguuccggguguacagcagcgccaacaacugcaccuucgaguacgugucccagccuuuccugauggaccuggaaggcaagcagggcaacuucaagaaccugcgcgaguucguguuuaagaacaucgacggcuacuucaagaucuacagcaagcacaccccuaucaaccucgugcgggaucugccucagggcuucucugcucuggaaccccugguggaucugcccaucggcaucaacaucacccgguuucagacacugcuggcccugcacagaagcuaccugacaccuggcgauagcagcagcggauggacagcuggugccgccgcuuacuaugugggcuaccugcagccuagaaccuuccugcugaaguacaacgagaacggcaccaucaccgacgccguggauugugcucuggauccucugagcgagacaaagugcacccugaaguccuucaccguggaaaagggcaucuaccagaccagcaacuuccgggugcagcccaccgaauccaucgugcgguuccccaauaucaccaaucugugccccuucggcgagguguucaaugccaccagauucgccucuguguacgccuggaaccggaagcggaucagcaauugcguggccgacuacuccgugcuguacaacuccgccagcuucagcaccuucaagugcuacggcguguccccuaccaagcugaacgaccugugcuucacaaacguguacgccgacagcuucgugauccggggagaugaagugcggcagauugccccuggacagacaggcaagaucgccgacuacaacuacaagcugcccgacgacuucaccggcugugugauugccuggaacagcaacaaccuggacuccaaagucggcggcaacuacaauuaccuguuccggcuguuccggaaguccaaucugaagcccuucgagcgggacaucuccaccgagaucuaucaggccggcagcaccccuuguaacggcguggaaggcuucaacugcuacuucccacugcaguccuacggcuuucagcccacaaauggcgugggcuaucagcccuacagagugguggugcugagcuucgaacugcugcaugccccugccacagugugcggcccuaagaaaagcaccaaucucgugaagaacaaaugcgugaacuucaacuucaacggccugaccggcaccggcgugcugacagagagcaacaagaaguuccugccauuccagcaguuuggccgggauaucgccgauaccacagacgccguuagagauccccagacacuggaaauccuggacaucaccccuugcagcuucggcggagugucugugaucaccccuggcaccaacaccagcaaucagguggcagugcuguaccagggcgugaacuguaccgaagugcccguggccauucacgccgaucagcugacaccuacauggcggguguacuccaccggcagcaauguguuucagaccagagccggcugucugaucggagccgagcacgugaacaauagcuacgagugcgacauccccaucggcgcuggaaucugcgccagcuaccagacacagacaaacagcccucggagagccagaagcguggccagccagagcaucauugccuacacaaugucucugggcgccgagaacagcguggccuacuccaacaacucuaucgcuauccccaccaacuucaccaucagcgugaccacagagauccugccuguguccaugaccaagaccagcguggacugcaccauguacaucugcggcgauuccaccgagugcuccaaccugcugcugcaguacggcagcuucugcacccagcugaauagagcccugacagggaucgccguggaacaggacaagaacacccaagagguguucgcccaagugaagcagaucuacaagaccccuccuaucaaggacuucggcggcuucaauuucagccagauucugcccgauccuagcaagcccagcaagcggagcuucaucgaggaccugcuguucaacaaagugacacuggccgacgccggcuucaucaagcaguauggcgauugucugggcgacauugccgccagggaucugauuugcgcccagaaguuuaacggacugacagugcugccuccucugcugaccgaugagaugaucgcccaguacacaucugcccugcuggccggcacaaucacaagcggcuggacauuuggagcaggcgccgcucugcagauccccuuugcuaugcagauggccuaccgguucaacggcaucggagugacccagaaugugcuguacgagaaccagaagcugaucgccaaccaguucaacagcgccaucggcaagauccaggacagccugagcagcacagcaagcgcccugggaaagcugcaggacguggucaaccagaaugcccaggcacugaacacccuggucaagcagcuguccuccaacuucggcgccaucagcucugugcugaacgauauccugagcagacuggacccuccugaggccgaggugcagaucgacagacugaucacaggcagacugcagagccuccagacauacgugacccagcagcugaucagagccgccgagauuagagccucugccaaucuggccgccaccaagaugucugagugugugcugggccagagcaagagaguggacuuuugcggcaagggcuaccaccugaugagcuucccucagucugccccucacggcgugguguuucugcacgugacauaugugcccgcucaagagaagaauuucaccaccgcuccagccaucugccacgacggcaaagcccacuuuccuagagaaggcguguucguguccaacggcacccauugguucgugacacagcggaacuucuacgagccccagaucaucaccaccgacaacaccuucgugucuggcaacugcgacgucgugaucggcauugugaacaauaccguguacgacccucugcagcccgagcuggacagcuucaaagaggaacuggacaaguacuuuaagaaccacacaagccccgacguggaccugggcgauaucagcggaaucaaugccagcgucgugaacauccagaaagagaucgaccggcugaacgagguggccaagaaucugaacgagagccugaucgaccugcaagaacuggggaaguacgagcaguacaucaaguggcccugguacaucuggcugggcuuuaucgccggacugauugccaucgugauggucacaaucaugcuguguugcaugaccagcugcuguagcugccugaagggcuguuguagcuguggcagcugcugcaaguucgacgaggacgauucugagcccgugcugaagggcgugaaacugcacuacacaugaggacuaguuauaagacugacuagcccgaugggccucccaacgggcccuccuccccuccuugcaccgagauuaauagaucucaaaggcucuuuucagagccaccaaaaaaaaaaaaaaaaaaaaaaaaaaaaaaaaaaaaaaaaaaaaaaaaaaaaaaaaaaaaaaaaaaaaaaaaaaaaaaaaaaaaaaaaaaaaaaaaaaaaa

SEQ ID NO: 24495 - RNA, 4041 nt, Artificial Sequence
  SARS-CoV-2/Wuhan/WIV05/2019__EPI_ISL_402128 spike protein mRNA gc mod (1-1273)(K986P_V987P_D614G_I692V)
aggagaaagcuuaccauguucguguuccuggugcugcugccucugguguccagccagugugugaaccugaccaccagaacacagcugccuccagccuacaccaacagcuuuaccagaggcguguacuaccccgacaagguguucagauccagcgugcugcacucuacccaggaccuguuccugccuuucuucagcaacgugaccugguuccacgccauccacguguccggcaccaauggcaccaagagauucgacaaccccgugcugcccuucaacgacgggguguacuuugccagcaccgagaaguccaacaucaucagaggcuggaucuucggcaccacacuggacagcaagacccagagccugcugaucgugaacaacgccaccaacguggucaucaaagugugcgaguuccaguucugcaacgaccccuuccugggcgucuacuaccacaagaacaacaagagcuggauggaaagcgaguuccggguguacagcagcgccaacaacugcaccuucgaguacgugucccagccuuuccugauggaccuggaaggcaagcagggcaacuucaagaaccugcgcgaguucguguuuaagaacaucgacggcuacuucaagaucuacagcaagcacaccccuaucaaccucgugcgggaucugccucagggcuucucugcucuggaaccccugguggaucugcccaucggcaucaacaucacccgguuucagacacugcuggcccugcacagaagcuaccugacaccuggcgauagcagcagcggauggacagcuggugccgccgcuuacuaugugggcuaccugcagccuagaaccuuccugcugaaguacaacgagaacggcaccaucaccgacgccguggauugugcucuggauccucugagcgagacaaagugcacccugaaguccuucaccguggaaaagggcaucuaccagaccagcaacuuccgggugcagcccaccgaauccaucgugcgguuccccaauaucaccaaucugugccccuucggcgagguguucaaugccaccagauucgccucuguguacgccuggaaccggaagcggaucagcaauugcguggccgacuacuccgugcuguacaacuccgccagcuucagcaccuucaagugcuacggcguguccccuaccaagcugaacgaccugugcuucacaaacguguacgccgacagcuucgugauccggggagaugaagugcggcagauugccccuggacagacaggcaagaucgccgacuacaacuacaagcugcccgacgacuucaccggcugugugauugccuggaacagcaacaaccuggacuccaaagucggcggcaacuacaauuaccuguaccggcuguuccggaaguccaaucugaagcccuucgagcgggacaucuccaccgagaucuaucaggccggcagcaccccuuguaacggcguggaaggcuucaacugcuacuucccacugcaguccuacggcuuucagcccacaaauggcgugggcuaucagcccuacagagugguggugcugagcuucgaacugcugcaugccccugccacagugugcggcccuaagaaaagcaccaaucucgugaagaacaaaugcgugaacuucaacuucaacggccugaccggcaccggcgugcugacagagagcaacaagaaguuccugccauuccagcaguuuggccgggauaucgccgauaccacagacgccguuagagauccccagacacuggaaauccuggacaucaccccuugcagcuucggcggagugucugugaucaccccuggcaccaacaccagcaaucagguggcagugcuguaccagggcgugaacuguaccgaagugcccguggccauucacgccgaucagcugacaccuacauggcggguguacuccaccggcagcaauguguuucagaccagagccggcugucugaucggagccgagcacgugaacaauagcuacgagugcgacauccccaucggcgcuggaaucugcgccagcuaccagacacagacaaacagcccucggagagccagaagcguggccagccagagcgugauugccuacacaaugucucugggcgccgagaacagcguggccuacuccaacaacucuaucgcuauccccaccaacuucaccaucagcgugaccacagagauccugccuguguccaugaccaagaccagcguggacugcaccauguacaucugcggcgauuccaccgagugcuccaaccugcugcugcaguacggcagcuucugcacccagcugaauagagcccugacagggaucgccguggaacaggacaagaacacccaagagguguucgcccaagugaagcagaucuacaagaccccuccuaucaaggacuucggcggcuucaauuucagccagauucugcccgauccuagcaagcccagcaagcggagcuucaucgaggaccugcuguucaacaaagugacacuggccgacgccggcuucaucaagcaguauggcgauugucugggcgacauugccgccagggaucugauuugcgcccagaaguuuaacggacugacagugcugccuccucugcugaccgaugagaugaucgcccaguacacaucugcccugcuggccggcacaaucacaagcggcuggacauuuggagcaggcgccgcucugcagauccccuuugcuaugcagauggccuaccgguucaacggcaucggagugacccagaaugugcuguacgagaaccagaagcugaucgccaaccaguucaacagcgccaucggcaagauccaggacagccugagcagcacagcaagcgcccugggaaagcugcaggacguggucaaccagaaugcccaggcacugaacacccuggucaagcagcuguccuccaacuucggcgccaucagcucugugcugaacgauauccugagcagacuggacccuccugaggccgaggugcagaucgacagacugaucacaggcagacugcagagccuccagacauacgugacccagcagcugaucagagccgccgagauuagagccucugccaaucuggccgccaccaagaugucugagugugugcugggccagagcaagagaguggacuuuugcggcaagggcuaccaccugaugagcuucccucagucugccccucacggcgugguguuucugcacgugacauaugugcccgcucaagagaagaauuucaccaccgcuccagccaucugccacgacggcaaagcccacuuuccuagagaaggcguguucguguccaacggcacccauugguucgugacacagcggaacuucuacgagccccagaucaucaccaccgacaacaccuucgugucuggcaacugcgacgucgugaucggcauugugaacaauaccguguacgacccucugcagcccgagcuggacagcuucaaagaggaacuggacaaguacuuuaagaaccacacaagccccgacguggaccugggcgauaucagcggaaucaaugccagcgucgugaacauccagaaagagaucgaccggcugaacgagguggccaagaaucugaacgagagccugaucgaccugcaagaacuggggaaguacgagcaguacaucaaguggcccugguacaucuggcugggcuuuaucgccggacugauugccaucgugauggucacaaucaugcuguguugcaugaccagcugcuguagcugccugaagggcuguuguagcuguggcagcugcugcaaguucgacgaggacgauucugagcccgugcugaagggcgugaaacugcacuacacaugaggacuaguuauaagacugacuagcccgaugggccucccaacgggcccuccuccccuccuugcaccgagauuaauagaucucaaaggcucuuuucagagccaccaaaaaaaaaaaaaaaaaaaaaaaaaaaaaaaaaaaaaaaaaaaaaaaaaaaaaaaaaaaaaaaaaaaaaaaaaaaaaaaaaaaaaaaaaaaaaaaaaaaaa

SEQ ID NO: 24496 - RNA, 4041 nt, Artificial Sequence
  SARS-CoV-2/Wuhan/WIV05/2019__EPI_ISL_402128 spike protein mRNA gc mod (1-1273)(K986P_V987P_D614G_M1229I)
aggagaaagcuuaccauguucguguuccuggugcugcugccucugguguccagccagugugugaaccugaccaccagaacacagcugccuccagccuacaccaacagcuuuaccagaggcguguacuaccccgacaagguguucagauccagcgugcugcacucuacccaggaccuguuccugccuuucuucagcaacgugaccugguuccacgccauccacguguccggcaccaauggcaccaagagauucgacaaccccgugcugcccuucaacgacgggguguacuuugccagcaccgagaaguccaacaucaucagaggcuggaucuucggcaccacacuggacagcaagacccagagccugcugaucgugaacaacgccaccaacguggucaucaaagugugcgaguuccaguucugcaacgaccccuuccugggcgucuacuaccacaagaacaacaagagcuggauggaaagcgaguuccggguguacagcagcgccaacaacugcaccuucgaguacgugucccagccuuuccugauggaccuggaaggcaagcagggcaacuucaagaaccugcgcgaguucguguuuaagaacaucgacggcuacuucaagaucuacagcaagcacaccccuaucaaccucgugcgggaucugccucagggcuucucugcucuggaaccccugguggaucugcccaucggcaucaacaucacccgguuucagacacugcuggcccugcacagaagcuaccugacaccuggcgauagcagcagcggauggacagcuggugccgccgcuuacuaugugggcuaccugcagccuagaaccuuccugcugaaguacaacgagaacggcaccaucaccgacgccguggauugugcucuggauccucugagcgagacaaagugcacccugaaguccuucaccguggaaaagggcaucuaccagaccagcaacuuccgggugcagcccaccgaauccaucgugcgguuccccaauaucaccaaucugugccccuucggcgagguguucaaugccaccagauucgccucuguguacgccuggaaccggaagcggaucagcaauugcguggccgacuacuccgugcuguacaacuccgccagcuucagcaccuucaagugcuacggcguguccccuaccaagcugaacgaccugugcuucacaaacguguacgccgacagcuucgugauccggggagaugaagugcggcagauugccccuggacagacaggcaagaucgccgacuacaacuacaagcugcccgacgacuucaccggcugugugauugccuggaacagcaacaaccuggacuccaaagucggcggcaacuacaauuaccuguaccggcuguuccggaaguccaaucugaagcccuucgagcgggacaucuccaccgagaucuaucaggccggcagcaccccuuguaacggcguggaaggcuucaacugcuacuucccacugcaguccuacggcuuucagcccacaaauggcgugggcuaucagcccuacagagugguggugcugagcuucgaacugcugcaugccccugccacagugugcggcccuaagaaaagcaccaaucucgugaagaacaaaugcgugaacuucaacuucaacggccugaccggcaccggcgugcugacagagagcaacaagaaguuccugccauuccagcaguuuggccgggauaucgccgauaccacagacgccguuagagauccccagacacuggaaauccuggacaucaccccuugcagcuucggcggagugucugugaucaccccuggcaccaacaccagcaaucagguggcagugcuguaccagggcgugaacuguaccgaagugcccguggccauucacgccgaucagcugacaccuacauggcggguguacuccaccggcagcaauguguuucagaccagagccggcugucugaucggagccgagcacgugaacaauagcuacgagugcgacauccccaucggcgcuggaaucugcgccagcuaccagacacagacaaacagcccucggagagccagaagcguggccagccagagcaucauugccuacacaaugucucugggcgccgagaacagcguggccuacuccaacaacucuaucgcuauccccaccaacuucaccaucagcgugaccacagagauccugccuguguccaugaccaagaccagcguggacugcaccauguacaucugcggcgauuccaccgagugcuccaaccugcugcugcaguacggcagcuucugcacccagcugaauagagcccugacagggaucgccguggaacaggacaagaacacccaagagguguucgcccaagugaagcagaucuacaagaccccuccuaucaaggacuucggcggcuucaauuucagccagauucugcccgauccuagcaagcccagcaagcggagcuucaucgaggaccugcuguucaacaaagugacacuggccgacgccggcuucaucaagcaguauggcgauugucugggcgacauugccgccagggaucugauuugcgcccagaaguuuaacggacugacagugcugccuccucugcugaccgaugagaugaucgcccaguacacaucugcccugcuggccggcacaaucacaagcggcuggacauuuggagcaggcgccgcucugcagauccccuuugcuaugcagauggccuaccgguucaacggcaucggagugacccagaaugugcuguacgagaaccagaagcugaucgccaaccaguucaacagcgccaucggcaagauccaggacagccugagcagcacagcaagcgcccugggaaagcugcaggacguggucaaccagaaugcccaggcacugaacacccuggucaagcagcuguccuccaacuucggcgccaucagcucugugcugaacgauauccugagcagacuggacccuccugaggccgaggugcagaucgacagacugaucacaggcagacugcagagccuccagacauacgugacccagcagcugaucagagccgccgagauuagagccucugccaaucuggccgccaccaagaugucugagugugugcugggccagagcaagagaguggacuuuugcggcaagggcuaccaccugaugagcuucccucagucugccccucacggcgugguguuucugcacgugacauaugugcccgcucaagagaagaauuucaccaccgcuccagccaucugccacgacggcaaagcccacuuuccuagagaaggcguguucguguccaacggcacccauugguucgugacacagcggaacuucuacgagccccagaucaucaccaccgacaacaccuucgugucuggcaacugcgacgucgugaucggcauugugaacaauaccguguacgacccucugcagcccgagcuggacagcuucaaagaggaacuggacaaguacuuuaagaaccacacaagccccgacguggaccugggcgauaucagcggaaucaaugccagcgucgugaacauccagaaagagaucgaccggcugaacgagguggccaagaaucugaacgagagccugaucgaccugcaagaacuggggaaguacgagcaguacaucaaguggcccugguacaucuggcugggcuuuaucgccggacugauugccaucgugaucgucacaaucaugcuguguugcaugaccagcugcuguagcugccugaagggcuguuguagcuguggcagcugcugcaaguucgacgaggacgauucugagcccgugcugaagggcgugaaacugcacuacacaugaggacuaguuauaagacugacuagcccgaugggccucccaacgggcccuccuccccuccuugcaccgagauuaauagaucucaaaggcucuuuucagagccaccaaaaaaaaaaaaaaaaaaaaaaaaaaaaaaaaaaaaaaaaaaaaaaaaaaaaaaaaaaaaaaaaaaaaaaaaaaaaaaaaaaaaaaaaaaaaaaaaaaaaa

SEQ ID NO: 24497 - RNA, 4035 nt, Artificial Sequence
  SARS-CoV-2/Wuhan/WIV05/2019__EPI_ISL_402128 spike protein mRNA gc mod (1-1273)(K986P_V987P_H69del_V70del_A222V_Y453F_S477N_D614G_I692V)
aggagaaagcuuaccauguucguguuccuggugcugcugccucugguguccagccagugugugaaccugaccaccagaacacagcugccuccagccuacaccaacagcuuuaccagaggcguguacuaccccgacaagguguucagauccagcgugcugcacucuacccaggaccuguuccugccuuucuucagcaacgugaccugguuccacgccaucuccggcaccaauggcaccaagagauucgacaaccccgugcugcccuucaacgacgggguguacuuugccagcaccgagaaguccaacaucaucagaggcuggaucuucggcaccacacuggacagcaagacccagagccugcugaucgugaacaacgccaccaacguggucaucaaagugugcgaguuccaguucugcaacgaccccuuccugggcgucuacuaccacaagaacaacaagagcuggauggaaagcgaguuccggguguacagcagcgccaacaacugcaccuucgaguacgugucccagccuuuccugauggaccuggaaggcaagcagggcaacuucaagaaccugcgcgaguucguguuuaagaacaucgacggcuacuucaagaucuacagcaagcacaccccuaucaaccucgugcgggaucugccucagggcuucucugugcuggaaccccugguggaucugcccaucggcaucaacaucacccgguuucagacacugcuggcccugcacagaagcuaccugacaccuggcgauagcagcagcggauggacagcuggugccgccgcuuacuaugugggcuaccugcagccuagaaccuuccugcugaaguacaacgagaacggcaccaucaccgacgccguggauugugcucuggauccucugagcgagacaaagugcacccugaaguccuucaccguggaaaagggcaucuaccagaccagcaacuuccgggugcagcccaccgaauccaucgugcgguuccccaauaucaccaaucugugccccuucggcgagguguucaaugccaccagauucgccucuguguacgccuggaaccggaagcggaucagcaauugcguggccgacuacuccgugcuguacaacuccgccagcuucagcaccuucaagugcuacggcguguccccuaccaagcugaacgaccugugcuucacaaacguguacgccgacagcuucgugauccggggagaugaagugcggcagauugccccuggacagacaggcaagaucgccgacuacaacuacaagcugcccgacgacuucaccggcugugugauugccuggaacagcaacaaccuggacuccaaagucggcggcaacuacaauuaccuguuccggcuguuccggaaguccaaucugaagcccuucgagcgggacaucuccaccgagaucuaucaggccggcaacaccccuuguaacggcguggaaggcuucaacugcuacuucccacugcaguccuacggcuuucagcccacaaauggcgugggcuaucagcccuacagagugguggugcugagcuucgaacugcugcaugccccugccacagugugcggcccuaagaaaagcaccaaucucgugaagaacaaaugcgugaacuucaacuucaacggccugaccggcaccggcgugcugacagagagcaacaagaaguuccugccauuccagcaguuuggccgggauaucgccgauaccacagacgccguuagagauccccagacacuggaaauccuggacaucaccccuugcagcuucggcggagugucugugaucaccccuggcaccaacaccagcaaucagguggcagugcuguaccagggcgugaacuguaccgaagugcccguggccauucacgccgaucagcugacaccuacauggcggguguacuccaccggcagcaauguguuucagaccagagccggcugucugaucggagccgagcacgugaacaauagcuacgagugcgacauccccaucggcgcuggaaucugcgccagcuaccagacacagacaaacagcccucggagagccagaagcguggccagccagagcgugauugccuacacaaugucucugggcgccgagaacagcguggccuacuccaacaacucuaucgcuauccccaccaacuucaccaucagcgugaccacagagauccugccuguguccaugaccaagaccagcguggacugcaccauguacaucugcggcgauuccaccgagugcuccaaccugcugcugcaguacggcagcuucugcacccagcugaauagagcccugacagggaucgccguggaacaggacaagaacacccaagagguguucgcccaagugaagcagaucuacaagaccccuccuaucaaggacuucggcggcuucaauuucagccagauucugcccgauccuagcaagcccagcaagcggagcuucaucgaggaccugcuguucaacaaagugacacuggccgacgccggcuucaucaagcaguauggcgauugucugggcgacauugccgccagggaucugauuugcgcccagaaguuuaacggacugacagugcugccuccucugcugaccgaugagaugaucgcccaguacacaucugcccugcuggccggcacaaucacaagcggcuggacauuuggagcaggcgccgcucugcagauccccuuugcuaugcagauggccuaccgguucaacggcaucggagugacccagaaugugcuguacgagaaccagaagcugaucgccaaccaguucaacagcgccaucggcaagauccaggacagccugagcagcacagcaagcgcccugggaaagcugcaggacguggucaaccagaaugcccaggcacugaacacccuggucaagcagcuguccuccaacuucggcgccaucagcucugugcugaacgauauccugagcagacuggacccuccugaggccgaggugcagaucgacagacugaucacaggcagacugcagagccuccagacauacgugacccagcagcugaucagagccgccgagauuagagccucugccaaucuggccgccaccaagaugucugagugugugcugggccagagcaagagaguggacuuuugcggcaagggcuaccaccugaugagcuucccucagucugccccucacggcgugguguuucugcacgugacauaugugcccgcucaagagaagaauuucaccaccgcuccagccaucugccacgacggcaaagcccacuuuccuagagaaggcguguucguguccaacggcacccauugguucgugacacagcggaacuucuacgagccccagaucaucaccaccgacaacaccuucgugucuggcaacugcgacgucgugaucggcauugugaacaauaccguguacgacccucugcagcccgagcuggacagcuucaaagaggaacuggacaaguacuuuaagaaccacacaagccccgacguggaccugggcgauaucagcggaaucaaugccagcgucgugaacauccagaaagagaucgaccggcugaacgagguggccaagaaucugaacgagagccugaucgaccugcaagaacuggggaaguacgagcaguacaucaaguggcccugguacaucuggcugggcuuuaucgccggacugauugccaucgugauggucacaaucaugcuguguugcaugaccagcugcuguagcugccugaagggcuguuguagcuguggcagcugcugcaaguucgacgaggacgauucugagcccgugcugaagggcgugaaacugcacuacacaugaggacuaguuauaagacugacuagcccgaugggccucccaacgggcccuccuccccuccuugcaccgagauuaauagaucucaaaggcucuuuucagagccaccaaaaaaaaaaaaaaaaaaaaaaaaaaaaaaaaaaaaaaaaaaaaaaaaaaaaaaaaaaaaaaaaaaaaaaaaaaaaaaaaaaaaaaaaaaaaaaaaaaaaa

SEQ ID NO: 24498 - RNA, 4035 nt, Artificial Sequence
  SARS-CoV-2/Wuhan/WIV05/2019__EPI_ISL_402128 spike protein mRNA gc mod (1-1273)(K986P_V987P_H69del_V70del_Y453F_D614G_I692V_M1229I)
aggagaaagcuuaccauguucguguuccuggugcugcugccucugguguccagccagugugugaaccugaccaccagaacacagcugccuccagccuacaccaacagcuuuaccagaggcguguacuaccccgacaagguguucagauccagcgugcugcacucuacccaggaccuguuccugccuuucuucagcaacgugaccugguuccacgccaucuccggcaccaauggcaccaagagauucgacaaccccgugcugcccuucaacgacgggguguacuuugccagcaccgagaaguccaacaucaucagaggcuggaucuucggcaccacacuggacagcaagacccagagccugcugaucgugaacaacgccaccaacguggucaucaaagugugcgaguuccaguucugcaacgaccccuuccugggcgucuacuaccacaagaacaacaagagcuggauggaaagcgaguuccggguguacagcagcgccaacaacugcaccuucgaguacgugucccagccuuuccugauggaccuggaaggcaagcagggcaacuucaagaaccugcgcgaguucguguuuaagaacaucgacggcuacuucaagaucuacagcaagcacaccccuaucaaccucgugcgggaucugccucagggcuucucugcucuggaaccccugguggaucugcccaucggcaucaacaucacccgguuucagacacugcuggcccugcacagaagcuaccugacaccuggcgauagcagcagcggauggacagcuggugccgccgcuuacuaugugggcuaccugcagccuagaaccuuccugcugaaguacaacgagaacggcaccaucaccgacgccguggauugugcucuggauccucugagcgagacaaagugcacccugaaguccuucaccguggaaaagggcaucuaccagaccagcaacuuccgggugcagcccaccgaauccaucgugcgguuccccaauaucaccaaucugugccccuucggcgagguguucaaugccaccagauucgccucuguguacgccuggaaccggaagcggaucagcaauugcguggccgacuacuccgugcuguacaacuccgccagcuucagcaccuucaagugcuacggcguguccccuaccaagcugaacgaccugugcuucacaaacguguacgccgacagcuucgugauccggggagaugaagugcggcagauugccccuggacagacaggcaagaucgccgacuacaacuacaagcugcccgacgacuucaccggcugugugauugccuggaacagcaacaaccuggacuccaaagucggcggcaacuacaauuaccuguuccggcuguuccggaaguccaaucugaagcccuucgagcgggacaucuccaccgagaucuaucaggccggcagcaccccuuguaacggcguggaaggcuucaacugcuacuucccacugcaguccuacggcuuucagcccacaaauggcgugggcuaucagcccuacagagugguggugcugagcuucgaacugcugcaugccccugccacagugugcggcccuaagaaaagcaccaaucucgugaagaacaaaugcgugaacuucaacuucaacggccugaccggcaccggcgugcugacagagagcaacaagaaguuccugccauuccagcaguuuggccgggauaucgccgauaccacagacgccguuagagauccccagacacuggaaauccuggacaucaccccuugcagcuucggcggagugucugugaucaccccuggcaccaacaccagcaaucagguggcagugcuguaccagggcgugaacuguaccgaagugcccguggccauucacgccgaucagcugacaccuacauggcggguguacuccaccggcagcaauguguuucagaccagagccggcugucugaucggagccgagcacgugaacaauagcuacgagugcgacauccccaucggcgcuggaaucugcgccagcuaccagacacagacaaacagcccucggagagccagaagcguggccagccagagcgugauugccuacacaaugucucugggcgccgagaacagcguggccuacuccaacaacucuaucgcuauccccaccaacuucaccaucagcgugaccacagagauccugccuguguccaugaccaagaccagcguggacugcaccauguacaucugcggcgauuccaccgagugcuccaaccugcugcugcaguacggcagcuucugcacccagcugaauagagcccugacagggaucgccguggaacaggacaagaacacccaagagguguucgcccaagugaagcagaucuacaagaccccuccuaucaaggacuucggcggcuucaauuucagccagauucugcccgauccuagcaagcccagcaagcggagcuucaucgaggaccugcuguucaacaaagugacacuggccgacgccggcuucaucaagcaguauggcgauugucugggcgacauugccgccagggaucugauuugcgcccagaaguuuaacggacugacagugcugccuccucugcugaccgaugagaugaucgcccaguacacaucugcccugcuggccggcacaaucacaagcggcuggacauuuggagcaggcgccgcucugcagauccccuuugcuaugcagauggccuaccgguucaacggcaucggagugacccagaaugugcuguacgagaaccagaagcugaucgccaaccaguucaacagcgccaucggcaagauccaggacagccugagcagcacagcaagcgcccugggaaagcugcaggacguggucaaccagaaugcccaggcacugaacacccuggucaagcagcuguccuccaacuucggcgccaucagcucugugcugaacgauauccugagcagacuggacccuccugaggccgaggugcagaucgacagacugaucacaggcagacugcagagccuccagacauacgugacccagcagcugaucagagccgccgagauuagagccucugccaaucuggccgccaccaagaugucugagugugugcugggccagagcaagagaguggacuuuugcggcaagggcuaccaccugaugagcuucccucagucugccccucacggcgugguguuucugcacgugacauaugugcccgcucaagagaagaauuucaccaccgcuccagccaucugccacgacggcaaagcccacuuuccuagagaaggcguguucguguccaacggcacccauugguucgugacacagcggaacuucuacgagccccagaucaucaccaccgacaacaccuucgugucuggcaacugcgacgucgugaucggcauugugaacaauaccguguacgacccucugcagcccgagcuggacagcuucaaagaggaacuggacaaguacuuuaagaaccacacaagccccgacguggaccugggcgauaucagcggaaucaaugccagcgucgugaacauccagaaagagaucgaccggcugaacgagguggccaagaaucugaacgagagccugaucgaccugcaagaacuggggaaguacgagcaguacaucaaguggcccugguacaucuggcugggcuuuaucgccggacugauugccaucgugaucgucacaaucaugcuguguugcaugaccagcugcuguagcugccugaagggcuguuguagcuguggcagcugcugcaaguucgacgaggacgauucugagcccgugcugaagggcgugaaacugcacuacacaugaggacuaguuauaagacugacuagcccgaugggccucccaacgggcccuccuccccuccuugcaccgagauuaauagaucucaaaggcucuuuucagagccaccaaaaaaaaaaaaaaaaaaaaaaaaaaaaaaaaaaaaaaaaaaaaaaaaaaaaaaaaaaaaaaaaaaaaaaaaaaaaaaaaaaaaaaaaaaaaaaaaaaaaa

SEQ ID NO: 24499 - RNA, 4032 nt, Artificial Sequence
  SARS-CoV-2/Wuhan/WIV05/2019__EPI_ISL_402128 spike protein mRNA gc mod (1-1273)(K986P_V987P_K986P_V987P_H69del_V70del_Y144del_N501Y_A570 D_D614G_P681H_T716I_S982A_D1118H)
aggagaaagcuuaccauguucguguuccuggugcugcugccucugguguccagccagugugugaaccugaccaccagaacacagcugccuccagccuacaccaacagcuuuaccagaggcguguacuaccccgacaagguguucagauccagcgugcugcacucuacccaggaccuguuccugccuuucuucagcaacgugaccugguuccacgccaucuccggcaccaauggcaccaagagauucgacaaccccgugcugcccuucaacgacgggguguacuuugccagcaccgagaaguccaacaucaucagaggcuggaucuucggcaccacacuggacagcaagacccagagccugcugaucgugaacaacgccaccaacguggucaucaaagugugcgaguuccaguucugcaacgaccccuuccugggcgucuaccacaagaacaacaagagcuggauggaaagcgaguuccggguguacagcagcgccaacaacugcaccuucgaguacgugucccagccuuuccugauggaccuggaaggcaagcagggcaacuucaagaaccugcgcgaguucguguuuaagaacaucgacggcuacuucaagaucuacagcaagcacaccccuaucaaccucgugcgggaucugccucagggcuucucugcucuggaaccccugguggaucugcccaucggcaucaacaucacccgguuucagacacugcuggcccugcacagaagcuaccugacaccuggcgauagcagcagcggauggacagcuggugccgccgcuuacuaugugggcuaccugcagccuagaaccuuccugcugaaguacaacgagaacggcaccaucaccgacgccguggauugugcucuggauccucugagcgagacaaagugcacccugaaguccuucaccguggaaaagggcaucuaccagaccagcaacuuccgggugcagcccaccgaauccaucgugcgguuccccaauaucaccaaucugugccccuucggcgagguguucaaugccaccagauucgccucuguguacgccuggaaccggaagcggaucagcaauugcguggccgacuacuccgugcuguacaacuccgccagcuucagcaccuucaagugcuacggcguguccccuaccaagcugaacgaccugugcuucacaaacguguacgccgacagcuucgugauccggggagaugaagugcggcagauugccccuggacagacaggcaagaucgccgacuacaacuacaagcugcccgacgacuucaccggcugugugauugccuggaacagcaacaaccuggacuccaaagucggcggcaacuacaauuaccuguaccggcuguuccggaaguccaaucugaagcccuucgagcgggacaucuccaccgagaucuaucaggccggcagcaccccuuguaacggcguggaaggcuucaacugcuacuucccacugcaguccuacggcuuucagcccacauacggcgugggcuaucagcccuacagagugguggugcugagcuucgaacugcugcaugccccugccacagugugcggcccuaagaaaagcaccaaucucgugaagaacaaaugcgugaacuucaacuucaacggccugaccggcaccggcgugcugacagagagcaacaagaaguuccugccauuccagcaguuuggccgggauaucgacgauaccacagacgccguuagagauccccagacacuggaaauccuggacaucaccccuugcagcuucggcggagugucugugaucaccccuggcaccaacaccagcaaucagguggcagugcuguaccagggcgugaacuguaccgaagugcccguggccauucacgccgaucagcugacaccuacauggcggguguacuccaccggcagcaauguguuucagaccagagccggcugucugaucggagccgagcacgugaacaauagcuacgagugcgacauccccaucggcgcuggaaucugcgccagcuaccagacacagacaaacagccaccggagagccagaagcguggccagccagagcaucauugccuacacaaugucucugggcgccgagaacagcguggccuacuccaacaacucuaucgcuauccccaucaacuucaccaucagcgugaccacagagauccugccuguguccaugaccaagaccagcguggacugcaccauguacaucugcggcgauuccaccgagugcuccaaccugcugcugcaguacggcagcuucugcacccagcugaauagagcccugacagggaucgccguggaacaggacaagaacacccaagagguguucgcccaagugaagcagaucuacaagaccccuccuaucaaggacuucggcggcuucaauuucagccagauucugcccgauccuagcaagcccagcaagcggagcuucaucgaggaccugcuguucaacaaagugacacuggccgacgccggcuucaucaagcaguauggcgauugucugggcgacauugccgccagggaucugauuugcgcccagaaguuuaacggacugacagugcugccuccucugcugaccgaugagaugaucgcccaguacacaucugcccugcuggccggcacaaucacaagcggcuggacauuuggagcaggcgccgcucugcagauccccuuugcuaugcagauggccuaccgguucaacggcaucggagugacccagaaugugcuguacgagaaccagaagcugaucgccaaccaguucaacagcgccaucggcaagauccaggacagccugagcagcacagcaagcgcccugggaaagcugcaggacguggucaaccagaaugcccaggcacugaacacccuggucaagcagcuguccuccaacuucggcgccaucagcucugugcugaacgauauccuggccagacuggacccuccugaggccgaggugcagaucgacagacugaucacaggcagacugcagagccuccagacauacgugacccagcagcugaucagagccgccgagauuagagccucugccaaucuggccgccaccaagaugucugagugugugcugggccagagcaagagaguggacuuuugcggcaagggcuaccaccugaugagcuucccucagucugccccucacggcgugguguuucugcacgugacauaugugcccgcucaagagaagaauuucaccaccgcuccagccaucugccacgacggcaaagcccacuuuccuagagaaggcguguucguguccaacggcacccauugguucgugacacagcggaacuucuacgagccccagaucaucaccacccacaacaccuucgugucuggcaacugcgacgucgugaucggcauugugaacaauaccguguacgacccucugcagcccgagcuggacagcuucaaagaggaacuggacaaguacuuuaagaaccacacaagccccgacguggaccugggcgauaucagcggaaucaaugccagcgucgugaacauccagaaagagaucgaccggcugaacgagguggccaagaaucugaacgagagccugaucgaccugcaagaacuggggaaguacgagcaguacaucaaguggcccugguacaucuggcugggcuuuaucgccggacugauugccaucgugauggucacaaucaugcuguguugcaugaccagcugcuguagcugccugaagggcuguuguagcuguggcagcugcugcaaguucgacgaggacgauucugagcccgugcugaagggcgugaaacugcacuacacaugaggacuaguuauaagacugacuagcccgaugggccucccaacgggcccuccuccccuccuugcaccgagauuaauagaucucaaaggcucuuuucagagccaccaaaaaaaaaaaaaaaaaaaaaaaaaaaaaaaaaaaaaaaaaaaaaaaaaaaaaaaaaaaaaaaaaaaaaaaaaaaaaaaaaaaaaaaaaaaaaaaaaaaaa

SEQ ID NO: 24500 - RNA, 4041 nt, Artificial Sequence
  SARS-CoV-2/Wuhan/WIV05/2019__EPI_ISL_402128 spike protein mRNA gc mod (1-1273)(K986P_V987P_K986P_V987P_K417N_E484K_N501Y_D614G)
aggagaaagcuuaccauguucguguuccuggugcugcugccucugguguccagccagugugugaaccugaccaccagaacacagcugccuccagccuacaccaacagcuuuaccagaggcguguacuaccccgacaagguguucagauccagcgugcugcacucuacccaggaccuguuccugccuuucuucagcaacgugaccugguuccacgccauccacguguccggcaccaauggcaccaagagauucgacaaccccgugcugcccuucaacgacgggguguacuuugccagcaccgagaaguccaacaucaucagaggcuggaucuucggcaccacacuggacagcaagacccagagccugcugaucgugaacaacgccaccaacguggucaucaaagugugcgaguuccaguucugcaacgaccccuuccugggcgucuacuaccacaagaacaacaagagcuggauggaaagcgaguuccggguguacagcagcgccaacaacugcaccuucgaguacgugucccagccuuuccugauggaccuggaaggcaagcagggcaacuucaagaaccugcgcgaguucguguuuaagaacaucgacggcuacuucaagaucuacagcaagcacaccccuaucaaccucgugcgggaucugccucagggcuucucugcucuggaaccccugguggaucugcccaucggcaucaacaucacccgguuucagacacugcuggcccugcacagaagcuaccugacaccuggcgauagcagcagcggauggacagcuggugccgccgcuuacuaugugggcuaccugcagccuagaaccuuccugcugaaguacaacgagaacggcaccaucaccgacgccguggauugugcucuggauccucugagcgagacaaagugcacccugaaguccuucaccguggaaaagggcaucuaccagaccagcaacuuccgggugcagcccaccgaauccaucgugcgguuccccaauaucaccaaucugugccccuucggcgagguguucaaugccaccagauucgccucuguguacgccuggaaccggaagcggaucagcaauugcguggccgacuacuccgugcuguacaacuccgccagcuucagcaccuucaagugcuacggcguguccccuaccaagcugaacgaccugugcuucacaaacguguacgccgacagcuucgugauccggggagaugaagugcggcagauugccccuggacagacaggcaacaucgccgacuacaacuacaagcugcccgacgacuucaccggcugugugauugccuggaacagcaacaaccuggacuccaaagucggcggcaacuacaauuaccuguaccggcuguuccggaaguccaaucugaagcccuucgagcgggacaucuccaccgagaucuaucaggccggcagcaccccuuguaacggcgugaagggcuucaacugcuacuucccacugcaguccuacggcuuucagcccacauacggcgugggcuaucagcccuacagagugguggugcugagcuucgaacugcugcaugccccugccacagugugcggcccuaagaaaagcaccaaucucgugaagaacaaaugcgugaacuucaacuucaacggccugaccggcaccggcgugcugacagagagcaacaagaaguuccugccauuccagcaguuuggccgggauaucgccgauaccacagacgccguuagagauccccagacacuggaaauccuggacaucaccccuugcagcuucggcggagugucugugaucaccccuggcaccaacaccagcaaucagguggcagugcuguaccagggcgugaacuguaccgaagugcccguggccauucacgccgaucagcugacaccuacauggcggguguacuccaccggcagcaauguguuucagaccagagccggcugucugaucggagccgagcacgugaacaauagcuacgagugcgacauccccaucggcgcuggaaucugcgccagcuaccagacacagacaaacagcccucggagagccagaagcguggccagccagagcaucauugccuacacaaugucucugggcgccgagaacagcguggccuacuccaacaacucuaucgcuauccccaccaacuucaccaucagcgugaccacagagauccugccuguguccaugaccaagaccagcguggacugcaccauguacaucugcggcgauuccaccgagugcuccaaccugcugcugcaguacggcagcuucugcacccagcugaauagagcccugacagggaucgccguggaacaggacaagaacacccaagagguguucgcccaagugaagcagaucuacaagaccccuccuaucaaggacuucggcggcuucaauuucagccagauucugcccgauccuagcaagcccagcaagcggagcuucaucgaggaccugcuguucaacaaagugacacuggccgacgccggcuucaucaagcaguauggcgauugucugggcgacauugccgccagggaucugauuugcgcccagaaguuuaacggacugacagugcugccuccucugcugaccgaugagaugaucgcccaguacacaucugcccugcuggccggcacaaucacaagcggcuggacauuuggagcaggcgccgcucugcagauccccuuugcuaugcagauggccuaccgguucaacggcaucggagugacccagaaugugcuguacgagaaccagaagcugaucgccaaccaguucaacagcgccaucggcaagauccaggacagccugagcagcacagcaagcgcccugggaaagcugcaggacguggucaaccagaaugcccaggcacugaacacccuggucaagcagcuguccuccaacuucggcgccaucagcucugugcugaacgauauccugagcagacuggacccuccugaggccgaggugcagaucgacagacugaucacaggcagacugcagagccuccagacauacgugacccagcagcugaucagagccgccgagauuagagccucugccaaucuggccgccaccaagaugucugagugugugcugggccagagcaagagaguggacuuuugcggcaagggcuaccaccugaugagcuucccucagucugccccucacggcgugguguuucugcacgugacauaugugcccgcucaagagaagaauuucaccaccgcuccagccaucugccacgacggcaaagcccacuuuccuagagaaggcguguucguguccaacggcacccauugguucgugacacagcggaacuucuacgagccccagaucaucaccaccgacaacaccuucgugucuggcaacugcgacgucgugaucggcauugugaacaauaccguguacgacccucugcagcccgagcuggacagcuucaaagaggaacuggacaaguacuuuaagaaccacacaagccccgacguggaccugggcgauaucagcggaaucaaugccagcgucgugaacauccagaaagagaucgaccggcugaacgagguggccaagaaucugaacgagagccugaucgaccugcaagaacuggggaaguacgagcaguacaucaaguggcccugguacaucuggcugggcuuuaucgccggacugauugccaucgugauggucacaaucaugcuguguugcaugaccagcugcuguagcugccugaagggcuguuguagcuguggcagcugcugcaaguucgacgaggacgauucugagcccgugcugaagggcgugaaacugcacuacacaugaggacuaguuauaagacugacuagcccgaugggccucccaacgggcccuccuccccuccuugcaccgagauuaauagaucucaaaggcucuuuucagagccaccaaaaaaaaaaaaaaaaaaaaaaaaaaaaaaaaaaaaaaaaaaaaaaaaaaaaaaaaaaaaaaaaaaaaaaaaaaaaaaaaaaaaaaaaaaaaaaaaaaaaa

SEQ ID NO: 24501 - RNA, 4032 nt, Artificial Sequence
  SARS-CoV-2/Wuhan/WIV05/2019__EPI_ISL_402128 spike protein mRNA gc mod (1-1273)(K986P_V987P_K986P_V987P_L18F_D80A_D215G_L242del_A243del_ L244del_R246I_K417N_E484K_N501Y_D614G_A701V)
aggagaaagcuuaccauguucguguuccuggugcugcugccucugguguccagccagugugugaacuucaccaccagaacacagcugccuccagccuacaccaacagcuuuaccagaggcguguacuaccccgacaagguguucagauccagcgugcugcacucuacccaggaccuguuccugccuuucuucagcaacgugaccugguuccacgccauccacguguccggcaccaauggcaccaagagauucgccaaccccgugcugcccuucaacgacgggguguacuuugccagcaccgagaaguccaacaucaucagaggcuggaucuucggcaccacacuggacagcaagacccagagccugcugaucgugaacaacgccaccaacguggucaucaaagugugcgaguuccaguucugcaacgaccccuuccugggcgucuacuaccacaagaacaacaagagcuggauggaaagcgaguuccggguguacagcagcgccaacaacugcaccuucgaguacgugucccagccuuuccugauggaccuggaaggcaagcagggcaacuucaagaaccugcgcgaguucguguuuaagaacaucgacggcuacuucaagaucuacagcaagcacaccccuaucaaccucgugcggggccugccucagggcuucucugcucuggaaccccugguggaucugcccaucggcaucaacaucacccgguuucagacacugcacaucagcuaccugacaccuggcgauagcagcagcggauggacagcuggugccgccgcuuacuaugugggcuaccugcagccuagaaccuuccugcugaaguacaacgagaacggcaccaucaccgacgccguggauugugcucuggauccucugagcgagacaaagugcacccugaaguccuucaccguggaaaagggcaucuaccagaccagcaacuuccgggugcagcccaccgaauccaucgugcgguuccccaauaucaccaaucugugccccuucggcgagguguucaaugccaccagauucgccucuguguacgccuggaaccggaagcggaucagcaauugcguggccgacuacuccgugcuguacaacuccgccagcuucagcaccuucaagugcuacggcguguccccuaccaagcugaacgaccugugcuucacaaacguguacgccgacagcuucgugauccggggagaugaagugcggcagauugccccuggacagacaggcaacaucgccgacuacaacuacaagcugcccgacgacuucaccggcugugugauugccuggaacagcaacaaccuggacuccaaagucggcggcaacuacaauuaccuguaccggcuguuccggaaguccaaucugaagcccuucgagcgggacaucuccaccgagaucuaucaggccggcagcaccccuuguaacggcgugaagggcuucaacugcuacuucccacugcaguccuacggcuuucagcccacauacggcgugggcuaucagcccuacagagugguggugcugagcuucgaacugcugcaugccccugccacagugugcggcccuaagaaaagcaccaaucucgugaagaacaaaugcgugaacuucaacuucaacggccugaccggcaccggcgugcugacagagagcaacaagaaguuccugccauuccagcaguuuggccgggauaucgccgauaccacagacgccguuagagauccccagacacuggaaauccuggacaucaccccuugcagcuucggcggagugucugugaucaccccuggcaccaacaccagcaaucagguggcagugcuguaccagggcgugaacuguaccgaagugcccguggccauucacgccgaucagcugacaccuacauggcggguguacuccaccggcagcaauguguuucagaccagagccggcugucugaucggagccgagcacgugaacaauagcuacgagugcgacauccccaucggcgcuggaaucugcgccagcuaccagacacagacaaacagcccucggagagccagaagcguggccagccagagcaucauugccuacacaaugucucugggcguggagaacagcguggccuacuccaacaacucuaucgcuauccccaccaacuucaccaucagcgugaccacagagauccugccuguguccaugaccaagaccagcguggacugcaccauguacaucugcggcgauuccaccgagugcuccaaccugcugcugcaguacggcagcuucugcacccagcugaauagagcccugacagggaucgccguggaacaggacaagaacacccaagagguguucgcccaagugaagcagaucuacaagaccccuccuaucaaggacuucggcggcuucaauuucagccagauucugcccgauccuagcaagcccagcaagcggagcuucaucgaggaccugcuguucaacaaagugacacuggccgacgccggcuucaucaagcaguauggcgauugucugggcgacauugccgccagggaucugauuugcgcccagaaguuuaacggacugacagugcugccuccucugcugaccgaugagaugaucgcccaguacacaucugcccugcuggccggcacaaucacaagcggcuggacauuuggagcaggcgccgcucugcagauccccuuugcuaugcagauggccuaccgguucaacggcaucggagugacccagaaugugcuguacgagaaccagaagcugaucgccaaccaguucaacagcgccaucggcaagauccaggacagccugagcagcacagcaagcgcccugggaaagcugcaggacguggucaaccagaaugcccaggcacugaacacccuggucaagcagcuguccuccaacuucggcgccaucagcucugugcugaacgauauccugagcagacuggacccuccugaggccgaggugcagaucgacagacugaucacaggcagacugcagagccuccagacauacgugacccagcagcugaucagagccgccgagauuagagccucugccaaucuggccgccaccaagaugucugagugugugcugggccagagcaagagaguggacuuuugcggcaagggcuaccaccugaugagcuucccucagucugccccucacggcgugguguuucugcacgugacauaugugcccgcucaagagaagaauuucaccaccgcuccagccaucugccacgacggcaaagcccacuuuccuagagaaggcguguucguguccaacggcacccauugguucgugacacagcggaacuucuacgagccccagaucaucaccaccgacaacaccuucgugucuggcaacugcgacgucgugaucggcauugugaacaauaccguguacgacccucugcagcccgagcuggacagcuucaaagaggaacuggacaaguacuuuaagaaccacacaagccccgacguggaccugggcgauaucagcggaaucaaugccagcgucgugaacauccagaaagagaucgaccggcugaacgagguggccaagaaucugaacgagagccugaucgaccugcaagaacuggggaaguacgagcaguacaucaaguggcccugguacaucuggcugggcuuuaucgccggacugauugccaucgugauggucacaaucaugcuguguugcaugaccagcugcuguagcugccugaagggcuguuguagcuguggcagcugcugcaaguucgacgaggacgauucugagcccgugcugaagggcgugaaacugcacuacacaugaggacuaguuauaagacugacuagcccgaugggccucccaacgggcccuccuccccuccuugcaccgagauuaauagaucucaaaggcucuuuucagagccaccaaaaaaaaaaaaaaaaaaaaaaaaaaaaaaaaaaaaaaaaaaaaaaaaaaaaaaaaaaaaaaaaaaaaaaaaaaaaaaaaaaaaaaaaaaaaaaaaaaaaa

SEQ ID NO: 24502 - RNA, 4041 nt, Artificial Sequence
  SARS-CoV-2/Wuhan/WIV05/2019__EPI_ISL_402128 spike protein mRNA gc mod (1-1273)(K986P_V987P_K986P_V987P_E484K_D614G)
aggagaaagcuuaccauguucguguuccuggugcugcugccucugguguccagccagugugugaaccugaccaccagaacacagcugccuccagccuacaccaacagcuuuaccagaggcguguacuaccccgacaagguguucagauccagcgugcugcacucuacccaggaccuguuccugccuuucuucagcaacgugaccugguuccacgccauccacguguccggcaccaauggcaccaagagauucgacaaccccgugcugcccuucaacgacgggguguacuuugccagcaccgagaaguccaacaucaucagaggcuggaucuucggcaccacacuggacagcaagacccagagccugcugaucgugaacaacgccaccaacguggucaucaaagugugcgaguuccaguucugcaacgaccccuuccugggcgucuacuaccacaagaacaacaagagcuggauggaaagcgaguuccggguguacagcagcgccaacaacugcaccuucgaguacgugucccagccuuuccugauggaccuggaaggcaagcagggcaacuucaagaaccugcgcgaguucguguuuaagaacaucgacggcuacuucaagaucuacagcaagcacaccccuaucaaccucgugcgggaucugccucagggcuucucugcucuggaaccccugguggaucugcccaucggcaucaacaucacccgguuucagacacugcuggcccugcacagaagcuaccugacaccuggcgauagcagcagcggauggacagcuggugccgccgcuuacuaugugggcuaccugcagccuagaaccuuccugcugaaguacaacgagaacggcaccaucaccgacgccguggauugugcucuggauccucugagcgagacaaagugcacccugaaguccuucaccguggaaaagggcaucuaccagaccagcaacuuccgggugcagcccaccgaauccaucgugcgguuccccaauaucaccaaucugugccccuucggcgagguguucaaugccaccagauucgccucuguguacgccuggaaccggaagcggaucagcaauugcguggccgacuacuccgugcuguacaacuccgccagcuucagcaccuucaagugcuacggcguguccccuaccaagcugaacgaccugugcuucacaaacguguacgccgacagcuucgugauccggggagaugaagugcggcagauugccccuggacagacaggcaagaucgccgacuacaacuacaagcugcccgacgacuucaccggcugugugauugccuggaacagcaacaaccuggacuccaaagucggcggcaacuacaauuaccuguaccggcuguuccggaaguccaaucugaagcccuucgagcgggacaucuccaccgagaucuaucaggccggcagcaccccuuguaacggcgugaagggcuucaacugcuacuucccacugcaguccuacggcuuucagcccacaaauggcgugggcuaucagcccuacagagugguggugcugagcuucgaacugcugcaugccccugccacagugugcggcccuaagaaaagcaccaaucucgugaagaacaaaugcgugaacuucaacuucaacggccugaccggcaccggcgugcugacagagagcaacaagaaguuccugccauuccagcaguuuggccgggauaucgccgauaccacagacgccguuagagauccccagacacuggaaauccuggacaucaccccuugcagcuucggcggagugucugugaucaccccuggcaccaacaccagcaaucagguggcagugcuguaccagggcgugaacuguaccgaagugcccguggccauucacgccgaucagcugacaccuacauggcggguguacuccaccggcagcaauguguuucagaccagagccggcugucugaucggagccgagcacgugaacaauagcuacgagugcgacauccccaucggcgcuggaaucugcgccagcuaccagacacagacaaacagcccucggagagccagaagcguggccagccagagcaucauugccuacacaaugucucugggcgccgagaacagcguggccuacuccaacaacucuaucgcuauccccaccaacuucaccaucagcgugaccacagagauccugccuguguccaugaccaagaccagcguggacugcaccauguacaucugcggcgauuccaccgagugcuccaaccugcugcugcaguacggcagcuucugcacccagcugaauagagcccugacagggaucgccguggaacaggacaagaacacccaagagguguucgcccaagugaagcagaucuacaagaccccuccuaucaaggacuucggcggcuucaauuucagccagauucugcccgauccuagcaagcccagcaagcggagcuucaucgaggaccugcuguucaacaaagugacacuggccgacgccggcuucaucaagcaguauggcgauugucugggcgacauugccgccagggaucugauuugcgcccagaaguuuaacggacugacagugcugccuccucugcugaccgaugagaugaucgcccaguacacaucugcccugcuggccggcacaaucacaagcggcuggacauuuggagcaggcgccgcucugcagauccccuuugcuaugcagauggccuaccgguucaacggcaucggagugacccagaaugugcuguacgagaaccagaagcugaucgccaaccaguucaacagcgccaucggcaagauccaggacagccugagcagcacagcaagcgcccugggaaagcugcaggacguggucaaccagaaugcccaggcacugaacacccuggucaagcagcuguccuccaacuucggcgccaucagcucugugcugaacgauauccugagcagacuggacccuccugaggccgaggugcagaucgacagacugaucacaggcagacugcagagccuccagacauacgugacccagcagcugaucagagccgccgagauuagagccucugccaaucuggccgccaccaagaugucugagugugugcugggccagagcaagagaguggacuuuugcggcaagggcuaccaccugaugagcuucccucagucugccccucacggcgugguguuucugcacgugacauaugugcccgcucaagagaagaauuucaccaccgcuccagccaucugccacgacggcaaagcccacuuuccuagagaaggcguguucguguccaacggcacccauugguucgugacacagcggaacuucuacgagccccagaucaucaccaccgacaacaccuucgugucuggcaacugcgacgucgugaucggcauugugaacaauaccguguacgacccucugcagcccgagcuggacagcuucaaagaggaacuggacaaguacuuuaagaaccacacaagccccgacguggaccugggcgauaucagcggaaucaaugccagcgucgugaacauccagaaagagaucgaccggcugaacgagguggccaagaaucugaacgagagccugaucgaccugcaagaacuggggaaguacgagcaguacaucaaguggcccugguacaucuggcugggcuuuaucgccggacugauugccaucgugauggucacaaucaugcuguguugcaugaccagcugcuguagcugccugaagggcuguuguagcuguggcagcugcugcaaguucgacgaggacgauucugagcccgugcugaagggcgugaaacugcacuacacaugaggacuaguuauaagacugacuagcccgaugggccucccaacgggcccuccuccccuccuugcaccgagauuaauagaucucaaaggcucuuuucagagccaccaaaaaaaaaaaaaaaaaaaaaaaaaaaaaaaaaaaaaaaaaaaaaaaaaaaaaaaaaaaaaaaaaaaaaaaaaaaaaaaaaaaaaaaaaaaaaaaaaaaaa

SEQ ID NO: 24503 - RNA, 4041 nt, Artificial Sequence
  SARS-CoV-2/Wuhan/WIV05/2019__EPI_ISL_402128 spike protein mRNA gc mod (1-1273)(K986P_V987P_K986P_V987P_L18F_T20N_P26S_D138Y_R190S_K417T _E484K_N501Y_D614G_H655Y_T1027I)
aggagaaagcuuaccauguucguguuccuggugcugcugccucugguguccagccagugugugaacuucaccaacagaacacagcugccuagcgccuacaccaacagcuuuaccagaggcguguacuaccccgacaagguguucagauccagcgugcugcacucuacccaggaccuguuccugccuuucuucagcaacgugaccugguuccacgccauccacguguccggcaccaauggcaccaagagauucgacaaccccgugcugcccuucaacgacgggguguacuuugccagcaccgagaaguccaacaucaucagaggcuggaucuucggcaccacacuggacagcaagacccagagccugcugaucgugaacaacgccaccaacguggucaucaaagugugcgaguuccaguucugcaacuaccccuuccugggcgucuacuaccacaagaacaacaagagcuggauggaaagcgaguuccggguguacagcagcgccaacaacugcaccuucgaguacgugucccagccuuuccugauggaccuggaaggcaagcagggcaacuucaagaaccugagcgaguucguguuuaagaacaucgacggcuacuucaagaucuacagcaagcacaccccuaucaaccucgugcgggaucugccucagggcuucucugcucuggaaccccugguggaucugcccaucggcaucaacaucacccgguuucagacacugcuggcccugcacagaagcuaccugacaccuggcgauagcagcagcggauggacagcuggugccgccgcuuacuaugugggcuaccugcagccuagaaccuuccugcugaaguacaacgagaacggcaccaucaccgacgccguggauugugcucuggauccucugagcgagacaaagugcacccugaaguccuucaccguggaaaagggcaucuaccagaccagcaacuuccgggugcagcccaccgaauccaucgugcgguuccccaauaucaccaaucugugccccuucggcgagguguucaaugccaccagauucgccucuguguacgccuggaaccggaagcggaucagcaauugcguggccgacuacuccgugcuguacaacuccgccagcuucagcaccuucaagugcuacggcguguccccuaccaagcugaacgaccugugcuucacaaacguguacgccgacagcuucgugauccggggagaugaagugcggcagauugccccuggacagacaggcaccaucgccgacuacaacuacaagcugcccgacgacuucaccggcugugugauugccuggaacagcaacaaccuggacuccaaagucggcggcaacuacaauuaccuguaccggcuguuccggaaguccaaucugaagcccuucgagcgggacaucuccaccgagaucuaucaggccggcagcaccccuuguaacggcgugaagggcuucaacugcuacuucccacugcaguccuacggcuuucagcccacauacggcgugggcuaucagcccuacagagugguggugcugagcuucgaacugcugcaugccccugccacagugugcggcccuaagaaaagcaccaaucucgugaagaacaaaugcgugaacuucaacuucaacggccugaccggcaccggcgugcugacagagagcaacaagaaguuccugccauuccagcaguuuggccgggauaucgccgauaccacagacgccguuagagauccccagacacuggaaauccuggacaucaccccuugcagcuucggcggagugucugugaucaccccuggcaccaacaccagcaaucagguggcagugcuguaccagggcgugaacuguaccgaagugcccguggccauucacgccgaucagcugacaccuacauggcggguguacuccaccggcagcaauguguuucagaccagagccggcugucugaucggagccgaguacgugaacaauagcuacgagugcgacauccccaucggcgcuggaaucugcgccagcuaccagacacagacaaacagcccucggagagccagaagcguggccagccagagcaucauugccuacacaaugucucugggcgccgagaacagcguggccuacuccaacaacucuaucgcuauccccaccaacuucaccaucagcgugaccacagagauccugccuguguccaugaccaagaccagcguggacugcaccauguacaucugcggcgauuccaccgagugcuccaaccugcugcugcaguacggcagcuucugcacccagcugaauagagcccugacagggaucgccguggaacaggacaagaacacccaagagguguucgcccaagugaagcagaucuacaagaccccuccuaucaaggacuucggcggcuucaauuucagccagauucugcccgauccuagcaagcccagcaagcggagcuucaucgaggaccugcuguucaacaaagugacacuggccgacgccggcuucaucaagcaguauggcgauugucugggcgacauugccgccagggaucugauuugcgcccagaaguuuaacggacugacagugcugccuccucugcugaccgaugagaugaucgcccaguacacaucugcccugcuggccggcacaaucacaagcggcuggacauuuggagcaggcgccgcucugcagauccccuuugcuaugcagauggccuaccgguucaacggcaucggagugacccagaaugugcuguacgagaaccagaagcugaucgccaaccaguucaacagcgccaucggcaagauccaggacagccugagcagcacagcaagcgcccugggaaagcugcaggacguggucaaccagaaugcccaggcacugaacacccuggucaagcagcuguccuccaacuucggcgccaucagcucugugcugaacgauauccugagcagacuggacccuccugaggccgaggugcagaucgacagacugaucacaggcagacugcagagccuccagacauacgugacccagcagcugaucagagccgccgagauuagagccucugccaaucuggccgccaucaagaugucugagugugugcugggccagagcaagagaguggacuuuugcggcaagggcuaccaccugaugagcuucccucagucugccccucacggcgugguguuucugcacgugacauaugugcccgcucaagagaagaauuucaccaccgcuccagccaucugccacgacggcaaagcccacuuuccuagagaaggcguguucguguccaacggcacccauugguucgugacacagcggaacuucuacgagccccagaucaucaccaccgacaacaccuucgugucuggcaacugcgacgucgugaucggcauugugaacaauaccguguacgacccucugcagcccgagcuggacagcuucaaagaggaacuggacaaguacuuuaagaaccacacaagccccgacguggaccugggcgauaucagcggaaucaaugccagcgucgugaacauccagaaagagaucgaccggcugaacgagguggccaagaaucugaacgagagccugaucgaccugcaagaacuggggaaguacgagcaguacaucaaguggcccugguacaucuggcugggcuuuaucgccggacugauugccaucgugauggucacaaucaugcuguguugcaugaccagcugcuguagcugccugaagggcuguuguagcuguggcagcugcugcaaguucgacgaggacgauucugagcccgugcugaagggcgugaaacugcacuacacaugaggacuaguuauaagacugacuagcccgaugggccucccaacgggcccuccuccccuccuugcaccgagauuaauagaucucaaaggcucuuuucagagccaccaaaaaaaaaaaaaaaaaaaaaaaaaaaaaaaaaaaaaaaaaaaaaaaaaaaaaaaaaaaaaaaaaaaaaaaaaaaaaaaaaaaaaaaaaaaaaaaaaaaaa

SEQ ID NO: 24504 - RNA, 4041 nt, Artificial Sequence
  SARS-CoV-2/Wuhan/WIV05/2019__EPI_ISL_402128 spike protein mRNA gc mod (1-1273)(K986P_V987P_K986P_V987P_S13I_W152C_L452R_D614G)
aggagaaagcuuaccauguucguguuccuggugcugcugccucugguguccauccagugugugaaccugaccaccagaacacagcugccuccagccuacaccaacagcuuuaccagaggcguguacuaccccgacaagguguucagauccagcgugcugcacucuacccaggaccuguuccugccuuucuucagcaacgugaccugguuccacgccauccacguguccggcaccaauggcaccaagagauucgacaaccccgugcugcccuucaacgacgggguguacuuugccagcaccgagaaguccaacaucaucagaggcuggaucuucggcaccacacuggacagcaagacccagagccugcugaucgugaacaacgccaccaacguggucaucaaagugugcgaguuccaguucugcaacgaccccuuccugggcgucuacuaccacaagaacaacaagagcugcauggaaagcgaguuccggguguacagcagcgccaacaacugcaccuucgaguacgugucccagccuuuccugauggaccuggaaggcaagcagggcaacuucaagaaccugcgcgaguucguguuuaagaacaucgacggcuacuucaagaucuacagcaagcacaccccuaucaaccucgugcgggaucugccucagggcuucucugcucuggaaccccugguggaucugcccaucggcaucaacaucacccgguuucagacacugcuggcccugcacagaagcuaccugacaccuggcgauagcagcagcggauggacagcuggugccgccgcuuacuaugugggcuaccugcagccuagaaccuuccugcugaaguacaacgagaacggcaccaucaccgacgccguggauugugcucuggauccucugagcgagacaaagugcacccugaaguccuucaccguggaaaagggcaucuaccagaccagcaacuuccgggugcagcccaccgaauccaucgugcgguuccccaauaucaccaaucugugccccuucggcgagguguucaaugccaccagauucgccucuguguacgccuggaaccggaagcggaucagcaauugcguggccgacuacuccgugcuguacaacuccgccagcuucagcaccuucaagugcuacggcguguccccuaccaagcugaacgaccugugcuucacaaacguguacgccgacagcuucgugauccggggagaugaagugcggcagauugccccuggacagacaggcaagaucgccgacuacaacuacaagcugcccgacgacuucaccggcugugugauugccuggaacagcaacaaccuggacuccaaagucggcggcaacuacaauuaccgcuaccggcuguuccggaaguccaaucugaagcccuucgagcgggacaucuccaccgagaucuaucaggccggcagcaccccuuguaacggcguggaaggcuucaacugcuacuucccacugcaguccuacggcuuucagcccacaaauggcgugggcuaucagcccuacagagugguggugcugagcuucgaacugcugcaugccccugccacagugugcggcccuaagaaaagcaccaaucucgugaagaacaaaugcgugaacuucaacuucaacggccugaccggcaccggcgugcugacagagagcaacaagaaguuccugccauuccagcaguuuggccgggauaucgccgauaccacagacgccguuagagauccccagacacuggaaauccuggacaucaccccuugcagcuucggcggagugucugugaucaccccuggcaccaacaccagcaaucagguggcagugcuguaccagggcgugaacuguaccgaagugcccguggccauucacgccgaucagcugacaccuacauggcggguguacuccaccggcagcaauguguuucagaccagagccggcugucugaucggagccgagcacgugaacaauagcuacgagugcgacauccccaucggcgcuggaaucugcgccagcuaccagacacagacaaacagcccucggagagccagaagcguggccagccagagcaucauugccuacacaaugucucugggcgccgagaacagcguggccuacuccaacaacucuaucgcuauccccaccaacuucaccaucagcgugaccacagagauccugccuguguccaugaccaagaccagcguggacugcaccauguacaucugcggcgauuccaccgagugcuccaaccugcugcugcaguacggcagcuucugcacccagcugaauagagcccugacagggaucgccguggaacaggacaagaacacccaagagguguucgcccaagugaagcagaucuacaagaccccuccuaucaaggacuucggcggcuucaauuucagccagauucugcccgauccuagcaagcccagcaagcggagcuucaucgaggaccugcuguucaacaaagugacacuggccgacgccggcuucaucaagcaguauggcgauugucugggcgacauugccgccagggaucugauuugcgcccagaaguuuaacggacugacagugcugccuccucugcugaccgaugagaugaucgcccaguacacaucugcccugcuggccggcacaaucacaagcggcuggacauuuggagcaggcgccgcucugcagauccccuuugcuaugcagauggccuaccgguucaacggcaucggagugacccagaaugugcuguacgagaaccagaagcugaucgccaaccaguucaacagcgccaucggcaagauccaggacagccugagcagcacagcaagcgcccugggaaagcugcaggacguggucaaccagaaugcccaggcacugaacacccuggucaagcagcuguccuccaacuucggcgccaucagcucugugcugaacgauauccugagcagacuggacccuccugaggccgaggugcagaucgacagacugaucacaggcagacugcagagccuccagacauacgugacccagcagcugaucagagccgccgagauuagagccucugccaaucuggccgccaccaagaugucugagugugugcugggccagagcaagagaguggacuuuugcggcaagggcuaccaccugaugagcuucccucagucugccccucacggcgugguguuucugcacgugacauaugugcccgcucaagagaagaauuucaccaccgcuccagccaucugccacgacggcaaagcccacuuuccuagagaaggcguguucguguccaacggcacccauugguucgugacacagcggaacuucuacgagccccagaucaucaccaccgacaacaccuucgugucuggcaacugcgacgucgugaucggcauugugaacaauaccguguacgacccucugcagcccgagcuggacagcuucaaagaggaacuggacaaguacuuuaagaaccacacaagccccgacguggaccugggcgauaucagcggaaucaaugccagcgucgugaacauccagaaagagaucgaccggcugaacgagguggccaagaaucugaacgagagccugaucgaccugcaagaacuggggaaguacgagcaguacaucaaguggcccugguacaucuggcugggcuuuaucgccggacugauugccaucgugauggucacaaucaugcuguguugcaugaccagcugcuguagcugccugaagggcuguuguagcuguggcagcugcugcaaguucgacgaggacgauucugagcccgugcugaagggcgugaaacugcacuacacaugaggacuaguuauaagacugacuagcccgaugggccucccaacgggcccuccuccccuccuugcaccgagauuaauagaucucaaaggcucuuuucagagccaccaaaaaaaaaaaaaaaaaaaaaaaaaaaaaaaaaaaaaaaaaaaaaaaaaaaaaaaaaaaaaaaaaaaaaaaaaaaaaaaaaaaaaaaaaaaaaaaaaaaaa

SEQ ID NO: 24505 - RNA, 1365 nt, Artificial Sequence
  SARS-CoV-2/Wuhan/WIV05/2019__EPI_ISL_402128 spike protein mRNA gc (1-15,334-528) Ferritin construct
aggagaaagcuuaccauguucguguuccugguccuccugccccuggugagcucccagugcaaccugugccccuucggcgagguguucaacgccacccgguucgccagcgucuacgccuggaaccgcaagcggaucuccaacugcguggcggacuacagcgugcuguacaacuccgccagcuucuccacguucaagugcuacggcgucagccccaccaagcucaacgaccugugcuucaccaacguguacgccgacuccuucgugauccgcggggacgagguccggcagaucgcccccggccagaccgggaagaucgccgacuacaacuacaagcugccggacgacuucacgggcugcgugaucgcguggaacagcaacaaccucgacuccaaggucgggggcaacuacaacuaccuguaccgccuguuccgcaagagcaaccucaagcccuucgagcgggacaucuccaccgagaucuaccaggccggcagcacccccugcaacgggguggagggcuucaacugcuacuucccccugcaguccuacggguuccagccgaccaacggcgugggguaccagcccuaccggguggucgugcugagcuucgagcuccugcacgcccccgccacggugugcggccccaagggcggggguggaagcggcggggguggaagugacaucaucaagcuccugaacgagcaggucaacaaggagaugcaguccagcaaccuguacauguccaugagcuccuggugcuacacccacagccucgacggcgccgggcuguuccuguucgaccacgccgcggaggaguacgagcacgccaagaagcucaucaucuuccugaacgagaacaacgugcccgugcagcugaccuccaucagcgccccggagcacaaguucgagggccucacgcagaucuuccagaaggccuacgagcacgagcagcacaucuccgagagcaucaacaacaucguggaccacgccaucaaguccaaggaccacgcgaccuucaacuuccugcagugguacgucgccgagcagcacgaggaggaggugcuguucaaggacauccucgacaagaucgagcugaucgggaacgagaaccacggccuguaccucgccgaccaguacgugaaggggaucgccaagagccgcaaguccugaggacuaguuauaagacugacuagcccgaugggccucccaacgggcccuccuccccuccuugcaccgagagaucucaaaggcucuuuucagagccaccaaaaaaaaaaaaaaaaaaaaaaaaaaaaaaaaaaaaaaaaaaaaaaaaaaaaaaaaaaaaaaaaaaaaaaaaaaaaaaaaaaaaaaaaaaaaaaaaaaaaa

SEQ ID NO: 24506 - RNA, 963 nt, Artificial Sequence
  SARS-CoV-2/Wuhan/WIV05/2019__EPI_ISL_402128 spike protein mRNA gc (334-528) Foldon construct
aggagaaagcuuaccaugcccaugggcagccugcagccgcucgccacccuguaccugcucgggaugcugguggccuccguccuggcgaaccugugccccuucggcgagguguucaacgccacccgguucgccagcgucuacgccuggaaccgcaagcggaucuccaacugcguggcggacuacagcgugcuguacaacuccgccagcuucuccacguucaagugcuacggcgucagccccaccaagcucaacgaccugugcuucaccaacguguacgccgacuccuucgugauccgcggggacgagguccggcagaucgcccccggccagaccgggaagaucgccgacuacaacuacaagcugccggacgacuucacgggcugcgugaucgcguggaacagcaacaaccucgacuccaaggucgggggcaacuacaacuaccuguaccgccuguuccgcaagagcaaccucaagcccuucgagcgggacaucuccaccgagaucuaccaggccggcagcacccccugcaacgggguggagggcuucaacugcuacuucccccugcaguccuacggguuccagccgaccaacggcgugggguaccagcccuaccggguggucgugcugagcuucgagcuccugcacgcccccgccacggugugcggccccaagggcagcggcggguacauccccgaggccccgcgcgacggccaggccuacgugcggaaggacggcgaguggguccugcugagcaccuuccucugaggacuaguuauaagacugacuagcccgaugggccucccaacgggcccuccuccccuccuugcaccgagagaucucaaaggcucuuuucagagccaccaaaaaaaaaaaaaaaaaaaaaaaaaaaaaaaaaaaaaaaaaaaaaaaaaaaaaaaaaaaaaaaaaaaaaaaaaaaaaaaaaaaaaaaaaaaaaaaaaaaaa

SEQ ID NO: 24507 - RNA, 1341 nt, Artificial Sequence
  SARS-CoV-2/Wuhan/WIV05/2019__EPI_ISL_402128 spike protein mRNA gc (1-15,334-528) LumSynth construct
aggagaaagcuuaccauguucguguuccugguccuccugccccuggugagcucccagugcaaccugugccccuucggcgagguguucaacgccacccgguucgccagcgucuacgccuggaaccgcaagcggaucuccaacugcguggcggacuacagcgugcuguacaacuccgccagcuucuccacguucaagugcuacggcgucagccccaccaagcucaacgaccugugcuucaccaacguguacgccgacuccuucgugauccgcggggacgagguccggcagaucgcccccggccagaccgggaagaucgccgacuacaacuacaagcugccggacgacuucacgggcugcgugaucgcguggaacagcaacaaccucgacuccaaggucgggggcaacuacaacuaccuguaccgccuguuccgcaagagcaaccucaagcccuucgagcgggacaucuccaccgagaucuaccaggccggcagcacccccugcaacgggguggagggcuucaacugcuacuucccccugcaguccuacggguuccagccgaccaacggcgugggguaccagcccuaccggguggucgugcugagcuucgagcuccugcacgcccccgccacggugugcggccccaagggcggcggcggcuccggaggcggagguagcgggggacagaucuacgagggcaagcugaccgccgaggggcuccgcuucggcaucguggccagccgguucaaccacgcgcuggucgaccgccugguggagggggccaucgacgccaucgugcggcacggcgggcgcgaggaggacaucacccucguccgggugcccggcuccugggagaucccgguggccgccggcgagcuggcccgcaaggaggacaucgacgcggucaucgccaucggggugcugauccggggcgccacgccccacuucgacuacaucgccagcgagguguccaaggggcucgcggaccugagccuggagcuccgcaagcccaucaccuucggcgucaucaccgccgacacccuggagcaggccaucgagcgggccgggacgaagcacggcaacaagggcugggaggccgcgcuguccgccaucgagauggccaaccucuucaagagccugcgcugaggacuaguuauaagacugacuagcccgaugggccucccaacgggcccuccuccccuccuugcaccgagagaucucaaaggcucuuuucagagccaccaaaaaaaaaaaaaaaaaaaaaaaaaaaaaaaaaaaaaaaaaaaaaaaaaaaaaaaaaaaaaaaaaaaaaaaaaaaaaaaaaaaaaaaaaaaaaaaaaaaaa

SEQ ID NO: 24508 - RNA, 1302 nt, Artificial Sequence
  SARS-CoV-2/Wuhan/WIV05/2019__EPI_ISL_402128 spike protein mRNA gc (334-528) LumSynth construct
aggagaaagcuuaccaugcagaucuacgagggcaagcugaccgccgaggggcuccgcuucggcaucguggccagccgguucaaccacgcgcuggucgaccgccugguggagggggccaucgacgccaucgugcggcacggcgggcgcgaggaggacaucacccucguccgggugcccggcuccugggagaucccgguggccgccggcgagcuggcccgcaaggaggacaucgacgcggucaucgccaucggggugcugauccggggcgccacgccccacuucgacuacaucgccagcgagguguccaaggggcucgcggaccugagccuggagcuccgcaagcccaucaccuucggcgucaucaccgccgacacccuggagcaggccaucgagcgggccgggacgaagcacggcaacaagggcugggaggccgcgcuguccgccaucgagauggccaaccucuucaagagccugcgcggcgggggcgggagcggcgggggcggcuccgggggcgggaaccugugccccuucggcgagguguucaacgccacccgguucgccagcgucuacgccuggaaccgcaagcggaucuccaacugcguggcggacuacagcgugcuguacaacuccgccagcuucuccacguucaagugcuacggcgucagccccaccaagcucaacgaccugugcuucaccaacguguacgccgacuccuucgugauccgcggggacgagguccggcagaucgcccccggccagaccgggaagaucgccgacuacaacuacaagcugccggacgacuucacgggcugcgugaucgcguggaacagcaacaaccucgacuccaaggucgggggcaacuacaacuaccuguaccgccuguuccgcaagagcaaccucaagcccuucgagcgggacaucuccaccgagaucuaccaggccggcagcacccccugcaacgggguggagggcuucaacugcuacuucccccugcaguccuacggguuccagccgaccaacggcgugggguaccagcccuaccggguggucgugcugagcuucgagcuccugcacgcccccgccacggugugcggccccaagugaggacuaguuauaagacugacuagcccgaugggccucccaacgggcccuccuccccuccuugcaccgagagaucucaaaggcucuuuucagagccaccaaaaaaaaaaaaaaaaaaaaaaaaaaaaaaaaaaaaaaaaaaaaaaaaaaaaaaaaaaaaaaaaaaaaaaaaaaaaaaaaaaaaaaaaaaaaaaaaaaaaa

SEQ ID NO: 24509 - RNA, 4035 nt, Artificial Sequence
  SARS-CoV-2/Wuhan/WIV05/2019__EPI_ISL_402128 spike protein mRNA gc (1-1273)
aggagaaagcuuaccauguucguguuccugguccuccugccccuggugagcucccagugcgugaaccucaccacccgcacgcagcugccgcccgccuacaccaacagcuucacccggggcgucuacuaccccgacaagguguuccgcuccagcgugcugcacuccacccaggaccucuuccugcccuucuucagcaacgucacgugguuccacgccauccacguguccgggaccaacggcaccaagcgguucgacaacccggugcugcccuucaacgacggggucuacuucgcgagcaccgagaaguccaacaucauccgcggcuggaucuucgggacgacccucgacagcaagacccagucccugcugaucgugaacaacgccaccaacguggucaucaaggugugcgaguuccaguucugcaacgaccccuuccucggcguguacuaccacaagaacaacaagagcuggauggaguccgaguuccgggucuacagcuccgccaacaacugcacguucgaguacgugagccagcccuuccugauggaccuggagggcaagcaggggaacuucaagaaccuccgcgaguucguguucaagaacaucgacggcuacuucaagaucuacuccaagcacaccccgaucaaccugguccgggaccugccccagggguucagcgcccucgagccccugguggaccugcccaucggcaucaacaucacccgcuuccagacccuccuggcccugcaccgguccuaccucacgccgggggacagcagcuccggcuggaccgcgggcgccgccgccuacuacgugggguaccugcagccccgcaccuuccugcucaaguacaacgagaacggcaccaucacggacgcggucgacugcgcccuggacccccugagcgagaccaagugcacccucaaguccuucaccguggagaaggggaucuaccagacgagcaacuuccgggugcagcccaccgaguccaucguccgcuucccgaacaucaccaaccugugccccuucggcgagguguucaacgccacccgguucgccagcgucuacgccuggaaccgcaagcggaucuccaacugcguggcggacuacagcgugcuguacaacuccgccagcuucuccacguucaagugcuacggcgucagccccaccaagcucaacgaccugugcuucaccaacguguacgccgacuccuucgugauccgcggggacgagguccggcagaucgcccccggccagaccgggaagaucgccgacuacaacuacaagcugccggacgacuucacgggcugcgugaucgcguggaacagcaacaaccucgacuccaaggucgggggcaacuacaacuaccuguaccgccuguuccgcaagagcaaccucaagcccuucgagcgggacaucuccaccgagaucuaccaggccggcagcacccccugcaacgggguggagggcuucaacugcuacuucccccugcaguccuacggguuccagccgaccaacggcgugggguaccagcccuaccggguggucgugcugagcuucgagcuccugcacgcccccgccacggugugcggccccaagaaguccaccaaccuggucaagaacaagugcgugaacuucaacuucaacggccucaccgggaccggcgugcugaccgagagcaacaagaaguuccugccguuccagcaguucgggcgcgacaucgccgacacgaccgacgcgguccgcgacccccagacccuggagauccucgacaucacccccugcagcuucggcgggguguccgugaucacgccgggcaccaacaccagcaaccaggucgccgugcuguaccaggacgugaacugcaccgagguccccguggccauccacgccgaccagcugacgcccaccuggcggguguacuccaccggcagcaacgucuuccagacccgcgccgggugccucaucggcgcggagcacgugaacaacuccuacgagugcgacauccccaucggggccggcaucugcgccagcuaccagacgcagaccaacuccccgcggcgcgcccggagcguggcgucccagagcaucaucgccuacaccaugucccugggcgccgagaacagcgucgccuacuccaacaacagcaucgccauccccaccaacuucacgaucuccgugaccaccgagauccugcccgugagcaugaccaagacgagcgucgacugcaccauguacaucugcggggacuccaccgagugcagcaaccuccugcugcaguacggcuccuucugcacccagcucaaccgcgcgcugacggggaucgccguggagcaggacaagaacacccaggagguguucgcccaggucaagcagaucuacaagacgcccccgaucaaggacuucggcggguucaacuucagccagauccugcccgaccccuccaagcccagcaagcgguccuucaucgaggaccuccuguucaacaaggugacccuggccgacgccggcuucaucaagcaguacggcgacugccucggggacaucgcggcccgcgaccugaucugcgcccagaaguucaacggccugaccgugcucccgccccugcugaccgacgagaugaucgcccaguacaccagcgcccuccuggcggggaccaucacguccggcuggaccuucggggccggcgccgcccugcagauccccuucgcgaugcagauggccuaccgguucaacggcaucggggucacccagaacgugcucuacgagaaccagaagcugaucgccaaccaguucaacagcgccaucggcaagauccaggacucccugagcuccaccgccagcgcgcucgggaagcugcaggacguggucaaccagaacgcccaggcccugaacacgcucgugaagcagcuguccagcaacuucggcgccaucuccagcgugcugaacgacauccucucccgccuggacaaggucgaggccgaggugcagaucgaccggcugaucaccgggcgccuccagagccugcagaccuacgugacccagcagcugauccgggcggccgagauccgcgccagcgccaaccucgccgcgaccaagauguccgagugcguccugggccagagcaagcggguggacuucugcggcaagggguaccaccugauguccuucccccagagcgccccgcacggcguggucuuccuccacgugacguacguccccgcccaggagaagaacuucaccaccgcccccgcgaucugccacgacgggaaggcccacuucccccgcgagggcguguucguguccaacgggacccacugguucgucacgcagcggaacuucuacgagccgcagaucaucaccaccgacaacaccuucgugagcggcaacugcgacguggucaucggcaucgugaacaacacgguguacgacccccugcagcccgagcuggacuccuucaaggaggagcucgacaaguacuucaagaaccacaccagccccgacgucgaccugggggacaucuccggcaucaacgccagcguggugaacauccagaaggagaucgaccgccugaacgaggucgccaagaaccucaacgagucccugaucgaccugcaggagcucgggaaguacgagcaguacaucaaguggccgugguacaucuggcugggcuucaucgccggccugaucgcgaucgugauggugaccaucaugcucugcugcaugaccagcugcugcuccugccugaaggggugcugcagcugcggcuccugcugcaaguucgacgaggacgacagcgagcccguccugaagggggugaagcuccacuacacgugaggacuaguuauaagacugacuagcccgaugggccucccaacgggcccuccuccccuccuugcaccgagagaucucaaaggcucuuuucagagccaccaaaaaaaaaaaaaaaaaaaaaaaaaaaaaaaaaaaaaaaaaaaaaaaaaaaaaaaaaaaaaaaaaaaaaaaaaaaaaaaaaaaaaaaaaaaaaaaaaaaaa

SEQ ID NO: 24510 - RNA, 4035 nt, Artificial Sequence
  SARS-CoV-2/Wuhan/WIV05/2019__EPI_ISL_402128 spike protein mRNA gc (1-1273)(D614G)
aggagaaagcuuaccauguucguguuccugguccuccugccccuggugagcucccagugcgugaaccucaccacccgcacgcagcugccgcccgccuacaccaacagcuucacccggggcgucuacuaccccgacaagguguuccgcuccagcgugcugcacuccacccaggaccucuuccugcccuucuucagcaacgucacgugguuccacgccauccacguguccgggaccaacggcaccaagcgguucgacaacccggugcugcccuucaacgacggggucuacuucgcgagcaccgagaaguccaacaucauccgcggcuggaucuucgggacgacccucgacagcaagacccagucccugcugaucgugaacaacgccaccaacguggucaucaaggugugcgaguuccaguucugcaacgaccccuuccucggcguguacuaccacaagaacaacaagagcuggauggaguccgaguuccgggucuacagcuccgccaacaacugcacguucgaguacgugagccagcccuuccugauggaccuggagggcaagcaggggaacuucaagaaccuccgcgaguucguguucaagaacaucgacggcuacuucaagaucuacuccaagcacaccccgaucaaccugguccgggaccugccccagggguucagcgcccucgagccccugguggaccugcccaucggcaucaacaucacccgcuuccagacccuccuggcccugcaccgguccuaccucacgccgggggacagcagcuccggcuggaccgcgggcgccgccgccuacuacgugggguaccugcagccccgcaccuuccugcucaaguacaacgagaacggcaccaucacggacgcggucgacugcgcccuggacccccugagcgagaccaagugcacccucaaguccuucaccguggagaaggggaucuaccagacgagcaacuuccgggugcagcccaccgaguccaucguccgcuucccgaacaucaccaaccugugccccuucggcgagguguucaacgccacccgguucgccagcgucuacgccuggaaccgcaagcggaucuccaacugcguggcggacuacagcgugcuguacaacuccgccagcuucuccacguucaagugcuacggcgucagccccaccaagcucaacgaccugugcuucaccaacguguacgccgacuccuucgugauccgcggggacgagguccggcagaucgcccccggccagaccgggaagaucgccgacuacaacuacaagcugccggacgacuucacgggcugcgugaucgcguggaacagcaacaaccucgacuccaaggucgggggcaacuacaacuaccuguaccgccuguuccgcaagagcaaccucaagcccuucgagcgggacaucuccaccgagaucuaccaggccggcagcacccccugcaacgggguggagggcuucaacugcuacuucccccugcaguccuacggguuccagccgaccaacggcgugggguaccagcccuaccggguggucgugcugagcuucgagcuccugcacgcccccgccacggugugcggccccaagaaguccaccaaccuggucaagaacaagugcgugaacuucaacuucaacggccucaccgggaccggcgugcugaccgagagcaacaagaaguuccugccguuccagcaguucgggcgcgacaucgccgacacgaccgacgcgguccgcgacccccagacccuggagauccucgacaucacccccugcagcuucggcgggguguccgugaucacgccgggcaccaacaccagcaaccaggucgccgugcuguaccagggcgugaacugcaccgagguccccguggccauccacgccgaccagcugacgcccaccuggcggguguacuccaccggcagcaacgucuuccagacccgcgccgggugccucaucggcgcggagcacgugaacaacuccuacgagugcgacauccccaucggggccggcaucugcgccagcuaccagacgcagaccaacuccccgcggcgcgcccggagcguggcgucccagagcaucaucgccuacaccaugucccugggcgccgagaacagcgucgccuacuccaacaacagcaucgccauccccaccaacuucacgaucuccgugaccaccgagauccugcccgugagcaugaccaagacgagcgucgacugcaccauguacaucugcggggacuccaccgagugcagcaaccuccugcugcaguacggcuccuucugcacccagcucaaccgcgcgcugacggggaucgccguggagcaggacaagaacacccaggagguguucgcccaggucaagcagaucuacaagacgcccccgaucaaggacuucggcggguucaacuucagccagauccugcccgaccccuccaagcccagcaagcgguccuucaucgaggaccuccuguucaacaaggugacccuggccgacgccggcuucaucaagcaguacggcgacugccucggggacaucgcggcccgcgaccugaucugcgcccagaaguucaacggccugaccgugcucccgccccugcugaccgacgagaugaucgcccaguacaccagcgcccuccuggcggggaccaucacguccggcuggaccuucggggccggcgccgcccugcagauccccuucgcgaugcagauggccuaccgguucaacggcaucggggucacccagaacgugcucuacgagaaccagaagcugaucgccaaccaguucaacagcgccaucggcaagauccaggacucccugagcuccaccgccagcgcgcucgggaagcugcaggacguggucaaccagaacgcccaggcccugaacacgcucgugaagcagcuguccagcaacuucggcgccaucuccagcgugcugaacgacauccucucccgccuggacaaggucgaggccgaggugcagaucgaccggcugaucaccgggcgccuccagagccugcagaccuacgugacccagcagcugauccgggcggccgagauccgcgccagcgccaaccucgccgcgaccaagauguccgagugcguccugggccagagcaagcggguggacuucugcggcaagggguaccaccugauguccuucccccagagcgccccgcacggcguggucuuccuccacgugacguacguccccgcccaggagaagaacuucaccaccgcccccgcgaucugccacgacgggaaggcccacuucccccgcgagggcguguucguguccaacgggacccacugguucgucacgcagcggaacuucuacgagccgcagaucaucaccaccgacaacaccuucgugagcggcaacugcgacguggucaucggcaucgugaacaacacgguguacgacccccugcagcccgagcuggacuccuucaaggaggagcucgacaaguacuucaagaaccacaccagccccgacgucgaccugggggacaucuccggcaucaacgccagcguggugaacauccagaaggagaucgaccgccugaacgaggucgccaagaaccucaacgagucccugaucgaccugcaggagcucgggaaguacgagcaguacaucaaguggccgugguacaucuggcugggcuucaucgccggccugaucgcgaucgugauggugaccaucaugcucugcugcaugaccagcugcugcuccugccugaaggggugcugcagcugcggcuccugcugcaaguucgacgaggacgacagcgagcccguccugaagggggugaagcuccacuacacgugaggacuaguuauaagacugacuagcccgaugggccucccaacgggcccuccuccccuccuugcaccgagagaucucaaaggcucuuuucagagccaccaaaaaaaaaaaaaaaaaaaaaaaaaaaaaaaaaaaaaaaaaaaaaaaaaaaaaaaaaaaaaaaaaaaaaaaaaaaaaaaaaaaaaaaaaaaaaaaaaaaaa

SEQ ID NO: 24511 - RNA, 4035 nt, Artificial Sequence
  SARS-CoV-2/Wuhan/WIV05/2019__EPI_ISL_402128 spike protein mRNA gc (1-1273)(A222V_D614G)
aggagaaagcuuaccauguucguguuccugguccuccugccccuggugagcucccagugcgugaaccucaccacccgcacgcagcugccgcccgccuacaccaacagcuucacccggggcgucuacuaccccgacaagguguuccgcuccagcgugcugcacuccacccaggaccucuuccugcccuucuucagcaacgucacgugguuccacgccauccacguguccgggaccaacggcaccaagcgguucgacaacccggugcugcccuucaacgacggggucuacuucgcgagcaccgagaaguccaacaucauccgcggcuggaucuucgggacgacccucgacagcaagacccagucccugcugaucgugaacaacgccaccaacguggucaucaaggugugcgaguuccaguucugcaacgaccccuuccucggcguguacuaccacaagaacaacaagagcuggauggaguccgaguuccgggucuacagcuccgccaacaacugcacguucgaguacgugagccagcccuuccugauggaccuggagggcaagcaggggaacuucaagaaccuccgcgaguucguguucaagaacaucgacggcuacuucaagaucuacuccaagcacaccccgaucaaccugguccgggaccugccccagggguucagcguccucgagccccugguggaccugcccaucggcaucaacaucacccgcuuccagacccuccuggcccugcaccgguccuaccucacgccgggggacagcagcuccggcuggaccgcgggcgccgccgccuacuacgugggguaccugcagccccgcaccuuccugcucaaguacaacgagaacggcaccaucacggacgcggucgacugcgcccuggacccccugagcgagaccaagugcacccucaaguccuucaccguggagaaggggaucuaccagacgagcaacuuccgggugcagcccaccgaguccaucguccgcuucccgaacaucaccaaccugugccccuucggcgagguguucaacgccacccgguucgccagcgucuacgccuggaaccgcaagcggaucuccaacugcguggcggacuacagcgugcuguacaacuccgccagcuucuccacguucaagugcuacggcgucagccccaccaagcucaacgaccugugcuucaccaacguguacgccgacuccuucgugauccgcggggacgagguccggcagaucgcccccggccagaccgggaagaucgccgacuacaacuacaagcugccggacgacuucacgggcugcgugaucgcguggaacagcaacaaccucgacuccaaggucgggggcaacuacaacuaccuguaccgccuguuccgcaagagcaaccucaagcccuucgagcgggacaucuccaccgagaucuaccaggccggcagcacccccugcaacgggguggagggcuucaacugcuacuucccccugcaguccuacggguuccagccgaccaacggcgugggguaccagcccuaccggguggucgugcugagcuucgagcuccugcacgcccccgccacggugugcggccccaagaaguccaccaaccuggucaagaacaagugcgugaacuucaacuucaacggccucaccgggaccggcgugcugaccgagagcaacaagaaguuccugccguuccagcaguucgggcgcgacaucgccgacacgaccgacgcgguccgcgacccccagacccuggagauccucgacaucacccccugcagcuucggcgggguguccgugaucacgccgggcaccaacaccagcaaccaggucgccgugcuguaccagggcgugaacugcaccgagguccccguggccauccacgccgaccagcugacgcccaccuggcggguguacuccaccggcagcaacgucuuccagacccgcgccgggugccucaucggcgcggagcacgugaacaacuccuacgagugcgacauccccaucggggccggcaucugcgccagcuaccagacgcagaccaacuccccgcggcgcgcccggagcguggcgucccagagcaucaucgccuacaccaugucccugggcgccgagaacagcgucgccuacuccaacaacagcaucgccauccccaccaacuucacgaucuccgugaccaccgagauccugcccgugagcaugaccaagacgagcgucgacugcaccauguacaucugcggggacuccaccgagugcagcaaccuccugcugcaguacggcuccuucugcacccagcucaaccgcgcgcugacggggaucgccguggagcaggacaagaacacccaggagguguucgcccaggucaagcagaucuacaagacgcccccgaucaaggacuucggcggguucaacuucagccagauccugcccgaccccuccaagcccagcaagcgguccuucaucgaggaccuccuguucaacaaggugacccuggccgacgccggcuucaucaagcaguacggcgacugccucggggacaucgcggcccgcgaccugaucugcgcccagaaguucaacggccugaccgugcucccgccccugcugaccgacgagaugaucgcccaguacaccagcgcccuccuggcggggaccaucacguccggcuggaccuucggggccggcgccgcccugcagauccccuucgcgaugcagauggccuaccgguucaacggcaucggggucacccagaacgugcucuacgagaaccagaagcugaucgccaaccaguucaacagcgccaucggcaagauccaggacucccugagcuccaccgccagcgcgcucgggaagcugcaggacguggucaaccagaacgcccaggcccugaacacgcucgugaagcagcuguccagcaacuucggcgccaucuccagcgugcugaacgacauccucucccgccuggacaaggucgaggccgaggugcagaucgaccggcugaucaccgggcgccuccagagccugcagaccuacgugacccagcagcugauccgggcggccgagauccgcgccagcgccaaccucgccgcgaccaagauguccgagugcguccugggccagagcaagcggguggacuucugcggcaagggguaccaccugauguccuucccccagagcgccccgcacggcguggucuuccuccacgugacguacguccccgcccaggagaagaacuucaccaccgcccccgcgaucugccacgacgggaaggcccacuucccccgcgagggcguguucguguccaacgggacccacugguucgucacgcagcggaacuucuacgagccgcagaucaucaccaccgacaacaccuucgugagcggcaacugcgacguggucaucggcaucgugaacaacacgguguacgacccccugcagcccgagcuggacuccuucaaggaggagcucgacaaguacuucaagaaccacaccagccccgacgucgaccugggggacaucuccggcaucaacgccagcguggugaacauccagaaggagaucgaccgccugaacgaggucgccaagaaccucaacgagucccugaucgaccugcaggagcucgggaaguacgagcaguacaucaaguggccgugguacaucuggcugggcuucaucgccggccugaucgcgaucgugauggugaccaucaugcucugcugcaugaccagcugcugcuccugccugaaggggugcugcagcugcggcuccugcugcaaguucgacgaggacgacagcgagcccguccugaagggggugaagcuccacuacacgugaggacuaguuauaagacugacuagcccgaugggccucccaacgggcccuccuccccuccuugcaccgagagaucucaaaggcucuuuucagagccaccaaaaaaaaaaaaaaaaaaaaaaaaaaaaaaaaaaaaaaaaaaaaaaaaaaaaaaaaaaaaaaaaaaaaaaaaaaaaaaaaaaaaaaaaaaaaaaaaaaaaa

SEQ ID NO: 24512 - RNA, 4035 nt, Artificial Sequence
  SARS-CoV-2/Wuhan/WIV05/2019__EPI_ISL_402128 spike protein mRNA gc (1-1273)(N439K_D614G)
aggagaaagcuuaccauguucguguuccugguccuccugccccuggugagcucccagugcgugaaccucaccacccgcacgcagcugccgcccgccuacaccaacagcuucacccggggcgucuacuaccccgacaagguguuccgcuccagcgugcugcacuccacccaggaccucuuccugcccuucuucagcaacgucacgugguuccacgccauccacguguccgggaccaacggcaccaagcgguucgacaacccggugcugcccuucaacgacggggucuacuucgcgagcaccgagaaguccaacaucauccgcggcuggaucuucgggacgacccucgacagcaagacccagucccugcugaucgugaacaacgccaccaacguggucaucaaggugugcgaguuccaguucugcaacgaccccuuccucggcguguacuaccacaagaacaacaagagcuggauggaguccgaguuccgggucuacagcuccgccaacaacugcacguucgaguacgugagccagcccuuccugauggaccuggagggcaagcaggggaacuucaagaaccuccgcgaguucguguucaagaacaucgacggcuacuucaagaucuacuccaagcacaccccgaucaaccugguccgggaccugccccagggguucagcgcccucgagccccugguggaccugcccaucggcaucaacaucacccgcuuccagacccuccuggcccugcaccgguccuaccucacgccgggggacagcagcuccggcuggaccgcgggcgccgccgccuacuacgugggguaccugcagccccgcaccuuccugcucaaguacaacgagaacggcaccaucacggacgcggucgacugcgcccuggacccccugagcgagaccaagugcacccucaaguccuucaccguggagaaggggaucuaccagacgagcaacuuccgggugcagcccaccgaguccaucguccgcuucccgaacaucaccaaccugugccccuucggcgagguguucaacgccacccgguucgccagcgucuacgccuggaaccgcaagcggaucuccaacugcguggcggacuacagcgugcuguacaacuccgccagcuucuccacguucaagugcuacggcgucagccccaccaagcucaacgaccugugcuucaccaacguguacgccgacuccuucgugauccgcggggacgagguccggcagaucgcccccggccagaccgggaagaucgccgacuacaacuacaagcugccggacgacuucacgggcugcgugaucgcguggaacagcaagaaccucgacuccaaggucgggggcaacuacaacuaccuguaccgccuguuccgcaagagcaaccucaagcccuucgagcgggacaucuccaccgagaucuaccaggccggcagcacccccugcaacgggguggagggcuucaacugcuacuucccccugcaguccuacggguuccagccgaccaacggcgugggguaccagcccuaccggguggucgugcugagcuucgagcuccugcacgcccccgccacggugugcggccccaagaaguccaccaaccuggucaagaacaagugcgugaacuucaacuucaacggccucaccgggaccggcgugcugaccgagagcaacaagaaguuccugccguuccagcaguucgggcgcgacaucgccgacacgaccgacgcgguccgcgacccccagacccuggagauccucgacaucacccccugcagcuucggcgggguguccgugaucacgccgggcaccaacaccagcaaccaggucgccgugcuguaccagggcgugaacugcaccgagguccccguggccauccacgccgaccagcugacgcccaccuggcggguguacuccaccggcagcaacgucuuccagacccgcgccgggugccucaucggcgcggagcacgugaacaacuccuacgagugcgacauccccaucggggccggcaucugcgccagcuaccagacgcagaccaacuccccgcggcgcgcccggagcguggcgucccagagcaucaucgccuacaccaugucccugggcgccgagaacagcgucgccuacuccaacaacagcaucgccauccccaccaacuucacgaucuccgugaccaccgagauccugcccgugagcaugaccaagacgagcgucgacugcaccauguacaucugcggggacuccaccgagugcagcaaccuccugcugcaguacggcuccuucugcacccagcucaaccgcgcgcugacggggaucgccguggagcaggacaagaacacccaggagguguucgcccaggucaagcagaucuacaagacgcccccgaucaaggacuucggcggguucaacuucagccagauccugcccgaccccuccaagcccagcaagcgguccuucaucgaggaccuccuguucaacaaggugacccuggccgacgccggcuucaucaagcaguacggcgacugccucggggacaucgcggcccgcgaccugaucugcgcccagaaguucaacggccugaccgugcucccgccccugcugaccgacgagaugaucgcccaguacaccagcgcccuccuggcggggaccaucacguccggcuggaccuucggggccggcgccgcccugcagauccccuucgcgaugcagauggccuaccgguucaacggcaucggggucacccagaacgugcucuacgagaaccagaagcugaucgccaaccaguucaacagcgccaucggcaagauccaggacucccugagcuccaccgccagcgcgcucgggaagcugcaggacguggucaaccagaacgcccaggcccugaacacgcucgugaagcagcuguccagcaacuucggcgccaucuccagcgugcugaacgacauccucucccgccuggacaaggucgaggccgaggugcagaucgaccggcugaucaccgggcgccuccagagccugcagaccuacgugacccagcagcugauccgggcggccgagauccgcgccagcgccaaccucgccgcgaccaagauguccgagugcguccugggccagagcaagcggguggacuucugcggcaagggguaccaccugauguccuucccccagagcgccccgcacggcguggucuuccuccacgugacguacguccccgcccaggagaagaacuucaccaccgcccccgcgaucugccacgacgggaaggcccacuucccccgcgagggcguguucguguccaacgggacccacugguucgucacgcagcggaacuucuacgagccgcagaucaucaccaccgacaacaccuucgugagcggcaacugcgacguggucaucggcaucgugaacaacacgguguacgacccccugcagcccgagcuggacuccuucaaggaggagcucgacaaguacuucaagaaccacaccagccccgacgucgaccugggggacaucuccggcaucaacgccagcguggugaacauccagaaggagaucgaccgccugaacgaggucgccaagaaccucaacgagucccugaucgaccugcaggagcucgggaaguacgagcaguacaucaaguggccgugguacaucuggcugggcuucaucgccggccugaucgcgaucgugauggugaccaucaugcucugcugcaugaccagcugcugcuccugccugaaggggugcugcagcugcggcuccugcugcaaguucgacgaggacgacagcgagcccguccugaagggggugaagcuccacuacacgugaggacuaguuauaagacugacuagcccgaugggccucccaacgggcccuccuccccuccuugcaccgagagaucucaaaggcucuuuucagagccaccaaaaaaaaaaaaaaaaaaaaaaaaaaaaaaaaaaaaaaaaaaaaaaaaaaaaaaaaaaaaaaaaaaaaaaaaaaaaaaaaaaaaaaaaaaaaaaaaaaaaa

SEQ ID NO: 24513 - RNA, 4035 nt, Artificial Sequence
  SARS-CoV-2/Wuhan/WIV05/2019__EPI_ISL_402128 spike protein mRNA gc (1-1273)(S477N_D614G)
aggagaaagcuuaccauguucguguuccugguccuccugccccuggugagcucccagugcgugaaccucaccacccgcacgcagcugccgcccgccuacaccaacagcuucacccggggcgucuacuaccccgacaagguguuccgcuccagcgugcugcacuccacccaggaccucuuccugcccuucuucagcaacgucacgugguuccacgccauccacguguccgggaccaacggcaccaagcgguucgacaacccggugcugcccuucaacgacggggucuacuucgcgagcaccgagaaguccaacaucauccgcggcuggaucuucgggacgacccucgacagcaagacccagucccugcugaucgugaacaacgccaccaacguggucaucaaggugugcgaguuccaguucugcaacgaccccuuccucggcguguacuaccacaagaacaacaagagcuggauggaguccgaguuccgggucuacagcuccgccaacaacugcacguucgaguacgugagccagcccuuccugauggaccuggagggcaagcaggggaacuucaagaaccuccgcgaguucguguucaagaacaucgacggcuacuucaagaucuacuccaagcacaccccgaucaaccugguccgggaccugccccagggguucagcgcccucgagccccugguggaccugcccaucggcaucaacaucacccgcuuccagacccuccuggcccugcaccgguccuaccucacgccgggggacagcagcuccggcuggaccgcgggcgccgccgccuacuacgugggguaccugcagccccgcaccuuccugcucaaguacaacgagaacggcaccaucacggacgcggucgacugcgcccuggacccccugagcgagaccaagugcacccucaaguccuucaccguggagaaggggaucuaccagacgagcaacuuccgggugcagcccaccgaguccaucguccgcuucccgaacaucaccaaccugugccccuucggcgagguguucaacgccacccgguucgccagcgucuacgccuggaaccgcaagcggaucuccaacugcguggcggacuacagcgugcuguacaacuccgccagcuucuccacguucaagugcuacggcgucagccccaccaagcucaacgaccugugcuucaccaacguguacgccgacuccuucgugauccgcggggacgagguccggcagaucgcccccggccagaccgggaagaucgccgacuacaacuacaagcugccggacgacuucacgggcugcgugaucgcguggaacagcaacaaccucgacuccaaggucgggggcaacuacaacuaccuguaccgccuguuccgcaagagcaaccucaagcccuucgagcgggacaucuccaccgagaucuaccaggccggcaacacccccugcaacgggguggagggcuucaacugcuacuucccccugcaguccuacggguuccagccgaccaacggcgugggguaccagcccuaccggguggucgugcugagcuucgagcuccugcacgcccccgccacggugugcggccccaagaaguccaccaaccuggucaagaacaagugcgugaacuucaacuucaacggccucaccgggaccggcgugcugaccgagagcaacaagaaguuccugccguuccagcaguucgggcgcgacaucgccgacacgaccgacgcgguccgcgacccccagacccuggagauccucgacaucacccccugcagcuucggcgggguguccgugaucacgccgggcaccaacaccagcaaccaggucgccgugcuguaccagggcgugaacugcaccgagguccccguggccauccacgccgaccagcugacgcccaccuggcggguguacuccaccggcagcaacgucuuccagacccgcgccgggugccucaucggcgcggagcacgugaacaacuccuacgagugcgacauccccaucggggccggcaucugcgccagcuaccagacgcagaccaacuccccgcggcgcgcccggagcguggcgucccagagcaucaucgccuacaccaugucccugggcgccgagaacagcgucgccuacuccaacaacagcaucgccauccccaccaacuucacgaucuccgugaccaccgagauccugcccgugagcaugaccaagacgagcgucgacugcaccauguacaucugcggggacuccaccgagugcagcaaccuccugcugcaguacggcuccuucugcacccagcucaaccgcgcgcugacggggaucgccguggagcaggacaagaacacccaggagguguucgcccaggucaagcagaucuacaagacgcccccgaucaaggacuucggcggguucaacuucagccagauccugcccgaccccuccaagcccagcaagcgguccuucaucgaggaccuccuguucaacaaggugacccuggccgacgccggcuucaucaagcaguacggcgacugccucggggacaucgcggcccgcgaccugaucugcgcccagaaguucaacggccugaccgugcucccgccccugcugaccgacgagaugaucgcccaguacaccagcgcccuccuggcggggaccaucacguccggcuggaccuucggggccggcgccgcccugcagauccccuucgcgaugcagauggccuaccgguucaacggcaucggggucacccagaacgugcucuacgagaaccagaagcugaucgccaaccaguucaacagcgccaucggcaagauccaggacucccugagcuccaccgccagcgcgcucgggaagcugcaggacguggucaaccagaacgcccaggcccugaacacgcucgugaagcagcuguccagcaacuucggcgccaucuccagcgugcugaacgacauccucucccgccuggacaaggucgaggccgaggugcagaucgaccggcugaucaccgggcgccuccagagccugcagaccuacgugacccagcagcugauccgggcggccgagauccgcgccagcgccaaccucgccgcgaccaagauguccgagugcguccugggccagagcaagcggguggacuucugcggcaagggguaccaccugauguccuucccccagagcgccccgcacggcguggucuuccuccacgugacguacguccccgcccaggagaagaacuucaccaccgcccccgcgaucugccacgacgggaaggcccacuucccccgcgagggcguguucguguccaacgggacccacugguucgucacgcagcggaacuucuacgagccgcagaucaucaccaccgacaacaccuucgugagcggcaacugcgacguggucaucggcaucgugaacaacacgguguacgacccccugcagcccgagcuggacuccuucaaggaggagcucgacaaguacuucaagaaccacaccagccccgacgucgaccugggggacaucuccggcaucaacgccagcguggugaacauccagaaggagaucgaccgccugaacgaggucgccaagaaccucaacgagucccugaucgaccugcaggagcucgggaaguacgagcaguacaucaaguggccgugguacaucuggcugggcuucaucgccggccugaucgcgaucgugauggugaccaucaugcucugcugcaugaccagcugcugcuccugccugaaggggugcugcagcugcggcuccugcugcaaguucgacgaggacgacagcgagcccguccugaagggggugaagcuccacuacacgugaggacuaguuauaagacugacuagcccgaugggccucccaacgggcccuccuccccuccuugcaccgagagaucucaaaggcucuuuucagagccaccaaaaaaaaaaaaaaaaaaaaaaaaaaaaaaaaaaaaaaaaaaaaaaaaaaaaaaaaaaaaaaaaaaaaaaaaaaaaaaaaaaaaaaaaaaaaaaaaaaaaa

SEQ ID NO: 24514 - RNA, 4035 nt, Artificial Sequence
  SARS-CoV-2/Wuhan/WIV05/2019__EPI_ISL_402128 spike protein mRNA gc (1-1273)(N501Y_D614G)
aggagaaagcuuaccauguucguguuccugguccuccugccccuggugagcucccagugcgugaaccucaccacccgcacgcagcugccgcccgccuacaccaacagcuucacccggggcgucuacuaccccgacaagguguuccgcuccagcgugcugcacuccacccaggaccucuuccugcccuucuucagcaacgucacgugguuccacgccauccacguguccgggaccaacggcaccaagcgguucgacaacccggugcugcccuucaacgacggggucuacuucgcgagcaccgagaaguccaacaucauccgcggcuggaucuucgggacgacccucgacagcaagacccagucccugcugaucgugaacaacgccaccaacguggucaucaaggugugcgaguuccaguucugcaacgaccccuuccucggcguguacuaccacaagaacaacaagagcuggauggaguccgaguuccgggucuacagcuccgccaacaacugcacguucgaguacgugagccagcccuuccugauggaccuggagggcaagcaggggaacuucaagaaccuccgcgaguucguguucaagaacaucgacggcuacuucaagaucuacuccaagcacaccccgaucaaccugguccgggaccugccccagggguucagcgcccucgagccccugguggaccugcccaucggcaucaacaucacccgcuuccagacccuccuggcccugcaccgguccuaccucacgccgggggacagcagcuccggcuggaccgcgggcgccgccgccuacuacgugggguaccugcagccccgcaccuuccugcucaaguacaacgagaacggcaccaucacggacgcggucgacugcgcccuggacccccugagcgagaccaagugcacccucaaguccuucaccguggagaaggggaucuaccagacgagcaacuuccgggugcagcccaccgaguccaucguccgcuucccgaacaucaccaaccugugccccuucggcgagguguucaacgccacccgguucgccagcgucuacgccuggaaccgcaagcggaucuccaacugcguggcggacuacagcgugcuguacaacuccgccagcuucuccacguucaagugcuacggcgucagccccaccaagcucaacgaccugugcuucaccaacguguacgccgacuccuucgugauccgcggggacgagguccggcagaucgcccccggccagaccgggaagaucgccgacuacaacuacaagcugccggacgacuucacgggcugcgugaucgcguggaacagcaacaaccucgacuccaaggucgggggcaacuacaacuaccuguaccgccuguuccgcaagagcaaccucaagcccuucgagcgggacaucuccaccgagaucuaccaggccggcagcacccccugcaacgggguggagggcuucaacugcuacuucccccugcaguccuacggguuccagccgaccuacggcgugggguaccagcccuaccggguggucgugcugagcuucgagcuccugcacgcccccgccacggugugcggccccaagaaguccaccaaccuggucaagaacaagugcgugaacuucaacuucaacggccucaccgggaccggcgugcugaccgagagcaacaagaaguuccugccguuccagcaguucgggcgcgacaucgccgacacgaccgacgcgguccgcgacccccagacccuggagauccucgacaucacccccugcagcuucggcgggguguccgugaucacgccgggcaccaacaccagcaaccaggucgccgugcuguaccagggcgugaacugcaccgagguccccguggccauccacgccgaccagcugacgcccaccuggcggguguacuccaccggcagcaacgucuuccagacccgcgccgggugccucaucggcgcggagcacgugaacaacuccuacgagugcgacauccccaucggggccggcaucugcgccagcuaccagacgcagaccaacuccccgcggcgcgcccggagcguggcgucccagagcaucaucgccuacaccaugucccugggcgccgagaacagcgucgccuacuccaacaacagcaucgccauccccaccaacuucacgaucuccgugaccaccgagauccugcccgugagcaugaccaagacgagcgucgacugcaccauguacaucugcggggacuccaccgagugcagcaaccuccugcugcaguacggcuccuucugcacccagcucaaccgcgcgcugacggggaucgccguggagcaggacaagaacacccaggagguguucgcccaggucaagcagaucuacaagacgcccccgaucaaggacuucggcggguucaacuucagccagauccugcccgaccccuccaagcccagcaagcgguccuucaucgaggaccuccuguucaacaaggugacccuggccgacgccggcuucaucaagcaguacggcgacugccucggggacaucgcggcccgcgaccugaucugcgcccagaaguucaacggccugaccgugcucccgccccugcugaccgacgagaugaucgcccaguacaccagcgcccuccuggcggggaccaucacguccggcuggaccuucggggccggcgccgcccugcagauccccuucgcgaugcagauggccuaccgguucaacggcaucggggucacccagaacgugcucuacgagaaccagaagcugaucgccaaccaguucaacagcgccaucggcaagauccaggacucccugagcuccaccgccagcgcgcucgggaagcugcaggacguggucaaccagaacgcccaggcccugaacacgcucgugaagcagcuguccagcaacuucggcgccaucuccagcgugcugaacgacauccucucccgccuggacaaggucgaggccgaggugcagaucgaccggcugaucaccgggcgccuccagagccugcagaccuacgugacccagcagcugauccgggcggccgagauccgcgccagcgccaaccucgccgcgaccaagauguccgagugcguccugggccagagcaagcggguggacuucugcggcaagggguaccaccugauguccuucccccagagcgccccgcacggcguggucuuccuccacgugacguacguccccgcccaggagaagaacuucaccaccgcccccgcgaucugccacgacgggaaggcccacuucccccgcgagggcguguucguguccaacgggacccacugguucgucacgcagcggaacuucuacgagccgcagaucaucaccaccgacaacaccuucgugagcggcaacugcgacguggucaucggcaucgugaacaacacgguguacgacccccugcagcccgagcuggacuccuucaaggaggagcucgacaaguacuucaagaaccacaccagccccgacgucgaccugggggacaucuccggcaucaacgccagcguggugaacauccagaaggagaucgaccgccugaacgaggucgccaagaaccucaacgagucccugaucgaccugcaggagcucgggaaguacgagcaguacaucaaguggccgugguacaucuggcugggcuucaucgccggccugaucgcgaucgugauggugaccaucaugcucugcugcaugaccagcugcugcuccugccugaaggggugcugcagcugcggcuccugcugcaaguucgacgaggacgacagcgagcccguccugaagggggugaagcuccacuacacgugaggacuaguuauaagacugacuagcccgaugggccucccaacgggcccuccuccccuccuugcaccgagagaucucaaaggcucuuuucagagccaccaaaaaaaaaaaaaaaaaaaaaaaaaaaaaaaaaaaaaaaaaaaaaaaaaaaaaaaaaaaaaaaaaaaaaaaaaaaaaaaaaaaaaaaaaaaaaaaaaaaaa

SEQ ID NO: 24515 - RNA, 4029 nt, Artificial Sequence
  SARS-CoV-2/Wuhan/WIV05/2019__EPI_ISL_402128 spike protein mRNA gc (1-1273)(H69del_V70del_D614G)
aggagaaagcuuaccauguucguguuccugguccuccugccccuggugagcucccagugcgugaaccucaccacccgcacgcagcugccgcccgccuacaccaacagcuucacccggggcgucuacuaccccgacaagguguuccgcuccagcgugcugcacuccacccaggaccucuuccugcccuucuucagcaacgucacgugguuccacgccaucuccgggaccaacggcaccaagcgguucgacaacccggugcugcccuucaacgacggggucuacuucgcgagcaccgagaaguccaacaucauccgcggcuggaucuucgggacgacccucgacagcaagacccagucccugcugaucgugaacaacgccaccaacguggucaucaaggugugcgaguuccaguucugcaacgaccccuuccucggcguguacuaccacaagaacaacaagagcuggauggaguccgaguuccgggucuacagcuccgccaacaacugcacguucgaguacgugagccagcccuuccugauggaccuggagggcaagcaggggaacuucaagaaccuccgcgaguucguguucaagaacaucgacggcuacuucaagaucuacuccaagcacaccccgaucaaccugguccgggaccugccccagggguucagcgcccucgagccccugguggaccugcccaucggcaucaacaucacccgcuuccagacccuccuggcccugcaccgguccuaccucacgccgggggacagcagcuccggcuggaccgcgggcgccgccgccuacuacgugggguaccugcagccccgcaccuuccugcucaaguacaacgagaacggcaccaucacggacgcggucgacugcgcccuggacccccugagcgagaccaagugcacccucaaguccuucaccguggagaaggggaucuaccagacgagcaacuuccgggugcagcccaccgaguccaucguccgcuucccgaacaucaccaaccugugccccuucggcgagguguucaacgccacccgguucgccagcgucuacgccuggaaccgcaagcggaucuccaacugcguggcggacuacagcgugcuguacaacuccgccagcuucuccacguucaagugcuacggcgucagccccaccaagcucaacgaccugugcuucaccaacguguacgccgacuccuucgugauccgcggggacgagguccggcagaucgcccccggccagaccgggaagaucgccgacuacaacuacaagcugccggacgacuucacgggcugcgugaucgcguggaacagcaacaaccucgacuccaaggucgggggcaacuacaacuaccuguaccgccuguuccgcaagagcaaccucaagcccuucgagcgggacaucuccaccgagaucuaccaggccggcagcacccccugcaacgggguggagggcuucaacugcuacuucccccugcaguccuacggguuccagccgaccaacggcgugggguaccagcccuaccggguggucgugcugagcuucgagcuccugcacgcccccgccacggugugcggccccaagaaguccaccaaccuggucaagaacaagugcgugaacuucaacuucaacggccucaccgggaccggcgugcugaccgagagcaacaagaaguuccugccguuccagcaguucgggcgcgacaucgccgacacgaccgacgcgguccgcgacccccagacccuggagauccucgacaucacccccugcagcuucggcgggguguccgugaucacgccgggcaccaacaccagcaaccaggucgccgugcuguaccagggcgugaacugcaccgagguccccguggccauccacgccgaccagcugacgcccaccuggcggguguacuccaccggcagcaacgucuuccagacccgcgccgggugccucaucggcgcggagcacgugaacaacuccuacgagugcgacauccccaucggggccggcaucugcgccagcuaccagacgcagaccaacuccccgcggcgcgcccggagcguggcgucccagagcaucaucgccuacaccaugucccugggcgccgagaacagcgucgccuacuccaacaacagcaucgccauccccaccaacuucacgaucuccgugaccaccgagauccugcccgugagcaugaccaagacgagcgucgacugcaccauguacaucugcggggacuccaccgagugcagcaaccuccugcugcaguacggcuccuucugcacccagcucaaccgcgcgcugacggggaucgccguggagcaggacaagaacacccaggagguguucgcccaggucaagcagaucuacaagacgcccccgaucaaggacuucggcggguucaacuucagccagauccugcccgaccccuccaagcccagcaagcgguccuucaucgaggaccuccuguucaacaaggugacccuggccgacgccggcuucaucaagcaguacggcgacugccucggggacaucgcggcccgcgaccugaucugcgcccagaaguucaacggccugaccgugcucccgccccugcugaccgacgagaugaucgcccaguacaccagcgcccuccuggcggggaccaucacguccggcuggaccuucggggccggcgccgcccugcagauccccuucgcgaugcagauggccuaccgguucaacggcaucggggucacccagaacgugcucuacgagaaccagaagcugaucgccaaccaguucaacagcgccaucggcaagauccaggacucccugagcuccaccgccagcgcgcucgggaagcugcaggacguggucaaccagaacgcccaggcccugaacacgcucgugaagcagcuguccagcaacuucggcgccaucuccagcgugcugaacgacauccucucccgccuggacaaggucgaggccgaggugcagaucgaccggcugaucaccgggcgccuccagagccugcagaccuacgugacccagcagcugauccgggcggccgagauccgcgccagcgccaaccucgccgcgaccaagauguccgagugcguccugggccagagcaagcggguggacuucugcggcaagggguaccaccugauguccuucccccagagcgccccgcacggcguggucuuccuccacgugacguacguccccgcccaggagaagaacuucaccaccgcccccgcgaucugccacgacgggaaggcccacuucccccgcgagggcguguucguguccaacgggacccacugguucgucacgcagcggaacuucuacgagccgcagaucaucaccaccgacaacaccuucgugagcggcaacugcgacguggucaucggcaucgugaacaacacgguguacgacccccugcagcccgagcuggacuccuucaaggaggagcucgacaaguacuucaagaaccacaccagccccgacgucgaccugggggacaucuccggcaucaacgccagcguggugaacauccagaaggagaucgaccgccugaacgaggucgccaagaaccucaacgagucccugaucgaccugcaggagcucgggaaguacgagcaguacaucaaguggccgugguacaucuggcugggcuucaucgccggccugaucgcgaucgugauggugaccaucaugcucugcugcaugaccagcugcugcuccugccugaaggggugcugcagcugcggcuccugcugcaaguucgacgaggacgacagcgagcccguccugaagggggugaagcuccacuacacgugaggacuaguuauaagacugacuagcccgaugggccucccaacgggcccuccuccccuccuugcaccgagagaucucaaaggcucuuuucagagccaccaaaaaaaaaaaaaaaaaaaaaaaaaaaaaaaaaaaaaaaaaaaaaaaaaaaaaaaaaaaaaaaaaaaaaaaaaaaaaaaaaaaaaaaaaaaaaaaaaaaaa

SEQ ID NO: 24516 - RNA, 4035 nt, Artificial Sequence
  SARS-CoV-2/Wuhan/WIV05/2019__EPI_ISL_402128 spike protein mRNA gc (1-1273)(Y453F_D614G)
aggagaaagcuuaccauguucguguuccugguccuccugccccuggugagcucccagugcgugaaccucaccacccgcacgcagcugccgcccgccuacaccaacagcuucacccggggcgucuacuaccccgacaagguguuccgcuccagcgugcugcacuccacccaggaccucuuccugcccuucuucagcaacgucacgugguuccacgccauccacguguccgggaccaacggcaccaagcgguucgacaacccggugcugcccuucaacgacggggucuacuucgcgagcaccgagaaguccaacaucauccgcggcuggaucuucgggacgacccucgacagcaagacccagucccugcugaucgugaacaacgccaccaacguggucaucaaggugugcgaguuccaguucugcaacgaccccuuccucggcguguacuaccacaagaacaacaagagcuggauggaguccgaguuccgggucuacagcuccgccaacaacugcacguucgaguacgugagccagcccuuccugauggaccuggagggcaagcaggggaacuucaagaaccuccgcgaguucguguucaagaacaucgacggcuacuucaagaucuacuccaagcacaccccgaucaaccugguccgggaccugccccagggguucagcgcccucgagccccugguggaccugcccaucggcaucaacaucacccgcuuccagacccuccuggcccugcaccgguccuaccucacgccgggggacagcagcuccggcuggaccgcgggcgccgccgccuacuacgugggguaccugcagccccgcaccuuccugcucaaguacaacgagaacggcaccaucacggacgcggucgacugcgcccuggacccccugagcgagaccaagugcacccucaaguccuucaccguggagaaggggaucuaccagacgagcaacuuccgggugcagcccaccgaguccaucguccgcuucccgaacaucaccaaccugugccccuucggcgagguguucaacgccacccgguucgccagcgucuacgccuggaaccgcaagcggaucuccaacugcguggcggacuacagcgugcuguacaacuccgccagcuucuccacguucaagugcuacggcgucagccccaccaagcucaacgaccugugcuucaccaacguguacgccgacuccuucgugauccgcggggacgagguccggcagaucgcccccggccagaccgggaagaucgccgacuacaacuacaagcugccggacgacuucacgggcugcgugaucgcguggaacagcaacaaccucgacuccaaggucgggggcaacuacaacuaccuguuccgccuguuccgcaagagcaaccucaagcccuucgagcgggacaucuccaccgagaucuaccaggccggcagcacccccugcaacgggguggagggcuucaacugcuacuucccccugcaguccuacggguuccagccgaccaacggcgugggguaccagcccuaccggguggucgugcugagcuucgagcuccugcacgcccccgccacggugugcggccccaagaaguccaccaaccuggucaagaacaagugcgugaacuucaacuucaacggccucaccgggaccggcgugcugaccgagagcaacaagaaguuccugccguuccagcaguucgggcgcgacaucgccgacacgaccgacgcgguccgcgacccccagacccuggagauccucgacaucacccccugcagcuucggcgggguguccgugaucacgccgggcaccaacaccagcaaccaggucgccgugcuguaccagggcgugaacugcaccgagguccccguggccauccacgccgaccagcugacgcccaccuggcggguguacuccaccggcagcaacgucuuccagacccgcgccgggugccucaucggcgcggagcacgugaacaacuccuacgagugcgacauccccaucggggccggcaucugcgccagcuaccagacgcagaccaacuccccgcggcgcgcccggagcguggcgucccagagcaucaucgccuacaccaugucccugggcgccgagaacagcgucgccuacuccaacaacagcaucgccauccccaccaacuucacgaucuccgugaccaccgagauccugcccgugagcaugaccaagacgagcgucgacugcaccauguacaucugcggggacuccaccgagugcagcaaccuccugcugcaguacggcuccuucugcacccagcucaaccgcgcgcugacggggaucgccguggagcaggacaagaacacccaggagguguucgcccaggucaagcagaucuacaagacgcccccgaucaaggacuucggcggguucaacuucagccagauccugcccgaccccuccaagcccagcaagcgguccuucaucgaggaccuccuguucaacaaggugacccuggccgacgccggcuucaucaagcaguacggcgacugccucggggacaucgcggcccgcgaccugaucugcgcccagaaguucaacggccugaccgugcucccgccccugcugaccgacgagaugaucgcccaguacaccagcgcccuccuggcggggaccaucacguccggcuggaccuucggggccggcgccgcccugcagauccccuucgcgaugcagauggccuaccgguucaacggcaucggggucacccagaacgugcucuacgagaaccagaagcugaucgccaaccaguucaacagcgccaucggcaagauccaggacucccugagcuccaccgccagcgcgcucgggaagcugcaggacguggucaaccagaacgcccaggcccugaacacgcucgugaagcagcuguccagcaacuucggcgccaucuccagcgugcugaacgacauccucucccgccuggacaaggucgaggccgaggugcagaucgaccggcugaucaccgggcgccuccagagccugcagaccuacgugacccagcagcugauccgggcggccgagauccgcgccagcgccaaccucgccgcgaccaagauguccgagugcguccugggccagagcaagcggguggacuucugcggcaagggguaccaccugauguccuucccccagagcgccccgcacggcguggucuuccuccacgugacguacguccccgcccaggagaagaacuucaccaccgcccccgcgaucugccacgacgggaaggcccacuucccccgcgagggcguguucguguccaacgggacccacugguucgucacgcagcggaacuucuacgagccgcagaucaucaccaccgacaacaccuucgugagcggcaacugcgacguggucaucggcaucgugaacaacacgguguacgacccccugcagcccgagcuggacuccuucaaggaggagcucgacaaguacuucaagaaccacaccagccccgacgucgaccugggggacaucuccggcaucaacgccagcguggugaacauccagaaggagaucgaccgccugaacgaggucgccaagaaccucaacgagucccugaucgaccugcaggagcucgggaaguacgagcaguacaucaaguggccgugguacaucuggcugggcuucaucgccggccugaucgcgaucgugauggugaccaucaugcucugcugcaugaccagcugcugcuccugccugaaggggugcugcagcugcggcuccugcugcaaguucgacgaggacgacagcgagcccguccugaagggggugaagcuccacuacacgugaggacuaguuauaagacugacuagcccgaugggccucccaacgggcccuccuccccuccuugcaccgagagaucucaaaggcucuuuucagagccaccaaaaaaaaaaaaaaaaaaaaaaaaaaaaaaaaaaaaaaaaaaaaaaaaaaaaaaaaaaaaaaaaaaaaaaaaaaaaaaaaaaaaaaaaaaaaaaaaaaaaa

SEQ ID NO: 24517 - RNA, 4035 nt, Artificial Sequence
  SARS-CoV-2/Wuhan/WIV05/2019__EPI_ISL_402128 spike protein mRNA gc (1-1273)(D614G_I692V)
aggagaaagcuuaccauguucguguuccugguccuccugccccuggugagcucccagugcgugaaccucaccacccgcacgcagcugccgcccgccuacaccaacagcuucacccggggcgucuacuaccccgacaagguguuccgcuccagcgugcugcacuccacccaggaccucuuccugcccuucuucagcaacgucacgugguuccacgccauccacguguccgggaccaacggcaccaagcgguucgacaacccggugcugcccuucaacgacggggucuacuucgcgagcaccgagaaguccaacaucauccgcggcuggaucuucgggacgacccucgacagcaagacccagucccugcugaucgugaacaacgccaccaacguggucaucaaggugugcgaguuccaguucugcaacgaccccuuccucggcguguacuaccacaagaacaacaagagcuggauggaguccgaguuccgggucuacagcuccgccaacaacugcacguucgaguacgugagccagcccuuccugauggaccuggagggcaagcaggggaacuucaagaaccuccgcgaguucguguucaagaacaucgacggcuacuucaagaucuacuccaagcacaccccgaucaaccugguccgggaccugccccagggguucagcgcccucgagccccugguggaccugcccaucggcaucaacaucacccgcuuccagacccuccuggcccugcaccgguccuaccucacgccgggggacagcagcuccggcuggaccgcgggcgccgccgccuacuacgugggguaccugcagccccgcaccuuccugcucaaguacaacgagaacggcaccaucacggacgcggucgacugcgcccuggacccccugagcgagaccaagugcacccucaaguccuucaccguggagaaggggaucuaccagacgagcaacuuccgggugcagcccaccgaguccaucguccgcuucccgaacaucaccaaccugugccccuucggcgagguguucaacgccacccgguucgccagcgucuacgccuggaaccgcaagcggaucuccaacugcguggcggacuacagcgugcuguacaacuccgccagcuucuccacguucaagugcuacggcgucagccccaccaagcucaacgaccugugcuucaccaacguguacgccgacuccuucgugauccgcggggacgagguccggcagaucgcccccggccagaccgggaagaucgccgacuacaacuacaagcugccggacgacuucacgggcugcgugaucgcguggaacagcaacaaccucgacuccaaggucgggggcaacuacaacuaccuguaccgccuguuccgcaagagcaaccucaagcccuucgagcgggacaucuccaccgagaucuaccaggccggcagcacccccugcaacgggguggagggcuucaacugcuacuucccccugcaguccuacggguuccagccgaccaacggcgugggguaccagcccuaccggguggucgugcugagcuucgagcuccugcacgcccccgccacggugugcggccccaagaaguccaccaaccuggucaagaacaagugcgugaacuucaacuucaacggccucaccgggaccggcgugcugaccgagagcaacaagaaguuccugccguuccagcaguucgggcgcgacaucgccgacacgaccgacgcgguccgcgacccccagacccuggagauccucgacaucacccccugcagcuucggcgggguguccgugaucacgccgggcaccaacaccagcaaccaggucgccgugcuguaccagggcgugaacugcaccgagguccccguggccauccacgccgaccagcugacgcccaccuggcggguguacuccaccggcagcaacgucuuccagacccgcgccgggugccucaucggcgcggagcacgugaacaacuccuacgagugcgacauccccaucggggccggcaucugcgccagcuaccagacgcagaccaacuccccgcggcgcgcccggagcguggcgucccagagcgucaucgccuacaccaugucccugggcgccgagaacagcgucgccuacuccaacaacagcaucgccauccccaccaacuucacgaucuccgugaccaccgagauccugcccgugagcaugaccaagacgagcgucgacugcaccauguacaucugcggggacuccaccgagugcagcaaccuccugcugcaguacggcuccuucugcacccagcucaaccgcgcgcugacggggaucgccguggagcaggacaagaacacccaggagguguucgcccaggucaagcagaucuacaagacgcccccgaucaaggacuucggcggguucaacuucagccagauccugcccgaccccuccaagcccagcaagcgguccuucaucgaggaccuccuguucaacaaggugacccuggccgacgccggcuucaucaagcaguacggcgacugccucggggacaucgcggcccgcgaccugaucugcgcccagaaguucaacggccugaccgugcucccgccccugcugaccgacgagaugaucgcccaguacaccagcgcccuccuggcggggaccaucacguccggcuggaccuucggggccggcgccgcccugcagauccccuucgcgaugcagauggccuaccgguucaacggcaucggggucacccagaacgugcucuacgagaaccagaagcugaucgccaaccaguucaacagcgccaucggcaagauccaggacucccugagcuccaccgccagcgcgcucgggaagcugcaggacguggucaaccagaacgcccaggcccugaacacgcucgugaagcagcuguccagcaacuucggcgccaucuccagcgugcugaacgacauccucucccgccuggacaaggucgaggccgaggugcagaucgaccggcugaucaccgggcgccuccagagccugcagaccuacgugacccagcagcugauccgggcggccgagauccgcgccagcgccaaccucgccgcgaccaagauguccgagugcguccugggccagagcaagcggguggacuucugcggcaagggguaccaccugauguccuucccccagagcgccccgcacggcguggucuuccuccacgugacguacguccccgcccaggagaagaacuucaccaccgcccccgcgaucugccacgacgggaaggcccacuucccccgcgagggcguguucguguccaacgggacccacugguucgucacgcagcggaacuucuacgagccgcagaucaucaccaccgacaacaccuucgugagcggcaacugcgacguggucaucggcaucgugaacaacacgguguacgacccccugcagcccgagcuggacuccuucaaggaggagcucgacaaguacuucaagaaccacaccagccccgacgucgaccugggggacaucuccggcaucaacgccagcguggugaacauccagaaggagaucgaccgccugaacgaggucgccaagaaccucaacgagucccugaucgaccugcaggagcucgggaaguacgagcaguacaucaaguggccgugguacaucuggcugggcuucaucgccggccugaucgcgaucgugauggugaccaucaugcucugcugcaugaccagcugcugcuccugccugaaggggugcugcagcugcggcuccugcugcaaguucgacgaggacgacagcgagcccguccugaagggggugaagcuccacuacacgugaggacuaguuauaagacugacuagcccgaugggccucccaacgggcccuccuccccuccuugcaccgagagaucucaaaggcucuuuucagagccaccaaaaaaaaaaaaaaaaaaaaaaaaaaaaaaaaaaaaaaaaaaaaaaaaaaaaaaaaaaaaaaaaaaaaaaaaaaaaaaaaaaaaaaaaaaaaaaaaaaaaa

SEQ ID NO: 24518 - RNA, 4035 nt, Artificial Sequence
  SARS-CoV-2/Wuhan/WIV05/2019__EPI_ISL_402128 spike protein mRNA gc (1-1273)(D614G_M1229I)
aggagaaagcuuaccauguucguguuccugguccuccugccccuggugagcucccagugcgugaaccucaccacccgcacgcagcugccgcccgccuacaccaacagcuucacccggggcgucuacuaccccgacaagguguuccgcuccagcgugcugcacuccacccaggaccucuuccugcccuucuucagcaacgucacgugguuccacgccauccacguguccgggaccaacggcaccaagcgguucgacaacccggugcugcccuucaacgacggggucuacuucgcgagcaccgagaaguccaacaucauccgcggcuggaucuucgggacgacccucgacagcaagacccagucccugcugaucgugaacaacgccaccaacguggucaucaaggugugcgaguuccaguucugcaacgaccccuuccucggcguguacuaccacaagaacaacaagagcuggauggaguccgaguuccgggucuacagcuccgccaacaacugcacguucgaguacgugagccagcccuuccugauggaccuggagggcaagcaggggaacuucaagaaccuccgcgaguucguguucaagaacaucgacggcuacuucaagaucuacuccaagcacaccccgaucaaccugguccgggaccugccccagggguucagcgcccucgagccccugguggaccugcccaucggcaucaacaucacccgcuuccagacccuccuggcccugcaccgguccuaccucacgccgggggacagcagcuccggcuggaccgcgggcgccgccgccuacuacgugggguaccugcagccccgcaccuuccugcucaaguacaacgagaacggcaccaucacggacgcggucgacugcgcccuggacccccugagcgagaccaagugcacccucaaguccuucaccguggagaaggggaucuaccagacgagcaacuuccgggugcagcccaccgaguccaucguccgcuucccgaacaucaccaaccugugccccuucggcgagguguucaacgccacccgguucgccagcgucuacgccuggaaccgcaagcggaucuccaacugcguggcggacuacagcgugcuguacaacuccgccagcuucuccacguucaagugcuacggcgucagccccaccaagcucaacgaccugugcuucaccaacguguacgccgacuccuucgugauccgcggggacgagguccggcagaucgcccccggccagaccgggaagaucgccgacuacaacuacaagcugccggacgacuucacgggcugcgugaucgcguggaacagcaacaaccucgacuccaaggucgggggcaacuacaacuaccuguaccgccuguuccgcaagagcaaccucaagcccuucgagcgggacaucuccaccgagaucuaccaggccggcagcacccccugcaacgggguggagggcuucaacugcuacuucccccugcaguccuacggguuccagccgaccaacggcgugggguaccagcccuaccggguggucgugcugagcuucgagcuccugcacgcccccgccacggugugcggccccaagaaguccaccaaccuggucaagaacaagugcgugaacuucaacuucaacggccucaccgggaccggcgugcugaccgagagcaacaagaaguuccugccguuccagcaguucgggcgcgacaucgccgacacgaccgacgcgguccgcgacccccagacccuggagauccucgacaucacccccugcagcuucggcgggguguccgugaucacgccgggcaccaacaccagcaaccaggucgccgugcuguaccagggcgugaacugcaccgagguccccguggccauccacgccgaccagcugacgcccaccuggcggguguacuccaccggcagcaacgucuuccagacccgcgccgggugccucaucggcgcggagcacgugaacaacuccuacgagugcgacauccccaucggggccggcaucugcgccagcuaccagacgcagaccaacuccccgcggcgcgcccggagcguggcgucccagagcaucaucgccuacaccaugucccugggcgccgagaacagcgucgccuacuccaacaacagcaucgccauccccaccaacuucacgaucuccgugaccaccgagauccugcccgugagcaugaccaagacgagcgucgacugcaccauguacaucugcggggacuccaccgagugcagcaaccuccugcugcaguacggcuccuucugcacccagcucaaccgcgcgcugacggggaucgccguggagcaggacaagaacacccaggagguguucgcccaggucaagcagaucuacaagacgcccccgaucaaggacuucggcggguucaacuucagccagauccugcccgaccccuccaagcccagcaagcgguccuucaucgaggaccuccuguucaacaaggugacccuggccgacgccggcuucaucaagcaguacggcgacugccucggggacaucgcggcccgcgaccugaucugcgcccagaaguucaacggccugaccgugcucccgccccugcugaccgacgagaugaucgcccaguacaccagcgcccuccuggcggggaccaucacguccggcuggaccuucggggccggcgccgcccugcagauccccuucgcgaugcagauggccuaccgguucaacggcaucggggucacccagaacgugcucuacgagaaccagaagcugaucgccaaccaguucaacagcgccaucggcaagauccaggacucccugagcuccaccgccagcgcgcucgggaagcugcaggacguggucaaccagaacgcccaggcccugaacacgcucgugaagcagcuguccagcaacuucggcgccaucuccagcgugcugaacgacauccucucccgccuggacaaggucgaggccgaggugcagaucgaccggcugaucaccgggcgccuccagagccugcagaccuacgugacccagcagcugauccgggcggccgagauccgcgccagcgccaaccucgccgcgaccaagauguccgagugcguccugggccagagcaagcggguggacuucugcggcaagggguaccaccugauguccuucccccagagcgccccgcacggcguggucuuccuccacgugacguacguccccgcccaggagaagaacuucaccaccgcccccgcgaucugccacgacgggaaggcccacuucccccgcgagggcguguucguguccaacgggacccacugguucgucacgcagcggaacuucuacgagccgcagaucaucaccaccgacaacaccuucgugagcggcaacugcgacguggucaucggcaucgugaacaacacgguguacgacccccugcagcccgagcuggacuccuucaaggaggagcucgacaaguacuucaagaaccacaccagccccgacgucgaccugggggacaucuccggcaucaacgccagcguggugaacauccagaaggagaucgaccgccugaacgaggucgccaagaaccucaacgagucccugaucgaccugcaggagcucgggaaguacgagcaguacaucaaguggccgugguacaucuggcugggcuucaucgccggccugaucgcgaucgugaucgugaccaucaugcucugcugcaugaccagcugcugcuccugccugaaggggugcugcagcugcggcuccugcugcaaguucgacgaggacgacagcgagcccguccugaagggggugaagcuccacuacacgugaggacuaguuauaagacugacuagcccgaugggccucccaacgggcccuccuccccuccuugcaccgagagaucucaaaggcucuuuucagagccaccaaaaaaaaaaaaaaaaaaaaaaaaaaaaaaaaaaaaaaaaaaaaaaaaaaaaaaaaaaaaaaaaaaaaaaaaaaaaaaaaaaaaaaaaaaaaaaaaaaaaa

SEQ ID NO: 24519 - RNA, 4029 nt, Artificial Sequence
  SARS-CoV-2/Wuhan/WIV05/2019__EPI_ISL_402128 spike protein mRNA gc (1-1273)(H69del_V70del_A222V_Y453F_S477N_D614G_I692V)
aggagaaagcuuaccauguucguguuccugguccuccugccccuggugagcucccagugcgugaaccucaccacccgcacgcagcugccgcccgccuacaccaacagcuucacccggggcgucuacuaccccgacaagguguuccgcuccagcgugcugcacuccacccaggaccucuuccugcccuucuucagcaacgucacgugguuccacgccaucuccgggaccaacggcaccaagcgguucgacaacccggugcugcccuucaacgacggggucuacuucgcgagcaccgagaaguccaacaucauccgcggcuggaucuucgggacgacccucgacagcaagacccagucccugcugaucgugaacaacgccaccaacguggucaucaaggugugcgaguuccaguucugcaacgaccccuuccucggcguguacuaccacaagaacaacaagagcuggauggaguccgaguuccgggucuacagcuccgccaacaacugcacguucgaguacgugagccagcccuuccugauggaccuggagggcaagcaggggaacuucaagaaccuccgcgaguucguguucaagaacaucgacggcuacuucaagaucuacuccaagcacaccccgaucaaccugguccgggaccugccccagggguucagcguccucgagccccugguggaccugcccaucggcaucaacaucacccgcuuccagacccuccuggcccugcaccgguccuaccucacgccgggggacagcagcuccggcuggaccgcgggcgccgccgccuacuacgugggguaccugcagccccgcaccuuccugcucaaguacaacgagaacggcaccaucacggacgcggucgacugcgcccuggacccccugagcgagaccaagugcacccucaaguccuucaccguggagaaggggaucuaccagacgagcaacuuccgggugcagcccaccgaguccaucguccgcuucccgaacaucaccaaccugugccccuucggcgagguguucaacgccacccgguucgccagcgucuacgccuggaaccgcaagcggaucuccaacugcguggcggacuacagcgugcuguacaacuccgccagcuucuccacguucaagugcuacggcgucagccccaccaagcucaacgaccugugcuucaccaacguguacgccgacuccuucgugauccgcggggacgagguccggcagaucgcccccggccagaccgggaagaucgccgacuacaacuacaagcugccggacgacuucacgggcugcgugaucgcguggaacagcaacaaccucgacuccaaggucgggggcaacuacaacuaccuguuccgccuguuccgcaagagcaaccucaagcccuucgagcgggacaucuccaccgagaucuaccaggccggcaacacccccugcaacgggguggagggcuucaacugcuacuucccccugcaguccuacggguuccagccgaccaacggcgugggguaccagcccuaccggguggucgugcugagcuucgagcuccugcacgcccccgccacggugugcggccccaagaaguccaccaaccuggucaagaacaagugcgugaacuucaacuucaacggccucaccgggaccggcgugcugaccgagagcaacaagaaguuccugccguuccagcaguucgggcgcgacaucgccgacacgaccgacgcgguccgcgacccccagacccuggagauccucgacaucacccccugcagcuucggcgggguguccgugaucacgccgggcaccaacaccagcaaccaggucgccgugcuguaccagggcgugaacugcaccgagguccccguggccauccacgccgaccagcugacgcccaccuggcggguguacuccaccggcagcaacgucuuccagacccgcgccgggugccucaucggcgcggagcacgugaacaacuccuacgagugcgacauccccaucggggccggcaucugcgccagcuaccagacgcagaccaacuccccgcggcgcgcccggagcguggcgucccagagcgucaucgccuacaccaugucccugggcgccgagaacagcgucgccuacuccaacaacagcaucgccauccccaccaacuucacgaucuccgugaccaccgagauccugcccgugagcaugaccaagacgagcgucgacugcaccauguacaucugcggggacuccaccgagugcagcaaccuccugcugcaguacggcuccuucugcacccagcucaaccgcgcgcugacggggaucgccguggagcaggacaagaacacccaggagguguucgcccaggucaagcagaucuacaagacgcccccgaucaaggacuucggcggguucaacuucagccagauccugcccgaccccuccaagcccagcaagcgguccuucaucgaggaccuccuguucaacaaggugacccuggccgacgccggcuucaucaagcaguacggcgacugccucggggacaucgcggcccgcgaccugaucugcgcccagaaguucaacggccugaccgugcucccgccccugcugaccgacgagaugaucgcccaguacaccagcgcccuccuggcggggaccaucacguccggcuggaccuucggggccggcgccgcccugcagauccccuucgcgaugcagauggccuaccgguucaacggcaucggggucacccagaacgugcucuacgagaaccagaagcugaucgccaaccaguucaacagcgccaucggcaagauccaggacucccugagcuccaccgccagcgcgcucgggaagcugcaggacguggucaaccagaacgcccaggcccugaacacgcucgugaagcagcuguccagcaacuucggcgccaucuccagcgugcugaacgacauccucucccgccuggacaaggucgaggccgaggugcagaucgaccggcugaucaccgggcgccuccagagccugcagaccuacgugacccagcagcugauccgggcggccgagauccgcgccagcgccaaccucgccgcgaccaagauguccgagugcguccugggccagagcaagcggguggacuucugcggcaagggguaccaccugauguccuucccccagagcgccccgcacggcguggucuuccuccacgugacguacguccccgcccaggagaagaacuucaccaccgcccccgcgaucugccacgacgggaaggcccacuucccccgcgagggcguguucguguccaacgggacccacugguucgucacgcagcggaacuucuacgagccgcagaucaucaccaccgacaacaccuucgugagcggcaacugcgacguggucaucggcaucgugaacaacacgguguacgacccccugcagcccgagcuggacuccuucaaggaggagcucgacaaguacuucaagaaccacaccagccccgacgucgaccugggggacaucuccggcaucaacgccagcguggugaacauccagaaggagaucgaccgccugaacgaggucgccaagaaccucaacgagucccugaucgaccugcaggagcucgggaaguacgagcaguacaucaaguggccgugguacaucuggcugggcuucaucgccggccugaucgcgaucgugauggugaccaucaugcucugcugcaugaccagcugcugcuccugccugaaggggugcugcagcugcggcuccugcugcaaguucgacgaggacgacagcgagcccguccugaagggggugaagcuccacuacacgugaggacuaguuauaagacugacuagcccgaugggccucccaacgggcccuccuccccuccuugcaccgagagaucucaaaggcucuuuucagagccaccaaaaaaaaaaaaaaaaaaaaaaaaaaaaaaaaaaaaaaaaaaaaaaaaaaaaaaaaaaaaaaaaaaaaaaaaaaaaaaaaaaaaaaaaaaaaaaaaaaaaa

SEQ ID NO: 24520 - RNA, 4029 nt, Artificial Sequence
  SARS-CoV-2/Wuhan/WIV05/2019__EPI_ISL_402128 spike protein mRNA gc (1-1273)(H69del_V70del_Y453F_D614G_I692V_M1229I)
aggagaaagcuuaccauguucguguuccugguccuccugccccuggugagcucccagugcgugaaccucaccacccgcacgcagcugccgcccgccuacaccaacagcuucacccggggcgucuacuaccccgacaagguguuccgcuccagcgugcugcacuccacccaggaccucuuccugcccuucuucagcaacgucacgugguuccacgccaucuccgggaccaacggcaccaagcgguucgacaacccggugcugcccuucaacgacggggucuacuucgcgagcaccgagaaguccaacaucauccgcggcuggaucuucgggacgacccucgacagcaagacccagucccugcugaucgugaacaacgccaccaacguggucaucaaggugugcgaguuccaguucugcaacgaccccuuccucggcguguacuaccacaagaacaacaagagcuggauggaguccgaguuccgggucuacagcuccgccaacaacugcacguucgaguacgugagccagcccuuccugauggaccuggagggcaagcaggggaacuucaagaaccuccgcgaguucguguucaagaacaucgacggcuacuucaagaucuacuccaagcacaccccgaucaaccugguccgggaccugccccagggguucagcgcccucgagccccugguggaccugcccaucggcaucaacaucacccgcuuccagacccuccuggcccugcaccgguccuaccucacgccgggggacagcagcuccggcuggaccgcgggcgccgccgccuacuacgugggguaccugcagccccgcaccuuccugcucaaguacaacgagaacggcaccaucacggacgcggucgacugcgcccuggacccccugagcgagaccaagugcacccucaaguccuucaccguggagaaggggaucuaccagacgagcaacuuccgggugcagcccaccgaguccaucguccgcuucccgaacaucaccaaccugugccccuucggcgagguguucaacgccacccgguucgccagcgucuacgccuggaaccgcaagcggaucuccaacugcguggcggacuacagcgugcuguacaacuccgccagcuucuccacguucaagugcuacggcgucagccccaccaagcucaacgaccugugcuucaccaacguguacgccgacuccuucgugauccgcggggacgagguccggcagaucgcccccggccagaccgggaagaucgccgacuacaacuacaagcugccggacgacuucacgggcugcgugaucgcguggaacagcaacaaccucgacuccaaggucgggggcaacuacaacuaccuguuccgccuguuccgcaagagcaaccucaagcccuucgagcgggacaucuccaccgagaucuaccaggccggcagcacccccugcaacgggguggagggcuucaacugcuacuucccccugcaguccuacggguuccagccgaccaacggcgugggguaccagcccuaccggguggucgugcugagcuucgagcuccugcacgcccccgccacggugugcggccccaagaaguccaccaaccuggucaagaacaagugcgugaacuucaacuucaacggccucaccgggaccggcgugcugaccgagagcaacaagaaguuccugccguuccagcaguucgggcgcgacaucgccgacacgaccgacgcgguccgcgacccccagacccuggagauccucgacaucacccccugcagcuucggcgggguguccgugaucacgccgggcaccaacaccagcaaccaggucgccgugcuguaccagggcgugaacugcaccgagguccccguggccauccacgccgaccagcugacgcccaccuggcggguguacuccaccggcagcaacgucuuccagacccgcgccgggugccucaucggcgcggagcacgugaacaacuccuacgagugcgacauccccaucggggccggcaucugcgccagcuaccagacgcagaccaacuccccgcggcgcgcccggagcguggcgucccagagcgugaucgccuacaccaugucccugggcgccgagaacagcgucgccuacuccaacaacagcaucgccauccccaccaacuucacgaucuccgugaccaccgagauccugcccgugagcaugaccaagacgagcgucgacugcaccauguacaucugcggggacuccaccgagugcagcaaccuccugcugcaguacggcuccuucugcacccagcucaaccgcgcgcugacggggaucgccguggagcaggacaagaacacccaggagguguucgcccaggucaagcagaucuacaagacgcccccgaucaaggacuucggcggguucaacuucagccagauccugcccgaccccuccaagcccagcaagcgguccuucaucgaggaccuccuguucaacaaggugacccuggccgacgccggcuucaucaagcaguacggcgacugccucggggacaucgcggcccgcgaccugaucugcgcccagaaguucaacggccugaccgugcucccgccccugcugaccgacgagaugaucgcccaguacaccagcgcccuccuggcggggaccaucacguccggcuggaccuucggggccggcgccgcccugcagauccccuucgcgaugcagauggccuaccgguucaacggcaucggggucacccagaacgugcucuacgagaaccagaagcugaucgccaaccaguucaacagcgccaucggcaagauccaggacucccugagcuccaccgccagcgcgcucgggaagcugcaggacguggucaaccagaacgcccaggcccugaacacgcucgugaagcagcuguccagcaacuucggcgccaucuccagcgugcugaacgacauccucucccgccuggacaaggucgaggccgaggugcagaucgaccggcugaucaccgggcgccuccagagccugcagaccuacgugacccagcagcugauccgggcggccgagauccgcgccagcgccaaccucgccgcgaccaagauguccgagugcguccugggccagagcaagcggguggacuucugcggcaagggguaccaccugauguccuucccccagagcgccccgcacggcguggucuuccuccacgugacguacguccccgcccaggagaagaacuucaccaccgcccccgcgaucugccacgacgggaaggcccacuucccccgcgagggcguguucguguccaacgggacccacugguucgucacgcagcggaacuucuacgagccgcagaucaucaccaccgacaacaccuucgugagcggcaacugcgacguggucaucggcaucgugaacaacacgguguacgacccccugcagcccgagcuggacuccuucaaggaggagcucgacaaguacuucaagaaccacaccagccccgacgucgaccugggggacaucuccggcaucaacgccagcguggugaacauccagaaggagaucgaccgccugaacgaggucgccaagaaccucaacgagucccugaucgaccugcaggagcucgggaaguacgagcaguacaucaaguggccgugguacaucuggcugggcuucaucgccggccugaucgcgaucgugaucgugaccaucaugcucugcugcaugaccagcugcugcuccugccugaaggggugcugcagcugcggcuccugcugcaaguucgacgaggacgacagcgagcccguccugaagggggugaagcuccacuacacgugaggacuaguuauaagacugacuagcccgaugggccucccaacgggcccuccuccccuccuugcaccgagagaucucaaaggcucuuuucagagccaccaaaaaaaaaaaaaaaaaaaaaaaaaaaaaaaaaaaaaaaaaaaaaaaaaaaaaaaaaaaaaaaaaaaaaaaaaaaaaaaaaaaaaaaaaaaaaaaaaaaaa

SEQ ID NO: 24521 - RNA, 4026 nt, Artificial Sequence
  SARS-CoV-2/Wuhan/WIV05/2019__EPI_ISL_402128 spike protein mRNA gc (1-1273)(H69del_V70del_Y144del_N501Y_A570D_D614G_P681H_T716I_S982 A_D1118H)
aggagaaagcuuaccauguucguguuccugguccuccugccccuggugagcucccagugcgugaaccucaccacccgcacgcagcugccgcccgccuacaccaacagcuucacccggggcgucuacuaccccgacaagguguuccgcuccagcgugcugcacuccacccaggaccucuuccugcccuucuucagcaacgucacgugguuccacgccaucuccgggaccaacggcaccaagcgguucgacaacccggugcugcccuucaacgacggggucuacuucgcgagcaccgagaaguccaacaucauccgcggcuggaucuucgggacgacccucgacagcaagacccagucccugcugaucgugaacaacgccaccaacguggucaucaaggugugcgaguuccaguucugcaacgaccccuuccucggcguguaccacaagaacaacaagagcuggauggaguccgaguuccgggucuacagcuccgccaacaacugcacguucgaguacgugagccagcccuuccugauggaccuggagggcaagcaggggaacuucaagaaccuccgcgaguucguguucaagaacaucgacggcuacuucaagaucuacuccaagcacaccccgaucaaccugguccgggaccugccccagggguucagcgcccucgagccccugguggaccugcccaucggcaucaacaucacccgcuuccagacccuccuggcccugcaccgguccuaccucacgccgggggacagcagcuccggcuggaccgcgggcgccgccgccuacuacgugggguaccugcagccccgcaccuuccugcucaaguacaacgagaacggcaccaucacggacgcggucgacugcgcccuggacccccugagcgagaccaagugcacccucaaguccuucaccguggagaaggggaucuaccagacgagcaacuuccgggugcagcccaccgaguccaucguccgcuucccgaacaucaccaaccugugccccuucggcgagguguucaacgccacccgguucgccagcgucuacgccuggaaccgcaagcggaucuccaacugcguggcggacuacagcgugcuguacaacuccgccagcuucuccacguucaagugcuacggcgucagccccaccaagcucaacgaccugugcuucaccaacguguacgccgacuccuucgugauccgcggggacgagguccggcagaucgcccccggccagaccgggaagaucgccgacuacaacuacaagcugccggacgacuucacgggcugcgugaucgcguggaacagcaacaaccucgacuccaaggucgggggcaacuacaacuaccuguaccgccuguuccgcaagagcaaccucaagcccuucgagcgggacaucuccaccgagaucuaccaggccggcagcacccccugcaacgggguggagggcuucaacugcuacuucccccugcaguccuacggguuccagccgaccuacggcgugggguaccagcccuaccggguggucgugcugagcuucgagcuccugcacgcccccgccacggugugcggccccaagaaguccaccaaccuggucaagaacaagugcgugaacuucaacuucaacggccucaccgggaccggcgugcugaccgagagcaacaagaaguuccugccguuccagcaguucgggcgcgacaucgacgacacgaccgacgcgguccgcgacccccagacccuggagauccucgacaucacccccugcagcuucggcgggguguccgugaucacgccgggcaccaacaccagcaaccaggucgccgugcuguaccagggcgugaacugcaccgagguccccguggccauccacgccgaccagcugacgcccaccuggcggguguacuccaccggcagcaacgucuuccagacccgcgccgggugccucaucggcgcggagcacgugaacaacuccuacgagugcgacauccccaucggggccggcaucugcgccagcuaccagacgcagaccaacucccaccggcgcgcccggagcguggcgucccagagcaucaucgccuacaccaugucccugggcgccgagaacagcgucgccuacuccaacaacagcaucgccauccccaucaacuucacgaucuccgugaccaccgagauccugcccgugagcaugaccaagacgagcgucgacugcaccauguacaucugcggggacuccaccgagugcagcaaccuccugcugcaguacggcuccuucugcacccagcucaaccgcgcgcugacggggaucgccguggagcaggacaagaacacccaggagguguucgcccaggucaagcagaucuacaagacgcccccgaucaaggacuucggcggguucaacuucagccagauccugcccgaccccuccaagcccagcaagcgguccuucaucgaggaccuccuguucaacaaggugacccuggccgacgccggcuucaucaagcaguacggcgacugccucggggacaucgcggcccgcgaccugaucugcgcccagaaguucaacggccugaccgugcucccgccccugcugaccgacgagaugaucgcccaguacaccagcgcccuccuggcggggaccaucacguccggcuggaccuucggggccggcgccgcccugcagauccccuucgcgaugcagauggccuaccgguucaacggcaucggggucacccagaacgugcucuacgagaaccagaagcugaucgccaaccaguucaacagcgccaucggcaagauccaggacucccugagcuccaccgccagcgcgcucgggaagcugcaggacguggucaaccagaacgcccaggcccugaacacgcucgugaagcagcuguccagcaacuucggcgccaucuccagcgugcugaacgacauccucgcccgccuggacaaggucgaggccgaggugcagaucgaccggcugaucaccgggcgccuccagagccugcagaccuacgugacccagcagcugauccgggcggccgagauccgcgccagcgccaaccucgccgcgaccaagauguccgagugcguccugggccagagcaagcggguggacuucugcggcaagggguaccaccugauguccuucccccagagcgccccgcacggcguggucuuccuccacgugacguacguccccgcccaggagaagaacuucaccaccgcccccgcgaucugccacgacgggaaggcccacuucccccgcgagggcguguucguguccaacgggacccacugguucgucacgcagcggaacuucuacgagccgcagaucaucaccacccacaacaccuucgugagcggcaacugcgacguggucaucggcaucgugaacaacacgguguacgacccccugcagcccgagcuggacuccuucaaggaggagcucgacaaguacuucaagaaccacaccagccccgacgucgaccugggggacaucuccggcaucaacgccagcguggugaacauccagaaggagaucgaccgccugaacgaggucgccaagaaccucaacgagucccugaucgaccugcaggagcucgggaaguacgagcaguacaucaaguggccgugguacaucuggcugggcuucaucgccggccugaucgcgaucgugauggugaccaucaugcucugcugcaugaccagcugcugcuccugccugaaggggugcugcagcugcggcuccugcugcaaguucgacgaggacgacagcgagcccguccugaagggggugaagcuccacuacacgugaggacuaguuauaagacugacuagcccgaugggccucccaacgggcccuccuccccuccuugcaccgagagaucucaaaggcucuuuucagagccaccaaaaaaaaaaaaaaaaaaaaaaaaaaaaaaaaaaaaaaaaaaaaaaaaaaaaaaaaaaaaaaaaaaaaaaaaaaaaaaaaaaaaaaaaaaaaaaaaaaaaa

SEQ ID NO: 24522 - RNA, 4035 nt, Artificial Sequence
  SARS-CoV-2/Wuhan/WIV05/2019__EPI_ISL_402128 spike protein mRNA gc (1-1273)(K417N_E484K_N501Y_D614G)
aggagaaagcuuaccauguucguguuccugguccuccugccccuggugagcucccagugcgugaaccucaccacccgcacgcagcugccgcccgccuacaccaacagcuucacccggggcgucuacuaccccgacaagguguuccgcuccagcgugcugcacuccacccaggaccucuuccugcccuucuucagcaacgucacgugguuccacgccauccacguguccgggaccaacggcaccaagcgguucgacaacccggugcugcccuucaacgacggggucuacuucgcgagcaccgagaaguccaacaucauccgcggcuggaucuucgggacgacccucgacagcaagacccagucccugcugaucgugaacaacgccaccaacguggucaucaaggugugcgaguuccaguucugcaacgaccccuuccucggcguguacuaccacaagaacaacaagagcuggauggaguccgaguuccgggucuacagcuccgccaacaacugcacguucgaguacgugagccagcccuuccugauggaccuggagggcaagcaggggaacuucaagaaccuccgcgaguucguguucaagaacaucgacggcuacuucaagaucuacuccaagcacaccccgaucaaccugguccgggaccugccccagggguucagcgcccucgagccccugguggaccugcccaucggcaucaacaucacccgcuuccagacccuccuggcccugcaccgguccuaccucacgccgggggacagcagcuccggcuggaccgcgggcgccgccgccuacuacgugggguaccugcagccccgcaccuuccugcucaaguacaacgagaacggcaccaucacggacgcggucgacugcgcccuggacccccugagcgagaccaagugcacccucaaguccuucaccguggagaaggggaucuaccagacgagcaacuuccgggugcagcccaccgaguccaucguccgcuucccgaacaucaccaaccugugccccuucggcgagguguucaacgccacccgguucgccagcgucuacgccuggaaccgcaagcggaucuccaacugcguggcggacuacagcgugcuguacaacuccgccagcuucuccacguucaagugcuacggcgucagccccaccaagcucaacgaccugugcuucaccaacguguacgccgacuccuucgugauccgcggggacgagguccggcagaucgcccccggccagaccgggaacaucgccgacuacaacuacaagcugccggacgacuucacgggcugcgugaucgcguggaacagcaacaaccucgacuccaaggucgggggcaacuacaacuaccuguaccgccuguuccgcaagagcaaccucaagcccuucgagcgggacaucuccaccgagaucuaccaggccggcagcacccccugcaacggggugaagggcuucaacugcuacuucccccugcaguccuacggguuccagccgaccuacggcgugggguaccagcccuaccggguggucgugcugagcuucgagcuccugcacgcccccgccacggugugcggccccaagaaguccaccaaccuggucaagaacaagugcgugaacuucaacuucaacggccucaccgggaccggcgugcugaccgagagcaacaagaaguuccugccguuccagcaguucgggcgcgacaucgccgacacgaccgacgcgguccgcgacccccagacccuggagauccucgacaucacccccugcagcuucggcgggguguccgugaucacgccgggcaccaacaccagcaaccaggucgccgugcuguaccagggcgugaacugcaccgagguccccguggccauccacgccgaccagcugacgcccaccuggcggguguacuccaccggcagcaacgucuuccagacccgcgccgggugccucaucggcgcggagcacgugaacaacuccuacgagugcgacauccccaucggggccggcaucugcgccagcuaccagacgcagaccaacuccccgcggcgcgcccggagcguggcgucccagagcaucaucgccuacaccaugucccugggcgccgagaacagcgucgccuacuccaacaacagcaucgccauccccaccaacuucacgaucuccgugaccaccgagauccugcccgugagcaugaccaagacgagcgucgacugcaccauguacaucugcggggacuccaccgagugcagcaaccuccugcugcaguacggcuccuucugcacccagcucaaccgcgcgcugacggggaucgccguggagcaggacaagaacacccaggagguguucgcccaggucaagcagaucuacaagacgcccccgaucaaggacuucggcggguucaacuucagccagauccugcccgaccccuccaagcccagcaagcgguccuucaucgaggaccuccuguucaacaaggugacccuggccgacgccggcuucaucaagcaguacggcgacugccucggggacaucgcggcccgcgaccugaucugcgcccagaaguucaacggccugaccgugcucccgccccugcugaccgacgagaugaucgcccaguacaccagcgcccuccuggcggggaccaucacguccggcuggaccuucggggccggcgccgcccugcagauccccuucgcgaugcagauggccuaccgguucaacggcaucggggucacccagaacgugcucuacgagaaccagaagcugaucgccaaccaguucaacagcgccaucggcaagauccaggacucccugagcuccaccgccagcgcgcucgggaagcugcaggacguggucaaccagaacgcccaggcccugaacacgcucgugaagcagcuguccagcaacuucggcgccaucuccagcgugcugaacgacauccucucccgccuggacaaggucgaggccgaggugcagaucgaccggcugaucaccgggcgccuccagagccugcagaccuacgugacccagcagcugauccgggcggccgagauccgcgccagcgccaaccucgccgcgaccaagauguccgagugcguccugggccagagcaagcggguggacuucugcggcaagggguaccaccugauguccuucccccagagcgccccgcacggcguggucuuccuccacgugacguacguccccgcccaggagaagaacuucaccaccgcccccgcgaucugccacgacgggaaggcccacuucccccgcgagggcguguucguguccaacgggacccacugguucgucacgcagcggaacuucuacgagccgcagaucaucaccaccgacaacaccuucgugagcggcaacugcgacguggucaucggcaucgugaacaacacgguguacgacccccugcagcccgagcuggacuccuucaaggaggagcucgacaaguacuucaagaaccacaccagccccgacgucgaccugggggacaucuccggcaucaacgccagcguggugaacauccagaaggagaucgaccgccugaacgaggucgccaagaaccucaacgagucccugaucgaccugcaggagcucgggaaguacgagcaguacaucaaguggccgugguacaucuggcugggcuucaucgccggccugaucgcgaucgugauggugaccaucaugcucugcugcaugaccagcugcugcuccugccugaaggggugcugcagcugcggcuccugcugcaaguucgacgaggacgacagcgagcccguccugaagggggugaagcuccacuacacgugaggacuaguuauaagacugacuagcccgaugggccucccaacgggcccuccuccccuccuugcaccgagagaucucaaaggcucuuuucagagccaccaaaaaaaaaaaaaaaaaaaaaaaaaaaaaaaaaaaaaaaaaaaaaaaaaaaaaaaaaaaaaaaaaaaaaaaaaaaaaaaaaaaaaaaaaaaaaaaaaaaaa

SEQ ID NO: 24523 - RNA, 4026 nt, Artificial Sequence
  SARS-CoV-2/Wuhan/WIV05/2019__EPI_ISL_402128 spike protein mRNA gc (1-1273)(L18F_D80A_D215G_L242del_A243del_L244del_R246I_K417N_E484 K_N501Y_D614G_A701V)
aggagaaagcuuaccauguucguguuccugguccuccugccccuggugagcucccagugcgugaacuucaccacccgcacgcagcugccgcccgccuacaccaacagcuucacccggggcgucuacuaccccgacaagguguuccgcuccagcgugcugcacuccacccaggaccucuuccugcccuucuucagcaacgucacgugguuccacgccauccacguguccgggaccaacggcaccaagcgguucgccaacccggugcugcccuucaacgacggggucuacuucgcgagcaccgagaaguccaacaucauccgcggcuggaucuucgggacgacccucgacagcaagacccagucccugcugaucgugaacaacgccaccaacguggucaucaaggugugcgaguuccaguucugcaacgaccccuuccucggcguguacuaccacaagaacaacaagagcuggauggaguccgaguuccgggucuacagcuccgccaacaacugcacguucgaguacgugagccagcccuuccugauggaccuggagggcaagcaggggaacuucaagaaccuccgcgaguucguguucaagaacaucgacggcuacuucaagaucuacuccaagcacaccccgaucaaccugguccggggccugccccagggguucagcgcccucgagccccugguggaccugcccaucggcaucaacaucacccgcuuccagacccuccacaucuccuaccucacgccgggggacagcagcuccggcuggaccgcgggcgccgccgccuacuacgugggguaccugcagccccgcaccuuccugcucaaguacaacgagaacggcaccaucacggacgcggucgacugcgcccuggacccccugagcgagaccaagugcacccucaaguccuucaccguggagaaggggaucuaccagacgagcaacuuccgggugcagcccaccgaguccaucguccgcuucccgaacaucaccaaccugugccccuucggcgagguguucaacgccacccgguucgccagcgucuacgccuggaaccgcaagcggaucuccaacugcguggcggacuacagcgugcuguacaacuccgccagcuucuccacguucaagugcuacggcgucagccccaccaagcucaacgaccugugcuucaccaacguguacgccgacuccuucgugauccgcggggacgagguccggcagaucgcccccggccagaccgggaacaucgccgacuacaacuacaagcugccggacgacuucacgggcugcgugaucgcguggaacagcaacaaccucgacuccaaggucgggggcaacuacaacuaccuguaccgccuguuccgcaagagcaaccucaagcccuucgagcgggacaucuccaccgagaucuaccaggccggcagcacccccugcaacggggugaagggcuucaacugcuacuucccccugcaguccuacggguuccagccgaccuacggcgugggguaccagcccuaccggguggucgugcugagcuucgagcuccugcacgcccccgccacggugugcggccccaagaaguccaccaaccuggucaagaacaagugcgugaacuucaacuucaacggccucaccgggaccggcgugcugaccgagagcaacaagaaguuccugccguuccagcaguucgggcgcgacaucgccgacacgaccgacgcgguccgcgacccccagacccuggagauccucgacaucacccccugcagcuucggcgggguguccgugaucacgccgggcaccaacaccagcaaccaggucgccgugcuguaccagggcgugaacugcaccgagguccccguggccauccacgccgaccagcugacgcccaccuggcggguguacuccaccggcagcaacgucuuccagacccgcgccgggugccucaucggcgcggagcacgugaacaacuccuacgagugcgacauccccaucggggccggcaucugcgccagcuaccagacgcagaccaacuccccgcggcgcgcccggagcguggcgucccagagcaucaucgccuacaccaugucccugggcguggagaacagcgucgccuacuccaacaacagcaucgccauccccaccaacuucacgaucuccgugaccaccgagauccugcccgugagcaugaccaagacgagcgucgacugcaccauguacaucugcggggacuccaccgagugcagcaaccuccugcugcaguacggcuccuucugcacccagcucaaccgcgcgcugacggggaucgccguggagcaggacaagaacacccaggagguguucgcccaggucaagcagaucuacaagacgcccccgaucaaggacuucggcggguucaacuucagccagauccugcccgaccccuccaagcccagcaagcgguccuucaucgaggaccuccuguucaacaaggugacccuggccgacgccggcuucaucaagcaguacggcgacugccucggggacaucgcggcccgcgaccugaucugcgcccagaaguucaacggccugaccgugcucccgccccugcugaccgacgagaugaucgcccaguacaccagcgcccuccuggcggggaccaucacguccggcuggaccuucggggccggcgccgcccugcagauccccuucgcgaugcagauggccuaccgguucaacggcaucggggucacccagaacgugcucuacgagaaccagaagcugaucgccaaccaguucaacagcgccaucggcaagauccaggacucccugagcuccaccgccagcgcgcucgggaagcugcaggacguggucaaccagaacgcccaggcccugaacacgcucgugaagcagcuguccagcaacuucggcgccaucuccagcgugcugaacgacauccucucccgccuggacaaggucgaggccgaggugcagaucgaccggcugaucaccgggcgccuccagagccugcagaccuacgugacccagcagcugauccgggcggccgagauccgcgccagcgccaaccucgccgcgaccaagauguccgagugcguccugggccagagcaagcggguggacuucugcggcaagggguaccaccugauguccuucccccagagcgccccgcacggcguggucuuccuccacgugacguacguccccgcccaggagaagaacuucaccaccgcccccgcgaucugccacgacgggaaggcccacuucccccgcgagggcguguucguguccaacgggacccacugguucgucacgcagcggaacuucuacgagccgcagaucaucaccaccgacaacaccuucgugagcggcaacugcgacguggucaucggcaucgugaacaacacgguguacgacccccugcagcccgagcuggacuccuucaaggaggagcucgacaaguacuucaagaaccacaccagccccgacgucgaccugggggacaucuccggcaucaacgccagcguggugaacauccagaaggagaucgaccgccugaacgaggucgccaagaaccucaacgagucccugaucgaccugcaggagcucgggaaguacgagcaguacaucaaguggccgugguacaucuggcugggcuucaucgccggccugaucgcgaucgugauggugaccaucaugcucugcugcaugaccagcugcugcuccugccugaaggggugcugcagcugcggcuccugcugcaaguucgacgaggacgacagcgagcccguccugaagggggugaagcuccacuacacgugaggacuaguuauaagacugacuagcccgaugggccucccaacgggcccuccuccccuccuugcaccgagagaucucaaaggcucuuuucagagccaccaaaaaaaaaaaaaaaaaaaaaaaaaaaaaaaaaaaaaaaaaaaaaaaaaaaaaaaaaaaaaaaaaaaaaaaaaaaaaaaaaaaaaaaaaaaaaaaaaaaaa

SEQ ID NO: 24524 - RNA, 4035 nt, Artificial Sequence
  SARS-CoV-2/Wuhan/WIV05/2019__EPI_ISL_402128 spike protein mRNA gc (1-1273)(E484K_D614G)
aggagaaagcuuaccauguucguguuccugguccuccugccccuggugagcucccagugcgugaaccucaccacccgcacgcagcugccgcccgccuacaccaacagcuucacccggggcgucuacuaccccgacaagguguuccgcuccagcgugcugcacuccacccaggaccucuuccugcccuucuucagcaacgucacgugguuccacgccauccacguguccgggaccaacggcaccaagcgguucgacaacccggugcugcccuucaacgacggggucuacuucgcgagcaccgagaaguccaacaucauccgcggcuggaucuucgggacgacccucgacagcaagacccagucccugcugaucgugaacaacgccaccaacguggucaucaaggugugcgaguuccaguucugcaacgaccccuuccucggcguguacuaccacaagaacaacaagagcuggauggaguccgaguuccgggucuacagcuccgccaacaacugcacguucgaguacgugagccagcccuuccugauggaccuggagggcaagcaggggaacuucaagaaccuccgcgaguucguguucaagaacaucgacggcuacuucaagaucuacuccaagcacaccccgaucaaccugguccgggaccugccccagggguucagcgcccucgagccccugguggaccugcccaucggcaucaacaucacccgcuuccagacccuccuggcccugcaccgguccuaccucacgccgggggacagcagcuccggcuggaccgcgggcgccgccgccuacuacgugggguaccugcagccccgcaccuuccugcucaaguacaacgagaacggcaccaucacggacgcggucgacugcgcccuggacccccugagcgagaccaagugcacccucaaguccuucaccguggagaaggggaucuaccagacgagcaacuuccgggugcagcccaccgaguccaucguccgcuucccgaacaucaccaaccugugccccuucggcgagguguucaacgccacccgguucgccagcgucuacgccuggaaccgcaagcggaucuccaacugcguggcggacuacagcgugcuguacaacuccgccagcuucuccacguucaagugcuacggcgucagccccaccaagcucaacgaccugugcuucaccaacguguacgccgacuccuucgugauccgcggggacgagguccggcagaucgcccccggccagaccgggaagaucgccgacuacaacuacaagcugccggacgacuucacgggcugcgugaucgcguggaacagcaacaaccucgacuccaaggucgggggcaacuacaacuaccuguaccgccuguuccgcaagagcaaccucaagcccuucgagcgggacaucuccaccgagaucuaccaggccggcagcacccccugcaacggggugaagggcuucaacugcuacuucccccugcaguccuacggguuccagccgaccaacggcgugggguaccagcccuaccggguggucgugcugagcuucgagcuccugcacgcccccgccacggugugcggccccaagaaguccaccaaccuggucaagaacaagugcgugaacuucaacuucaacggccucaccgggaccggcgugcugaccgagagcaacaagaaguuccugccguuccagcaguucgggcgcgacaucgccgacacgaccgacgcgguccgcgacccccagacccuggagauccucgacaucacccccugcagcuucggcgggguguccgugaucacgccgggcaccaacaccagcaaccaggucgccgugcuguaccagggcgugaacugcaccgagguccccguggccauccacgccgaccagcugacgcccaccuggcggguguacuccaccggcagcaacgucuuccagacccgcgccgggugccucaucggcgcggagcacgugaacaacuccuacgagugcgacauccccaucggggccggcaucugcgccagcuaccagacgcagaccaacuccccgcggcgcgcccggagcguggcgucccagagcaucaucgccuacaccaugucccugggcgccgagaacagcgucgccuacuccaacaacagcaucgccauccccaccaacuucacgaucuccgugaccaccgagauccugcccgugagcaugaccaagacgagcgucgacugcaccauguacaucugcggggacuccaccgagugcagcaaccuccugcugcaguacggcuccuucugcacccagcucaaccgcgcgcugacggggaucgccguggagcaggacaagaacacccaggagguguucgcccaggucaagcagaucuacaagacgcccccgaucaaggacuucggcggguucaacuucagccagauccugcccgaccccuccaagcccagcaagcgguccuucaucgaggaccuccuguucaacaaggugacccuggccgacgccggcuucaucaagcaguacggcgacugccucggggacaucgcggcccgcgaccugaucugcgcccagaaguucaacggccugaccgugcucccgccccugcugaccgacgagaugaucgcccaguacaccagcgcccuccuggcggggaccaucacguccggcuggaccuucggggccggcgccgcccugcagauccccuucgcgaugcagauggccuaccgguucaacggcaucggggucacccagaacgugcucuacgagaaccagaagcugaucgccaaccaguucaacagcgccaucggcaagauccaggacucccugagcuccaccgccagcgcgcucgggaagcugcaggacguggucaaccagaacgcccaggcccugaacacgcucgugaagcagcuguccagcaacuucggcgccaucuccagcgugcugaacgacauccucucccgccuggacaaggucgaggccgaggugcagaucgaccggcugaucaccgggcgccuccagagccugcagaccuacgugacccagcagcugauccgggcggccgagauccgcgccagcgccaaccucgccgcgaccaagauguccgagugcguccugggccagagcaagcggguggacuucugcggcaagggguaccaccugauguccuucccccagagcgccccgcacggcguggucuuccuccacgugacguacguccccgcccaggagaagaacuucaccaccgcccccgcgaucugccacgacgggaaggcccacuucccccgcgagggcguguucguguccaacgggacccacugguucgucacgcagcggaacuucuacgagccgcagaucaucaccaccgacaacaccuucgugagcggcaacugcgacguggucaucggcaucgugaacaacacgguguacgacccccugcagcccgagcuggacuccuucaaggaggagcucgacaaguacuucaagaaccacaccagccccgacgucgaccugggggacaucuccggcaucaacgccagcguggugaacauccagaaggagaucgaccgccugaacgaggucgccaagaaccucaacgagucccugaucgaccugcaggagcucgggaaguacgagcaguacaucaaguggccgugguacaucuggcugggcuucaucgccggccugaucgcgaucgugauggugaccaucaugcucugcugcaugaccagcugcugcuccugccugaaggggugcugcagcugcggcuccugcugcaaguucgacgaggacgacagcgagcccguccugaagggggugaagcuccacuacacgugaggacuaguuauaagacugacuagcccgaugggccucccaacgggcccuccuccccuccuugcaccgagagaucucaaaggcucuuuucagagccaccaaaaaaaaaaaaaaaaaaaaaaaaaaaaaaaaaaaaaaaaaaaaaaaaaaaaaaaaaaaaaaaaaaaaaaaaaaaaaaaaaaaaaaaaaaaaaaaaaaaaa

SEQ ID NO: 24525 - RNA, 4035 nt, Artificial Sequence
  SARS-CoV-2/Wuhan/WIV05/2019__EPI_ISL_402128 spike protein mRNA gc (1-1273)(L18F_T20N_P26S_D138Y_R190S_K417T_E484K_N501Y_D614G_H655Y _T1027I)
aggagaaagcuuaccauguucguguuccugguccuccugccccuggugagcucccagugcgugaacuucaccaaccgcacgcagcugccgagcgccuacaccaacagcuucacccggggcgucuacuaccccgacaagguguuccgcuccagcgugcugcacuccacccaggaccucuuccugcccuucuucagcaacgucacgugguuccacgccauccacguguccgggaccaacggcaccaagcgguucgacaacccggugcugcccuucaacgacggggucuacuucgcgagcaccgagaaguccaacaucauccgcggcuggaucuucgggacgacccucgacagcaagacccagucccugcugaucgugaacaacgccaccaacguggucaucaaggugugcgaguuccaguucugcaacuaccccuuccucggcguguacuaccacaagaacaacaagagcuggauggaguccgaguuccgggucuacagcuccgccaacaacugcacguucgaguacgugagccagcccuuccugauggaccuggagggcaagcaggggaacuucaagaaccucagcgaguucguguucaagaacaucgacggcuacuucaagaucuacuccaagcacaccccgaucaaccugguccgggaccugccccagggguucagcgcccucgagccccugguggaccugcccaucggcaucaacaucacccgcuuccagacccuccuggcccugcaccgguccuaccucacgccgggggacagcagcuccggcuggaccgcgggcgccgccgccuacuacgugggguaccugcagccccgcaccuuccugcucaaguacaacgagaacggcaccaucacggacgcggucgacugcgcccuggacccccugagcgagaccaagugcacccucaaguccuucaccguggagaaggggaucuaccagacgagcaacuuccgggugcagcccaccgaguccaucguccgcuucccgaacaucaccaaccugugccccuucggcgagguguucaacgccacccgguucgccagcgucuacgccuggaaccgcaagcggaucuccaacugcguggcggacuacagcgugcuguacaacuccgccagcuucuccacguucaagugcuacggcgucagccccaccaagcucaacgaccugugcuucaccaacguguacgccgacuccuucgugauccgcggggacgagguccggcagaucgcccccggccagaccgggaccaucgccgacuacaacuacaagcugccggacgacuucacgggcugcgugaucgcguggaacagcaacaaccucgacuccaaggucgggggcaacuacaacuaccuguaccgccuguuccgcaagagcaaccucaagcccuucgagcgggacaucuccaccgagaucuaccaggccggcagcacccccugcaacggggugaagggcuucaacugcuacuucccccugcaguccuacggguuccagccgaccuacggcgugggguaccagcccuaccggguggucgugcugagcuucgagcuccugcacgcccccgccacggugugcggccccaagaaguccaccaaccuggucaagaacaagugcgugaacuucaacuucaacggccucaccgggaccggcgugcugaccgagagcaacaagaaguuccugccguuccagcaguucgggcgcgacaucgccgacacgaccgacgcgguccgcgacccccagacccuggagauccucgacaucacccccugcagcuucggcgggguguccgugaucacgccgggcaccaacaccagcaaccaggucgccgugcuguaccagggcgugaacugcaccgagguccccguggccauccacgccgaccagcugacgcccaccuggcggguguacuccaccggcagcaacgucuuccagacccgcgccgggugccucaucggcgcggaguacgugaacaacuccuacgagugcgacauccccaucggggccggcaucugcgccagcuaccagacgcagaccaacuccccgcggcgcgcccggagcguggcgucccagagcaucaucgccuacaccaugucccugggcgccgagaacagcgucgccuacuccaacaacagcaucgccauccccaccaacuucacgaucuccgugaccaccgagauccugcccgugagcaugaccaagacgagcgucgacugcaccauguacaucugcggggacuccaccgagugcagcaaccuccugcugcaguacggcuccuucugcacccagcucaaccgcgcgcugacggggaucgccguggagcaggacaagaacacccaggagguguucgcccaggucaagcagaucuacaagacgcccccgaucaaggacuucggcggguucaacuucagccagauccugcccgaccccuccaagcccagcaagcgguccuucaucgaggaccuccuguucaacaaggugacccuggccgacgccggcuucaucaagcaguacggcgacugccucggggacaucgcggcccgcgaccugaucugcgcccagaaguucaacggccugaccgugcucccgccccugcugaccgacgagaugaucgcccaguacaccagcgcccuccuggcggggaccaucacguccggcuggaccuucggggccggcgccgcccugcagauccccuucgcgaugcagauggccuaccgguucaacggcaucggggucacccagaacgugcucuacgagaaccagaagcugaucgccaaccaguucaacagcgccaucggcaagauccaggacucccugagcuccaccgccagcgcgcucgggaagcugcaggacguggucaaccagaacgcccaggcccugaacacgcucgugaagcagcuguccagcaacuucggcgccaucuccagcgugcugaacgacauccucucccgccuggacaaggucgaggccgaggugcagaucgaccggcugaucaccgggcgccuccagagccugcagaccuacgugacccagcagcugauccgggcggccgagauccgcgccagcgccaaccucgccgcgaucaagauguccgagugcguccugggccagagcaagcggguggacuucugcggcaagggguaccaccugauguccuucccccagagcgccccgcacggcguggucuuccuccacgugacguacguccccgcccaggagaagaacuucaccaccgcccccgcgaucugccacgacgggaaggcccacuucccccgcgagggcguguucguguccaacgggacccacugguucgucacgcagcggaacuucuacgagccgcagaucaucaccaccgacaacaccuucgugagcggcaacugcgacguggucaucggcaucgugaacaacacgguguacgacccccugcagcccgagcuggacuccuucaaggaggagcucgacaaguacuucaagaaccacaccagccccgacgucgaccugggggacaucuccggcaucaacgccagcguggugaacauccagaaggagaucgaccgccugaacgaggucgccaagaaccucaacgagucccugaucgaccugcaggagcucgggaaguacgagcaguacaucaaguggccgugguacaucuggcugggcuucaucgccggccugaucgcgaucgugauggugaccaucaugcucugcugcaugaccagcugcugcuccugccugaaggggugcugcagcugcggcuccugcugcaaguucgacgaggacgacagcgagcccguccugaagggggugaagcuccacuacacgugaggacuaguuauaagacugacuagcccgaugggccucccaacgggcccuccuccccuccuugcaccgagagaucucaaaggcucuuuucagagccaccaaaaaaaaaaaaaaaaaaaaaaaaaaaaaaaaaaaaaaaaaaaaaaaaaaaaaaaaaaaaaaaaaaaaaaaaaaaaaaaaaaaaaaaaaaaaaaaaaaaaa

SEQ ID NO: 24526 - RNA, 4035 nt, Artificial Sequence
  SARS-CoV-2/Wuhan/WIV05/2019__EPI_ISL_402128 spike protein mRNA gc (1-1273)(S13I_W152C_L452R_D614G)
aggagaaagcuuaccauguucguguuccugguccuccugccccuggugagcauccagugcgugaaccucaccacccgcacgcagcugccgcccgccuacaccaacagcuucacccggggcgucuacuaccccgacaagguguuccgcuccagcgugcugcacuccacccaggaccucuuccugcccuucuucagcaacgucacgugguuccacgccauccacguguccgggaccaacggcaccaagcgguucgacaacccggugcugcccuucaacgacggggucuacuucgcgagcaccgagaaguccaacaucauccgcggcuggaucuucgggacgacccucgacagcaagacccagucccugcugaucgugaacaacgccaccaacguggucaucaaggugugcgaguuccaguucugcaacgaccccuuccucggcguguacuaccacaagaacaacaagagcugcauggaguccgaguuccgggucuacagcuccgccaacaacugcacguucgaguacgugagccagcccuuccugauggaccuggagggcaagcaggggaacuucaagaaccuccgcgaguucguguucaagaacaucgacggcuacuucaagaucuacuccaagcacaccccgaucaaccugguccgggaccugccccagggguucagcgcccucgagccccugguggaccugcccaucggcaucaacaucacccgcuuccagacccuccuggcccugcaccgguccuaccucacgccgggggacagcagcuccggcuggaccgcgggcgccgccgccuacuacgugggguaccugcagccccgcaccuuccugcucaaguacaacgagaacggcaccaucacggacgcggucgacugcgcccuggacccccugagcgagaccaagugcacccucaaguccuucaccguggagaaggggaucuaccagacgagcaacuuccgggugcagcccaccgaguccaucguccgcuucccgaacaucaccaaccugugccccuucggcgagguguucaacgccacccgguucgccagcgucuacgccuggaaccgcaagcggaucuccaacugcguggcggacuacagcgugcuguacaacuccgccagcuucuccacguucaagugcuacggcgucagccccaccaagcucaacgaccugugcuucaccaacguguacgccgacuccuucgugauccgcggggacgagguccggcagaucgcccccggccagaccgggaagaucgccgacuacaacuacaagcugccggacgacuucacgggcugcgugaucgcguggaacagcaacaaccucgacuccaaggucgggggcaacuacaacuaccgcuaccgccuguuccgcaagagcaaccucaagcccuucgagcgggacaucuccaccgagaucuaccaggccggcagcacccccugcaacgggguggagggcuucaacugcuacuucccccugcaguccuacggguuccagccgaccaacggcgugggguaccagcccuaccggguggucgugcugagcuucgagcuccugcacgcccccgccacggugugcggccccaagaaguccaccaaccuggucaagaacaagugcgugaacuucaacuucaacggccucaccgggaccggcgugcugaccgagagcaacaagaaguuccugccguuccagcaguucgggcgcgacaucgccgacacgaccgacgcgguccgcgacccccagacccuggagauccucgacaucacccccugcagcuucggcgggguguccgugaucacgccgggcaccaacaccagcaaccaggucgccgugcuguaccagggcgugaacugcaccgagguccccguggccauccacgccgaccagcugacgcccaccuggcggguguacuccaccggcagcaacgucuuccagacccgcgccgggugccucaucggcgcggagcacgugaacaacuccuacgagugcgacauccccaucggggccggcaucugcgccagcuaccagacgcagaccaacuccccgcggcgcgcccggagcguggcgucccagagcaucaucgccuacaccaugucccugggcgccgagaacagcgucgccuacuccaacaacagcaucgccauccccaccaacuucacgaucuccgugaccaccgagauccugcccgugagcaugaccaagacgagcgucgacugcaccauguacaucugcggggacuccaccgagugcagcaaccuccugcugcaguacggcuccuucugcacccagcucaaccgcgcgcugacggggaucgccguggagcaggacaagaacacccaggagguguucgcccaggucaagcagaucuacaagacgcccccgaucaaggacuucggcggguucaacuucagccagauccugcccgaccccuccaagcccagcaagcgguccuucaucgaggaccuccuguucaacaaggugacccuggccgacgccggcuucaucaagcaguacggcgacugccucggggacaucgcggcccgcgaccugaucugcgcccagaaguucaacggccugaccgugcucccgccccugcugaccgacgagaugaucgcccaguacaccagcgcccuccuggcggggaccaucacguccggcuggaccuucggggccggcgccgcccugcagauccccuucgcgaugcagauggccuaccgguucaacggcaucggggucacccagaacgugcucuacgagaaccagaagcugaucgccaaccaguucaacagcgccaucggcaagauccaggacucccugagcuccaccgccagcgcgcucgggaagcugcaggacguggucaaccagaacgcccaggcccugaacacgcucgugaagcagcuguccagcaacuucggcgccaucuccagcgugcugaacgacauccucucccgccuggacaaggucgaggccgaggugcagaucgaccggcugaucaccgggcgccuccagagccugcagaccuacgugacccagcagcugauccgggcggccgagauccgcgccagcgccaaccucgccgcgaccaagauguccgagugcguccugggccagagcaagcggguggacuucugcggcaagggguaccaccugauguccuucccccagagcgccccgcacggcguggucuuccuccacgugacguacguccccgcccaggagaagaacuucaccaccgcccccgcgaucugccacgacgggaaggcccacuucccccgcgagggcguguucguguccaacgggacccacugguucgucacgcagcggaacuucuacgagccgcagaucaucaccaccgacaacaccuucgugagcggcaacugcgacguggucaucggcaucgugaacaacacgguguacgacccccugcagcccgagcuggacuccuucaaggaggagcucgacaaguacuucaagaaccacaccagccccgacgucgaccugggggacaucuccggcaucaacgccagcguggugaacauccagaaggagaucgaccgccugaacgaggucgccaagaaccucaacgagucccugaucgaccugcaggagcucgggaaguacgagcaguacaucaaguggccgugguacaucuggcugggcuucaucgccggccugaucgcgaucgugauggugaccaucaugcucugcugcaugaccagcugcugcuccugccugaaggggugcugcagcugcggcuccugcugcaaguucgacgaggacgacagcgagcccguccugaagggggugaagcuccacuacacgugaggacuaguuauaagacugacuagcccgaugggccucccaacgggcccuccuccccuccuugcaccgagagaucucaaaggcucuuuucagagccaccaaaaaaaaaaaaaaaaaaaaaaaaaaaaaaaaaaaaaaaaaaaaaaaaaaaaaaaaaaaaaaaaaaaaaaaaaaaaaaaaaaaaaaaaaaaaaaaaaaaaa

SEQ ID NO: 24527 - RNA, 4035 nt, Artificial Sequence; identical to SEQ ID NO: 24509
  SARS-CoV-2/Wuhan/WIV05/2019__EPI_ISL_402128 spike protein mRNA gc (1-1273)

SEQ ID NO: 24528 - RNA, 4035 nt, Artificial Sequence
  SARS-CoV-2/Wuhan/WIV05/2019__EPI_ISL_402128 spike protein mRNA gc (1-1273)(D614G)
aggagaaagcuuaccauguucguguuccugguccuccugccccuggugagcucccagugcgugaaccucaccacccgcacgcagcugccgcccgccuacaccaacagcuucacccggggcgucuacuaccccgacaagguguuccgcuccagcgugcugcacuccacccaggaccucuuccugcccuucuucagcaacgucacgugguuccacgccauccacguguccgggaccaacggcaccaagcgguucgacaacccggugcugcccuucaacgacggggucuacuucgcgagcaccgagaaguccaacaucauccgcggcuggaucuucgggacgacccucgacagcaagacccagucccugcugaucgugaacaacgccaccaacguggucaucaaggugugcgaguuccaguucugcaacgaccccuuccucggcguguacuaccacaagaacaacaagagcuggauggaguccgaguuccgggucuacagcuccgccaacaacugcacguucgaguacgugagccagcccuuccugauggaccuggagggcaagcaggggaacuucaagaaccuccgcgaguucguguucaagaacaucgacggcuacuucaagaucuacuccaagcacaccccgaucaaccugguccgggaccugccccagggguucagcgcccucgagccccugguggaccugcccaucggcaucaacaucacccgcuuccagacccuccuggcccugcaccgguccuaccucacgccgggggacagcagcuccggcuggaccgcgggcgccgccgccuacuacgugggguaccugcagccccgcaccuuccugcucaaguacaacgagaacggcaccaucacggacgcggucgacugcgcccuggacccccugagcgagaccaagugcacccucaaguccuucaccguggagaaggggaucuaccagacgagcaacuuccgggugcagcccaccgaguccaucguccgcuucccgaacaucaccaaccugugccccuucggcgagguguucaacgccacccgguucgccagcgucuacgccuggaaccgcaagcggaucuccaacugcguggcggacuacagcgugcuguacaacuccgccagcuucuccacguucaagugcuacggcgucagccccaccaagcucaacgaccugugcuucaccaacguguacgccgacuccuucgugauccgcggggacgagguccggcagaucgcccccggccagaccgggaagaucgccgacuacaacuacaagcugccggacgacuucacgggcugcgugaucgcguggaacagcaacaaccucgacuccaaggucgggggcaacuacaacuaccuguaccgccuguuccgcaagagcaaccucaagcccuucgagcgggacaucuccaccgagaucuaccaggccggcagcacccccugcaacgggguggagggcuucaacugcuacuucccccugcaguccuacggguuccagccgaccaacggcgugggguaccagcccuaccggguggucgugcugagcuucgagcuccugcacgcccccgccacggugugcggccccaagaaguccaccaaccuggucaagaacaagugcgugaacuucaacuucaacggccucaccgggaccggcgugcugaccgagagcaacaagaaguuccugccguuccagcaguucgggcgcgacaucgccgacacgaccgacgcgguccgcgacccccagacccuggagauccucgacaucacccccugcagcuucggcgggguguccgugaucacgccgggcaccaacaccagcaaccaggucgccgugcuguaccagggcgugaacugcaccgagguccccguggccauccacgccgaccagcugacgcccaccuggcggguguacuccaccgggagcaacgucuuccagacccgcgccggcugccucaucggggcggagcacgugaacaacuccuacgagugcgacauccccaucggcgccggcaucugcgccagcuaccagacgcagaccaacuccccgcggcgcgcccggagcguggcgucccagagcaucaucgccuacaccaugucccugggggccgagaacagcgucgccuacuccaacaacagcaucgccauccccaccaacuucacgaucuccgugaccaccgagauccugcccgugagcaugaccaagacgagcgucgacugcaccauguacaucugcggcgacuccaccgagugcagcaaccuccugcugcaguacggguccuucugcacccagcucaaccgcgcgcugacgggcaucgccguggagcaggacaagaacacccaggagguguucgcccaggucaagcagaucuacaagacgcccccgaucaaggacuucgggggcuucaacuucagccagauccugcccgaccccuccaagcccagcaagcgguccuucaucgaggaccuccuguucaacaaggugacccuggccgacgccggcuucaucaagcaguacggggacugccucggcgacaucgcggcccgcgaccugaucugcgcccagaaguucaacgggcugaccgugcucccgccccugcugaccgacgagaugaucgcccaguacaccagcgcccuccuggcgggcaccaucacguccggguggaccuucggcgccggcgccgcccugcagauccccuucgcgaugcagauggccuaccgguucaacgggaucggcgucacccagaacgugcucuacgagaaccagaagcugaucgccaaccaguucaacagcgccaucgggaagauccaggacucccugagcuccaccgccagcgcgcucggcaagcugcaggacguggucaaccagaacgcccaggcccugaacacgcucgugaagcagcuguccagcaacuucggggccaucuccagcgugcugaacgacauccucucccgccuggacaaggucgaggccgaggugcagaucgaccggcugaucaccggccgccuccagagccugcagaccuacgugacccagcagcugauccgggcggccgagauccgcgccagcgccaaccucgccgcgaccaagauguccgagugcguccugggccagagcaagcggguggacuucugcgggaagggcuaccaccugauguccuucccccagagcgccccgcacgggguggucuuccuccacgugacguacguccccgcccaggagaagaacuucaccaccgcccccgcgaucugccacgacggcaaggcccacuucccccgcgaggggguguucguguccaacggcacccacugguucgucacgcagcggaacuucuacgagccgcagaucaucaccaccgacaacaccuucgugagcggcaacugcgacguggucaucgggaucgugaacaacacgguguacgacccccugcagcccgagcuggacuccuucaaggaggagcucgacaaguacuucaagaaccacaccagccccgacgucgaccugggcgacaucuccgggaucaacgccagcguggugaacauccagaaggagaucgaccgccugaacgaggucgccaagaaccucaacgagucccugaucgaccugcaggagcucggcaaguacgagcaguacaucaaguggccgugguacaucuggcugggcuucaucgccgggcugaucgcgaucgugauggugaccaucaugcucugcugcaugaccagcugcugcuccugccugaagggcugcugcagcugcggguccugcugcaaguucgacgaggacgacagcgagcccguccugaagggcgugaagcuccacuacacgugaggacuaguuauaagacugacuagcccgaugggccucccaacgggcccuccuccccuccuugcaccgagagaucucaaaggcucuuuucagagccaccaaaaaaaaaaaaaaaaaaaaaaaaaaaaaaaaaaaaaaaaaaaaaaaaaaaaaaaaaaaaaaaaaaaaaaaaaaaaaaaaaaaaaaaaaaaaaaaaaaaaa

SEQ ID NO: 24529 - RNA, 4035 nt, Artificial Sequence
  SARS-CoV-2/Wuhan/WIV05/2019__EPI_ISL_402128 spike protein mRNA gc (1-1273)(A222V_D614G)
aggagaaagcuuaccauguucguguuccugguccuccugccccuggugagcucccagugcgugaaccucaccacccgcacgcagcugccgcccgccuacaccaacagcuucacccggggcgucuacuaccccgacaagguguuccgcuccagcgugcugcacuccacccaggaccucuuccugcccuucuucagcaacgucacgugguuccacgccauccacguguccgggaccaacggcaccaagcgguucgacaacccggugcugcccuucaacgacggggucuacuucgcgagcaccgagaaguccaacaucauccgcggcuggaucuucgggacgacccucgacagcaagacccagucccugcugaucgugaacaacgccaccaacguggucaucaaggugugcgaguuccaguucugcaacgaccccuuccucggcguguacuaccacaagaacaacaagagcuggauggaguccgaguuccgggucuacagcuccgccaacaacugcacguucgaguacgugagccagcccuuccugauggaccuggagggcaagcaggggaacuucaagaaccuccgcgaguucguguucaagaacaucgacggcuacuucaagaucuacuccaagcacaccccgaucaaccugguccgggaccugccccagggguucagcgugcucgagccccugguggaccugcccaucggcaucaacaucacccgcuuccagacccuccuggcccugcaccgguccuaccucacgccgggggacagcagcuccggcuggaccgccggcgcggccgccuacuacgucggguaccugcagccccgcaccuuccugcucaaguacaacgagaacggcaccaucacggacgccguggacugcgcgcuggacccccugagcgagaccaagugcacccucaaguccuucaccguggagaaggggaucuaccagacgagcaacuuccggguccagcccaccgaguccaucgugcgcuucccgaacaucaccaaccugugccccuucggcgaggucuucaacgccacccgguucgccagcguguacgccuggaaccgcaagcggaucuccaacugcguggccgacuacagcguccuguacaacuccgcgagcuucuccacguucaagugcuacggcgugagccccaccaagcucaacgaccugugcuucaccaacguguacgccgacuccuucgucauccgcggggacgaggugcggcagaucgcccccggccagaccgggaagaucgccgacuacaacuacaagcugccggacgacuucacgggcugcgugaucgccuggaacagcaacaaccucgacuccaaggucgggggcaacuacaacuaccuguaccgccuguuccgcaagagcaaccucaagcccuucgagcgggacaucuccaccgagaucuaccaggcgggcagcacccccugcaacgggguggagggcuucaacugcuacuucccccugcaguccuacggguuccagccgaccaacggcgugggguaccagcccuaccgggucguggugcugagcuucgagcuccugcacgcccccgccacggucugcggccccaagaaguccaccaaccuggugaagaacaagugcgugaacuucaacuucaacggccucaccgggaccggcguccugaccgagagcaacaagaaguuccugccguuccagcaguucgggcgcgacaucgccgacacgaccgacgccgugcgcgacccccagacccuggagauccucgacaucacccccugcagcuucggcgggguguccgucaucacgccgggcaccaacaccagcaaccagguggcggugcuguaccagggcgucaacugcaccgaggugcccguggccauccacgccgaccagcugacgcccaccuggcgggucuacuccaccgggagcaacguguuccagacccgcgccggcugccucaucggggccgagcacgugaacaacuccuacgagugcgacauccccaucggcgcgggcaucugcgccagcuaccagacgcagaccaacuccccgcggcgcgcccggagcgucgccucccagagcaucaucgcguacaccaugucccugggggccgagaacagcguggccuacuccaacaacagcaucgccauccccaccaacuucacgaucuccgugaccaccgagauccugcccgucagcaugaccaagacgagcguggacugcaccauguacaucugcggcgacuccaccgagugcagcaaccuccugcugcaguacggguccuucugcacccagcucaaccgcgcccugacgggcaucgcgguggagcaggacaagaacacccaggaggucuucgcccaggugaagcagaucuacaagacgcccccgaucaaggacuucgggggcuucaacuucagccagauccugcccgaccccuccaagcccagcaagcgguccuucaucgaggaccuccuguucaacaaggugacccuggccgacgccggcuucaucaagcaguacggggacugccucggcgacaucgccgcgcgcgaccugaucugcgcccagaaguucaacgggcugaccguccucccgccccugcugaccgacgagaugaucgcccaguacaccagcgcccuccuggccggcaccaucacguccggguggaccuucggcgcgggcgccgcccugcagauccccuucgccaugcagauggcguaccgguucaacgggaucggcgugacccagaacgugcucuacgagaaccagaagcugaucgccaaccaguucaacagcgccaucgggaagauccaggacucccugagcuccaccgccagcgcccucggcaagcugcaggacgucgugaaccagaacgcgcaggcccugaacacgcucgugaagcagcuguccagcaacuucggggccaucuccagcguccugaacgacauccucucccgccuggacaagguggaggccgaggugcagaucgaccggcugaucaccggccgccuccagagccugcagaccuacgucacccagcagcugauccgggccgcggagauccgcgccagcgccaaccucgccgccaccaagauguccgagugcgugcugggccagagcaagcggguggacuucugcgggaagggcuaccaccugauguccuucccccagagcgcgccgcacggggucguguuccuccacgucacguacgugcccgcccaggagaagaacuucaccaccgcccccgccaucugccacgacggcaaggcgcacuucccccgcgaggggguguucgucuccaacggcacccacugguucgugacgcagcggaacuucuacgagccgcagaucaucaccaccgacaacaccuucgugagcggcaacugcgacgucgugaucgggaucgugaacaacacggucuacgacccccugcagcccgagcuggacuccuucaaggaggagcucgacaaguacuucaagaaccacaccagccccgacguggaccugggcgacaucuccgggaucaacgccagcguggucaacauccagaaggagaucgaccgccugaacgagguggccaagaaccucaacgagucccugaucgaccugcaggagcucggcaaguacgagcaguacaucaaguggccgugguacaucuggcugggcuucaucgccgggcugaucgccaucgugauggucaccaucaugcucugcugcaugaccagcugcugcuccugccugaagggcugcugcagcugcggguccugcugcaaguucgacgaggacgacagcgagcccgugcugaagggcgugaagcuccacuacacgugaggacuaguuauaagacugacuagcccgaugggccucccaacgggcccuccuccccuccuugcaccgagagaucucaaaggcucuuuucagagccaccaaaaaaaaaaaaaaaaaaaaaaaaaaaaaaaaaaaaaaaaaaaaaaaaaaaaaaaaaaaaaaaaaaaaaaaaaaaaaaaaaaaaaaaaaaaaaaaaaaaaa

SEQ ID NO: 24530 - RNA, 4035 nt, Artificial Sequence
  SARS-CoV-2/Wuhan/WIV05/2019__EPI_ISL_402128 spike protein mRNA gc (1-1273)(N439K_D614G)
aggagaaagcuuaccauguucguguuccugguccuccugccccuggugagcucccagugcgugaaccucaccacccgcacgcagcugccgcccgccuacaccaacagcuucacccggggcgucuacuaccccgacaagguguuccgcuccagcgugcugcacuccacccaggaccucuuccugcccuucuucagcaacgucacgugguuccacgccauccacguguccgggaccaacggcaccaagcgguucgacaacccggugcugcccuucaacgacggggucuacuucgcgagcaccgagaaguccaacaucauccgcggcuggaucuucgggacgacccucgacagcaagacccagucccugcugaucgugaacaacgccaccaacguggucaucaaggugugcgaguuccaguucugcaacgaccccuuccucggcguguacuaccacaagaacaacaagagcuggauggaguccgaguuccgggucuacagcuccgccaacaacugcacguucgaguacgugagccagcccuuccugauggaccuggagggcaagcaggggaacuucaagaaccuccgcgaguucguguucaagaacaucgacggcuacuucaagaucuacuccaagcacaccccgaucaaccugguccgggaccugccccagggguucagcgcccucgagccccugguggaccugcccaucggcaucaacaucacccgcuuccagacccuccuggcccugcaccgguccuaccucacgccgggggacagcagcuccggcuggaccgcgggcgccgccgccuacuacgugggguaccugcagccccgcaccuuccugcucaaguacaacgagaacggcaccaucacggacgcggucgacugcgcccuggacccccugagcgagaccaagugcacccucaaguccuucaccguggagaaggggaucuaccagacgagcaacuuccgggugcagcccaccgaguccaucguccgcuucccgaacaucaccaaccugugccccuucggcgagguguucaacgccacccgguucgccagcgucuacgccuggaaccgcaagcggaucuccaacugcguggcggacuacagcgugcuguacaacuccgccagcuucuccacguucaagugcuacggcgucagccccaccaagcucaacgaccugugcuucaccaacguguacgccgacuccuucgugauccgcggggacgagguccggcagaucgcccccggccagaccgggaagaucgccgacuacaacuacaagcugccggacgacuucacgggcugcgugaucgcguggaacagcaagaaccucgacuccaaggucgggggcaacuacaacuaccuguaccgccuguuccgcaagagcaaccucaagcccuucgagcgggacaucuccaccgagaucuaccaggccggcagcacccccugcaacgggguggagggcuucaacugcuacuucccccugcaguccuacggguuccagccgaccaacggcgugggguaccagcccuaccggguggucgugcugagcuucgagcuccugcacgcccccgccacggugugcggccccaagaaguccaccaaccuggucaagaacaagugcgugaacuucaacuucaacggccucaccgggaccggcgugcugaccgagagcaacaagaaguuccugccguuccagcaguucgggcgcgacaucgccgacacgaccgacgcgguccgcgacccccagacccuggagauccucgacaucacccccugcagcuucggcgggguguccgugaucacgccgggcaccaacaccagcaaccaggucgccgugcuguaccagggcgugaacugcaccgagguccccguggccauccacgccgaccagcugacgcccaccuggcggguguacuccaccgggagcaacgucuuccagacccgcgccggcugccucaucggggcggagcacgugaacaacuccuacgagugcgacauccccaucggcgccggcaucugcgccagcuaccagacgcagaccaacuccccgcggcgcgcccggagcguggcgucccagagcaucaucgccuacaccaugucccugggggccgagaacagcgucgccuacuccaacaacagcaucgccauccccaccaacuucacgaucuccgugaccaccgagauccugcccgugagcaugaccaagacgagcgucgacugcaccauguacaucugcggcgacuccaccgagugcagcaaccuccugcugcaguacggguccuucugcacccagcucaaccgcgcgcugacgggcaucgccguggagcaggacaagaacacccaggagguguucgcccaggucaagcagaucuacaagacgcccccgaucaaggacuucgggggcuucaacuucagccagauccugcccgaccccuccaagcccagcaagcgguccuucaucgaggaccuccuguucaacaaggugacccuggccgacgccggcuucaucaagcaguacggggacugccucggcgacaucgcggcccgcgaccugaucugcgcccagaaguucaacgggcugaccgugcucccgccccugcugaccgacgagaugaucgcccaguacaccagcgcccuccuggcgggcaccaucacguccggguggaccuucggcgccggcgccgcccugcagauccccuucgcgaugcagauggccuaccgguucaacgggaucggcgucacccagaacgugcucuacgagaaccagaagcugaucgccaaccaguucaacagcgccaucgggaagauccaggacucccugagcuccaccgccagcgcgcucggcaagcugcaggacguggucaaccagaacgcccaggcccugaacacgcucgugaagcagcuguccagcaacuucggggccaucuccagcgugcugaacgacauccucucccgccuggacaaggucgaggccgaggugcagaucgaccggcugaucaccggccgccuccagagccugcagaccuacgugacccagcagcugauccgggcggccgagauccgcgccagcgccaaccucgccgcgaccaagauguccgagugcguccugggccagagcaagcggguggacuucugcgggaagggcuaccaccugauguccuucccccagagcgccccgcacgggguggucuuccuccacgugacguacguccccgcccaggagaagaacuucaccaccgcccccgcgaucugccacgacggcaaggcccacuucccccgcgaggggguguucguguccaacggcacccacugguucgucacgcagcggaacuucuacgagccgcagaucaucaccaccgacaacaccuucgugagcggcaacugcgacguggucaucgggaucgugaacaacacgguguacgacccccugcagcccgagcuggacuccuucaaggaggagcucgacaaguacuucaagaaccacaccagccccgacgucgaccugggcgacaucuccgggaucaacgccagcguggugaacauccagaaggagaucgaccgccugaacgaggucgccaagaaccucaacgagucccugaucgaccugcaggagcucggcaaguacgagcaguacaucaaguggccgugguacaucuggcugggcuucaucgccgggcugaucgcgaucgugauggugaccaucaugcucugcugcaugaccagcugcugcuccugccugaagggcugcugcagcugcggguccugcugcaaguucgacgaggacgacagcgagcccguccugaagggcgugaagcuccacuacacgugaggacuaguuauaagacugacuagcccgaugggccucccaacgggcccuccuccccuccuugcaccgagagaucucaaaggcucuuuucagagccaccaaaaaaaaaaaaaaaaaaaaaaaaaaaaaaaaaaaaaaaaaaaaaaaaaaaaaaaaaaaaaaaaaaaaaaaaaaaaaaaaaaaaaaaaaaaaaaaaaaaaa

SEQ ID NO: 24531 - RNA, 4035 nt, Artificial Sequence
  SARS-CoV-2/Wuhan/WIV05/2019__EPI_ISL_402128 spike protein mRNA gc (1-1273)(S477N_D614G)
aggagaaagcuuaccauguucguguuccugguccuccugccccuggugagcucccagugcgugaaccucaccacccgcacgcagcugccgcccgccuacaccaacagcuucacccggggcgucuacuaccccgacaagguguuccgcuccagcgugcugcacuccacccaggaccucuuccugcccuucuucagcaacgucacgugguuccacgccauccacguguccgggaccaacggcaccaagcgguucgacaacccggugcugcccuucaacgacggggucuacuucgcgagcaccgagaaguccaacaucauccgcggcuggaucuucgggacgacccucgacagcaagacccagucccugcugaucgugaacaacgccaccaacguggucaucaaggugugcgaguuccaguucugcaacgaccccuuccucggcguguacuaccacaagaacaacaagagcuggauggaguccgaguuccgggucuacagcuccgccaacaacugcacguucgaguacgugagccagcccuuccugauggaccuggagggcaagcaggggaacuucaagaaccuccgcgaguucguguucaagaacaucgacggcuacuucaagaucuacuccaagcacaccccgaucaaccugguccgggaccugccccagggguucagcgcccucgagccccugguggaccugcccaucggcaucaacaucacccgcuuccagacccuccuggcccugcaccgguccuaccucacgccgggggacagcagcuccggcuggaccgcgggcgccgccgccuacuacgugggguaccugcagccccgcaccuuccugcucaaguacaacgagaacggcaccaucacggacgcggucgacugcgcccuggacccccugagcgagaccaagugcacccucaaguccuucaccguggagaaggggaucuaccagacgagcaacuuccgggugcagcccaccgaguccaucguccgcuucccgaacaucaccaaccugugccccuucggcgagguguucaacgccacccgguucgccagcgucuacgccuggaaccgcaagcggaucuccaacugcguggcggacuacagcgugcuguacaacuccgccagcuucuccacguucaagugcuacggcgucagccccaccaagcucaacgaccugugcuucaccaacguguacgccgacuccuucgugauccgcggggacgagguccggcagaucgcccccggccagaccgggaagaucgccgacuacaacuacaagcugccggacgacuucacgggcugcgugaucgcguggaacagcaacaaccucgacuccaaggucgggggcaacuacaacuaccuguaccgccuguuccgcaagagcaaccucaagcccuucgagcgggacaucuccaccgagaucuaccaggccggcaacacccccugcaacgggguggagggcuucaacugcuacuucccccugcagagcuacggguuccagccgaccaacggcgugggguaccagcccuaccggguggucgugcuguccuucgagcuccugcacgcccccgccacggugugcggccccaagaaguccaccaaccuggucaagaacaagugcgugaacuucaacuucaacggccucaccgggaccggcgugcugaccgagagcaacaagaaguuccugccguuccagcaguucgggcgcgacaucgccgacacgaccgacgcgguccgcgacccccagacccuggagauccucgacaucacccccugcagcuucggcggggugagcgugaucacgccgggcaccaacaccuccaaccaggucgccgugcuguaccagggcgugaacugcaccgagguccccguggccauccacgccgaccagcugacgcccaccuggcggguguacagcaccggguccaacgucuuccagacccgcgccggcugccucaucggggcggagcacgugaacaacagcuacgagugcgacauccccaucggcgccggcaucugcgccuccuaccagacgcagaccaacagcccgcggcgcgcccgguccguggcgagccaguccaucaucgccuacaccaugagccugggggccgagaacuccgucgccuacagcaacaacuccaucgccauccccaccaacuucacgaucagcgugaccaccgagauccugcccguguccaugaccaagacgagcgucgacugcaccauguacaucugcggcgacagcaccgagugcuccaaccuccugcugcaguacgggagcuucugcacccagcucaaccgcgcgcugacgggcaucgccguggagcaggacaagaacacccaggagguguucgcccaggucaagcagaucuacaagacgcccccgaucaaggacuucgggggcuucaacuucucccagauccugcccgaccccagcaagcccuccaagcggagcuucaucgaggaccuccuguucaacaaggugacccuggccgacgccggcuucaucaagcaguacggggacugccucggcgacaucgcggcccgcgaccugaucugcgcccagaaguucaacgggcugaccgugcucccgccccugcugaccgacgagaugaucgcccaguacaccuccgcccuccuggcgggcaccaucacgagcggguggaccuucggcgccggcgccgcccugcagauccccuucgcgaugcagauggccuaccgguucaacgggaucggcgucacccagaacgugcucuacgagaaccagaagcugaucgccaaccaguucaacuccgccaucgggaagauccaggacagccuguccagcaccgccuccgcgcucggcaagcugcaggacguggucaaccagaacgcccaggcccugaacacgcucgugaagcagcugagcuccaacuucggggccaucagcuccgugcugaacgacauccucagccgccuggacaaggucgaggccgaggugcagaucgaccggcugaucaccggccgccuccagucccugcagaccuacgugacccagcagcugauccgggcggccgagauccgcgccagcgccaaccucgccgcgaccaagaugagcgagugcguccugggccaguccaagcggguggacuucugcgggaagggcuaccaccugaugagcuucccccaguccgccccgcacgggguggucuuccuccacgugacguacguccccgcccaggagaagaacuucaccaccgcccccgcgaucugccacgacggcaaggcccacuucccccgcgaggggguguucgugagcaacggcacccacugguucgucacgcagcggaacuucuacgagccgcagaucaucaccaccgacaacaccuucguguccggcaacugcgacguggucaucgggaucgugaacaacacgguguacgacccccugcagcccgagcuggacagcuucaaggaggagcucgacaaguacuucaagaaccacaccucccccgacgucgaccugggcgacaucagcgggaucaacgccuccguggugaacauccagaaggagaucgaccgccugaacgaggucgccaagaaccucaacgagagccugaucgaccugcaggagcucggcaaguacgagcaguacaucaaguggccgugguacaucuggcugggcuucaucgccgggcugaucgcgaucgugauggugaccaucaugcucugcugcaugaccuccugcugcagcugccugaagggcugcugcuccugcgggagcugcugcaaguucgacgaggacgacuccgagcccguccugaagggcgugaagcuccacuacacgugaggacuaguuauaagacugacuagcccgaugggccucccaacgggcccuccuccccuccuugcaccgagagaucucaaaggcucuuuucagagccaccaaaaaaaaaaaaaaaaaaaaaaaaaaaaaaaaaaaaaaaaaaaaaaaaaaaaaaaaaaaaaaaaaaaaaaaaaaaaaaaaaaaaaaaaaaaaaaaaaaaaa

SEQ ID NO: 24532 - RNA, 4035 nt, Artificial Sequence
  SARS-CoV-2/Wuhan/WIV05/2019__EPI_ISL_402128 spike protein mRNA gc (1-1273)(N501Y_D614G)
aggagaaagcuuaccauguucguguuccugguccuccugccccuggugagcucccagugcgugaaccucaccacccgcacgcagcugccgcccgccuacaccaacagcuucacccggggcgucuacuaccccgacaagguguuccgcuccagcgugcugcacuccacccaggaccucuuccugcccuucuucagcaacgucacgugguuccacgccauccacguguccgggaccaacggcaccaagcgguucgacaacccggugcugcccuucaacgacggggucuacuucgcgagcaccgagaaguccaacaucauccgcggcuggaucuucgggacgacccucgacagcaagacccagucccugcugaucgugaacaacgccaccaacguggucaucaaggugugcgaguuccaguucugcaacgaccccuuccucggcguguacuaccacaagaacaacaagagcuggauggaguccgaguuccgggucuacagcuccgccaacaacugcacguucgaguacgugagccagcccuuccugauggaccuggagggcaagcaggggaacuucaagaaccuccgcgaguucguguucaagaacaucgacggcuacuucaagaucuacuccaagcacaccccgaucaaccugguccgggaccugccccagggguucagcgcccucgagccccugguggaccugcccaucggcaucaacaucacccgcuuccagacccuccuggcccugcaccgguccuaccucacgccgggggacagcagcuccggcuggaccgcgggcgccgccgccuacuacgugggguaccugcagccccgcaccuuccugcucaaguacaacgagaacggcaccaucacggacgcggucgacugcgcccuggacccccugagcgagaccaagugcacccucaaguccuucaccguggagaaggggaucuaccagacgagcaacuuccgggugcagcccaccgaguccaucguccgcuucccgaacaucaccaaccugugccccuucggcgagguguucaacgccacccgguucgccagcgucuacgccuggaaccgcaagcggaucuccaacugcguggcggacuacagcgugcuguacaacuccgccagcuucuccacguucaagugcuacggcgucagccccaccaagcucaacgaccugugcuucaccaacguguacgccgacuccuucgugauccgcggggacgagguccggcagaucgcccccggccagaccgggaagaucgccgacuacaacuacaagcugccggacgacuucacgggcugcgugaucgcguggaacagcaacaaccucgacuccaaggucgggggcaacuacaacuaccuguaccgccuguuccgcaagagcaaccucaagcccuucgagcgggacaucuccaccgagaucuaccaggccggcagcacccccugcaacgggguggagggcuucaacugcuacuucccccugcaguccuacggguuccagccgaccuacggcgugggguaccagcccuaccggguggucgugcugagcuucgagcuccugcacgcccccgccacggugugcggccccaagaaguccaccaaccuggucaagaacaagugcgugaacuucaacuucaacggccucaccgggaccggcgugcugaccgagagcaacaagaaguuccugccguuccagcaguucgggcgcgacaucgccgacacgaccgacgcgguccgcgacccccagacccuggagauccucgacaucacccccugcagcuucggcgggguguccgugaucacgccgggcaccaacaccagcaaccaggucgccgugcuguaccagggcgugaacugcaccgagguccccguggccauccacgccgaccagcugacgcccaccuggcggguguacuccaccgggagcaacgucuuccagacccgcgccggcugccucaucggggcggagcacgugaacaacuccuacgagugcgacauccccaucggcgccggcaucugcgccagcuaccagacgcagaccaacuccccgcggcgcgcccggagcguggcgucccagagcaucaucgccuacaccaugucccugggggccgagaacagcgucgccuacuccaacaacagcaucgccauccccaccaacuucacgaucuccgugaccaccgagauccugcccgugagcaugaccaagacgagcgucgacugcaccauguacaucugcggcgacuccaccgagugcagcaaccuccugcugcaguacggguccuucugcacccagcucaaccgcgcgcugacgggcaucgccguggagcaggacaagaacacccaggagguguucgcccaggucaagcagaucuacaagacgcccccgaucaaggacuucgggggcuucaacuucagccagauccugcccgaccccuccaagcccagcaagcgguccuucaucgaggaccuccuguucaacaaggugacccuggccgacgccggcuucaucaagcaguacggggacugccucggcgacaucgcggcccgcgaccugaucugcgcccagaaguucaacgggcugaccgugcucccgccccugcugaccgacgagaugaucgcccaguacaccagcgcccuccuggcgggcaccaucacguccggguggaccuucggcgccggcgccgcccugcagauccccuucgcgaugcagauggccuaccgguucaacgggaucggcgucacccagaacgugcucuacgagaaccagaagcugaucgccaaccaguucaacagcgccaucgggaagauccaggacucccugagcuccaccgccagcgcgcucggcaagcugcaggacguggucaaccagaacgcccaggcccugaacacgcucgugaagcagcuguccagcaacuucggggccaucuccagcgugcugaacgacauccucucccgccuggacaaggucgaggccgaggugcagaucgaccggcugaucaccggccgccuccagagccugcagaccuacgugacccagcagcugauccgggcggccgagauccgcgccagcgccaaccucgccgcgaccaagauguccgagugcguccugggccagagcaagcggguggacuucugcgggaagggcuaccaccugauguccuucccccagagcgccccgcacgggguggucuuccuccacgugacguacguccccgcccaggagaagaacuucaccaccgcccccgcgaucugccacgacggcaaggcccacuucccccgcgaggggguguucguguccaacggcacccacugguucgucacgcagcggaacuucuacgagccgcagaucaucaccaccgacaacaccuucgugagcggcaacugcgacguggucaucgggaucgugaacaacacgguguacgacccccugcagcccgagcuggacuccuucaaggaggagcucgacaaguacuucaagaaccacaccagccccgacgucgaccugggcgacaucuccgggaucaacgccagcguggugaacauccagaaggagaucgaccgccugaacgaggucgccaagaaccucaacgagucccugaucgaccugcaggagcucggcaaguacgagcaguacaucaaguggccgugguacaucuggcugggcuucaucgccgggcugaucgcgaucgugauggugaccaucaugcucugcugcaugaccagcugcugcuccugccugaagggcugcugcagcugcggguccugcugcaaguucgacgaggacgacagcgagcccguccugaagggcgugaagcuccacuacacgugaggacuaguuauaagacugacuagcccgaugggccucccaacgggcccuccuccccuccuugcaccgagagaucucaaaggcucuuuucagagccaccaaaaaaaaaaaaaaaaaaaaaaaaaaaaaaaaaaaaaaaaaaaaaaaaaaaaaaaaaaaaaaaaaaaaaaaaaaaaaaaaaaaaaaaaaaaaaaaaaaaaa

SEQ ID NO: 24533 - RNA, 4029 nt, Artificial Sequence
  SARS-CoV-2/Wuhan/WIV05/2019__EPI_ISL_402128 spike protein mRNA gc (1-1273)(H69del_V70del_D614G)
aggagaaagcuuaccauguucguguuccugguccuccugccccuggugagcucccagugcgugaaccucaccacccgcacgcagcugccgcccgccuacaccaacagcuucacccggggcgucuacuaccccgacaagguguuccgcuccagcgugcugcacuccacccaggaccucuuccugcccuucuucagcaacgucacgugguuccacgccaucuccgggaccaacggcaccaagcgguucgacaacccggugcugcccuucaacgacgggguguacuucgcgagcaccgagaaguccaacaucauccgcggcuggaucuucgggacgacccucgacagcaagacccagucccugcugaucgucaacaacgccaccaacguggugaucaaggucugcgaguuccaguucugcaacgaccccuuccucggcguguacuaccacaagaacaacaagagcuggauggaguccgaguuccggguguacagcuccgccaacaacugcacguucgaguacgucagccagcccuuccugauggaccuggagggcaagcaggggaacuucaagaaccuccgcgaguucguguucaagaacaucgacggcuacuucaagaucuacuccaagcacaccccgaucaaccuggugcgggaccugccccagggguucagcgcccucgagccccuggucgaccugcccaucggcaucaacaucacccgcuuccagacccuccuggcccugcaccgguccuaccucacgccgggggacagcagcuccggcuggaccgcgggcgccgccgccuacuacgugggguaccugcagccccgcaccuuccugcucaaguacaacgagaacggcaccaucacggacgcgguggacugcgcccuggacccccugagcgagaccaagugcacccucaaguccuucaccgucgagaaggggaucuaccagacgagcaacuuccgggugcagcccaccgaguccaucgugcgcuucccgaacaucaccaaccugugccccuucggcgaggucuucaacgccacccgguucgccagcguguacgccuggaaccgcaagcggaucuccaacugcgucgcggacuacagcgugcuguacaacuccgccagcuucuccacguucaagugcuacggcgugagccccaccaagcucaacgaccugugcuucaccaacgucuacgccgacuccuucgugauccgcggggacgaggugcggcagaucgcccccggccagaccgggaagaucgccgacuacaacuacaagcugccggacgacuucacgggcugcgucaucgcguggaacagcaacaaccucgacuccaaggucgggggcaacuacaacuaccuguaccgccuguuccgcaagagcaaccucaagcccuucgagcgggacaucuccaccgagaucuaccaggccggcagcacccccugcaacgggguggagggcuucaacugcuacuucccccugcaguccuacggguuccagccgaccaacggcgugggguaccagcccuaccggguggugguccugagcuucgagcuccugcacgcccccgccacggugugcggccccaagaaguccaccaaccuggugaagaacaagugcgucaacuucaacuucaacggccucaccgggaccggcgugcugaccgagagcaacaagaaguuccugccguuccagcaguucgggcgcgacaucgccgacacgaccgacgcggugcgcgacccccagacccuggagauccucgacaucacccccugcagcuucggcggggucuccgugaucacgccgggcaccaacaccagcaaccagguggccguccuguaccagggcgugaacugcaccgaggugcccgucgccauccacgccgaccagcugacgcccaccuggcggguguacuccaccgggagcaacguguuccagacccgcgccggcugccucaucggggcggagcacgucaacaacuccuacgagugcgacauccccaucggcgccggcaucugcgccagcuaccagacgcagaccaacuccccgcggcgcgcccggagcguggcgucccagagcaucaucgccuacaccaugucccugggggccgagaacagcguggccuacuccaacaacagcaucgccauccccaccaacuucacgaucuccgucaccaccgagauccugcccgugagcaugaccaagacgagcguggacugcaccauguacaucugcggcgacuccaccgagugcagcaaccuccugcugcaguacggguccuucugcacccagcucaaccgcgcgcugacgggcaucgccgucgagcaggacaagaacacccaggagguguucgcccaggugaagcagaucuacaagacgcccccgaucaaggacuucgggggcuucaacuucagccagauccugcccgaccccuccaagcccagcaagcgguccuucaucgaggaccuccuguucaacaaggucacccuggccgacgccggcuucaucaagcaguacggggacugccucggcgacaucgcggcccgcgaccugaucugcgcccagaaguucaacgggcugaccgugcucccgccccugcugaccgacgagaugaucgcccaguacaccagcgcccuccuggcgggcaccaucacguccggguggaccuucggcgccggcgccgcccugcagauccccuucgcgaugcagauggccuaccgguucaacgggaucggcgugacccagaacguccucuacgagaaccagaagcugaucgccaaccaguucaacagcgccaucgggaagauccaggacucccugagcuccaccgccagcgcgcucggcaagcugcaggacguggugaaccagaacgcccaggcccugaacacgcucgucaagcagcuguccagcaacuucggggccaucuccagcgugcugaacgacauccucucccgccuggacaagguggaggccgagguccagaucgaccggcugaucaccggccgccuccagagccugcagaccuacgugacccagcagcugauccgggcggccgagauccgcgccagcgccaaccucgccgcgaccaagauguccgagugcgugcugggccagagcaagcgggucgacuucugcgggaagggcuaccaccugauguccuucccccagagcgccccgcacggggugguguuccuccacgucacguacgugcccgcccaggagaagaacuucaccaccgcccccgcgaucugccacgacggcaaggcccacuucccccgcgagggggucuucguguccaacggcacccacugguucgugacgcagcggaacuucuacgagccgcagaucaucaccaccgacaacaccuucgucagcggcaacugcgacguggugaucgggaucgucaacaacacgguguacgacccccugcagcccgagcuggacuccuucaaggaggagcucgacaaguacuucaagaaccacaccagccccgacguggaccugggcgacaucuccgggaucaacgccagcgucgugaacauccagaaggagaucgaccgccugaacgagguggccaagaaccucaacgagucccugaucgaccugcaggagcucggcaaguacgagcaguacaucaaguggccgugguacaucuggcugggcuucaucgccgggcugaucgcgaucgucauggugaccaucaugcucugcugcaugaccagcugcugcuccugccugaagggcugcugcagcugcggguccugcugcaaguucgacgaggacgacagcgagcccgugcugaagggcgucaagcuccacuacacgugaggacuaguuauaagacugacuagcccgaugggccucccaacgggcccuccuccccuccuugcaccgagagaucucaaaggcucuuuucagagccaccaaaaaaaaaaaaaaaaaaaaaaaaaaaaaaaaaaaaaaaaaaaaaaaaaaaaaaaaaaaaaaaaaaaaaaaaaaaaaaaaaaaaaaaaaaaaaaaaaaaaa

SEQ ID NO: 24534 - RNA, 4035 nt, Artificial Sequence
  SARS-CoV-2/Wuhan/WIV05/2019__EPI_ISL_402128 spike protein mRNA gc (1-1273)(Y453F_D614G)
aggagaaagcuuaccauguucguguuccugguccuccugccccuggugagcucccagugcgugaaccucaccacccgcacgcagcugccgcccgccuacaccaacagcuucacccggggcgucuacuaccccgacaagguguuccgcuccagcgugcugcacuccacccaggaccucuuccugcccuucuucagcaacgucacgugguuccacgccauccacguguccgggaccaacggcaccaagcgguucgacaacccggugcugcccuucaacgacggggucuacuucgcgagcaccgagaaguccaacaucauccgcggcuggaucuucgggacgacccucgacagcaagacccagucccugcugaucgugaacaacgccaccaacguggucaucaaggugugcgaguuccaguucugcaacgaccccuuccucggcguguacuaccacaagaacaacaagagcuggauggaguccgaguuccgggucuacagcuccgccaacaacugcacguucgaguacgugagccagcccuuccugauggaccuggagggcaagcaggggaacuucaagaaccuccgcgaguucguguucaagaacaucgacggcuacuucaagaucuacuccaagcacaccccgaucaaccugguccgggaccugccccagggguucagcgcccucgagccccugguggaccugcccaucggcaucaacaucacccgcuuccagacccuccuggcccugcaccgguccuaccucacgccgggggacagcagcuccggcuggaccgcgggcgccgccgccuacuacgugggguaccugcagccccgcaccuuccugcucaaguacaacgagaacggcaccaucacggacgcggucgacugcgcccuggacccccugagcgagaccaagugcacccucaaguccuucaccguggagaaggggaucuaccagacgagcaacuuccgggugcagcccaccgaguccaucguccgcuucccgaacaucaccaaccugugccccuucggcgagguguucaacgccacccgguucgccagcgucuacgccuggaaccgcaagcggaucuccaacugcguggcggacuacagcgugcuguacaacuccgccagcuucuccacguucaagugcuacggcgucagccccaccaagcucaacgaccugugcuucaccaacguguacgccgacuccuucgugauccgcggggacgagguccggcagaucgcccccggccagaccgggaagaucgccgacuacaacuacaagcugccggacgacuucacgggcugcgugaucgcguggaacagcaacaaccucgacuccaaggucgggggcaacuacaacuaccuguuccgccuguuccgcaagagcaaccucaagcccuucgagcgggacaucuccaccgagaucuaccaggccggcagcacccccugcaacgggguggagggcuucaacugcuacuucccccugcaguccuacggguuccagccgaccaacggcgugggguaccagcccuaccggguggucgugcugagcuucgagcuccugcacgcccccgccacggugugcggccccaagaaguccaccaaccuggucaagaacaagugcgugaacuucaacuucaacggccucaccgggaccggcgugcugaccgagagcaacaagaaguuccugccguuccagcaguucgggcgcgacaucgccgacacgaccgacgcgguccgcgacccccagacccuggagauccucgacaucacccccugcagcuucggcgggguguccgugaucacgccgggcaccaacaccagcaaccaggucgccgugcuguaccagggcgugaacugcaccgagguccccguggccauccacgccgaccagcugacgcccaccuggcggguguacuccaccgggagcaacgucuuccagacccgcgccggcugccucaucggggcggagcacgugaacaacuccuacgagugcgacauccccaucggcgccggcaucugcgccagcuaccagacgcagaccaacuccccgcggcgcgcccggagcguggcgucccagagcaucaucgccuacaccaugucccugggggccgagaacagcgucgccuacuccaacaacagcaucgccauccccaccaacuucacgaucuccgugaccaccgagauccugcccgugagcaugaccaagacgagcgucgacugcaccauguacaucugcggcgacuccaccgagugcagcaaccuccugcugcaguacggguccuucugcacccagcucaaccgcgcgcugacgggcaucgccguggagcaggacaagaacacccaggagguguucgcccaggucaagcagaucuacaagacgcccccgaucaaggacuucgggggcuucaacuucagccagauccugcccgaccccuccaagcccagcaagcgguccuucaucgaggaccuccuguucaacaaggugacccuggccgacgccggcuucaucaagcaguacggggacugccucggcgacaucgcggcccgcgaccugaucugcgcccagaaguucaacgggcugaccgugcucccgccccugcugaccgacgagaugaucgcccaguacaccagcgcccuccuggcgggcaccaucacguccggguggaccuucggcgccggcgccgcccugcagauccccuucgcgaugcagauggccuaccgguucaacgggaucggcgucacccagaacgugcucuacgagaaccagaagcugaucgccaaccaguucaacagcgccaucgggaagauccaggacucccugagcuccaccgccagcgcgcucggcaagcugcaggacguggucaaccagaacgcccaggcccugaacacgcucgugaagcagcuguccagcaacuucggggccaucuccagcgugcugaacgacauccucucccgccuggacaaggucgaggccgaggugcagaucgaccggcugaucaccggccgccuccagagccugcagaccuacgugacccagcagcugauccgggcggccgagauccgcgccagcgccaaccucgccgcgaccaagauguccgagugcguccugggccagagcaagcggguggacuucugcgggaagggcuaccaccugauguccuucccccagagcgccccgcacgggguggucuuccuccacgugacguacguccccgcccaggagaagaacuucaccaccgcccccgcgaucugccacgacggcaaggcccacuucccccgcgaggggguguucguguccaacggcacccacugguucgucacgcagcggaacuucuacgagccgcagaucaucaccaccgacaacaccuucgugagcggcaacugcgacguggucaucgggaucgugaacaacacgguguacgacccccugcagcccgagcuggacuccuucaaggaggagcucgacaaguacuucaagaaccacaccagccccgacgucgaccugggcgacaucuccgggaucaacgccagcguggugaacauccagaaggagaucgaccgccugaacgaggucgccaagaaccucaacgagucccugaucgaccugcaggagcucggcaaguacgagcaguacaucaaguggccgugguacaucuggcugggcuucaucgccgggcugaucgcgaucgugauggugaccaucaugcucugcugcaugaccagcugcugcuccugccugaagggcugcugcagcugcggguccugcugcaaguucgacgaggacgacagcgagcccguccugaagggcgugaagcuccacuacacgugaggacuaguuauaagacugacuagcccgaugggccucccaacgggcccuccuccccuccuugcaccgagagaucucaaaggcucuuuucagagccaccaaaaaaaaaaaaaaaaaaaaaaaaaaaaaaaaaaaaaaaaaaaaaaaaaaaaaaaaaaaaaaaaaaaaaaaaaaaaaaaaaaaaaaaaaaaaaaaaaaaaa

SEQ ID NO: 24535 - RNA, 4035 nt, Artificial Sequence
  SARS-CoV-2/Wuhan/WIV05/2019__EPI_ISL_402128 spike protein mRNA gc (1-1273)(D614G_I692V)
aggagaaagcuuaccauguucguguuccugguccuccugccccuggugagcucccagugcgugaaccucaccacccgcacgcagcugccgcccgccuacaccaacagcuucacccggggcgucuacuaccccgacaagguguuccgcuccagcgugcugcacuccacccaggaccucuuccugcccuucuucagcaacgucacgugguuccacgccauccacguguccgggaccaacggcaccaagcgguucgacaacccggugcugcccuucaacgacggggucuacuucgcgagcaccgagaaguccaacaucauccgcggcuggaucuucgggacgacccucgacagcaagacccagucccugcugaucgugaacaacgccaccaacguggucaucaaggugugcgaguuccaguucugcaacgaccccuuccucggcguguacuaccacaagaacaacaagagcuggauggaguccgaguuccgggucuacagcuccgccaacaacugcacguucgaguacgugagccagcccuuccugauggaccuggagggcaagcaggggaacuucaagaaccuccgcgaguucguguucaagaacaucgacggcuacuucaagaucuacuccaagcacaccccgaucaaccugguccgggaccugccccagggguucagcgcccucgagccccugguggaccugcccaucggcaucaacaucacccgcuuccagacccuccuggcccugcaccgguccuaccucacgccgggggacagcagcuccggcuggaccgcgggcgccgccgccuacuacgugggguaccugcagccccgcaccuuccugcucaaguacaacgagaacggcaccaucacggacgcggucgacugcgcccuggacccccugagcgagaccaagugcacccucaaguccuucaccguggagaaggggaucuaccagacgagcaacuuccgggugcagcccaccgaguccaucguccgcuucccgaacaucaccaaccugugccccuucggcgagguguucaacgccacccgguucgccagcgucuacgccuggaaccgcaagcggaucuccaacugcguggcggacuacagcgugcuguacaacuccgccagcuucuccacguucaagugcuacggcgucagccccaccaagcucaacgaccugugcuucaccaacguguacgccgacuccuucgugauccgcggggacgagguccggcagaucgcccccggccagaccgggaagaucgccgacuacaacuacaagcugccggacgacuucacgggcugcgugaucgcguggaacagcaacaaccucgacuccaaggucgggggcaacuacaacuaccuguaccgccuguuccgcaagagcaaccucaagcccuucgagcgggacaucuccaccgagaucuaccaggccggcagcacccccugcaacgggguggagggcuucaacugcuacuucccccugcaguccuacggguuccagccgaccaacggcgugggguaccagcccuaccggguggucgugcugagcuucgagcuccugcacgcccccgccacggugugcggccccaagaaguccaccaaccuggucaagaacaagugcgugaacuucaacuucaacggccucaccgggaccggcgugcugaccgagagcaacaagaaguuccugccguuccagcaguucgggcgcgacaucgccgacacgaccgacgcgguccgcgacccccagacccuggagauccucgacaucacccccugcagcuucggcgggguguccgugaucacgccgggcaccaacaccagcaaccaggucgccgugcuguaccagggcgugaacugcaccgagguccccguggccauccacgccgaccagcugacgcccaccuggcggguguacuccaccgggagcaacgucuuccagacccgcgccggcugccucaucggggcggagcacgugaacaacuccuacgagugcgacauccccaucggcgccggcaucugcgccagcuaccagacgcagaccaacuccccgcggcgcgcccggagcguggcgucccagagcgucaucgccuacaccaugucccugggggccgagaacagcguggccuacuccaacaacagcaucgccauccccaccaacuucacgaucuccgugaccaccgagauccugcccgucagcaugaccaagacgagcguggacugcaccauguacaucugcggcgacuccaccgagugcagcaaccuccugcugcaguacggguccuucugcacccagcucaaccgcgcgcugacgggcaucgccguggagcaggacaagaacacccaggaggucuucgcccaggugaagcagaucuacaagacgcccccgaucaaggacuucgggggcuucaacuucagccagauccugcccgaccccuccaagcccagcaagcgguccuucaucgaggaccuccuguucaacaaggugacccuggccgacgccggcuucaucaagcaguacggggacugccucggcgacaucgcggcccgcgaccugaucugcgcccagaaguucaacgggcugaccguccucccgccccugcugaccgacgagaugaucgcccaguacaccagcgcccuccuggcgggcaccaucacguccggguggaccuucggcgccggcgccgcccugcagauccccuucgcgaugcagauggccuaccgguucaacgggaucggcgugacccagaacgugcucuacgagaaccagaagcugaucgccaaccaguucaacagcgccaucgggaagauccaggacucccugagcuccaccgccagcgcgcucggcaagcugcaggacgucgugaaccagaacgcccaggcccugaacacgcucgugaagcagcuguccagcaacuucggggccaucuccagcguccugaacgacauccucucccgccuggacaagguggaggccgaggugcagaucgaccggcugaucaccggccgccuccagagccugcagaccuacgucacccagcagcugauccgggcggccgagauccgcgccagcgccaaccucgccgcgaccaagauguccgagugcgugcugggccagagcaagcggguggacuucugcgggaagggcuaccaccugauguccuucccccagagcgccccgcacggggucguguuccuccacgucacguacgugcccgcccaggagaagaacuucaccaccgcccccgcgaucugccacgacggcaaggcccacuucccccgcgaggggguguucgucuccaacggcacccacugguucgugacgcagcggaacuucuacgagccgcagaucaucaccaccgacaacaccuucgugagcggcaacugcgacgucgugaucgggaucgugaacaacacggucuacgacccccugcagcccgagcuggacuccuucaaggaggagcucgacaaguacuucaagaaccacaccagccccgacguggaccugggcgacaucuccgggaucaacgccagcguggucaacauccagaaggagaucgaccgccugaacgagguggccaagaaccucaacgagucccugaucgaccugcaggagcucggcaaguacgagcaguacaucaaguggccgugguacaucuggcugggcuucaucgccgggcugaucgcgaucgugauggucaccaucaugcucugcugcaugaccagcugcugcuccugccugaagggcugcugcagcugcggguccugcugcaaguucgacgaggacgacagcgagcccgugcugaagggcgugaagcuccacuacacgugaggacuaguuauaagacugacuagcccgaugggccucccaacgggcccuccuccccuccuugcaccgagagaucucaaaggcucuuuucagagccaccaaaaaaaaaaaaaaaaaaaaaaaaaaaaaaaaaaaaaaaaaaaaaaaaaaaaaaaaaaaaaaaaaaaaaaaaaaaaaaaaaaaaaaaaaaaaaaaaaaaaa

SEQ ID NO: 24536 - RNA, 4035 nt, Artificial Sequence
  SARS-CoV-2/Wuhan/WIV05/2019__EPI_ISL_402128 spike protein mRNA gc (1-1273)(D614G_M1229I)
aggagaaagcuuaccauguucguguuccugguccuccugccccuggugagcucccagugcgugaaccucaccacccgcacgcagcugccgcccgccuacaccaacagcuucacccggggcgucuacuaccccgacaagguguuccgcuccagcgugcugcacuccacccaggaccucuuccugcccuucuucagcaacgucacgugguuccacgccauccacguguccgggaccaacggcaccaagcgguucgacaacccggugcugcccuucaacgacggggucuacuucgcgagcaccgagaaguccaacaucauccgcggcuggaucuucgggacgacccucgacagcaagacccagucccugcugaucgugaacaacgccaccaacguggucaucaaggugugcgaguuccaguucugcaacgaccccuuccucggcguguacuaccacaagaacaacaagagcuggauggaguccgaguuccgggucuacagcuccgccaacaacugcacguucgaguacgugagccagcccuuccugauggaccuggagggcaagcaggggaacuucaagaaccuccgcgaguucguguucaagaacaucgacggcuacuucaagaucuacuccaagcacaccccgaucaaccugguccgggaccugccccagggguucagcgcccucgagccccugguggaccugcccaucggcaucaacaucacccgcuuccagacccuccuggcccugcaccgguccuaccucacgccgggggacagcagcuccggcuggaccgcgggcgccgccgccuacuacgugggguaccugcagccccgcaccuuccugcucaaguacaacgagaacggcaccaucacggacgcggucgacugcgcccuggacccccugagcgagaccaagugcacccucaaguccuucaccguggagaaggggaucuaccagacgagcaacuuccgggugcagcccaccgaguccaucguccgcuucccgaacaucaccaaccugugccccuucggcgagguguucaacgccacccgguucgccagcgucuacgccuggaaccgcaagcggaucuccaacugcguggcggacuacagcgugcuguacaacuccgccagcuucuccacguucaagugcuacggcgucagccccaccaagcucaacgaccugugcuucaccaacguguacgccgacuccuucgugauccgcggggacgagguccggcagaucgcccccggccagaccgggaagaucgccgacuacaacuacaagcugccggacgacuucacgggcugcgugaucgcguggaacagcaacaaccucgacuccaaggucgggggcaacuacaacuaccuguaccgccuguuccgcaagagcaaccucaagcccuucgagcgggacaucuccaccgagaucuaccaggccggcagcacccccugcaacgggguggagggcuucaacugcuacuucccccugcaguccuacggguuccagccgaccaacggcgugggguaccagcccuaccggguggucgugcugagcuucgagcuccugcacgcccccgccacggugugcggccccaagaaguccaccaaccuggucaagaacaagugcgugaacuucaacuucaacggccucaccgggaccggcgugcugaccgagagcaacaagaaguuccugccguuccagcaguucgggcgcgacaucgccgacacgaccgacgcgguccgcgacccccagacccuggagauccucgacaucacccccugcagcuucggcgggguguccgugaucacgccgggcaccaacaccagcaaccaggucgccgugcuguaccagggcgugaacugcaccgagguccccguggccauccacgccgaccagcugacgcccaccuggcggguguacuccaccgggagcaacgucuuccagacccgcgccggcugccucaucggggcggagcacgugaacaacuccuacgagugcgacauccccaucggcgccggcaucugcgccagcuaccagacgcagaccaacuccccgcggcgcgcccggagcguggcgucccagagcaucaucgccuacaccaugucccugggggccgagaacagcgucgccuacuccaacaacagcaucgccauccccaccaacuucacgaucuccgugaccaccgagauccugcccgugagcaugaccaagacgagcgucgacugcaccauguacaucugcggcgacuccaccgagugcagcaaccuccugcugcaguacggguccuucugcacccagcucaaccgcgcgcugacgggcaucgccguggagcaggacaagaacacccaggagguguucgcccaggucaagcagaucuacaagacgcccccgaucaaggacuucgggggcuucaacuucagccagauccugcccgaccccuccaagcccagcaagcgguccuucaucgaggaccuccuguucaacaaggugacccuggccgacgccggcuucaucaagcaguacggggacugccucggcgacaucgcggcccgcgaccugaucugcgcccagaaguucaacgggcugaccgugcucccgccccugcugaccgacgagaugaucgcccaguacaccagcgcccuccuggcgggcaccaucacguccggguggaccuucggcgccggcgccgcccugcagauccccuucgcgaugcagauggccuaccgguucaacgggaucggcgucacccagaacgugcucuacgagaaccagaagcugaucgccaaccaguucaacagcgccaucgggaagauccaggacucccugagcuccaccgccagcgcgcucggcaagcugcaggacguggucaaccagaacgcccaggcccugaacacgcucgugaagcagcuguccagcaacuucggggccaucuccagcgugcugaacgacauccucucccgccuggacaaggucgaggccgaggugcagaucgaccggcugaucaccggccgccuccagagccugcagaccuacgugacccagcagcugauccgggcggccgagauccgcgccagcgccaaccucgccgcgaccaagauguccgagugcguccugggccagagcaagcggguggacuucugcgggaagggcuaccaccugauguccuucccccagagcgccccgcacgggguggucuuccuccacgugacguacguccccgcccaggagaagaacuucaccaccgcccccgcgaucugccacgacggcaaggcccacuucccccgcgaggggguguucguguccaacggcacccacugguucgucacgcagcggaacuucuacgagccgcagaucaucaccaccgacaacaccuucgugagcggcaacugcgacguggucaucgggaucgugaacaacacgguguacgacccccugcagcccgagcuggacuccuucaaggaggagcucgacaaguacuucaagaaccacaccagccccgacgucgaccugggcgacaucuccgggaucaacgccagcguggugaacauccagaaggagaucgaccgccugaacgaggucgccaagaaccucaacgagucccugaucgaccugcaggagcucggcaaguacgagcaguacaucaaguggccgugguacaucuggcugggcuucaucgccgggcugaucgcgaucgugaucgugaccaucaugcucugcugcaugaccagcugcugcuccugccugaagggcugcugcagcugcggguccugcugcaaguucgacgaggacgacagcgagcccguccugaagggcgugaagcuccacuacacgugaggacuaguuauaagacugacuagcccgaugggccucccaacgggcccuccuccccuccuugcaccgagagaucucaaaggcucuuuucagagccaccaaaaaaaaaaaaaaaaaaaaaaaaaaaaaaaaaaaaaaaaaaaaaaaaaaaaaaaaaaaaaaaaaaaaaaaaaaaaaaaaaaaaaaaaaaaaaaaaaaaaa

SEQ ID NO: 24537 - RNA, 4029 nt, Artificial Sequence
  SARS-CoV-2/Wuhan/WIV05/2019__EPI_ISL_402128 spike protein mRNA gc (1-1273)(H69del_V70del_A222V_Y453F_S477N_D614G_I692V)
aggagaaagcuuaccauguucguguuccugguccuccugccccuggugagcucccagugcgugaaccucaccacccgcacgcagcugccgcccgccuacaccaacagcuucacccggggcgucuacuaccccgacaagguguuccgcuccagcgugcugcacuccacccaggaccucuuccugcccuucuucagcaacgucacgugguuccacgccaucuccgggaccaacggcaccaagcgguucgacaacccggugcugcccuucaacgacgggguguacuucgcgagcaccgagaaguccaacaucauccgcggcuggaucuucgggacgacccucgacagcaagacccagucccugcugaucgucaacaacgccaccaacguggugaucaaggucugcgaguuccaguucugcaacgaccccuuccucggcguguacuaccacaagaacaacaagagcuggauggaguccgaguuccggguguacagcuccgccaacaacugcacguucgaguacgucagccagcccuuccugauggaccuggagggcaagcaggggaacuucaagaaccuccgcgaguucguguucaagaacaucgacggcuacuucaagaucuacuccaagcacaccccgaucaaccuggugcgggaccugccccagggguucagcguccucgagccccugguggaccugcccaucggcaucaacaucacccgcuuccagacccuccuggcccugcaccgguccuaccucacgccgggggacagcagcuccggcuggaccgccggcgcggccgccuacuacgugggguaccugcagccccgcaccuuccugcucaaguacaacgagaacggcaccaucacggacgccgucgacugcgcgcuggacccccugagcgagaccaagugcacccucaaguccuucaccguggagaaggggaucuaccagacgagcaacuuccgggugcagcccaccgaguccaucguccgcuucccgaacaucaccaaccugugccccuucggcgagguguucaacgccacccgguucgccagcgucuacgccuggaaccgcaagcggaucuccaacugcguggccgacuacagcgugcuguacaacuccgcgagcuucuccacguucaagugcuacggcgucagccccaccaagcucaacgaccugugcuucaccaacguguacgccgacuccuucgugauccgcggggacgagguccggcagaucgcccccggccagaccgggaagaucgccgacuacaacuacaagcugccggacgacuucacgggcugcgugaucgccuggaacagcaacaaccucgacuccaaggucgggggcaacuacaacuaccuguuccgccuguuccgcaagagcaaccucaagcccuucgagcgggacaucuccaccgagaucuaccaggcgggcaacacccccugcaacgggguggagggcuucaacugcuacuucccccugcagagcuacggguuccagccgaccaacggcgugggguaccagcccuaccggguggucgugcuguccuucgagcuccugcacgcccccgccacggugugcggccccaagaaguccaccaaccuggucaagaacaagugcgugaacuucaacuucaacggccucaccgggaccggcgugcugaccgagagcaacaagaaguuccugccguuccagcaguucgggcgcgacaucgccgacacgaccgacgccguccgcgacccccagacccuggagauccucgacaucacccccugcagcuucggcggggugagcgugaucacgccgggcaccaacaccuccaaccaggucgcggugcuguaccagggcgugaacugcaccgagguccccguggccauccacgccgaccagcugacgcccaccuggcggguguacagcaccggguccaacgucuuccagacccgcgccggcugccucaucggggccgagcacgugaacaacagcuacgagugcgacauccccaucggcgcgggcaucugcgccuccuaccagacgcagaccaacagcccgcggcgcgcccgguccguggccagccaguccgucaucgcguacaccaugagccugggggccgagaacuccguggccuacagcaacaacuccaucgccauccccaccaacuucacgaucagcgugaccaccgagauccugcccgucuccaugaccaagacgagcguggacugcaccauguacaucugcggcgacagcaccgagugcuccaaccuccugcugcaguacgggagcuucugcacccagcucaaccgcgcccugacgggcaucgcgguggagcaggacaagaacacccaggaggucuucgcccaggugaagcagaucuacaagacgcccccgaucaaggacuucgggggcuucaacuucucccagauccugcccgaccccagcaagcccuccaagcggagcuucaucgaggaccuccuguucaacaaggugacccuggccgacgccggcuucaucaagcaguacggggacugccucggcgacaucgccgcgcgcgaccugaucugcgcccagaaguucaacgggcugaccguccucccgccccugcugaccgacgagaugaucgcccaguacaccuccgcccuccuggccggcaccaucacgagcggguggaccuucggcgcgggcgccgcccugcagauccccuucgccaugcagauggcguaccgguucaacgggaucggcgugacccagaacgugcucuacgagaaccagaagcugaucgccaaccaguucaacuccgccaucgggaagauccaggacagccuguccagcaccgccuccgcccucggcaagcugcaggacgucgugaaccagaacgcgcaggcccugaacacgcucgugaagcagcugagcuccaacuucggggccaucagcuccguccugaacgacauccucagccgccuggacaagguggaggccgaggugcagaucgaccggcugaucaccggccgccuccagucccugcagaccuacgucacccagcagcugauccgggccgcggagauccgcgccagcgccaaccucgccgccaccaagaugagcgagugcgugcugggccaguccaagcggguggacuucugcgggaagggcuaccaccugaugagcuucccccaguccgcgccgcacggggucguguuccuccacgucacguacgugcccgcccaggagaagaacuucaccaccgcccccgccaucugccacgacggcaaggcgcacuucccccgcgaggggguguucgucagcaacggcacccacugguucgugacgcagcggaacuucuacgagccgcagaucaucaccaccgacaacaccuucguguccggcaacugcgacgucgugaucgggaucgugaacaacacggucuacgacccccugcagcccgagcuggacagcuucaaggaggagcucgacaaguacuucaagaaccacaccucccccgacguggaccugggcgacaucagcgggaucaacgccuccguggucaacauccagaaggagaucgaccgccugaacgagguggccaagaaccucaacgagagccugaucgaccugcaggagcucggcaaguacgagcaguacaucaaguggccgugguacaucuggcugggcuucaucgccgggcugaucgccaucgugauggucaccaucaugcucugcugcaugaccuccugcugcagcugccugaagggcugcugcuccugcgggagcugcugcaaguucgacgaggacgacuccgagcccgugcugaagggcgugaagcuccacuacacgugaggacuaguuauaagacugacuagcccgaugggccucccaacgggcccuccuccccuccuugcaccgagagaucucaaaggcucuuuucagagccaccaaaaaaaaaaaaaaaaaaaaaaaaaaaaaaaaaaaaaaaaaaaaaaaaaaaaaaaaaaaaaaaaaaaaaaaaaaaaaaaaaaaaaaaaaaaaaaaaaaaaa

SEQ ID NO: 24538 - RNA, 4029 nt, Artificial Sequence
  SARS-CoV-2/Wuhan/WIV05/2019__EPI_ISL_402128 spike protein mRNA gc (1-1273)(H69del_V70del_Y453F_D614G_I692V_M1229I)
aggagaaagcuuaccauguucguguuccugguccuccugccccuggugagcucccagugcgugaaccucaccacccgcacgcagcugccgcccgccuacaccaacagcuucacccggggcgucuacuaccccgacaagguguuccgcuccagcgugcugcacuccacccaggaccucuuccugcccuucuucagcaacgucacgugguuccacgccaucuccgggaccaacggcaccaagcgguucgacaacccggugcugcccuucaacgacgggguguacuucgcgagcaccgagaaguccaacaucauccgcggcuggaucuucgggacgacccucgacagcaagacccagucccugcugaucgucaacaacgccaccaacguggugaucaaggucugcgaguuccaguucugcaacgaccccuuccucggcguguacuaccacaagaacaacaagagcuggauggaguccgaguuccggguguacagcuccgccaacaacugcacguucgaguacgucagccagcccuuccugauggaccuggagggcaagcaggggaacuucaagaaccuccgcgaguucguguucaagaacaucgacggcuacuucaagaucuacuccaagcacaccccgaucaaccuggugcgggaccugccccagggguucagcgcccucgagccccuggucgaccugcccaucggcaucaacaucacccgcuuccagacccuccuggcccugcaccgguccuaccucacgccgggggacagcagcuccggcuggaccgcgggcgccgccgccuacuacgugggguaccugcagccccgcaccuuccugcucaaguacaacgagaacggcaccaucacggacgcgguggacugcgcccuggacccccugagcgagaccaagugcacccucaaguccuucaccgucgagaaggggaucuaccagacgagcaacuuccgggugcagcccaccgaguccaucgugcgcuucccgaacaucaccaaccugugccccuucggcgaggucuucaacgccacccgguucgccagcguguacgccuggaaccgcaagcggaucuccaacugcgucgcggacuacagcgugcuguacaacuccgccagcuucuccacguucaagugcuacggcgugagccccaccaagcucaacgaccugugcuucaccaacgucuacgccgacuccuucgugauccgcggggacgaggugcggcagaucgcccccggccagaccgggaagaucgccgacuacaacuacaagcugccggacgacuucacgggcugcgucaucgcguggaacagcaacaaccucgacuccaaggucgggggcaacuacaacuaccuguuccgccuguuccgcaagagcaaccucaagcccuucgagcgggacaucuccaccgagaucuaccaggccggcagcacccccugcaacgggguggagggcuucaacugcuacuucccccugcaguccuacggguuccagccgaccaacggcgugggguaccagcccuaccggguggugguccugagcuucgagcuccugcacgcccccgccacggugugcggccccaagaaguccaccaaccuggugaagaacaagugcgucaacuucaacuucaacggccucaccgggaccggcgugcugaccgagagcaacaagaaguuccugccguuccagcaguucgggcgcgacaucgccgacacgaccgacgcggugcgcgacccccagacccuggagauccucgacaucacccccugcagcuucggcggggucuccgugaucacgccgggcaccaacaccagcaaccagguggccguccuguaccagggcgugaacugcaccgaggugcccgucgccauccacgccgaccagcugacgcccaccuggcggguguacuccaccgggagcaacguguuccagacccgcgccggcugccucaucggggcggagcacgucaacaacuccuacgagugcgacauccccaucggcgccggcaucugcgccagcuaccagacgcagaccaacuccccgcggcgcgcccggagcguggcgucccagagcgugaucgccuacaccaugucccugggggccgagaacagcgucgccuacuccaacaacagcaucgccauccccaccaacuucacgaucuccgugaccaccgagauccugcccgugagcaugaccaagacgagcgucgacugcaccauguacaucugcggcgacuccaccgagugcagcaaccuccugcugcaguacggguccuucugcacccagcucaaccgcgcgcugacgggcaucgccguggagcaggacaagaacacccaggagguguucgcccaggucaagcagaucuacaagacgcccccgaucaaggacuucgggggcuucaacuucagccagauccugcccgaccccuccaagcccagcaagcgguccuucaucgaggaccuccuguucaacaaggugacccuggccgacgccggcuucaucaagcaguacggggacugccucggcgacaucgcggcccgcgaccugaucugcgcccagaaguucaacgggcugaccgugcucccgccccugcugaccgacgagaugaucgcccaguacaccagcgcccuccuggcgggcaccaucacguccggguggaccuucggcgccggcgccgcccugcagauccccuucgcgaugcagauggccuaccgguucaacgggaucggcgucacccagaacgugcucuacgagaaccagaagcugaucgccaaccaguucaacagcgccaucgggaagauccaggacucccugagcuccaccgccagcgcgcucggcaagcugcaggacguggucaaccagaacgcccaggcccugaacacgcucgugaagcagcuguccagcaacuucggggccaucuccagcgugcugaacgacauccucucccgccuggacaaggucgaggccgaggugcagaucgaccggcugaucaccggccgccuccagagccugcagaccuacgugacccagcagcugauccgggcggccgagauccgcgccagcgccaaccucgccgcgaccaagauguccgagugcguccugggccagagcaagcggguggacuucugcgggaagggcuaccaccugauguccuucccccagagcgccccgcacgggguggucuuccuccacgugacguacguccccgcccaggagaagaacuucaccaccgcccccgcgaucugccacgacggcaaggcccacuucccccgcgaggggguguucguguccaacggcacccacugguucgucacgcagcggaacuucuacgagccgcagaucaucaccaccgacaacaccuucgugagcggcaacugcgacguggucaucgggaucgugaacaacacgguguacgacccccugcagcccgagcuggacuccuucaaggaggagcucgacaaguacuucaagaaccacaccagccccgacgucgaccugggcgacaucuccgggaucaacgccagcguggugaacauccagaaggagaucgaccgccugaacgaggucgccaagaaccucaacgagucccugaucgaccugcaggagcucggcaaguacgagcaguacaucaaguggccgugguacaucuggcugggcuucaucgccgggcugaucgcgaucgugaucgugaccaucaugcucugcugcaugaccagcugcugcuccugccugaagggcugcugcagcugcggguccugcugcaaguucgacgaggacgacagcgagcccguccugaagggcgugaagcuccacuacacgugaggacuaguuauaagacugacuagcccgaugggccucccaacgggcccuccuccccuccuugcaccgagagaucucaaaggcucuuuucagagccaccaaaaaaaaaaaaaaaaaaaaaaaaaaaaaaaaaaaaaaaaaaaaaaaaaaaaaaaaaaaaaaaaaaaaaaaaaaaaaaaaaaaaaaaaaaaaaaaaaaaaa

SEQ ID NO: 24539 - RNA, 4026 nt, Artificial Sequence
  SARS-CoV-2/Wuhan/WIV05/2019__EPI_ISL_402128 spike protein mRNA gc (1-1273)(H69del_V70del_Y144del_N501Y_A570D_D614G_P681H_T716I_S982 A_D1118H)
aggagaaagcuuaccauguucguguuccugguccuccugccccuggugagcucccagugcgugaaccucaccacccgcacgcagcugccgcccgccuacaccaacagcuucacccggggcgucuacuaccccgacaagguguuccgcuccagcgugcugcacuccacccaggaccucuuccugcccuucuucagcaacgucacgugguuccacgccaucuccgggaccaacggcaccaagcgguucgacaacccggugcugcccuucaacgacgggguguacuucgcgagcaccgagaaguccaacaucauccgcggcuggaucuucgggacgacccucgacagcaagacccagucccugcugaucgucaacaacgccaccaacguggugaucaaggucugcgaguuccaguucugcaacgaccccuuccucggcguguaccacaagaacaacaagagcuggauggaguccgaguuccggguguacagcuccgccaacaacugcacguucgaguacgucagccagcccuuccugauggaccuggagggcaagcaggggaacuucaagaaccuccgcgaguucguguucaagaacaucgacggcuacuucaagaucuacuccaagcacaccccgaucaaccuggugcgggaccugccccagggguucagcgcccucgagccccuggucgaccugcccaucggcaucaacaucacccgcuuccagacccuccuggcccugcaccgguccuaccucacgccgggggacagcagcuccggcuggaccgcgggcgccgccgccuacuacgugggguaccugcagccccgcaccuuccugcucaaguacaacgagaacggcaccaucacggacgcgguggacugcgcccuggacccccugagcgagaccaagugcacccucaaguccuucaccgucgagaaggggaucuaccagacgagcaacuuccgggugcagcccaccgaguccaucgugcgcuucccgaacaucaccaaccugugccccuucggcgaggucuucaacgccacccgguucgccagcguguacgccuggaaccgcaagcggaucuccaacugcgucgcggacuacagcgugcuguacaacuccgccagcuucuccacguucaagugcuacggcgugagccccaccaagcucaacgaccugugcuucaccaacgucuacgccgacuccuucgugauccgcggggacgaggugcggcagaucgcccccggccagaccgggaagaucgccgacuacaacuacaagcugccggacgacuucacgggcugcgucaucgcguggaacagcaacaaccucgacuccaaggucgggggcaacuacaacuaccuguaccgccuguuccgcaagagcaaccucaagcccuucgagcgggacaucuccaccgagaucuaccaggccggcagcacccccugcaacgggguggagggcuucaacugcuacuucccccugcaguccuacggguuccagccgaccuacggcgugggguaccagcccuaccggguggugguccugagcuucgagcuccugcacgcccccgccacggugugcggccccaagaaguccaccaaccuggugaagaacaagugcgucaacuucaacuucaacggccucaccgggaccggcgugcugaccgagagcaacaagaaguuccugccguuccagcaguucgggcgcgacaucgacgacacgaccgacgccgugcgcgacccccagacccuggagauccucgacaucacccccugcagcuucggcggggucuccgugaucacgccgggcaccaacaccagcaaccagguggcgguccuguaccagggcgugaacugcaccgaggugcccgucgccauccacgccgaccagcugacgcccaccuggcggguguacuccaccgggagcaacguguuccagacccgcgccggcugccucaucggggccgagcacgucaacaacuccuacgagugcgacauccccaucggcgcgggcaucugcgccagcuaccagacgcagaccaacucccaccggcgcgcccggagcguggccucccagagcaucaucgcguacaccaugucccugggggccgagaacagcguggccuacuccaacaacagcaucgccaucccgaucaacuucaccaucuccgucacgaccgagauccugcccgugagcaugaccaagaccagcguggacugcacgauguacaucugcggcgacuccaccgagugcagcaaccuccugcugcaguacggguccuucugcacccagcucaaccgcgcccugaccggcaucgcggucgagcaggacaagaacacgcaggagguguucgcccaggugaagcagaucuacaagaccccgcccaucaaggacuucgggggcuucaacuucagccagauccugcccgaccccuccaagcccagcaagcgguccuucaucgaggaccuccuguucaacaaggucacccuggccgacgccggcuucaucaagcaguacggggacugccucggcgacaucgccgcgcgcgaccugaucugcgcccagaaguucaacgggcugaccgugcugcccccgcuccugacggacgagaugaucgcccaguacaccagcgcccuccuggccggcaccaucaccuccggguggacguucggcgcgggcgccgcccugcagauccccuucgccaugcagauggcguaccgguucaacgggaucggcgugacccagaacguccucuacgagaaccagaagcugaucgccaaccaguucaacagcgccaucgggaagauccaggacucccugagcuccaccgccagcgcccucggcaagcugcaggacguggugaaccagaacgcgcaggcccugaacacccucgucaagcagcuguccagcaacuucggggccaucuccagcgugcugaacgacauccucgcccgccuggacaagguggaggccgagguccagaucgaccggcugaucacgggccgccuccagucccugcagaccuacgugacccagcagcugauccgggcggccgagauccgcgccagcgccaaccucgccgcgaccaagaugagcgagugcgugcugggccaguccaagcgggucgacuucugcgggaagggcuaccaccugaugagcuucccccaguccgcgccccacggggugguguuccuccacgucaccuacgugccggcccaggagaagaacuucacgaccgcccccgccaucugccacgacggcaaggcccacuucccccgcgagggggucuucgugagcaacggcacccacugguucgugacccagcggaacuucuacgagccccagaucaucacgacccacaacaccuucgucuccggcaacugcgacguggugaucgggaucgucaacaacaccguguacgacccgcugcagcccgagcuggacagcuucaaggaggagcucgacaaguacuucaagaaccacacgucccccgacguggaccugggcgacaucagcgggaucaacgccuccgucgugaacauccagaaggagaucgaccgccugaacgagguggccaagaaccucaacgagagccugaucgaccugcaggagcucggcaaguacgagcaguacaucaaguggcccugguacaucuggcugggcuucaucgccgggcugaucgcgaucgucauggugaccaucaugcucugcugcaugaccuccugcugcagcugccugaagggcugcugcuccugcgggagcugcugcaaguucgacgaggacgacuccgagccggugcugaagggcgucaagcuccacuacaccugaggacuaguuauaagacugacuagcccgaugggccucccaacgggcccuccuccccuccuugcaccgagagaucucaaaggcucuuuucagagccaccaaaaaaaaaaaaaaaaaaaaaaaaaaaaaaaaaaaaaaaaaaaaaaaaaaaaaaaaaaaaaaaaaaaaaaaaaaaaaaaaaaaaaaaaaaaaaaaaaaaaa

SEQ ID NO: 24540 - RNA, 4035 nt, Artificial Sequence
  SARS-CoV-2/Wuhan/WIV05/2019__EPI_ISL_402128 spike protein mRNA gc (1-1273)(K417N_E484K_N501Y_D614G)
aggagaaagcuuaccauguucguguuccugguccuccugccccuggugagcucccagugcgugaaccucaccacccgcacgcagcugccgcccgccuacaccaacagcuucacccggggcgucuacuaccccgacaagguguuccgcuccagcgugcugcacuccacccaggaccucuuccugcccuucuucagcaacgucacgugguuccacgccauccacguguccgggaccaacggcaccaagcgguucgacaacccggugcugcccuucaacgacggggucuacuucgcgagcaccgagaaguccaacaucauccgcggcuggaucuucgggacgacccucgacagcaagacccagucccugcugaucgugaacaacgccaccaacguggucaucaaggugugcgaguuccaguucugcaacgaccccuuccucggcguguacuaccacaagaacaacaagagcuggauggaguccgaguuccgggucuacagcuccgccaacaacugcacguucgaguacgugagccagcccuuccugauggaccuggagggcaagcaggggaacuucaagaaccuccgcgaguucguguucaagaacaucgacggcuacuucaagaucuacuccaagcacaccccgaucaaccugguccgggaccugccccagggguucagcgcccucgagccccugguggaccugcccaucggcaucaacaucacccgcuuccagacccuccuggcccugcaccgguccuaccucacgccgggggacagcagcuccggcuggaccgcgggcgccgccgccuacuacgugggguaccugcagccccgcaccuuccugcucaaguacaacgagaacggcaccaucacggacgcggucgacugcgcccuggacccccugagcgagaccaagugcacccucaaguccuucaccguggagaaggggaucuaccagacgagcaacuuccgggugcagcccaccgaguccaucguccgcuucccgaacaucaccaaccugugccccuucggcgagguguucaacgccacccgguucgccagcgucuacgccuggaaccgcaagcggaucuccaacugcguggcggacuacagcgugcuguacaacuccgccagcuucuccacguucaagugcuacggcgucagccccaccaagcucaacgaccugugcuucaccaacguguacgccgacuccuucgugauccgcggggacgagguccggcagaucgcccccggccagaccgggaacaucgccgacuacaacuacaagcugccggacgacuucacgggcugcgugaucgcguggaacagcaacaaccucgacuccaaggucgggggcaacuacaacuaccuguaccgccuguuccgcaagagcaaccucaagcccuucgagcgggacaucuccaccgagaucuaccaggccggcagcacccccugcaacggggugaagggcuucaacugcuacuucccccugcaguccuacggguuccagccgaccuacggcgugggguaccagcccuaccggguggucgugcugagcuucgagcuccugcacgcccccgccacggugugcggccccaagaaguccaccaaccuggucaagaacaagugcgugaacuucaacuucaacggccucaccgggaccggcgugcugaccgagagcaacaagaaguuccugccguuccagcaguucgggcgcgacaucgccgacacgaccgacgcgguccgcgacccccagacccuggagauccucgacaucacccccugcagcuucggcgggguguccgugaucacgccgggcaccaacaccagcaaccaggucgccgugcuguaccagggcgugaacugcaccgagguccccguggccauccacgccgaccagcugacgcccaccuggcggguguacuccaccgggagcaacgucuuccagacccgcgccggcugccucaucggggcggagcacgugaacaacuccuacgagugcgacauccccaucggcgccggcaucugcgccagcuaccagacgcagaccaacuccccgcggcgcgcccggagcguggcgucccagagcaucaucgccuacaccaugucccugggggccgagaacagcgucgccuacuccaacaacagcaucgccauccccaccaacuucacgaucuccgugaccaccgagauccugcccgugagcaugaccaagacgagcgucgacugcaccauguacaucugcggcgacuccaccgagugcagcaaccuccugcugcaguacggguccuucugcacccagcucaaccgcgcgcugacgggcaucgccguggagcaggacaagaacacccaggagguguucgcccaggucaagcagaucuacaagacgcccccgaucaaggacuucgggggcuucaacuucagccagauccugcccgaccccuccaagcccagcaagcgguccuucaucgaggaccuccuguucaacaaggugacccuggccgacgccggcuucaucaagcaguacggggacugccucggcgacaucgcggcccgcgaccugaucugcgcccagaaguucaacgggcugaccgugcucccgccccugcugaccgacgagaugaucgcccaguacaccagcgcccuccuggcgggcaccaucacguccggguggaccuucggcgccggcgccgcccugcagauccccuucgcgaugcagauggccuaccgguucaacgggaucggcgucacccagaacgugcucuacgagaaccagaagcugaucgccaaccaguucaacagcgccaucgggaagauccaggacucccugagcuccaccgccagcgcgcucggcaagcugcaggacguggucaaccagaacgcccaggcccugaacacgcucgugaagcagcuguccagcaacuucggggccaucuccagcgugcugaacgacauccucucccgccuggacaaggucgaggccgaggugcagaucgaccggcugaucaccggccgccuccagagccugcagaccuacgugacccagcagcugauccgggcggccgagauccgcgccagcgccaaccucgccgcgaccaagauguccgagugcguccugggccagagcaagcggguggacuucugcgggaagggcuaccaccugauguccuucccccagagcgccccgcacgggguggucuuccuccacgugacguacguccccgcccaggagaagaacuucaccaccgcccccgcgaucugccacgacggcaaggcccacuucccccgcgaggggguguucguguccaacggcacccacugguucgucacgcagcggaacuucuacgagccgcagaucaucaccaccgacaacaccuucgugagcggcaacugcgacguggucaucgggaucgugaacaacacgguguacgacccccugcagcccgagcuggacuccuucaaggaggagcucgacaaguacuucaagaaccacaccagccccgacgucgaccugggcgacaucuccgggaucaacgccagcguggugaacauccagaaggagaucgaccgccugaacgaggucgccaagaaccucaacgagucccugaucgaccugcaggagcucggcaaguacgagcaguacaucaaguggccgugguacaucuggcugggcuucaucgccgggcugaucgcgaucgugauggugaccaucaugcucugcugcaugaccagcugcugcuccugccugaagggcugcugcagcugcggguccugcugcaaguucgacgaggacgacagcgagcccguccugaagggcgugaagcuccacuacacgugaggacuaguuauaagacugacuagcccgaugggccucccaacgggcccuccuccccuccuugcaccgagagaucucaaaggcucuuuucagagccaccaaaaaaaaaaaaaaaaaaaaaaaaaaaaaaaaaaaaaaaaaaaaaaaaaaaaaaaaaaaaaaaaaaaaaaaaaaaaaaaaaaaaaaaaaaaaaaaaaaaaa

SEQ ID NO: 24541 - RNA, 4026 nt, Artificial Sequence
  SARS-CoV-2/Wuhan/WIV05/2019__EPI_ISL_402128 spike protein mRNA gc (1-1273)(L18F_D80A_D215G_L242del_A243del_L244del_R246I_K417N_E484 K_N501Y_D614G_A701V)
aggagaaagcuuaccauguucguguuccugguccuccugccccuggugagcucccagugcgugaacuucaccacccgcacgcagcucccgcccgccuacaccaacagcuucacccggggcgucuacuaccccgacaagguguuccgcuccagcgugcugcacuccacccaggaccuguuccuccccuucuucagcaacgucacgugguuccacgccauccacguguccgggaccaacggcaccaagcgguucgcgaacccggugcugcccuucaacgacggggucuacuucgccagcaccgagaaguccaacaucauccgcggcuggaucuucgggacgacccuggacagcaagacccagucccuccugaucgugaacaacgccaccaacguggucaucaaggugugcgaguuccaguucugcaacgaccccuuccugggcguguacuaccacaagaacaacaagagcuggauggaguccgaguuccgggucuacagcuccgccaacaacugcacguucgaguacgugagccagcccuuccucauggaccuggagggcaagcaggggaacuucaagaaccugcgcgaguucguguucaagaacaucgacggcuacuucaagaucuacuccaagcacaccccgaucaaccucguccgggggcugccccagggcuucagcgcccuggagccccucguggaccugcccaucgggaucaacaucacccgcuuccagacccugcacaucuccuaccucacgccgggcgacagcagcuccggcuggaccgcgggggccgccgccuacuacgugggcuaccugcagccccggaccuuccugcucaaguacaacgagaacgggaccaucacggacgcggucgacugcgcccuggacccccugagcgagaccaagugcacccucaaguccuucaccguggagaagggcaucuaccagacgagcaacuuccgcgugcagcccaccgaguccaucguccgguucccgaacaucaccaaccugugccccuucggcgagguguucaacgccacccgcuucgccagcgucuacgccuggaaccggaagcgcaucuccaacugcguggcggacuacagcgugcuguacaacuccgccagcuucuccacguucaagugcuacggggucagccccaccaagcucaacgaccugugcuucaccaacguguacgccgacuccuucgugauccggggcgacgagguccgccagaucgcccccgggcagaccggcaacaucgccgacuacaacuacaagcugccggacgacuucacggggugcgugaucgcguggaacagcaacaaccucgacuccaaggugggcggcaacuacaacuaccuguaccggcuguuccgcaagagcaaccucaagcccuucgagcgggacaucuccaccgagaucuaccaggccgggagcacccccugcaacggcgucaagggguucaacugcuacuucccccugcaguccuacggcuuccagccgaccuacggggugggcuaccagcccuaccgcguggucgugcugagcuucgagcuccugcacgcccccgccacggugugcggccccaagaaguccaccaaccuggucaagaacaagugcgugaacuucaacuucaacgggcucaccggcaccggggugcugaccgagagcaacaagaaguuccugccguuccagcaguucggccgggacaucgccgacacgaccgacgcgguccgcgacccccagacccucgagauccuggacaucacccccugcagcuucgggggcguguccgugaucacgccgggcaccaacaccagcaaccaggucgccgugcuguaccagggggugaacugcaccgagguccccguggccauccacgccgaccagcugacgcccaccuggcgcguguacuccaccggcagcaacgucuuccagacccgggccgggugccucaucggcgcggagcacgugaacaacuccuacgagugcgacauccccaucggcgccgggaucugcgccagcuaccagacgcagaccaacuccccgcgccgggcccgcagcguggcgucccagagcaucaucgccuacaccaugucccugggcgucgagaacagcguggccuacuccaacaacagcaucgccauccccaccaacuucacgaucuccgugaccaccgagauccugcccgucagcaugaccaagacgagcguggacugcaccauguacaucugcggggacuccaccgagugcagcaaccuccugcugcaguacggcuccuucugcacccagcucaaccgggcccugacggggaucgcgguggagcaggacaagaacacccaggaggucuucgcccaggugaagcagaucuacaagacgcccccgaucaaggacuucggcggcuucaacuucagccagauccugcccgaccccuccaagcccagcaagcgcuccuucaucgaggaccuccuguucaacaaggugacccuggccgacgccggguucaucaagcaguacggcgacugccucggggacaucgccgcgcgggaccugaucugcgcccagaaguucaacggccugaccguccucccgccccugcugaccgacgagaugaucgcccaguacaccagcgcccuccuggccgggaccaucacguccggcuggaccuucggcgcgggggccgcccugcagauccccuucgccaugcagauggcguaccgcuucaacggcaucggggugacccagaacgugcucuacgagaaccagaagcugaucgccaaccaguucaacagcgccaucggcaagauccaggacucccugagcuccaccgccagcgcccucgggaagcugcaggacgucgugaaccagaacgcgcaggcccugaacacgcucgugaagcagcuguccagcaacuucggcgccaucuccagcguccugaacgacauccucucccggcuggacaagguggaggccgaggugcagaucgaccgccugaucaccggccggcuccagagccugcagaccuacgucacccagcagcugauccgcgccgcggagauccgggccagcgccaaccucgccgccaccaagauguccgagugcgugcuggggcagagcaagcgcguggacuucugcggcaagggguaccaccugauguccuucccccagagcgcgccgcacggcgucguguuccuccacgucacguacgugcccgcccaggagaagaacuucaccaccgcccccgccaucugccacgacgggaaggcgcacuucccccgggagggcguguucgucuccaacggcacccacugguucgugacgcagcgcaacuucuacgagccgcagaucaucaccaccgacaacaccuucgugagcgggaacugcgacgucgugaucggcaucgugaacaacacggucuacgacccccugcagcccgagcuggacuccuucaaggaggagcucgacaaguacuucaagaaccacaccagccccgacguggaccugggggacaucuccggcaucaacgccagcguggucaacauccagaaggagaucgaccggcugaacgagguggccaagaaccucaacgagucccugaucgaccugcaggagcucggcaaguacgagcaguacaucaaguggccgugguacaucuggcugggguucaucgccggccugaucgccaucgugauggucaccaucaugcucugcugcaugaccagcugcugcuccugccugaaggggugcugcagcugcggcuccugcugcaaguucgacgaggacgacagcgagcccgugcugaagggggugaagcuccacuacacgugaggacuaguuauaagacugacuagcccgaugggccucccaacgggcccuccuccccuccuugcaccgagagaucucaaaggcucuuuucagagccaccaaaaaaaaaaaaaaaaaaaaaaaaaaaaaaaaaaaaaaaaaaaaaaaaaaaaaaaaaaaaaaaaaaaaaaaaaaaaaaaaaaaaaaaaaaaaaaaaaaaaa

SEQ ID NO: 24542 - RNA, 4035 nt, Artificial Sequence
  SARS-CoV-2/Wuhan/WIV05/2019__EPI_ISL_402128 spike protein mRNA gc (1-1273)(E484K_D614G)
aggagaaagcuuaccauguucguguuccugguccuccugccccuggugagcucccagugcgugaaccucaccacccgcacgcagcugccgcccgccuacaccaacagcuucacccggggcgucuacuaccccgacaagguguuccgcuccagcgugcugcacuccacccaggaccucuuccugcccuucuucagcaacgucacgugguuccacgccauccacguguccgggaccaacggcaccaagcgguucgacaacccggugcugcccuucaacgacggggucuacuucgcgagcaccgagaaguccaacaucauccgcggcuggaucuucgggacgacccucgacagcaagacccagucccugcugaucgugaacaacgccaccaacguggucaucaaggugugcgaguuccaguucugcaacgaccccuuccucggcguguacuaccacaagaacaacaagagcuggauggaguccgaguuccgggucuacagcuccgccaacaacugcacguucgaguacgugagccagcccuuccugauggaccuggagggcaagcaggggaacuucaagaaccuccgcgaguucguguucaagaacaucgacggcuacuucaagaucuacuccaagcacaccccgaucaaccugguccgggaccugccccagggguucagcgcccucgagccccugguggaccugcccaucggcaucaacaucacccgcuuccagacccuccuggcccugcaccgguccuaccucacgccgggggacagcagcuccggcuggaccgcgggcgccgccgccuacuacgugggguaccugcagccccgcaccuuccugcucaaguacaacgagaacggcaccaucacggacgcggucgacugcgcccuggacccccugagcgagaccaagugcacccucaaguccuucaccguggagaaggggaucuaccagacgagcaacuuccgggugcagcccaccgaguccaucguccgcuucccgaacaucaccaaccugugccccuucggcgagguguucaacgccacccgguucgccagcgucuacgccuggaaccgcaagcggaucuccaacugcguggcggacuacagcgugcuguacaacuccgccagcuucuccacguucaagugcuacggcgucagccccaccaagcucaacgaccugugcuucaccaacguguacgccgacuccuucgugauccgcggggacgagguccggcagaucgcccccggccagaccgggaagaucgccgacuacaacuacaagcugccggacgacuucacgggcugcgugaucgcguggaacagcaacaaccucgacuccaaggucgggggcaacuacaacuaccuguaccgccuguuccgcaagagcaaccucaagcccuucgagcgggacaucuccaccgagaucuaccaggccggcagcacccccugcaacggggugaagggcuucaacugcuacuucccccugcaguccuacggguuccagccgaccaacggcgugggguaccagcccuaccggguggucgugcugagcuucgagcuccugcacgcccccgccacggugugcggccccaagaaguccaccaaccuggucaagaacaagugcgugaacuucaacuucaacggccucaccgggaccggcgugcugaccgagagcaacaagaaguuccugccguuccagcaguucgggcgcgacaucgccgacacgaccgacgcgguccgcgacccccagacccuggagauccucgacaucacccccugcagcuucggcgggguguccgugaucacgccgggcaccaacaccagcaaccaggucgccgugcuguaccagggcgugaacugcaccgagguccccguggccauccacgccgaccagcugacgcccaccuggcggguguacuccaccgggagcaacgucuuccagacccgcgccggcugccucaucggggcggagcacgugaacaacuccuacgagugcgacauccccaucggcgccggcaucugcgccagcuaccagacgcagaccaacuccccgcggcgcgcccggagcguggcgucccagagcaucaucgccuacaccaugucccugggggccgagaacagcgucgccuacuccaacaacagcaucgccauccccaccaacuucacgaucuccgugaccaccgagauccugcccgugagcaugaccaagacgagcgucgacugcaccauguacaucugcggcgacuccaccgagugcagcaaccuccugcugcaguacggguccuucugcacccagcucaaccgcgcgcugacgggcaucgccguggagcaggacaagaacacccaggagguguucgcccaggucaagcagaucuacaagacgcccccgaucaaggacuucgggggcuucaacuucagccagauccugcccgaccccuccaagcccagcaagcgguccuucaucgaggaccuccuguucaacaaggugacccuggccgacgccggcuucaucaagcaguacggggacugccucggcgacaucgcggcccgcgaccugaucugcgcccagaaguucaacgggcugaccgugcucccgccccugcugaccgacgagaugaucgcccaguacaccagcgcccuccuggcgggcaccaucacguccggguggaccuucggcgccggcgccgcccugcagauccccuucgcgaugcagauggccuaccgguucaacgggaucggcgucacccagaacgugcucuacgagaaccagaagcugaucgccaaccaguucaacagcgccaucgggaagauccaggacucccugagcuccaccgccagcgcgcucggcaagcugcaggacguggucaaccagaacgcccaggcccugaacacgcucgugaagcagcuguccagcaacuucggggccaucuccagcgugcugaacgacauccucucccgccuggacaaggucgaggccgaggugcagaucgaccggcugaucaccggccgccuccagagccugcagaccuacgugacccagcagcugauccgggcggccgagauccgcgccagcgccaaccucgccgcgaccaagauguccgagugcguccugggccagagcaagcggguggacuucugcgggaagggcuaccaccugauguccuucccccagagcgccccgcacgggguggucuuccuccacgugacguacguccccgcccaggagaagaacuucaccaccgcccccgcgaucugccacgacggcaaggcccacuucccccgcgaggggguguucguguccaacggcacccacugguucgucacgcagcggaacuucuacgagccgcagaucaucaccaccgacaacaccuucgugagcggcaacugcgacguggucaucgggaucgugaacaacacgguguacgacccccugcagcccgagcuggacuccuucaaggaggagcucgacaaguacuucaagaaccacaccagccccgacgucgaccugggcgacaucuccgggaucaacgccagcguggugaacauccagaaggagaucgaccgccugaacgaggucgccaagaaccucaacgagucccugaucgaccugcaggagcucggcaaguacgagcaguacaucaaguggccgugguacaucuggcugggcuucaucgccgggcugaucgcgaucgugauggugaccaucaugcucugcugcaugaccagcugcugcuccugccugaagggcugcugcagcugcggguccugcugcaaguucgacgaggacgacagcgagcccguccugaagggcgugaagcuccacuacacgugaggacuaguuauaagacugacuagcccgaugggccucccaacgggcccuccuccccuccuugcaccgagagaucucaaaggcucuuuucagagccaccaaaaaaaaaaaaaaaaaaaaaaaaaaaaaaaaaaaaaaaaaaaaaaaaaaaaaaaaaaaaaaaaaaaaaaaaaaaaaaaaaaaaaaaaaaaaaaaaaaaaa

SEQ ID NO: 24543 - RNA, 4035 nt, Artificial Sequence
  SARS-CoV-2/Wuhan/WIV05/2019__EPI_ISL_402128 spike protein mRNA gc (1-1273)(L18F_T20N_P26S_D138Y_R190S_K417T_E484K_N501Y_D614G_H655Y _T1027I)
aggagaaagcuuaccauguucguguuccugguccuccugccccuggugagcucccagugcgugaacuucaccaaccgcacccagcucccgagcgccuacacgaacuccuucacccggggcgucuacuaccccgacaagguguuccgcagcuccgugcugcacagcacccaggaccuguuccuccccuucuucuccaacgucaccugguuccacgccauccacgugagcgggacgaacggcaccaagcgguucgacaaccccgugcugccguucaacgacggggucuacuucgcguccaccgagaaguccaacaucauccgcggcuggaucuucgggaccacgcuggacuccaagacccagagccuccugaucgugaacaacgccaccaacguggucaucaaggugugcgaguuccaguucugcaacuaccccuuccugggcguguacuaccacaagaacaacaaguccuggauggagagcgaguuccgggucuacuccagcgccaacaacugcaccuucgaguacgugucccagcccuuccucauggaccuggagggcaagcaggggaacuucaagaaccugagcgaguucguguucaagaacaucgacggcuacuucaagaucuacuccaagcacacgcccaucaaccucguccgcgaccugccgcagggguucagcgcccuggagccccucguggaccugcccaucggcaucaacaucacccgguuccagacccugcucgcccugcaccgcagcuaccugacccccggggacuccagcuccggcuggacggcgggcgccgccgccuacuacgugggguaccuccagccgcggaccuuccugcugaaguacaacgagaacggcaccaucaccgacgcggucgacugcgcccucgacccccugagcgagacgaagugcacccugaaguccuucaccguggagaaggggaucuaccagaccagcaacuuccgcgugcagcccacggaguccaucguccgguuccccaacaucaccaaccucugcccguucggcgagguguucaacgccacccgcuucgccagcgucuacgccuggaaccggaagcgcaucuccaacugcguggcggacuacagcgugcuguacaacuccgccagcuucuccaccuucaagugcuacggcgucagccccacgaagcugaacgaccucugcuucaccaacguguacgccgacuccuucgugauccgcggggacgagguccggcagaucgcccccggccagaccgggaccaucgccgacuacaacuacaagcugcccgacgacuucacgggcugcgugaucgcguggaacagcaacaaccuggacuccaaggucgggggcaacuacaacuaccucuaccggcuguuccgcaagagcaaccugaagccguucgagcgggacaucuccaccgagaucuaccaggccggcagcacccccugcaacggggugaagggcuucaacugcuacuucccccuccagagcuacggguuccagcccaccuacggcgugggguaccagccguaccgcguggucgugcuguccuucgagcugcuccacgcccccgccacggugugcggccccaagaaguccaccaaccuggucaagaacaagugcgugaacuucaacuucaacggccugaccgggaccggcgugcucaccgagagcaacaagaaguuccugcccuuccagcaguucgggcgggacaucgccgacacgaccgacgcgguccgcgacccgcagacccuggagauccuggacaucacccccugcagcuucggcgggguguccgugaucacgcccggcaccaacaccagcaaccaggucgccgugcucuaccagggcgugaacugcaccgaggucccgguggccauccacgccgaccagcugacgcccaccuggcgcguguacuccaccgggagcaacgucuuccagacccgggccggcugccugaucggggcggaguacgugaacaacuccuacgagugcgacauccccaucggcgccggcaucugcgccagcuaccagacgcagaccaacagcccccgccgggcccgcagcguggcgucccagagcaucaucgccuacaccaugucccucggggccgagaacagcgucgccuacuccaacaacagcaucgccaucccgaccaacuucacgaucagcgugaccaccgagauccugcccguguccaugaccaagacgagcgucgacugcaccauguacaucugcggcgacuccaccgagugcagcaaccugcuccugcaguacggguccuucugcacccagcugaaccgggcgcucacgggcaucgccguggagcaggacaagaacacccaggagguguucgcccaggucaagcagaucuacaagaccccgcccaucaaggacuucgggggcuucaacuucagccagauccugcccgaccccuccaagcccagcaagcgcuccuucaucgaggaccuccuguucaacaaggugacccuggccgacgccggcuucaucaagcaguacggggacugccugggcgacaucgcggcccgggaccucaucugcgcccagaaguucaacgggcugacggugcugcccccgcuccugaccgacgagaugaucgcccaguacaccagcgcccugcucgcgggcaccaucacguccggguggaccuucggcgccggcgccgcccugcagauccccuucgcgaugcagauggccuaccgcuucaacgggaucggcgucacccagaacgugcuguacgagaaccagaagcucaucgccaaccaguucaacagcgccaucgggaagauccaggacucccugagcuccaccgccagcgcgcugggcaagcuccaggacguggucaaccagaacgcccaggcccugaacacgcuggugaagcagcucuccagcaacuucggggccaucuccagcgugcugaacgacauccugagccggcucgacaaggucgaggccgaggugcagaucgaccgccugaucaccggccggcugcagucccuccagaccuacgugacccagcagcugauccgcgcggccgagauccgggccagcgccaaccuggccgcgaucaagauguccgagugcguccucggccagagcaagcgcguggacuucugcgggaagggcuaccaccugauguccuucccccagagcgcgccccacgggguggucuuccugcacgugaccuacgucccggcccaggagaagaacuucacgaccgcccccgccaucugccacgacggcaaggcccacuucccccgggaggggguguucguguccaacggcacccacugguucgucacccagcgcaacuucuacgagccccagaucaucacgaccgacaacaccuucgugagcggcaacugcgacguggucaucgggaucgugaacaacaccguguacgacccgcuccagcccgagcuggacuccuucaaggaggagcuggacaaguacuucaagaaccacacgagccccgacgucgaccucggcgacaucuccgggaucaacgccagcguggugaacauccagaaggagaucgaccggcugaacgaggucgccaagaaccugaacgagucccucaucgaccugcaggagcugggcaaguacgagcaguacaucaaguggcccugguacaucuggcucggcuucaucgccgggcugaucgcgaucgugauggugaccaucaugcugugcugcaugaccagcugcugcuccugccucaagggcugcugcagcugcggguccugcugcaaguucgacgaggacgacagcgagccgguccugaagggcgugaagcugcacuacaccugaggacuaguuauaagacugacuagcccgaugggccucccaacgggcccuccuccccuccuugcaccgagagaucucaaaggcucuuuucagagccaccaaaaaaaaaaaaaaaaaaaaaaaaaaaaaaaaaaaaaaaaaaaaaaaaaaaaaaaaaaaaaaaaaaaaaaaaaaaaaaaaaaaaaaaaaaaaaaaaaaaaa

SEQ ID NO: 24544 - RNA, 4035 nt, Artificial Sequence
  SARS-CoV-2/Wuhan/WIV05/2019__EPI_ISL_402128 spike protein mRNA gc (1-1273)(S13I_W152C_L452R_D614G)
aggagaaagcuuaccauguucguguuccugguccuccugccccuggugagcauccagugcgugaaccucaccacccgcacgcagcugccgcccgccuacaccaacuccuucacccggggcgucuacuaccccgacaagguguuccgcagcuccgugcugcacagcacccaggaccucuuccugcccuucuucuccaacgucacgugguuccacgccauccacgugagcgggaccaacggcaccaagcgguucgacaacccggugcugcccuucaacgacggggucuacuucgcguccaccgagaaguccaacaucauccgcggcuggaucuucgggacgacccucgacagcaagacccagagccugcugaucgugaacaacgccaccaacguggucaucaaggugugcgaguuccaguucugcaacgaccccuuccucggcguguacuaccacaagaacaacaaguccugcauggagagcgaguuccgggucuacuccagcgccaacaacugcacguucgaguacgugucccagcccuuccugauggaccuggagggcaagcaggggaacuucaagaaccuccgcgaguucguguucaagaacaucgacggcuacuucaagaucuacagcaagcacaccccgaucaaccugguccgggaccugccccagggguucuccgcccucgagccccugguggaccugcccaucggcaucaacaucacccgcuuccagacccuccuggcccugcaccggagcuaccucacgccgggggacuccagcagcggcuggaccgcgggcgccgccgccuacuacgugggguaccugcagccccgcaccuuccugcucaaguacaacgagaacggcaccaucacggacgcggucgacugcgcccuggacccccuguccgagaccaagugcacccucaagagcuucaccguggagaaggggaucuaccagacguccaacuuccgggugcagcccaccgagagcaucguccgcuucccgaacaucaccaaccugugccccuucggcgagguguucaacgccacccgguucgccuccgucuacgccuggaaccgcaagcggaucagcaacugcguggcggacuacuccgugcuguacaacagcgccuccuucagcacguucaagugcuacggcgucucccccaccaagcucaacgaccugugcuucaccaacguguacgccgacagcuucgugauccgcggggacgagguccggcagaucgcccccggccagaccgggaagaucgccgacuacaacuacaagcugccggacgacuucacgggcugcgugaucgcguggaacuccaacaaccucgacagcaaggucgggggcaacuacaacuaccgcuaccggcuguuccgcaaguccaaccugaagcccuucgagcgggacaucagcaccgagaucuaccaggccggcuccacccccugcaacgggguggagggcuucaacugcuacuucccccuccagagcuacggguuccagccgaccaacggcgugggguaccagcccuaccgcguggucgugcuguccuucgagcugcuccacgcccccgccacggugugcggccccaagaaguccaccaaccuggucaagaacaagugcgugaacuucaacuucaacggccugaccgggaccggcgugcucaccgagagcaacaagaaguuccugccguuccagcaguucgggcgcgacaucgccgacacgaccgacgcgguccgggacccccagacccuggagauccuggacaucacccccugcagcuucggcggggugagcgugaucacgccgggcaccaacaccuccaaccaggucgccgugcucuaccagggcgugaacugcaccgagguccccguggccauccacgccgaccagcugacgcccaccuggcgcguguacagcaccggguccaacgucuuccagacccgggccggcugccugaucggggcggagcacgugaacaacagcuacgagugcgacauccccaucggcgccggcaucugcgccuccuaccagacgcagaccaacagcccgcgccgggcccgcuccguggcgagccaguccaucaucgccuacaccaugagccucggggccgagaacuccgucgccuacagcaacaacuccaucgccauccccaccaacuucacgaucagcgugaccaccgagauccugcccguguccaugaccaagacgagcgucgacugcaccauguacaucugcggcgacagcaccgagugcuccaaccugcuccugcaguacgggagcuucugcacccagcugaaccgggcgcucacgggcaucgccguggagcaggacaagaacacccaggagguguucgcccaggucaagcagaucuacaagacgcccccgaucaaggacuucgggggcuucaacuucucccagauccugcccgaccccagcaagcccuccaagcgcagcuucaucgaggaccuccuguucaacaaggugacccuggccgacgccggcuucaucaagcaguacggggacugccugggcgacaucgcggcccgggaccucaucugcgcccagaaguucaacgggcugaccgugcugccgccccuccugaccgacgagaugaucgcccaguacaccuccgcccugcucgcgggcaccaucacgagcggguggaccuucggcgccggcgccgcccugcagauccccuucgcgaugcagauggccuaccgcuucaacgggaucggcgucacccagaacgugcuguacgagaaccagaagcucaucgccaaccaguucaacuccgccaucgggaagauccaggacagccuguccagcaccgccuccgcgcugggcaagcuccaggacguggucaaccagaacgcccaggcccugaacacgcuggugaagcagcucagcuccaacuucggggccaucagcuccgugcugaacgacauccugagccggcucgacaaggucgaggccgaggugcagaucgaccgccugaucaccggccggcugcagucccuccagaccuacgugacccagcagcugauccgcgcggccgagauccgggccagcgccaaccuggccgcgaccaagaugagcgagugcguccucggccaguccaagcgcguggacuucugcgggaagggcuaccaccugaugagcuucccccaguccgccccgcacgggguggucuuccugcacgugacguacguccccgcccaggagaagaacuucaccaccgcccccgcgaucugccacgacggcaaggcccacuucccccgggaggggguguucgugagcaacggcacccacugguucgucacgcagcgcaacuucuacgagccgcagaucaucaccaccgacaacaccuucguguccggcaacugcgacguggucaucgggaucgugaacaacacgguguacgacccccuccagcccgagcuggacagcuucaaggaggagcuggacaaguacuucaagaaccacaccucccccgacgucgaccucggcgacaucagcgggaucaacgccuccguggugaacauccagaaggagaucgaccggcugaacgaggucgccaagaaccugaacgagagccucaucgaccugcaggagcugggcaaguacgagcaguacaucaaguggccgugguacaucuggcucggcuucaucgccgggcugaucgcgaucgugauggugaccaucaugcugugcugcaugaccuccugcugcagcugccucaagggcugcugcuccugcgggagcugcugcaaguucgacgaggacgacuccgagcccguccugaagggcgugaagcugcacuacacgugaggacuaguuauaagacugacuagcccgaugggccucccaacgggcccuccuccccuccuugcaccgagagaucucaaaggcucuuuucagagccaccaaaaaaaaaaaaaaaaaaaaaaaaaaaaaaaaaaaaaaaaaaaaaaaaaaaaaaaaaaaaaaaaaaaaaaaaaaaaaaaaaaaaaaaaaaaaaaaaaaaaa

SEQ ID NO: 24545 - RNA, 4035 nt, Artificial Sequence
  SARS-CoV-2/Wuhan/WIV05/2019__EPI_ISL_402128 spike protein mRNA gc (1-1273)
aggagaaagcuuaccauguucguguuccuggugcugcugccccuggugagcagccagugcgugaaccugaccacccggacccagcugccaccagccuacaccaacagcuucacccggggcgucuacuaccccgacaagguguuccggagcagcguccugcacagcacccaggaccuguuccugcccuucuucagcaacgugaccugguuccacgccauccacgugagcggcaccaacggcaccaagcgguucgacaaccccgugcugcccuucaacgacggcguguacuucgccagcaccgagaagagcaacaucauccggggcuggaucuucggcaccacccuggacagcaagacccagagccugcugaucgugaauaacgccaccaacguggugaucaaggugugcgaguuccaguucugcaacgaccccuuccugggcguguacuaccacaagaacaacaagagcuggauggagagcgaguuccggguguacagcagcgccaacaacugcaccuucgaguacgugagccagcccuuccugauggaccuggagggcaagcagggcaacuucaagaaccugcgggaguucguguucaagaacaucgacggcuacuucaagaucuacagcaagcacaccccaaucaaccuggugcgggaucugccccagggcuucucagcccuggagccccugguggaccugcccaucggcaucaacaucacccgguuccagacccugcuggcccugcaccggagcuaccugaccccaggcgacagcagcagcggguggacagcaggcgcggcugcuuacuacgugggcuaccugcagccccggaccuuccugcugaaguacaacgagaacggcaccaucaccgacgccguggacugcgcccuggacccucugagcgagaccaagugcacccugaagagcuucaccguggagaagggcaucuaccagaccagcaacuuccgggugcagcccaccgagagcaucgugcgguuccccaacaucaccaaccugugccccuucggcgagguguucaacgccacccgguucgccagcguguacgccuggaaccggaagcggaucagcaacugcguggccgacuacagcgugcuguacaacagcgccagcuucagcaccuucaagugcuacggcgugagccccaccaagcugaacgaccugugcuucaccaacguguacgccgacagcuucgugauccguggcgacgaggugcggcagaucgcacccggccagacaggcaagaucgccgacuacaacuacaagcugcccgacgacuucaccggcugcgugaucgccuggaacagcaacaaccucgacagcaaggugggcggcaacuacaacuaccuguaccggcuguuccggaagagcaaccugaagcccuucgagcgggacaucagcaccgagaucuaccaagccggcuccaccccuugcaacggcguggagggcuucaacugcuacuucccucugcagagcuacggcuuccagcccaccaacggcgugggcuaccagcccuaccgggugguggugcugagcuucgagcugcugcacgccccagccaccguguguggccccaagaagagcaccaaccuggugaagaacaagugcgugaacuucaacuucaacggccuuaccggcaccggcgugcugaccgagagcaacaagaaauuccugcccuuucagcaguucggccgggacaucgccgacaccaccgacgcugugcgggauccccagacccuggagauccuggacaucaccccuugcagcuucggcggcgugagcgugaucaccccaggcaccaacaccagcaaccagguggccgugcuguaccaggacgugaacugcaccgaggugcccguggccauccacgccgaccagcugacacccaccuggcgggucuacagcaccggcagcaacguguuccagacccgggccgguugccugaucggcgccgagcacgugaacaacagcuacgagugcgacauccccaucggcgccggcaucugugccagcuaccagacccagaccaauucaccccggagggcaaggagcguggccagccagagcaucaucgccuacaccaugagccugggcgccgagaacagcguggccuacagcaacaacagcaucgccauccccaccaacuucaccaucagcgugaccaccgagauucugcccgugagcaugaccaagaccagcguggacugcaccauguacaucugcggcgacagcaccgagugcagcaaccugcugcugcaguacggcagcuucugcacccagcugaaccgggcccugaccggcaucgccguggagcaggacaagaacacccaggagguguucgcccaggugaagcagaucuacaagaccccucccaucaaggacuucggcggcuucaacuucagccagauccugcccgaccccagcaagcccagcaagcggagcuucaucgaggaccugcuguucaacaaggugacccuagccgacgccggcuucaucaagcaguacggcgacugccucggcgacauagccgcccgggaccugaucugcgcccagaaguucaacggccugaccgugcugccuccccugcugaccgacgagaugaucgcccaguacaccagcgcccuguuagccggaaccaucaccagcggcuggacuuucggcgcuggagccgcucugcagauccccuucgccaugcagauggccuaccgguucaacggcaucggcgugacccagaacgugcuguacgagaaccagaagcugaucgccaaccaguucaacagcgccaucggcaagauccaggacagccugagcagcaccgcuagcgcccugggcaagcugcaggacguggugaaccagaacgcccaggcccugaacacccuggugaagcagcugagcagcaacuucggcgccaucagcagcgugcugaacgacauccugagccggcuggacaaggucgaggccgaggugcagaucgaccggcugaucacuggccggcugcagagccugcagaccuacgugacccagcagcugauccgggccgccgagauucgggccagcgccaaccuggccgccaccaagaugagcgagugcgugcugggccagagcaagcggguggacuucugcggcaagggcuaccaccugaugagcuuuccccagagcgcaccccacggagugguguuccugcacgugaccuacgugcccgcccaggagaagaacuucaccaccgccccagccaucugccacgacggcaaggcccacuuuccccgggagggcguguucgugagcaacggcacccacugguucgugacccagcggaacuucuacgagccccagaucaucaccaccgacaacaccuucgugagcggcaacugcgacguggugaucggcaucgugaacaacaccguguacgauccccugcagcccgagcuggacagcuucaaggaggagcuggacaaguacuucaagaaucacaccagccccgacguggaccugggcgacaucagcggcaucaacgccagcguggugaacauccagaaggagaucgaucggcugaacgagguggccaagaaccugaacgagagccugaucgaccugcaggagcugggcaaguacgagcaguacaucaaguggcccugguacaucuggcugggcuucaucgccggccugaucgccaucgugauggugaccaucaugcugugcugcaugaccagcugcugcagcugccugaagggcuguugcagcugcggcagcugcugcaaguucgacgaggacgacagcgagcccgugcugaagggcgugaagcugcacuacaccugaggacuaguuauaagacugacuagcccgaugggccucccaacgggcccuccuccccuccuugcaccgagagaucucaaaggcucuuuucagagccaccaaaaaaaaaaaaaaaaaaaaaaaaaaaaaaaaaaaaaaaaaaaaaaaaaaaaaaaaaaaaaaaaaaaaaaaaaaaaaaaaaaaaaaaaaaaaaaaaaaaaa

SEQ ID NO: 24546 - RNA, 4035 nt, Artificial Sequence
  SARS-CoV-2/Wuhan/WIV05/2019__EPI_ISL_402128 spike protein mRNA gc (1-1273)(D614G)
aggagaaagcuuaccauguucguguuccuggugcugcugccccuggugagcagccagugcgugaaccugaccacccggacccagcugccaccagccuacaccaacagcuucacccggggcgucuacuaccccgacaagguguuccggagcagcguccugcacagcacccaggaccuguuccugcccuucuucagcaacgugaccugguuccacgccauccacgugagcggcaccaacggcaccaagcgguucgacaaccccgugcugcccuucaacgacggcguguacuucgccagcaccgagaagagcaacaucauccggggcuggaucuucggcaccacccuggacagcaagacccagagccugcugaucgugaauaacgccaccaacguggugaucaaggugugcgaguuccaguucugcaacgaccccuuccugggcguguacuaccacaagaacaacaagagcuggauggagagcgaguuccggguguacagcagcgccaacaacugcaccuucgaguacgugagccagcccuuccugauggaccuggagggcaagcagggcaacuucaagaaccugcgggaguucguguucaagaacaucgacggcuacuucaagaucuacagcaagcacaccccaaucaaccuggugcgggaucugccccagggcuucucagcccuggagccccugguggaccugcccaucggcaucaacaucacccgguuccagacccugcuggcccugcaccggagcuaccugaccccaggcgacagcagcagcggguggacagcaggcgcggcugcuuacuacgugggcuaccugcagccccggaccuuccugcugaaguacaacgagaacggcaccaucaccgacgccguggacugcgcccuggacccucugagcgagaccaagugcacccugaagagcuucaccguggagaagggcaucuaccagaccagcaacuuccgggugcagcccaccgagagcaucgugcgguuccccaacaucaccaaccugugccccuucggcgagguguucaacgccacccgguucgccagcguguacgccuggaaccggaagcggaucagcaacugcguggccgacuacagcgugcuguacaacagcgccagcuucagcaccuucaagugcuacggcgugagccccaccaagcugaacgaccugugcuucaccaacguguacgccgacagcuucgugauccguggcgacgaggugcggcagaucgcacccggccagacaggcaagaucgccgacuacaacuacaagcugcccgacgacuucaccggcugcgugaucgccuggaacagcaacaaccucgacagcaaggugggcggcaacuacaacuaccuguaccggcuguuccggaagagcaaccugaagcccuucgagcgggacaucagcaccgagaucuaccaagccggcuccaccccuugcaacggcguggagggcuucaacugcuacuucccucugcagagcuacggcuuccagcccaccaacggcgugggcuaccagcccuaccgggugguggugcugagcuucgagcugcugcacgccccagccaccguguguggccccaagaagagcaccaaccuggugaagaacaagugcgugaacuucaacuucaacggccuuaccggcaccggcgugcugaccgagagcaacaagaaauuccugcccuuucagcaguucggccgggacaucgccgacaccaccgacgcugugcgggauccccagacccuggagauccuggacaucaccccuugcagcuucggcggcgugagcgugaucaccccaggcaccaacaccagcaaccagguggccgugcuguaccagggcgugaacugcaccgaggugcccguggccauccacgccgaccagcugacacccaccuggcgggucuacagcaccggcagcaacguguuccagacccgggccgguugccugaucggcgccgagcacgugaacaacagcuacgagugcgacauccccaucggcgccggcaucugugccagcuaccagacccagaccaauucaccccggagggcaaggagcguggccagccagagcaucaucgccuacaccaugagccugggcgccgagaacagcguggccuacagcaacaacagcaucgccauccccaccaacuucaccaucagcgugaccaccgagauucugcccgugagcaugaccaagaccagcguggacugcaccauguacaucugcggcgacagcaccgagugcagcaaccugcugcugcaguacggcagcuucugcacccagcugaaccgggcccugaccggcaucgccguggagcaggacaagaacacccaggagguguucgcccaggugaagcagaucuacaagaccccucccaucaaggacuucggcggcuucaacuucagccagauccugcccgaccccagcaagcccagcaagcggagcuucaucgaggaccugcuguucaacaaggugacccuagccgacgccggcuucaucaagcaguacggcgacugccucggcgacauagccgcccgggaccugaucugcgcccagaaguucaacggccugaccgugcugccuccccugcugaccgacgagaugaucgcccaguacaccagcgcccuguuagccggaaccaucaccagcggcuggacuuucggcgcuggagccgcucugcagauccccuucgccaugcagauggccuaccgguucaacggcaucggcgugacccagaacgugcuguacgagaaccagaagcugaucgccaaccaguucaacagcgccaucggcaagauccaggacagccugagcagcaccgcuagcgcccugggcaagcugcaggacguggugaaccagaacgcccaggcccugaacacccuggugaagcagcugagcagcaacuucggcgccaucagcagcgugcugaacgacauccugagccggcuggacaaggucgaggccgaggugcagaucgaccggcugaucacuggccggcugcagagccugcagaccuacgugacccagcagcugauccgggccgccgagauucgggccagcgccaaccuggccgccaccaagaugagcgagugcgugcugggccagagcaagcggguggacuucugcggcaagggcuaccaccugaugagcuuuccccagagcgcaccccacggagugguguuccugcacgugaccuacgugcccgcccaggagaagaacuucaccaccgccccagccaucugccacgacggcaaggcccacuuuccccgggagggcguguucgugagcaacggcacccacugguucgugacccagcggaacuucuacgagccccagaucaucaccaccgacaacaccuucgugagcggcaacugcgacguggugaucggcaucgugaacaacaccguguacgauccccugcagcccgagcuggacagcuucaaggaggagcuggacaaguacuucaagaaucacaccagccccgacguggaccugggcgacaucagcggcaucaacgccagcguggugaacauccagaaggagaucgaucggcugaacgagguggccaagaaccugaacgagagccugaucgaccugcaggagcugggcaaguacgagcaguacaucaaguggcccugguacaucuggcugggcuucaucgccggccugaucgccaucgugauggugaccaucaugcugugcugcaugaccagcugcugcagcugccugaagggcuguugcagcugcggcagcugcugcaaguucgacgaggacgacagcgagcccgugcugaagggcgugaagcugcacuacaccugaggacuaguuauaagacugacuagcccgaugggccucccaacgggcccuccuccccuccuugcaccgagagaucucaaaggcucuuuucagagccaccaaaaaaaaaaaaaaaaaaaaaaaaaaaaaaaaaaaaaaaaaaaaaaaaaaaaaaaaaaaaaaaaaaaaaaaaaaaaaaaaaaaaaaaaaaaaaaaaaaaaa

SEQ ID NO: 24547 - RNA, 4035 nt, Artificial Sequence
  SARS-CoV-2/Wuhan/WIV05/2019__EPI_ISL_402128 spike protein mRNA gc (1-1273)(A222V_D614G)
aggagaaagcuuaccauguucguguuccuggugcugcugccccuggugagcagccagugcgugaaccugaccacccggacccagcugccaccagccuacaccaacagcuucacccggggcgucuacuaccccgacaagguguuccggagcagcguccugcacagcacccaggaccuguuccugcccuucuucagcaacgugaccugguuccacgccauccacgugagcggcaccaacggcaccaagcgguucgacaaccccgugcugcccuucaacgacggcguguacuucgccagcaccgagaagagcaacaucauccggggcuggaucuucggcaccacccuggacagcaagacccagagccugcugaucgugaauaacgccaccaacguggugaucaaggugugcgaguuccaguucugcaacgaccccuuccugggcguguacuaccacaagaacaacaagagcuggauggagagcgaguuccggguguacagcagcgccaacaacugcaccuucgaguacgugagccagcccuuccugauggaccuggagggcaagcagggcaacuucaagaaccugcgggaguucguguucaagaacaucgacggcuacuucaagaucuacagcaagcacaccccaaucaaccuggugcgggaucugccccagggcuucucagugcuggagccccugguggaccugcccaucggcaucaacaucacccgguuccagacccugcuggcccugcaccggagcuaccugaccccaggcgacagcagcagcggguggacagcaggcgcggcugcuuacuacgugggcuaccugcagccccggaccuuccugcugaaguacaacgagaacggcaccaucaccgacgccguggacugcgcccuggacccucugagcgagaccaagugcacccugaagagcuucaccguggagaagggcaucuaccagaccagcaacuuccgggugcagcccaccgagagcaucgugcgguuccccaacaucaccaaccugugccccuucggcgagguguucaacgccacccgguucgccagcguguacgccuggaaccggaagcggaucagcaacugcguggccgacuacagcgugcuguacaacagcgccagcuucagcaccuucaagugcuacggcgugagccccaccaagcugaacgaccugugcuucaccaacguguacgccgacagcuucgugauccguggcgacgaggugcggcagaucgcacccggccagacaggcaagaucgccgacuacaacuacaagcugcccgacgacuucaccggcugcgugaucgccuggaacagcaacaaccucgacagcaaggugggcggcaacuacaacuaccuguaccggcuguuccggaagagcaaccugaagcccuucgagcgggacaucagcaccgagaucuaccaagccggcuccaccccuugcaacggcguggagggcuucaacugcuacuucccucugcagagcuacggcuuccagcccaccaacggcgugggcuaccagcccuaccgggugguggugcugagcuucgagcugcugcacgccccagccaccguguguggccccaagaagagcaccaaccuggugaagaacaagugcgugaacuucaacuucaacggccuuaccggcaccggcgugcugaccgagagcaacaagaaauuccugcccuuucagcaguucggccgggacaucgccgacaccaccgacgcugugcgggauccccagacccuggagauccuggacaucaccccuugcagcuucggcggcgugagcgugaucaccccaggcaccaacaccagcaaccagguggccgugcuguaccagggcgugaacugcaccgaggugcccguggccauccacgccgaccagcugacacccaccuggcgggucuacagcaccggcagcaacguguuccagacccgggccgguugccugaucggcgccgagcacgugaacaacagcuacgagugcgacauccccaucggcgccggcaucugugccagcuaccagacccagaccaauucaccccggagggcaaggagcguggccagccagagcaucaucgccuacaccaugagccugggcgccgagaacagcguggccuacagcaacaacagcaucgccauccccaccaacuucaccaucagcgugaccaccgagauucugcccgugagcaugaccaagaccagcguggacugcaccauguacaucugcggcgacagcaccgagugcagcaaccugcugcugcaguacggcagcuucugcacccagcugaaccgggcccugaccggcaucgccguggagcaggacaagaacacccaggagguguucgcccaggugaagcagaucuacaagaccccucccaucaaggacuucggcggcuucaacuucagccagauccugcccgaccccagcaagcccagcaagcggagcuucaucgaggaccugcuguucaacaaggugacccuagccgacgccggcuucaucaagcaguacggcgacugccucggcgacauagccgcccgggaccugaucugcgcccagaaguucaacggccugaccgugcugccuccccugcugaccgacgagaugaucgcccaguacaccagcgcccuguuagccggaaccaucaccagcggcuggacuuucggcgcuggagccgcucugcagauccccuucgccaugcagauggccuaccgguucaacggcaucggcgugacccagaacgugcuguacgagaaccagaagcugaucgccaaccaguucaacagcgccaucggcaagauccaggacagccugagcagcaccgcuagcgcccugggcaagcugcaggacguggugaaccagaacgcccaggcccugaacacccuggugaagcagcugagcagcaacuucggcgccaucagcagcgugcugaacgacauccugagccggcuggacaaggucgaggccgaggugcagaucgaccggcugaucacuggccggcugcagagccugcagaccuacgugacccagcagcugauccgggccgccgagauucgggccagcgccaaccuggccgccaccaagaugagcgagugcgugcugggccagagcaagcggguggacuucugcggcaagggcuaccaccugaugagcuuuccccagagcgcaccccacggagugguguuccugcacgugaccuacgugcccgcccaggagaagaacuucaccaccgccccagccaucugccacgacggcaaggcccacuuuccccgggagggcguguucgugagcaacggcacccacugguucgugacccagcggaacuucuacgagccccagaucaucaccaccgacaacaccuucgugagcggcaacugcgacguggugaucggcaucgugaacaacaccguguacgauccccugcagcccgagcuggacagcuucaaggaggagcuggacaaguacuucaagaaucacaccagccccgacguggaccugggcgacaucagcggcaucaacgccagcguggugaacauccagaaggagaucgaucggcugaacgagguggccaagaaccugaacgagagccugaucgaccugcaggagcugggcaaguacgagcaguacaucaaguggcccugguacaucuggcugggcuucaucgccggccugaucgccaucgugauggugaccaucaugcugugcugcaugaccagcugcugcagcugccugaagggcuguugcagcugcggcagcugcugcaaguucgacgaggacgacagcgagcccgugcugaagggcgugaagcugcacuacaccugaggacuaguuauaagacugacuagcccgaugggccucccaacgggcccuccuccccuccuugcaccgagagaucucaaaggcucuuuucagagccaccaaaaaaaaaaaaaaaaaaaaaaaaaaaaaaaaaaaaaaaaaaaaaaaaaaaaaaaaaaaaaaaaaaaaaaaaaaaaaaaaaaaaaaaaaaaaaaaaaaaaa

SEQ ID NO: 24548 - RNA, 4035 nt, Artificial Sequence
  SARS-CoV-2/Wuhan/WIV05/2019__EPI_ISL_402128 spike protein mRNA gc (1-1273)(N439K_D614G)
aggagaaagcuuaccauguucguguuccuggugcugcugccccuggugagcagccagugcgugaaccugaccacccggacccagcugccaccagccuacaccaacagcuucacccggggcgucuacuaccccgacaagguguuccggagcagcguccugcacagcacccaggaccuguuccugcccuucuucagcaacgugaccugguuccacgccauccacgugagcggcaccaacggcaccaagcgguucgacaaccccgugcugcccuucaacgacggcguguacuucgccagcaccgagaagagcaacaucauccggggcuggaucuucggcaccacccuggacagcaagacccagagccugcugaucgugaauaacgccaccaacguggugaucaaggugugcgaguuccaguucugcaacgaccccuuccugggcguguacuaccacaagaacaacaagagcuggauggagagcgaguuccggguguacagcagcgccaacaacugcaccuucgaguacgugagccagcccuuccugauggaccuggagggcaagcagggcaacuucaagaaccugcgggaguucguguucaagaacaucgacggcuacuucaagaucuacagcaagcacaccccaaucaaccuggugcgggaucugccccagggcuucucagcccuggagccccugguggaccugcccaucggcaucaacaucacccgguuccagacccugcuggcccugcaccggagcuaccugaccccaggcgacagcagcagcggguggacagcaggcgcggcugcuuacuacgugggcuaccugcagccccggaccuuccugcugaaguacaacgagaacggcaccaucaccgacgccguggacugcgcccuggacccucugagcgagaccaagugcacccugaagagcuucaccguggagaagggcaucuaccagaccagcaacuuccgggugcagcccaccgagagcaucgugcgguuccccaacaucaccaaccugugccccuucggcgagguguucaacgccacccgguucgccagcguguacgccuggaaccggaagcggaucagcaacugcguggccgacuacagcgugcuguacaacagcgccagcuucagcaccuucaagugcuacggcgugagccccaccaagcugaacgaccugugcuucaccaacguguacgccgacagcuucgugauccguggcgacgaggugcggcagaucgcacccggccagacaggcaagaucgccgacuacaacuacaagcugcccgacgacuucaccggcugcgugaucgccuggaacagcaagaaccucgacagcaaggugggcggcaacuacaacuaccuguaccggcuguuccggaagagcaaccugaagcccuucgagcgggacaucagcaccgagaucuaccaagccggcuccaccccuugcaacggcguggagggcuucaacugcuacuucccucugcagagcuacggcuuccagcccaccaacggcgugggcuaccagcccuaccgggugguggugcugagcuucgagcugcugcacgccccagccaccguguguggccccaagaagagcaccaaccuggugaagaacaagugcgugaacuucaacuucaacggccuuaccggcaccggcgugcugaccgagagcaacaagaaauuccugcccuuucagcaguucggccgggacaucgccgacaccaccgacgcugugcgggauccccagacccuggagauccuggacaucaccccuugcagcuucggcggcgugagcgugaucaccccaggcaccaacaccagcaaccagguggccgugcuguaccagggcgugaacugcaccgaggugcccguggccauccacgccgaccagcugacacccaccuggcgggucuacagcaccggcagcaacguguuccagacccgggccgguugccugaucggcgccgagcacgugaacaacagcuacgagugcgacauccccaucggcgccggcaucugugccagcuaccagacccagaccaauucaccccggagggcaaggagcguggccagccagagcaucaucgccuacaccaugagccugggcgccgagaacagcguggccuacagcaacaacagcaucgccauccccaccaacuucaccaucagcgugaccaccgagauucugcccgugagcaugaccaagaccagcguggacugcaccauguacaucugcggcgacagcaccgagugcagcaaccugcugcugcaguacggcagcuucugcacccagcugaaccgggcccugaccggcaucgccguggagcaggacaagaacacccaggagguguucgcccaggugaagcagaucuacaagaccccucccaucaaggacuucggcggcuucaacuucagccagauccugcccgaccccagcaagcccagcaagcggagcuucaucgaggaccugcuguucaacaaggugacccuagccgacgccggcuucaucaagcaguacggcgacugccucggcgacauagccgcccgggaccugaucugcgcccagaaguucaacggccugaccgugcugccuccccugcugaccgacgagaugaucgcccaguacaccagcgcccuguuagccggaaccaucaccagcggcuggacuuucggcgcuggagccgcucugcagauccccuucgccaugcagauggccuaccgguucaacggcaucggcgugacccagaacgugcuguacgagaaccagaagcugaucgccaaccaguucaacagcgccaucggcaagauccaggacagccugagcagcaccgcuagcgcccugggcaagcugcaggacguggugaaccagaacgcccaggcccugaacacccuggugaagcagcugagcagcaacuucggcgccaucagcagcgugcugaacgacauccugagccggcuggacaaggucgaggccgaggugcagaucgaccggcugaucacuggccggcugcagagccugcagaccuacgugacccagcagcugauccgggccgccgagauucgggccagcgccaaccuggccgccaccaagaugagcgagugcgugcugggccagagcaagcggguggacuucugcggcaagggcuaccaccugaugagcuuuccccagagcgcaccccacggagugguguuccugcacgugaccuacgugcccgcccaggagaagaacuucaccaccgccccagccaucugccacgacggcaaggcccacuuuccccgggagggcguguucgugagcaacggcacccacugguucgugacccagcggaacuucuacgagccccagaucaucaccaccgacaacaccuucgugagcggcaacugcgacguggugaucggcaucgugaacaacaccguguacgauccccugcagcccgagcuggacagcuucaaggaggagcuggacaaguacuucaagaaucacaccagccccgacguggaccugggcgacaucagcggcaucaacgccagcguggugaacauccagaaggagaucgaucggcugaacgagguggccaagaaccugaacgagagccugaucgaccugcaggagcugggcaaguacgagcaguacaucaaguggcccugguacaucuggcugggcuucaucgccggccugaucgccaucgugauggugaccaucaugcugugcugcaugaccagcugcugcagcugccugaagggcuguugcagcugcggcagcugcugcaaguucgacgaggacgacagcgagcccgugcugaagggcgugaagcugcacuacaccugaggacuaguuauaagacugacuagcccgaugggccucccaacgggcccuccuccccuccuugcaccgagagaucucaaaggcucuuuucagagccaccaaaaaaaaaaaaaaaaaaaaaaaaaaaaaaaaaaaaaaaaaaaaaaaaaaaaaaaaaaaaaaaaaaaaaaaaaaaaaaaaaaaaaaaaaaaaaaaaaaaaa

SEQ ID NO: 24549 - RNA, 4035 nt, Artificial Sequence
  SARS-CoV-2/Wuhan/WIV05/2019__EPI_ISL_402128 spike protein mRNA gc (1-1273)(S477N_D614G)
aggagaaagcuuaccauguucguguuccuggugcugcugccccuggugagcagccagugcgugaaccugaccacccggacccagcugccaccagccuacaccaacagcuucacccggggcgucuacuaccccgacaagguguuccggagcagcguccugcacagcacccaggaccuguuccugcccuucuucagcaacgugaccugguuccacgccauccacgugagcggcaccaacggcaccaagcgguucgacaaccccgugcugcccuucaacgacggcguguacuucgccagcaccgagaagagcaacaucauccggggcuggaucuucggcaccacccuggacagcaagacccagagccugcugaucgugaauaacgccaccaacguggugaucaaggugugcgaguuccaguucugcaacgaccccuuccugggcguguacuaccacaagaacaacaagagcuggauggagagcgaguuccggguguacagcagcgccaacaacugcaccuucgaguacgugagccagcccuuccugauggaccuggagggcaagcagggcaacuucaagaaccugcgggaguucguguucaagaacaucgacggcuacuucaagaucuacagcaagcacaccccaaucaaccuggugcgggaucugccccagggcuucucagcccuggagccccugguggaccugcccaucggcaucaacaucacccgguuccagacccugcuggcccugcaccggagcuaccugaccccaggcgacagcagcagcggguggacagcaggcgcggcugcuuacuacgugggcuaccugcagccccggaccuuccugcugaaguacaacgagaacggcaccaucaccgacgccguggacugcgcccuggacccucugagcgagaccaagugcacccugaagagcuucaccguggagaagggcaucuaccagaccagcaacuuccgggugcagcccaccgagagcaucgugcgguuccccaacaucaccaaccugugccccuucggcgagguguucaacgccacccgguucgccagcguguacgccuggaaccggaagcggaucagcaacugcguggccgacuacagcgugcuguacaacagcgccagcuucagcaccuucaagugcuacggcgugagccccaccaagcugaacgaccugugcuucaccaacguguacgccgacagcuucgugauccguggcgacgaggugcggcagaucgcacccggccagacaggcaagaucgccgacuacaacuacaagcugcccgacgacuucaccggcugcgugaucgccuggaacagcaacaaccucgacagcaaggugggcggcaacuacaacuaccuguaccggcuguuccggaagagcaaccugaagcccuucgagcgggacaucagcaccgagaucuaccaagccggcaacaccccuugcaacggcguggagggcuucaacugcuacuucccucugcagagcuacggcuuccagcccaccaacggcgugggcuaccagcccuaccgggugguggugcugagcuucgagcugcugcacgccccagccaccguguguggccccaagaagagcaccaaccuggugaagaacaagugcgugaacuucaacuucaacggccuuaccggcaccggcgugcugaccgagagcaacaagaaauuccugcccuuucagcaguucggccgggacaucgccgacaccaccgacgcugugcgggauccccagacccuggagauccuggacaucaccccuugcagcuucggcggcgugagcgugaucaccccaggcaccaacaccagcaaccagguggccgugcuguaccagggcgugaacugcaccgaggugcccguggccauccacgccgaccagcugacacccaccuggcgggucuacagcaccggcagcaacguguuccagacccgggccgguugccugaucggcgccgagcacgugaacaacagcuacgagugcgacauccccaucggcgccggcaucugugccagcuaccagacccagaccaauucaccccggagggcaaggagcguggccagccagagcaucaucgccuacaccaugagccugggcgccgagaacagcguggccuacagcaacaacagcaucgccauccccaccaacuucaccaucagcgugaccaccgagauucugcccgugagcaugaccaagaccagcguggacugcaccauguacaucugcggcgacagcaccgagugcagcaaccugcugcugcaguacggcagcuucugcacccagcugaaccgggcccugaccggcaucgccguggagcaggacaagaacacccaggagguguucgcccaggugaagcagaucuacaagaccccucccaucaaggacuucggcggcuucaacuucagccagauccugcccgaccccagcaagcccagcaagcggagcuucaucgaggaccugcuguucaacaaggugacccuagccgacgccggcuucaucaagcaguacggcgacugccucggcgacauagccgcccgggaccugaucugcgcccagaaguucaacggccugaccgugcugccuccccugcugaccgacgagaugaucgcccaguacaccagcgcccuguuagccggaaccaucaccagcggcuggacuuucggcgcuggagccgcucugcagauccccuucgccaugcagauggccuaccgguucaacggcaucggcgugacccagaacgugcuguacgagaaccagaagcugaucgccaaccaguucaacagcgccaucggcaagauccaggacagccugagcagcaccgcuagcgcccugggcaagcugcaggacguggugaaccagaacgcccaggcccugaacacccuggugaagcagcugagcagcaacuucggcgccaucagcagcgugcugaacgacauccugagccggcuggacaaggucgaggccgaggugcagaucgaccggcugaucacuggccggcugcagagccugcagaccuacgugacccagcagcugauccgggccgccgagauucgggccagcgccaaccuggccgccaccaagaugagcgagugcgugcugggccagagcaagcggguggacuucugcggcaagggcuaccaccugaugagcuuuccccagagcgcaccccacggagugguguuccugcacgugaccuacgugcccgcccaggagaagaacuucaccaccgccccagccaucugccacgacggcaaggcccacuuuccccgggagggcguguucgugagcaacggcacccacugguucgugacccagcggaacuucuacgagccccagaucaucaccaccgacaacaccuucgugagcggcaacugcgacguggugaucggcaucgugaacaacaccguguacgauccccugcagcccgagcuggacagcuucaaggaggagcuggacaaguacuucaagaaucacaccagccccgacguggaccugggcgacaucagcggcaucaacgccagcguggugaacauccagaaggagaucgaucggcugaacgagguggccaagaaccugaacgagagccugaucgaccugcaggagcugggcaaguacgagcaguacaucaaguggcccugguacaucuggcugggcuucaucgccggccugaucgccaucgugauggugaccaucaugcugugcugcaugaccagcugcugcagcugccugaagggcuguugcagcugcggcagcugcugcaaguucgacgaggacgacagcgagcccgugcugaagggcgugaagcugcacuacaccugaggacuaguuauaagacugacuagcccgaugggccucccaacgggcccuccuccccuccuugcaccgagagaucucaaaggcucuuuucagagccaccaaaaaaaaaaaaaaaaaaaaaaaaaaaaaaaaaaaaaaaaaaaaaaaaaaaaaaaaaaaaaaaaaaaaaaaaaaaaaaaaaaaaaaaaaaaaaaaaaaaaa

SEQ ID NO: 24550 - RNA, 4035 nt, Artificial Sequence
  SARS-CoV-2/Wuhan/WIV05/2019__EPI_ISL_402128 spike protein mRNA gc (1-1273)(N501Y_D614G)
aggagaaagcuuaccauguucguguuccuggugcugcugccccuggugagcagccagugcgugaaccugaccacccggacccagcugccaccagccuacaccaacagcuucacccggggcgucuacuaccccgacaagguguuccggagcagcguccugcacagcacccaggaccuguuccugcccuucuucagcaacgugaccugguuccacgccauccacgugagcggcaccaacggcaccaagcgguucgacaaccccgugcugcccuucaacgacggcguguacuucgccagcaccgagaagagcaacaucauccggggcuggaucuucggcaccacccuggacagcaagacccagagccugcugaucgugaauaacgccaccaacguggugaucaaggugugcgaguuccaguucugcaacgaccccuuccugggcguguacuaccacaagaacaacaagagcuggauggagagcgaguuccggguguacagcagcgccaacaacugcaccuucgaguacgugagccagcccuuccugauggaccuggagggcaagcagggcaacuucaagaaccugcgggaguucguguucaagaacaucgacggcuacuucaagaucuacagcaagcacaccccaaucaaccuggugcgggaucugccccagggcuucucagcccuggagccccugguggaccugcccaucggcaucaacaucacccgguuccagacccugcuggcccugcaccggagcuaccugaccccaggcgacagcagcagcggguggacagcaggcgcggcugcuuacuacgugggcuaccugcagccccggaccuuccugcugaaguacaacgagaacggcaccaucaccgacgccguggacugcgcccuggacccucugagcgagaccaagugcacccugaagagcuucaccguggagaagggcaucuaccagaccagcaacuuccgggugcagcccaccgagagcaucgugcgguuccccaacaucaccaaccugugccccuucggcgagguguucaacgccacccgguucgccagcguguacgccuggaaccggaagcggaucagcaacugcguggccgacuacagcgugcuguacaacagcgccagcuucagcaccuucaagugcuacggcgugagccccaccaagcugaacgaccugugcuucaccaacguguacgccgacagcuucgugauccguggcgacgaggugcggcagaucgcacccggccagacaggcaagaucgccgacuacaacuacaagcugcccgacgacuucaccggcugcgugaucgccuggaacagcaacaaccucgacagcaaggugggcggcaacuacaacuaccuguaccggcuguuccggaagagcaaccugaagcccuucgagcgggacaucagcaccgagaucuaccaagccggcuccaccccuugcaacggcguggagggcuucaacugcuacuucccucugcagagcuacggcuuccagcccaccuacggcgugggcuaccagcccuaccgggugguggugcugagcuucgagcugcugcacgccccagccaccguguguggccccaagaagagcaccaaccuggugaagaacaagugcgugaacuucaacuucaacggccuuaccggcaccggcgugcugaccgagagcaacaagaaauuccugcccuuucagcaguucggccgggacaucgccgacaccaccgacgcugugcgggauccccagacccuggagauccuggacaucaccccuugcagcuucggcggcgugagcgugaucaccccaggcaccaacaccagcaaccagguggccgugcuguaccagggcgugaacugcaccgaggugcccguggccauccacgccgaccagcugacacccaccuggcgggucuacagcaccggcagcaacguguuccagacccgggccgguugccugaucggcgccgagcacgugaacaacagcuacgagugcgacauccccaucggcgccggcaucugugccagcuaccagacccagaccaauucaccccggagggcaaggagcguggccagccagagcaucaucgccuacaccaugagccugggcgccgagaacagcguggccuacagcaacaacagcaucgccauccccaccaacuucaccaucagcgugaccaccgagauucugcccgugagcaugaccaagaccagcguggacugcaccauguacaucugcggcgacagcaccgagugcagcaaccugcugcugcaguacggcagcuucugcacccagcugaaccgggcccugaccggcaucgccguggagcaggacaagaacacccaggagguguucgcccaggugaagcagaucuacaagaccccucccaucaaggacuucggcggcuucaacuucagccagauccugcccgaccccagcaagcccagcaagcggagcuucaucgaggaccugcuguucaacaaggugacccuagccgacgccggcuucaucaagcaguacggcgacugccucggcgacauagccgcccgggaccugaucugcgcccagaaguucaacggccugaccgugcugccuccccugcugaccgacgagaugaucgcccaguacaccagcgcccuguuagccggaaccaucaccagcggcuggacuuucggcgcuggagccgcucugcagauccccuucgccaugcagauggccuaccgguucaacggcaucggcgugacccagaacgugcuguacgagaaccagaagcugaucgccaaccaguucaacagcgccaucggcaagauccaggacagccugagcagcaccgcuagcgcccugggcaagcugcaggacguggugaaccagaacgcccaggcccugaacacccuggugaagcagcugagcagcaacuucggcgccaucagcagcgugcugaacgacauccugagccggcuggacaaggucgaggccgaggugcagaucgaccggcugaucacuggccggcugcagagccugcagaccuacgugacccagcagcugauccgggccgccgagauucgggccagcgccaaccuggccgccaccaagaugagcgagugcgugcugggccagagcaagcggguggacuucugcggcaagggcuaccaccugaugagcuuuccccagagcgcaccccacggagugguguuccugcacgugaccuacgugcccgcccaggagaagaacuucaccaccgccccagccaucugccacgacggcaaggcccacuuuccccgggagggcguguucgugagcaacggcacccacugguucgugacccagcggaacuucuacgagccccagaucaucaccaccgacaacaccuucgugagcggcaacugcgacguggugaucggcaucgugaacaacaccguguacgauccccugcagcccgagcuggacagcuucaaggaggagcuggacaaguacuucaagaaucacaccagccccgacguggaccugggcgacaucagcggcaucaacgccagcguggugaacauccagaaggagaucgaucggcugaacgagguggccaagaaccugaacgagagccugaucgaccugcaggagcugggcaaguacgagcaguacaucaaguggcccugguacaucuggcugggcuucaucgccggccugaucgccaucgugauggugaccaucaugcugugcugcaugaccagcugcugcagcugccugaagggcuguugcagcugcggcagcugcugcaaguucgacgaggacgacagcgagcccgugcugaagggcgugaagcugcacuacaccugaggacuaguuauaagacugacuagcccgaugggccucccaacgggcccuccuccccuccuugcaccgagagaucucaaaggcucuuuucagagccaccaaaaaaaaaaaaaaaaaaaaaaaaaaaaaaaaaaaaaaaaaaaaaaaaaaaaaaaaaaaaaaaaaaaaaaaaaaaaaaaaaaaaaaaaaaaaaaaaaaaaa

SEQ ID NO: 24551 - RNA, 4029 nt, Artificial Sequence
  SARS-CoV-2/Wuhan/WIV05/2019__EPI_ISL_402128 spike protein mRNA gc (1-1273)(H69del_V70del_D614G)
aggagaaagcuuaccauguucguguuccuggugcugcugccccuggugagcagccagugcgugaaccugaccacccggacccagcugccaccagccuacaccaacagcuucacccggggcgucuacuaccccgacaagguguuccggagcagcguccugcacagcacccaggaccuguuccugcccuucuucagcaacgugaccugguuccacgccaucagcggcaccaacggcaccaagcgguucgacaaccccgugcugcccuucaacgacggcguguacuucgccagcaccgagaagagcaacaucauccggggcuggaucuucggcaccacccuggacagcaagacccagagccugcugaucgugaauaacgccaccaacguggugaucaaggugugcgaguuccaguucugcaacgaccccuuccugggcguguacuaccacaagaacaacaagagcuggauggagagcgaguuccggguguacagcagcgccaacaacugcaccuucgaguacgugagccagcccuuccugauggaccuggagggcaagcagggcaacuucaagaaccugcgggaguucguguucaagaacaucgacggcuacuucaagaucuacagcaagcacaccccaaucaaccuggugcgggaucugccccagggcuucucagcccuggagccccugguggaccugcccaucggcaucaacaucacccgguuccagacccugcuggcccugcaccggagcuaccugaccccaggcgacagcagcagcggguggacagcaggcgcggcugcuuacuacgugggcuaccugcagccccggaccuuccugcugaaguacaacgagaacggcaccaucaccgacgccguggacugcgcccuggacccucugagcgagaccaagugcacccugaagagcuucaccguggagaagggcaucuaccagaccagcaacuuccgggugcagcccaccgagagcaucgugcgguuccccaacaucaccaaccugugccccuucggcgagguguucaacgccacccgguucgccagcguguacgccuggaaccggaagcggaucagcaacugcguggccgacuacagcgugcuguacaacagcgccagcuucagcaccuucaagugcuacggcgugagccccaccaagcugaacgaccugugcuucaccaacguguacgccgacagcuucgugauccguggcgacgaggugcggcagaucgcacccggccagacaggcaagaucgccgacuacaacuacaagcugcccgacgacuucaccggcugcgugaucgccuggaacagcaacaaccucgacagcaaggugggcggcaacuacaacuaccuguaccggcuguuccggaagagcaaccugaagcccuucgagcgggacaucagcaccgagaucuaccaagccggcuccaccccuugcaacggcguggagggcuucaacugcuacuucccucugcagagcuacggcuuccagcccaccaacggcgugggcuaccagcccuaccgggugguggugcugagcuucgagcugcugcacgccccagccaccguguguggccccaagaagagcaccaaccuggugaagaacaagugcgugaacuucaacuucaacggccuuaccggcaccggcgugcugaccgagagcaacaagaaauuccugcccuuucagcaguucggccgggacaucgccgacaccaccgacgcugugcgggauccccagacccuggagauccuggacaucaccccuugcagcuucggcggcgugagcgugaucaccccaggcaccaacaccagcaaccagguggccgugcuguaccagggcgugaacugcaccgaggugcccguggccauccacgccgaccagcugacacccaccuggcgggucuacagcaccggcagcaacguguuccagacccgggccgguugccugaucggcgccgagcacgugaacaacagcuacgagugcgacauccccaucggcgccggcaucugugccagcuaccagacccagaccaauucaccccggagggcaaggagcguggccagccagagcaucaucgccuacaccaugagccugggcgccgagaacagcguggccuacagcaacaacagcaucgccauccccaccaacuucaccaucagcgugaccaccgagauucugcccgugagcaugaccaagaccagcguggacugcaccauguacaucugcggcgacagcaccgagugcagcaaccugcugcugcaguacggcagcuucugcacccagcugaaccgggcccugaccggcaucgccguggagcaggacaagaacacccaggagguguucgcccaggugaagcagaucuacaagaccccucccaucaaggacuucggcggcuucaacuucagccagauccugcccgaccccagcaagcccagcaagcggagcuucaucgaggaccugcuguucaacaaggugacccuagccgacgccggcuucaucaagcaguacggcgacugccucggcgacauagccgcccgggaccugaucugcgcccagaaguucaacggccugaccgugcugccuccccugcugaccgacgagaugaucgcccaguacaccagcgcccuguuagccggaaccaucaccagcggcuggacuuucggcgcuggagccgcucugcagauccccuucgccaugcagauggccuaccgguucaacggcaucggcgugacccagaacgugcuguacgagaaccagaagcugaucgccaaccaguucaacagcgccaucggcaagauccaggacagccugagcagcaccgcuagcgcccugggcaagcugcaggacguggugaaccagaacgcccaggcccugaacacccuggugaagcagcugagcagcaacuucggcgccaucagcagcgugcugaacgacauccugagccggcuggacaaggucgaggccgaggugcagaucgaccggcugaucacuggccggcugcagagccugcagaccuacgugacccagcagcugauccgggccgccgagauucgggccagcgccaaccuggccgccaccaagaugagcgagugcgugcugggccagagcaagcggguggacuucugcggcaagggcuaccaccugaugagcuuuccccagagcgcaccccacggagugguguuccugcacgugaccuacgugcccgcccaggagaagaacuucaccaccgccccagccaucugccacgacggcaaggcccacuuuccccgggagggcguguucgugagcaacggcacccacugguucgugacccagcggaacuucuacgagccccagaucaucaccaccgacaacaccuucgugagcggcaacugcgacguggugaucggcaucgugaacaacaccguguacgauccccugcagcccgagcuggacagcuucaaggaggagcuggacaaguacuucaagaaucacaccagccccgacguggaccugggcgacaucagcggcaucaacgccagcguggugaacauccagaaggagaucgaucggcugaacgagguggccaagaaccugaacgagagccugaucgaccugcaggagcugggcaaguacgagcaguacaucaaguggcccugguacaucuggcugggcuucaucgccggccugaucgccaucgugauggugaccaucaugcugugcugcaugaccagcugcugcagcugccugaagggcuguugcagcugcggcagcugcugcaaguucgacgaggacgacagcgagcccgugcugaagggcgugaagcugcacuacaccugaggacuaguuauaagacugacuagcccgaugggccucccaacgggcccuccuccccuccuugcaccgagagaucucaaaggcucuuuucagagccaccaaaaaaaaaaaaaaaaaaaaaaaaaaaaaaaaaaaaaaaaaaaaaaaaaaaaaaaaaaaaaaaaaaaaaaaaaaaaaaaaaaaaaaaaaaaaaaaaaaaaa

SEQ ID NO: 24552 - RNA, 4035 nt, Artificial Sequence
  SARS-CoV-2/Wuhan/WIV05/2019__EPI_ISL_402128 spike protein mRNA gc (1-1273)(Y453F_D614G)
aggagaaagcuuaccauguucguguuccuggugcugcugccccuggugagcagccagugcgugaaccugaccacccggacccagcugccaccagccuacaccaacagcuucacccggggcgucuacuaccccgacaagguguuccggagcagcguccugcacagcacccaggaccuguuccugcccuucuucagcaacgugaccugguuccacgccauccacgugagcggcaccaacggcaccaagcgguucgacaaccccgugcugcccuucaacgacggcguguacuucgccagcaccgagaagagcaacaucauccggggcuggaucuucggcaccacccuggacagcaagacccagagccugcugaucgugaauaacgccaccaacguggugaucaaggugugcgaguuccaguucugcaacgaccccuuccugggcguguacuaccacaagaacaacaagagcuggauggagagcgaguuccggguguacagcagcgccaacaacugcaccuucgaguacgugagccagcccuuccugauggaccuggagggcaagcagggcaacuucaagaaccugcgggaguucguguucaagaacaucgacggcuacuucaagaucuacagcaagcacaccccaaucaaccuggugcgggaucugccccagggcuucucagcccuggagccccugguggaccugcccaucggcaucaacaucacccgguuccagacccugcuggcccugcaccggagcuaccugaccccaggcgacagcagcagcggguggacagcaggcgcggcugcuuacuacgugggcuaccugcagccccggaccuuccugcugaaguacaacgagaacggcaccaucaccgacgccguggacugcgcccuggacccucugagcgagaccaagugcacccugaagagcuucaccguggagaagggcaucuaccagaccagcaacuuccgggugcagcccaccgagagcaucgugcgguuccccaacaucaccaaccugugccccuucggcgagguguucaacgccacccgguucgccagcguguacgccuggaaccggaagcggaucagcaacugcguggccgacuacagcgugcuguacaacagcgccagcuucagcaccuucaagugcuacggcgugagccccaccaagcugaacgaccugugcuucaccaacguguacgccgacagcuucgugauccguggcgacgaggugcggcagaucgcacccggccagacaggcaagaucgccgacuacaacuacaagcugcccgacgacuucaccggcugcgugaucgccuggaacagcaacaaccucgacagcaaggugggcggcaacuacaacuaccuguuccggcuguuccggaagagcaaccugaagcccuucgagcgggacaucagcaccgagaucuaccaagccggcuccaccccuugcaacggcguggagggcuucaacugcuacuucccucugcagagcuacggcuuccagcccaccaacggcgugggcuaccagcccuaccgggugguggugcugagcuucgagcugcugcacgccccagccaccguguguggccccaagaagagcaccaaccuggugaagaacaagugcgugaacuucaacuucaacggccuuaccggcaccggcgugcugaccgagagcaacaagaaauuccugcccuuucagcaguucggccgggacaucgccgacaccaccgacgcugugcgggauccccagacccuggagauccuggacaucaccccuugcagcuucggcggcgugagcgugaucaccccaggcaccaacaccagcaaccagguggccgugcuguaccagggcgugaacugcaccgaggugcccguggccauccacgccgaccagcugacacccaccuggcgggucuacagcaccggcagcaacguguuccagacccgggccgguugccugaucggcgccgagcacgugaacaacagcuacgagugcgacauccccaucggcgccggcaucugugccagcuaccagacccagaccaauucaccccggagggcaaggagcguggccagccagagcaucaucgccuacaccaugagccugggcgccgagaacagcguggccuacagcaacaacagcaucgccauccccaccaacuucaccaucagcgugaccaccgagauucugcccgugagcaugaccaagaccagcguggacugcaccauguacaucugcggcgacagcaccgagugcagcaaccugcugcugcaguacggcagcuucugcacccagcugaaccgggcccugaccggcaucgccguggagcaggacaagaacacccaggagguguucgcccaggugaagcagaucuacaagaccccucccaucaaggacuucggcggcuucaacuucagccagauccugcccgaccccagcaagcccagcaagcggagcuucaucgaggaccugcuguucaacaaggugacccuagccgacgccggcuucaucaagcaguacggcgacugccucggcgacauagccgcccgggaccugaucugcgcccagaaguucaacggccugaccgugcugccuccccugcugaccgacgagaugaucgcccaguacaccagcgcccuguuagccggaaccaucaccagcggcuggacuuucggcgcuggagccgcucugcagauccccuucgccaugcagauggccuaccgguucaacggcaucggcgugacccagaacgugcuguacgagaaccagaagcugaucgccaaccaguucaacagcgccaucggcaagauccaggacagccugagcagcaccgcuagcgcccugggcaagcugcaggacguggugaaccagaacgcccaggcccugaacacccuggugaagcagcugagcagcaacuucggcgccaucagcagcgugcugaacgacauccugagccggcuggacaaggucgaggccgaggugcagaucgaccggcugaucacuggccggcugcagagccugcagaccuacgugacccagcagcugauccgggccgccgagauucgggccagcgccaaccuggccgccaccaagaugagcgagugcgugcugggccagagcaagcggguggacuucugcggcaagggcuaccaccugaugagcuuuccccagagcgcaccccacggagugguguuccugcacgugaccuacgugcccgcccaggagaagaacuucaccaccgccccagccaucugccacgacggcaaggcccacuuuccccgggagggcguguucgugagcaacggcacccacugguucgugacccagcggaacuucuacgagccccagaucaucaccaccgacaacaccuucgugagcggcaacugcgacguggugaucggcaucgugaacaacaccguguacgauccccugcagcccgagcuggacagcuucaaggaggagcuggacaaguacuucaagaaucacaccagccccgacguggaccugggcgacaucagcggcaucaacgccagcguggugaacauccagaaggagaucgaucggcugaacgagguggccaagaaccugaacgagagccugaucgaccugcaggagcugggcaaguacgagcaguacaucaaguggcccugguacaucuggcugggcuucaucgccggccugaucgccaucgugauggugaccaucaugcugugcugcaugaccagcugcugcagcugccugaagggcuguugcagcugcggcagcugcugcaaguucgacgaggacgacagcgagcccgugcugaagggcgugaagcugcacuacaccugaggacuaguuauaagacugacuagcccgaugggccucccaacgggcccuccuccccuccuugcaccgagagaucucaaaggcucuuuucagagccaccaaaaaaaaaaaaaaaaaaaaaaaaaaaaaaaaaaaaaaaaaaaaaaaaaaaaaaaaaaaaaaaaaaaaaaaaaaaaaaaaaaaaaaaaaaaaaaaaaaaaa

SEQ ID NO: 24553 - RNA, 4035 nt, Artificial Sequence
  SARS-CoV-2/Wuhan/WIV05/2019__EPI_ISL_402128 spike protein mRNA gc (1-1273)(D614G_I692V)
aggagaaagcuuaccauguucguguuccuggugcugcugccccuggugagcagccagugcgugaaccugaccacccggacccagcugccaccagccuacaccaacagcuucacccggggcgucuacuaccccgacaagguguuccggagcagcguccugcacagcacccaggaccuguuccugcccuucuucagcaacgugaccugguuccacgccauccacgugagcggcaccaacggcaccaagcgguucgacaaccccgugcugcccuucaacgacggcguguacuucgccagcaccgagaagagcaacaucauccggggcuggaucuucggcaccacccuggacagcaagacccagagccugcugaucgugaauaacgccaccaacguggugaucaaggugugcgaguuccaguucugcaacgaccccuuccugggcguguacuaccacaagaacaacaagagcuggauggagagcgaguuccggguguacagcagcgccaacaacugcaccuucgaguacgugagccagcccuuccugauggaccuggagggcaagcagggcaacuucaagaaccugcgggaguucguguucaagaacaucgacggcuacuucaagaucuacagcaagcacaccccaaucaaccuggugcgggaucugccccagggcuucucagcccuggagccccugguggaccugcccaucggcaucaacaucacccgguuccagacccugcuggcccugcaccggagcuaccugaccccaggcgacagcagcagcggguggacagcaggcgcggcugcuuacuacgugggcuaccugcagccccggaccuuccugcugaaguacaacgagaacggcaccaucaccgacgccguggacugcgcccuggacccucugagcgagaccaagugcacccugaagagcuucaccguggagaagggcaucuaccagaccagcaacuuccgggugcagcccaccgagagcaucgugcgguuccccaacaucaccaaccugugccccuucggcgagguguucaacgccacccgguucgccagcguguacgccuggaaccggaagcggaucagcaacugcguggccgacuacagcgugcuguacaacagcgccagcuucagcaccuucaagugcuacggcgugagccccaccaagcugaacgaccugugcuucaccaacguguacgccgacagcuucgugauccguggcgacgaggugcggcagaucgcacccggccagacaggcaagaucgccgacuacaacuacaagcugcccgacgacuucaccggcugcgugaucgccuggaacagcaacaaccucgacagcaaggugggcggcaacuacaacuaccuguaccggcuguuccggaagagcaaccugaagcccuucgagcgggacaucagcaccgagaucuaccaagccggcuccaccccuugcaacggcguggagggcuucaacugcuacuucccucugcagagcuacggcuuccagcccaccaacggcgugggcuaccagcccuaccgggugguggugcugagcuucgagcugcugcacgccccagccaccguguguggccccaagaagagcaccaaccuggugaagaacaagugcgugaacuucaacuucaacggccuuaccggcaccggcgugcugaccgagagcaacaagaaauuccugcccuuucagcaguucggccgggacaucgccgacaccaccgacgcugugcgggauccccagacccuggagauccuggacaucaccccuugcagcuucggcggcgugagcgugaucaccccaggcaccaacaccagcaaccagguggccgugcuguaccagggcgugaacugcaccgaggugcccguggccauccacgccgaccagcugacacccaccuggcgggucuacagcaccggcagcaacguguuccagacccgggccgguugccugaucggcgccgagcacgugaacaacagcuacgagugcgacauccccaucggcgccggcaucugugccagcuaccagacccagaccaauucaccccggagggcaaggagcguggccagccagagcgugaucgccuacaccaugagccugggcgccgagaacagcguggccuacagcaacaacagcaucgccauccccaccaacuucaccaucagcgugaccaccgagauucugcccgugagcaugaccaagaccagcguggacugcaccauguacaucugcggcgacagcaccgagugcagcaaccugcugcugcaguacggcagcuucugcacccagcugaaccgggcccugaccggcaucgccguggagcaggacaagaacacccaggagguguucgcccaggugaagcagaucuacaagaccccucccaucaaggacuucggcggcuucaacuucagccagauccugcccgaccccagcaagcccagcaagcggagcuucaucgaggaccugcuguucaacaaggugacccuagccgacgccggcuucaucaagcaguacggcgacugccucggcgacauagccgcccgggaccugaucugcgcccagaaguucaacggccugaccgugcugccuccccugcugaccgacgagaugaucgcccaguacaccagcgcccuguuagccggaaccaucaccagcggcuggacuuucggcgcuggagccgcucugcagauccccuucgccaugcagauggccuaccgguucaacggcaucggcgugacccagaacgugcuguacgagaaccagaagcugaucgccaaccaguucaacagcgccaucggcaagauccaggacagccugagcagcaccgcuagcgcccugggcaagcugcaggacguggugaaccagaacgcccaggcccugaacacccuggugaagcagcugagcagcaacuucggcgccaucagcagcgugcugaacgacauccugagccggcuggacaaggucgaggccgaggugcagaucgaccggcugaucacuggccggcugcagagccugcagaccuacgugacccagcagcugauccgggccgccgagauucgggccagcgccaaccuggccgccaccaagaugagcgagugcgugcugggccagagcaagcggguggacuucugcggcaagggcuaccaccugaugagcuuuccccagagcgcaccccacggagugguguuccugcacgugaccuacgugcccgcccaggagaagaacuucaccaccgccccagccaucugccacgacggcaaggcccacuuuccccgggagggcguguucgugagcaacggcacccacugguucgugacccagcggaacuucuacgagccccagaucaucaccaccgacaacaccuucgugagcggcaacugcgacguggugaucggcaucgugaacaacaccguguacgauccccugcagcccgagcuggacagcuucaaggaggagcuggacaaguacuucaagaaucacaccagccccgacguggaccugggcgacaucagcggcaucaacgccagcguggugaacauccagaaggagaucgaucggcugaacgagguggccaagaaccugaacgagagccugaucgaccugcaggagcugggcaaguacgagcaguacaucaaguggcccugguacaucuggcugggcuucaucgccggccugaucgccaucgugauggugaccaucaugcugugcugcaugaccagcugcugcagcugccugaagggcuguugcagcugcggcagcugcugcaaguucgacgaggacgacagcgagcccgugcugaagggcgugaagcugcacuacaccugaggacuaguuauaagacugacuagcccgaugggccucccaacgggcccuccuccccuccuugcaccgagagaucucaaaggcucuuuucagagccaccaaaaaaaaaaaaaaaaaaaaaaaaaaaaaaaaaaaaaaaaaaaaaaaaaaaaaaaaaaaaaaaaaaaaaaaaaaaaaaaaaaaaaaaaaaaaaaaaaaaaa

SEQ ID NO: 24554 - RNA, 4035 nt, Artificial Sequence
  SARS-CoV-2/Wuhan/WIV05/2019__EPI_ISL_402128 spike protein mRNA gc (1-1273)(D614G_M1229I)
aggagaaagcuuaccauguucguguuccuggugcugcugccccuggugagcagccagugcgugaaccugaccacccggacccagcugccaccagccuacaccaacagcuucacccggggcgucuacuaccccgacaagguguuccggagcagcguccugcacagcacccaggaccuguuccugcccuucuucagcaacgugaccugguuccacgccauccacgugagcggcaccaacggcaccaagcgguucgacaaccccgugcugcccuucaacgacggcguguacuucgccagcaccgagaagagcaacaucauccggggcuggaucuucggcaccacccuggacagcaagacccagagccugcugaucgugaauaacgccaccaacguggugaucaaggugugcgaguuccaguucugcaacgaccccuuccugggcguguacuaccacaagaacaacaagagcuggauggagagcgaguuccggguguacagcagcgccaacaacugcaccuucgaguacgugagccagcccuuccugauggaccuggagggcaagcagggcaacuucaagaaccugcgggaguucguguucaagaacaucgacggcuacuucaagaucuacagcaagcacaccccaaucaaccuggugcgggaucugccccagggcuucucagcccuggagccccugguggaccugcccaucggcaucaacaucacccgguuccagacccugcuggcccugcaccggagcuaccugaccccaggcgacagcagcagcggguggacagcaggcgcggcugcuuacuacgugggcuaccugcagccccggaccuuccugcugaaguacaacgagaacggcaccaucaccgacgccguggacugcgcccuggacccucugagcgagaccaagugcacccugaagagcuucaccguggagaagggcaucuaccagaccagcaacuuccgggugcagcccaccgagagcaucgugcgguuccccaacaucaccaaccugugccccuucggcgagguguucaacgccacccgguucgccagcguguacgccuggaaccggaagcggaucagcaacugcguggccgacuacagcgugcuguacaacagcgccagcuucagcaccuucaagugcuacggcgugagccccaccaagcugaacgaccugugcuucaccaacguguacgccgacagcuucgugauccguggcgacgaggugcggcagaucgcacccggccagacaggcaagaucgccgacuacaacuacaagcugcccgacgacuucaccggcugcgugaucgccuggaacagcaacaaccucgacagcaaggugggcggcaacuacaacuaccuguaccggcuguuccggaagagcaaccugaagcccuucgagcgggacaucagcaccgagaucuaccaagccggcuccaccccuugcaacggcguggagggcuucaacugcuacuucccucugcagagcuacggcuuccagcccaccaacggcgugggcuaccagcccuaccgggugguggugcugagcuucgagcugcugcacgccccagccaccguguguggccccaagaagagcaccaaccuggugaagaacaagugcgugaacuucaacuucaacggccuuaccggcaccggcgugcugaccgagagcaacaagaaauuccugcccuuucagcaguucggccgggacaucgccgacaccaccgacgcugugcgggauccccagacccuggagauccuggacaucaccccuugcagcuucggcggcgugagcgugaucaccccaggcaccaacaccagcaaccagguggccgugcuguaccagggcgugaacugcaccgaggugcccguggccauccacgccgaccagcugacacccaccuggcgggucuacagcaccggcagcaacguguuccagacccgggccgguugccugaucggcgccgagcacgugaacaacagcuacgagugcgacauccccaucggcgccggcaucugugccagcuaccagacccagaccaauucaccccggagggcaaggagcguggccagccagagcaucaucgccuacaccaugagccugggcgccgagaacagcguggccuacagcaacaacagcaucgccauccccaccaacuucaccaucagcgugaccaccgagauucugcccgugagcaugaccaagaccagcguggacugcaccauguacaucugcggcgacagcaccgagugcagcaaccugcugcugcaguacggcagcuucugcacccagcugaaccgggcccugaccggcaucgccguggagcaggacaagaacacccaggagguguucgcccaggugaagcagaucuacaagaccccucccaucaaggacuucggcggcuucaacuucagccagauccugcccgaccccagcaagcccagcaagcggagcuucaucgaggaccugcuguucaacaaggugacccuagccgacgccggcuucaucaagcaguacggcgacugccucggcgacauagccgcccgggaccugaucugcgcccagaaguucaacggccugaccgugcugccuccccugcugaccgacgagaugaucgcccaguacaccagcgcccuguuagccggaaccaucaccagcggcuggacuuucggcgcuggagccgcucugcagauccccuucgccaugcagauggccuaccgguucaacggcaucggcgugacccagaacgugcuguacgagaaccagaagcugaucgccaaccaguucaacagcgccaucggcaagauccaggacagccugagcagcaccgcuagcgcccugggcaagcugcaggacguggugaaccagaacgcccaggcccugaacacccuggugaagcagcugagcagcaacuucggcgccaucagcagcgugcugaacgacauccugagccggcuggacaaggucgaggccgaggugcagaucgaccggcugaucacuggccggcugcagagccugcagaccuacgugacccagcagcugauccgggccgccgagauucgggccagcgccaaccuggccgccaccaagaugagcgagugcgugcugggccagagcaagcggguggacuucugcggcaagggcuaccaccugaugagcuuuccccagagcgcaccccacggagugguguuccugcacgugaccuacgugcccgcccaggagaagaacuucaccaccgccccagccaucugccacgacggcaaggcccacuuuccccgggagggcguguucgugagcaacggcacccacugguucgugacccagcggaacuucuacgagccccagaucaucaccaccgacaacaccuucgugagcggcaacugcgacguggugaucggcaucgugaacaacaccguguacgauccccugcagcccgagcuggacagcuucaaggaggagcuggacaaguacuucaagaaucacaccagccccgacguggaccugggcgacaucagcggcaucaacgccagcguggugaacauccagaaggagaucgaucggcugaacgagguggccaagaaccugaacgagagccugaucgaccugcaggagcugggcaaguacgagcaguacaucaaguggcccugguacaucuggcugggcuucaucgccggccugaucgccaucgugaucgugaccaucaugcugugcugcaugaccagcugcugcagcugccugaagggcuguugcagcugcggcagcugcugcaaguucgacgaggacgacagcgagcccgugcugaagggcgugaagcugcacuacaccugaggacuaguuauaagacugacuagcccgaugggccucccaacgggcccuccuccccuccuugcaccgagagaucucaaaggcucuuuucagagccaccaaaaaaaaaaaaaaaaaaaaaaaaaaaaaaaaaaaaaaaaaaaaaaaaaaaaaaaaaaaaaaaaaaaaaaaaaaaaaaaaaaaaaaaaaaaaaaaaaaaaa

SEQ ID NO: 24555 - RNA, 4029 nt, Artificial Sequence
  SARS-CoV-2/Wuhan/WIV05/2019__EPI_ISL_402128 spike protein mRNA gc (1-1273)(H69del_V70del_A222V_Y453F_S477N_D614G_I692V)
aggagaaagcuuaccauguucguguuccuggugcugcugccccuggugagcagccagugcgugaaccugaccacccggacccagcugccaccagccuacaccaacagcuucacccggggcgucuacuaccccgacaagguguuccggagcagcguccugcacagcacccaggaccuguuccugcccuucuucagcaacgugaccugguuccacgccaucagcggcaccaacggcaccaagcgguucgacaaccccgugcugcccuucaacgacggcguguacuucgccagcaccgagaagagcaacaucauccggggcuggaucuucggcaccacccuggacagcaagacccagagccugcugaucgugaauaacgccaccaacguggugaucaaggugugcgaguuccaguucugcaacgaccccuuccugggcguguacuaccacaagaacaacaagagcuggauggagagcgaguuccggguguacagcagcgccaacaacugcaccuucgaguacgugagccagcccuuccugauggaccuggagggcaagcagggcaacuucaagaaccugcgggaguucguguucaagaacaucgacggcuacuucaagaucuacagcaagcacaccccaaucaaccuggugcgggaucugccccagggcuucucagugcuggagccccugguggaccugcccaucggcaucaacaucacccgguuccagacccugcuggcccugcaccggagcuaccugaccccaggcgacagcagcagcggguggacagcaggcgcggcugcuuacuacgugggcuaccugcagccccggaccuuccugcugaaguacaacgagaacggcaccaucaccgacgccguggacugcgcccuggacccucugagcgagaccaagugcacccugaagagcuucaccguggagaagggcaucuaccagaccagcaacuuccgggugcagcccaccgagagcaucgugcgguuccccaacaucaccaaccugugccccuucggcgagguguucaacgccacccgguucgccagcguguacgccuggaaccggaagcggaucagcaacugcguggccgacuacagcgugcuguacaacagcgccagcuucagcaccuucaagugcuacggcgugagccccaccaagcugaacgaccugugcuucaccaacguguacgccgacagcuucgugauccguggcgacgaggugcggcagaucgcacccggccagacaggcaagaucgccgacuacaacuacaagcugcccgacgacuucaccggcugcgugaucgccuggaacagcaacaaccucgacagcaaggugggcggcaacuacaacuaccuguuccggcuguuccggaagagcaaccugaagcccuucgagcgggacaucagcaccgagaucuaccaagccggcaacaccccuugcaacggcguggagggcuucaacugcuacuucccucugcagagcuacggcuuccagcccaccaacggcgugggcuaccagcccuaccgggugguggugcugagcuucgagcugcugcacgccccagccaccguguguggccccaagaagagcaccaaccuggugaagaacaagugcgugaacuucaacuucaacggccuuaccggcaccggcgugcugaccgagagcaacaagaaauuccugcccuuucagcaguucggccgggacaucgccgacaccaccgacgcugugcgggauccccagacccuggagauccuggacaucaccccuugcagcuucggcggcgugagcgugaucaccccaggcaccaacaccagcaaccagguggccgugcuguaccagggcgugaacugcaccgaggugcccguggccauccacgccgaccagcugacacccaccuggcgggucuacagcaccggcagcaacguguuccagacccgggccgguugccugaucggcgccgagcacgugaacaacagcuacgagugcgacauccccaucggcgccggcaucugugccagcuaccagacccagaccaauucaccccggagggcaaggagcguggccagccagagcgugaucgccuacaccaugagccugggcgccgagaacagcguggccuacagcaacaacagcaucgccauccccaccaacuucaccaucagcgugaccaccgagauucugcccgugagcaugaccaagaccagcguggacugcaccauguacaucugcggcgacagcaccgagugcagcaaccugcugcugcaguacggcagcuucugcacccagcugaaccgggcccugaccggcaucgccguggagcaggacaagaacacccaggagguguucgcccaggugaagcagaucuacaagaccccucccaucaaggacuucggcggcuucaacuucagccagauccugcccgaccccagcaagcccagcaagcggagcuucaucgaggaccugcuguucaacaaggugacccuagccgacgccggcuucaucaagcaguacggcgacugccucggcgacauagccgcccgggaccugaucugcgcccagaaguucaacggccugaccgugcugccuccccugcugaccgacgagaugaucgcccaguacaccagcgcccuguuagccggaaccaucaccagcggcuggacuuucggcgcuggagccgcucugcagauccccuucgccaugcagauggccuaccgguucaacggcaucggcgugacccagaacgugcuguacgagaaccagaagcugaucgccaaccaguucaacagcgccaucggcaagauccaggacagccugagcagcaccgcuagcgcccugggcaagcugcaggacguggugaaccagaacgcccaggcccugaacacccuggugaagcagcugagcagcaacuucggcgccaucagcagcgugcugaacgacauccugagccggcuggacaaggucgaggccgaggugcagaucgaccggcugaucacuggccggcugcagagccugcagaccuacgugacccagcagcugauccgggccgccgagauucgggccagcgccaaccuggccgccaccaagaugagcgagugcgugcugggccagagcaagcggguggacuucugcggcaagggcuaccaccugaugagcuuuccccagagcgcaccccacggagugguguuccugcacgugaccuacgugcccgcccaggagaagaacuucaccaccgccccagccaucugccacgacggcaaggcccacuuuccccgggagggcguguucgugagcaacggcacccacugguucgugacccagcggaacuucuacgagccccagaucaucaccaccgacaacaccuucgugagcggcaacugcgacguggugaucggcaucgugaacaacaccguguacgauccccugcagcccgagcuggacagcuucaaggaggagcuggacaaguacuucaagaaucacaccagccccgacguggaccugggcgacaucagcggcaucaacgccagcguggugaacauccagaaggagaucgaucggcugaacgagguggccaagaaccugaacgagagccugaucgaccugcaggagcugggcaaguacgagcaguacaucaaguggcccugguacaucuggcugggcuucaucgccggccugaucgccaucgugauggugaccaucaugcugugcugcaugaccagcugcugcagcugccugaagggcuguugcagcugcggcagcugcugcaaguucgacgaggacgacagcgagcccgugcugaagggcgugaagcugcacuacaccugaggacuaguuauaagacugacuagcccgaugggccucccaacgggcccuccuccccuccuugcaccgagagaucucaaaggcucuuuucagagccaccaaaaaaaaaaaaaaaaaaaaaaaaaaaaaaaaaaaaaaaaaaaaaaaaaaaaaaaaaaaaaaaaaaaaaaaaaaaaaaaaaaaaaaaaaaaaaaaaaaaaa

SEQ ID NO: 24556 - RNA, 4029 nt, Artificial Sequence
  SARS-CoV-2/Wuhan/WIV05/2019__EPI_ISL_402128 spike protein mRNA gc (1-1273)(H69del_V70del_Y453F_D614G_I692V_M1229I)
aggagaaagcuuaccauguucguguuccuggugcugcugccccuggugagcagccagugcgugaaccugaccacccggacccagcugccaccagccuacaccaacagcuucacccggggcgucuacuaccccgacaagguguuccggagcagcguccugcacagcacccaggaccuguuccugcccuucuucagcaacgugaccugguuccacgccaucagcggcaccaacggcaccaagcgguucgacaaccccgugcugcccuucaacgacggcguguacuucgccagcaccgagaagagcaacaucauccggggcuggaucuucggcaccacccuggacagcaagacccagagccugcugaucgugaauaacgccaccaacguggugaucaaggugugcgaguuccaguucugcaacgaccccuuccugggcguguacuaccacaagaacaacaagagcuggauggagagcgaguuccggguguacagcagcgccaacaacugcaccuucgaguacgugagccagcccuuccugauggaccuggagggcaagcagggcaacuucaagaaccugcgggaguucguguucaagaacaucgacggcuacuucaagaucuacagcaagcacaccccaaucaaccuggugcgggaucugccccagggcuucucagcccuggagccccugguggaccugcccaucggcaucaacaucacccgguuccagacccugcuggcccugcaccggagcuaccugaccccaggcgacagcagcagcggguggacagcaggcgcggcugcuuacuacgugggcuaccugcagccccggaccuuccugcugaaguacaacgagaacggcaccaucaccgacgccguggacugcgcccuggacccucugagcgagaccaagugcacccugaagagcuucaccguggagaagggcaucuaccagaccagcaacuuccgggugcagcccaccgagagcaucgugcgguuccccaacaucaccaaccugugccccuucggcgagguguucaacgccacccgguucgccagcguguacgccuggaaccggaagcggaucagcaacugcguggccgacuacagcgugcuguacaacagcgccagcuucagcaccuucaagugcuacggcgugagccccaccaagcugaacgaccugugcuucaccaacguguacgccgacagcuucgugauccguggcgacgaggugcggcagaucgcacccggccagacaggcaagaucgccgacuacaacuacaagcugcccgacgacuucaccggcugcgugaucgccuggaacagcaacaaccucgacagcaaggugggcggcaacuacaacuaccuguuccggcuguuccggaagagcaaccugaagcccuucgagcgggacaucagcaccgagaucuaccaagccggcuccaccccuugcaacggcguggagggcuucaacugcuacuucccucugcagagcuacggcuuccagcccaccaacggcgugggcuaccagcccuaccgggugguggugcugagcuucgagcugcugcacgccccagccaccguguguggccccaagaagagcaccaaccuggugaagaacaagugcgugaacuucaacuucaacggccuuaccggcaccggcgugcugaccgagagcaacaagaaauuccugcccuuucagcaguucggccgggacaucgccgacaccaccgacgcugugcgggauccccagacccuggagauccuggacaucaccccuugcagcuucggcggcgugagcgugaucaccccaggcaccaacaccagcaaccagguggccgugcuguaccagggcgugaacugcaccgaggugcccguggccauccacgccgaccagcugacacccaccuggcgggucuacagcaccggcagcaacguguuccagacccgggccgguugccugaucggcgccgagcacgugaacaacagcuacgagugcgacauccccaucggcgccggcaucugugccagcuaccagacccagaccaauucaccccggagggcaaggagcguggccagccagagcgugaucgccuacaccaugagccugggcgccgagaacagcguggccuacagcaacaacagcaucgccauccccaccaacuucaccaucagcgugaccaccgagauucugcccgugagcaugaccaagaccagcguggacugcaccauguacaucugcggcgacagcaccgagugcagcaaccugcugcugcaguacggcagcuucugcacccagcugaaccgggcccugaccggcaucgccguggagcaggacaagaacacccaggagguguucgcccaggugaagcagaucuacaagaccccucccaucaaggacuucggcggcuucaacuucagccagauccugcccgaccccagcaagcccagcaagcggagcuucaucgaggaccugcuguucaacaaggugacccuagccgacgccggcuucaucaagcaguacggcgacugccucggcgacauagccgcccgggaccugaucugcgcccagaaguucaacggccugaccgugcugccuccccugcugaccgacgagaugaucgcccaguacaccagcgcccuguuagccggaaccaucaccagcggcuggacuuucggcgcuggagccgcucugcagauccccuucgccaugcagauggccuaccgguucaacggcaucggcgugacccagaacgugcuguacgagaaccagaagcugaucgccaaccaguucaacagcgccaucggcaagauccaggacagccugagcagcaccgcuagcgcccugggcaagcugcaggacguggugaaccagaacgcccaggcccugaacacccuggugaagcagcugagcagcaacuucggcgccaucagcagcgugcugaacgacauccugagccggcuggacaaggucgaggccgaggugcagaucgaccggcugaucacuggccggcugcagagccugcagaccuacgugacccagcagcugauccgggccgccgagauucgggccagcgccaaccuggccgccaccaagaugagcgagugcgugcugggccagagcaagcggguggacuucugcggcaagggcuaccaccugaugagcuuuccccagagcgcaccccacggagugguguuccugcacgugaccuacgugcccgcccaggagaagaacuucaccaccgccccagccaucugccacgacggcaaggcccacuuuccccgggagggcguguucgugagcaacggcacccacugguucgugacccagcggaacuucuacgagccccagaucaucaccaccgacaacaccuucgugagcggcaacugcgacguggugaucggcaucgugaacaacaccguguacgauccccugcagcccgagcuggacagcuucaaggaggagcuggacaaguacuucaagaaucacaccagccccgacguggaccugggcgacaucagcggcaucaacgccagcguggugaacauccagaaggagaucgaucggcugaacgagguggccaagaaccugaacgagagccugaucgaccugcaggagcugggcaaguacgagcaguacaucaaguggcccugguacaucuggcugggcuucaucgccggccugaucgccaucgugaucgugaccaucaugcugugcugcaugaccagcugcugcagcugccugaagggcuguugcagcugcggcagcugcugcaaguucgacgaggacgacagcgagcccgugcugaagggcgugaagcugcacuacaccugaggacuaguuauaagacugacuagcccgaugggccucccaacgggcccuccuccccuccuugcaccgagagaucucaaaggcucuuuucagagccaccaaaaaaaaaaaaaaaaaaaaaaaaaaaaaaaaaaaaaaaaaaaaaaaaaaaaaaaaaaaaaaaaaaaaaaaaaaaaaaaaaaaaaaaaaaaaaaaaaaaaa

SEQ ID NO: 24557 - RNA, 4026 nt, Artificial Sequence
  SARS-CoV-2/Wuhan/WIV05/2019__EPI_ISL_402128 spike protein mRNA gc (1-1273)(H69del_V70del_Y144del_N501Y_A570D_D614G_P681H_T716I_S982 A_D1118H)
aggagaaagcuuaccauguucguguuccuggugcugcugccccuggugagcagccagugcgugaaccugaccacccggacccagcugccaccagccuacaccaacagcuucacccggggcgucuacuaccccgacaagguguuccggagcagcguccugcacagcacccaggaccuguuccugcccuucuucagcaacgugaccugguuccacgccaucagcggcaccaacggcaccaagcgguucgacaaccccgugcugcccuucaacgacggcguguacuucgccagcaccgagaagagcaacaucauccggggcuggaucuucggcaccacccuggacagcaagacccagagccugcugaucgugaauaacgccaccaacguggugaucaaggugugcgaguuccaguucugcaacgaccccuuccugggcguguaccacaagaacaacaagagcuggauggagagcgaguuccggguguacagcagcgccaacaacugcaccuucgaguacgugagccagcccuuccugauggaccuggagggcaagcagggcaacuucaagaaccugcgggaguucguguucaagaacaucgacggcuacuucaagaucuacagcaagcacaccccaaucaaccuggugcgggaucugccccagggcuucucagcccuggagccccugguggaccugcccaucggcaucaacaucacccgguuccagacccugcuggcccugcaccggagcuaccugaccccaggcgacagcagcagcggguggacagcaggcgcggcugcuuacuacgugggcuaccugcagccccggaccuuccugcugaaguacaacgagaacggcaccaucaccgacgccguggacugcgcccuggacccucugagcgagaccaagugcacccugaagagcuucaccguggagaagggcaucuaccagaccagcaacuuccgggugcagcccaccgagagcaucgugcgguuccccaacaucaccaaccugugccccuucggcgagguguucaacgccacccgguucgccagcguguacgccuggaaccggaagcggaucagcaacugcguggccgacuacagcgugcuguacaacagcgccagcuucagcaccuucaagugcuacggcgugagccccaccaagcugaacgaccugugcuucaccaacguguacgccgacagcuucgugauccguggcgacgaggugcggcagaucgcacccggccagacaggcaagaucgccgacuacaacuacaagcugcccgacgacuucaccggcugcgugaucgccuggaacagcaacaaccucgacagcaaggugggcggcaacuacaacuaccuguaccggcuguuccggaagagcaaccugaagcccuucgagcgggacaucagcaccgagaucuaccaagccggcuccaccccuugcaacggcguggagggcuucaacugcuacuucccucugcagagcuacggcuuccagcccaccuacggcgugggcuaccagcccuaccgggugguggugcugagcuucgagcugcugcacgccccagccaccguguguggccccaagaagagcaccaaccuggugaagaacaagugcgugaacuucaacuucaacggccuuaccggcaccggcgugcugaccgagagcaacaagaaauuccugcccuuucagcaguucggccgggacaucgacgacaccaccgacgcugugcgggauccccagacccuggagauccuggacaucaccccuugcagcuucggcggcgugagcgugaucaccccaggcaccaacaccagcaaccagguggccgugcuguaccagggcgugaacugcaccgaggugcccguggccauccacgccgaccagcugacacccaccuggcgggucuacagcaccggcagcaacguguuccagacccgggccgguugccugaucggcgccgagcacgugaacaacagcuacgagugcgacauccccaucggcgccggcaucugugccagcuaccagacccagaccaauucacaccggagggcaaggagcguggccagccagagcaucaucgccuacaccaugagccugggcgccgagaacagcguggccuacagcaacaacagcaucgccauccccaucaacuucaccaucagcgugaccaccgagauucugcccgugagcaugaccaagaccagcguggacugcaccauguacaucugcggcgacagcaccgagugcagcaaccugcugcugcaguacggcagcuucugcacccagcugaaccgggcccugaccggcaucgccguggagcaggacaagaacacccaggagguguucgcccaggugaagcagaucuacaagaccccucccaucaaggacuucggcggcuucaacuucagccagauccugcccgaccccagcaagcccagcaagcggagcuucaucgaggaccugcuguucaacaaggugacccuagccgacgccggcuucaucaagcaguacggcgacugccucggcgacauagccgcccgggaccugaucugcgcccagaaguucaacggccugaccgugcugccuccccugcugaccgacgagaugaucgcccaguacaccagcgcccuguuagccggaaccaucaccagcggcuggacuuucggcgcuggagccgcucugcagauccccuucgccaugcagauggccuaccgguucaacggcaucggcgugacccagaacgugcuguacgagaaccagaagcugaucgccaaccaguucaacagcgccaucggcaagauccaggacagccugagcagcaccgcuagcgcccugggcaagcugcaggacguggugaaccagaacgcccaggcccugaacacccuggugaagcagcugagcagcaacuucggcgccaucagcagcgugcugaacgacauccuggcccggcuggacaaggucgaggccgaggugcagaucgaccggcugaucacuggccggcugcagagccugcagaccuacgugacccagcagcugauccgggccgccgagauucgggccagcgccaaccuggccgccaccaagaugagcgagugcgugcugggccagagcaagcggguggacuucugcggcaagggcuaccaccugaugagcuuuccccagagcgcaccccacggagugguguuccugcacgugaccuacgugcccgcccaggagaagaacuucaccaccgccccagccaucugccacgacggcaaggcccacuuuccccgggagggcguguucgugagcaacggcacccacugguucgugacccagcggaacuucuacgagccccagaucaucaccacccacaacaccuucgugagcggcaacugcgacguggugaucggcaucgugaacaacaccguguacgauccccugcagcccgagcuggacagcuucaaggaggagcuggacaaguacuucaagaaucacaccagccccgacguggaccugggcgacaucagcggcaucaacgccagcguggugaacauccagaaggagaucgaucggcugaacgagguggccaagaaccugaacgagagccugaucgaccugcaggagcugggcaaguacgagcaguacaucaaguggcccugguacaucuggcugggcuucaucgccggccugaucgccaucgugauggugaccaucaugcugugcugcaugaccagcugcugcagcugccugaagggcuguugcagcugcggcagcugcugcaaguucgacgaggacgacagcgagcccgugcugaagggcgugaagcugcacuacaccugaggacuaguuauaagacugacuagcccgaugggccucccaacgggcccuccuccccuccuugcaccgagagaucucaaaggcucuuuucagagccaccaaaaaaaaaaaaaaaaaaaaaaaaaaaaaaaaaaaaaaaaaaaaaaaaaaaaaaaaaaaaaaaaaaaaaaaaaaaaaaaaaaaaaaaaaaaaaaaaaaaaa

SEQ ID NO: 24558 - RNA, 4035 nt, Artificial Sequence
  SARS-CoV-2/Wuhan/WIV05/2019__EPI_ISL_402128 spike protein mRNA gc (1-1273)(K417N_E484K_N501Y_D614G)
aggagaaagcuuaccauguucguguuccuggugcugcugccccuggugagcagccagugcgugaaccugaccacccggacccagcugccaccagccuacaccaacagcuucacccggggcgucuacuaccccgacaagguguuccggagcagcguccugcacagcacccaggaccuguuccugcccuucuucagcaacgugaccugguuccacgccauccacgugagcggcaccaacggcaccaagcgguucgacaaccccgugcugcccuucaacgacggcguguacuucgccagcaccgagaagagcaacaucauccggggcuggaucuucggcaccacccuggacagcaagacccagagccugcugaucgugaauaacgccaccaacguggugaucaaggugugcgaguuccaguucugcaacgaccccuuccugggcguguacuaccacaagaacaacaagagcuggauggagagcgaguuccggguguacagcagcgccaacaacugcaccuucgaguacgugagccagcccuuccugauggaccuggagggcaagcagggcaacuucaagaaccugcgggaguucguguucaagaacaucgacggcuacuucaagaucuacagcaagcacaccccaaucaaccuggugcgggaucugccccagggcuucucagcccuggagccccugguggaccugcccaucggcaucaacaucacccgguuccagacccugcuggcccugcaccggagcuaccugaccccaggcgacagcagcagcggguggacagcaggcgcggcugcuuacuacgugggcuaccugcagccccggaccuuccugcugaaguacaacgagaacggcaccaucaccgacgccguggacugcgcccuggacccucugagcgagaccaagugcacccugaagagcuucaccguggagaagggcaucuaccagaccagcaacuuccgggugcagcccaccgagagcaucgugcgguuccccaacaucaccaaccugugccccuucggcgagguguucaacgccacccgguucgccagcguguacgccuggaaccggaagcggaucagcaacugcguggccgacuacagcgugcuguacaacagcgccagcuucagcaccuucaagugcuacggcgugagccccaccaagcugaacgaccugugcuucaccaacguguacgccgacagcuucgugauccguggcgacgaggugcggcagaucgcacccggccagacaggcaacaucgccgacuacaacuacaagcugcccgacgacuucaccggcugcgugaucgccuggaacagcaacaaccucgacagcaaggugggcggcaacuacaacuaccuguaccggcuguuccggaagagcaaccugaagcccuucgagcgggacaucagcaccgagaucuaccaagccggcuccaccccuugcaacggcgugaagggcuucaacugcuacuucccucugcagagcuacggcuuccagcccaccuacggcgugggcuaccagcccuaccgggugguggugcugagcuucgagcugcugcacgccccagccaccguguguggccccaagaagagcaccaaccuggugaagaacaagugcgugaacuucaacuucaacggccuuaccggcaccggcgugcugaccgagagcaacaagaaauuccugcccuuucagcaguucggccgggacaucgccgacaccaccgacgcugugcgggauccccagacccuggagauccuggacaucaccccuugcagcuucggcggcgugagcgugaucaccccaggcaccaacaccagcaaccagguggccgugcuguaccagggcgugaacugcaccgaggugcccguggccauccacgccgaccagcugacacccaccuggcgggucuacagcaccggcagcaacguguuccagacccgggccgguugccugaucggcgccgagcacgugaacaacagcuacgagugcgacauccccaucggcgccggcaucugugccagcuaccagacccagaccaauucaccccggagggcaaggagcguggccagccagagcaucaucgccuacaccaugagccugggcgccgagaacagcguggccuacagcaacaacagcaucgccauccccaccaacuucaccaucagcgugaccaccgagauucugcccgugagcaugaccaagaccagcguggacugcaccauguacaucugcggcgacagcaccgagugcagcaaccugcugcugcaguacggcagcuucugcacccagcugaaccgggcccugaccggcaucgccguggagcaggacaagaacacccaggagguguucgcccaggugaagcagaucuacaagaccccucccaucaaggacuucggcggcuucaacuucagccagauccugcccgaccccagcaagcccagcaagcggagcuucaucgaggaccugcuguucaacaaggugacccuagccgacgccggcuucaucaagcaguacggcgacugccucggcgacauagccgcccgggaccugaucugcgcccagaaguucaacggccugaccgugcugccuccccugcugaccgacgagaugaucgcccaguacaccagcgcccuguuagccggaaccaucaccagcggcuggacuuucggcgcuggagccgcucugcagauccccuucgccaugcagauggccuaccgguucaacggcaucggcgugacccagaacgugcuguacgagaaccagaagcugaucgccaaccaguucaacagcgccaucggcaagauccaggacagccugagcagcaccgcuagcgcccugggcaagcugcaggacguggugaaccagaacgcccaggcccugaacacccuggugaagcagcugagcagcaacuucggcgccaucagcagcgugcugaacgacauccugagccggcuggacaaggucgaggccgaggugcagaucgaccggcugaucacuggccggcugcagagccugcagaccuacgugacccagcagcugauccgggccgccgagauucgggccagcgccaaccuggccgccaccaagaugagcgagugcgugcugggccagagcaagcggguggacuucugcggcaagggcuaccaccugaugagcuuuccccagagcgcaccccacggagugguguuccugcacgugaccuacgugcccgcccaggagaagaacuucaccaccgccccagccaucugccacgacggcaaggcccacuuuccccgggagggcguguucgugagcaacggcacccacugguucgugacccagcggaacuucuacgagccccagaucaucaccaccgacaacaccuucgugagcggcaacugcgacguggugaucggcaucgugaacaacaccguguacgauccccugcagcccgagcuggacagcuucaaggaggagcuggacaaguacuucaagaaucacaccagccccgacguggaccugggcgacaucagcggcaucaacgccagcguggugaacauccagaaggagaucgaucggcugaacgagguggccaagaaccugaacgagagccugaucgaccugcaggagcugggcaaguacgagcaguacaucaaguggcccugguacaucuggcugggcuucaucgccggccugaucgccaucgugauggugaccaucaugcugugcugcaugaccagcugcugcagcugccugaagggcuguugcagcugcggcagcugcugcaaguucgacgaggacgacagcgagcccgugcugaagggcgugaagcugcacuacaccugaggacuaguuauaagacugacuagcccgaugggccucccaacgggcccuccuccccuccuugcaccgagagaucucaaaggcucuuuucagagccaccaaaaaaaaaaaaaaaaaaaaaaaaaaaaaaaaaaaaaaaaaaaaaaaaaaaaaaaaaaaaaaaaaaaaaaaaaaaaaaaaaaaaaaaaaaaaaaaaaaaaa

SEQ ID NO: 24559 - RNA, 4026 nt, Artificial Sequence
  SARS-CoV-2/Wuhan/WIV05/2019__EPI_ISL_402128 spike protein mRNA gc (1-1273)(L18F_D80A_D215G_L242del_A243del_L244del_R246I_K417N_E484 K_N501Y_D614G_A701V)
aggagaaagcuuaccauguucguguuccuggugcugcugccccuggugagcagccagugcgugaacuucaccacccggacccagcugccaccagccuacaccaacagcuucacccggggcgucuacuaccccgacaagguguuccggagcagcguccugcacagcacccaggaccuguuccugcccuucuucagcaacgugaccugguuccacgccauccacgugagcggcaccaacggcaccaagcgguucgccaaccccgugcugcccuucaacgacggcguguacuucgccagcaccgagaagagcaacaucauccggggcuggaucuucggcaccacccuggacagcaagacccagagccugcugaucgugaauaacgccaccaacguggugaucaaggugugcgaguuccaguucugcaacgaccccuuccugggcguguacuaccacaagaacaacaagagcuggauggagagcgaguuccggguguacagcagcgccaacaacugcaccuucgaguacgugagccagcccuuccugauggaccuggagggcaagcagggcaacuucaagaaccugcgggaguucguguucaagaacaucgacggcuacuucaagaucuacagcaagcacaccccaaucaaccuggugcggggccugccccagggcuucucagcccuggagccccugguggaccugcccaucggcaucaacaucacccgguuccagacccugcacaucagcuaccugaccccaggcgacagcagcagcggguggacagcaggcgcggcugcuuacuacgugggcuaccugcagccccggaccuuccugcugaaguacaacgagaacggcaccaucaccgacgccguggacugcgcccuggacccucugagcgagaccaagugcacccugaagagcuucaccguggagaagggcaucuaccagaccagcaacuuccgggugcagcccaccgagagcaucgugcgguuccccaacaucaccaaccugugccccuucggcgagguguucaacgccacccgguucgccagcguguacgccuggaaccggaagcggaucagcaacugcguggccgacuacagcgugcuguacaacagcgccagcuucagcaccuucaagugcuacggcgugagccccaccaagcugaacgaccugugcuucaccaacguguacgccgacagcuucgugauccguggcgacgaggugcggcagaucgcacccggccagacaggcaacaucgccgacuacaacuacaagcugcccgacgacuucaccggcugcgugaucgccuggaacagcaacaaccucgacagcaaggugggcggcaacuacaacuaccuguaccggcuguuccggaagagcaaccugaagcccuucgagcgggacaucagcaccgagaucuaccaagccggcuccaccccuugcaacggcgugaagggcuucaacugcuacuucccucugcagagcuacggcuuccagcccaccuacggcgugggcuaccagcccuaccgggugguggugcugagcuucgagcugcugcacgccccagccaccguguguggccccaagaagagcaccaaccuggugaagaacaagugcgugaacuucaacuucaacggccuuaccggcaccggcgugcugaccgagagcaacaagaaauuccugcccuuucagcaguucggccgggacaucgccgacaccaccgacgcugugcgggauccccagacccuggagauccuggacaucaccccuugcagcuucggcggcgugagcgugaucaccccaggcaccaacaccagcaaccagguggccgugcuguaccagggcgugaacugcaccgaggugcccguggccauccacgccgaccagcugacacccaccuggcgggucuacagcaccggcagcaacguguuccagacccgggccgguugccugaucggcgccgagcacgugaacaacagcuacgagugcgacauccccaucggcgccggcaucugugccagcuaccagacccagaccaauucaccccggagggcaaggagcguggccagccagagcaucaucgccuacaccaugagccugggcguggagaacagcguggccuacagcaacaacagcaucgccauccccaccaacuucaccaucagcgugaccaccgagauucugcccgugagcaugaccaagaccagcguggacugcaccauguacaucugcggcgacagcaccgagugcagcaaccugcugcugcaguacggcagcuucugcacccagcugaaccgggcccugaccggcaucgccguggagcaggacaagaacacccaggagguguucgcccaggugaagcagaucuacaagaccccucccaucaaggacuucggcggcuucaacuucagccagauccugcccgaccccagcaagcccagcaagcggagcuucaucgaggaccugcuguucaacaaggugacccuagccgacgccggcuucaucaagcaguacggcgacugccucggcgacauagccgcccgggaccugaucugcgcccagaaguucaacggccugaccgugcugccuccccugcugaccgacgagaugaucgcccaguacaccagcgcccuguuagccggaaccaucaccagcggcuggacuuucggcgcuggagccgcucugcagauccccuucgccaugcagauggccuaccgguucaacggcaucggcgugacccagaacgugcuguacgagaaccagaagcugaucgccaaccaguucaacagcgccaucggcaagauccaggacagccugagcagcaccgcuagcgcccugggcaagcugcaggacguggugaaccagaacgcccaggcccugaacacccuggugaagcagcugagcagcaacuucggcgccaucagcagcgugcugaacgacauccugagccggcuggacaaggucgaggccgaggugcagaucgaccggcugaucacuggccggcugcagagccugcagaccuacgugacccagcagcugauccgggccgccgagauucgggccagcgccaaccuggccgccaccaagaugagcgagugcgugcugggccagagcaagcggguggacuucugcggcaagggcuaccaccugaugagcuuuccccagagcgcaccccacggagugguguuccugcacgugaccuacgugcccgcccaggagaagaacuucaccaccgccccagccaucugccacgacggcaaggcccacuuuccccgggagggcguguucgugagcaacggcacccacugguucgugacccagcggaacuucuacgagccccagaucaucaccaccgacaacaccuucgugagcggcaacugcgacguggugaucggcaucgugaacaacaccguguacgauccccugcagcccgagcuggacagcuucaaggaggagcuggacaaguacuucaagaaucacaccagccccgacguggaccugggcgacaucagcggcaucaacgccagcguggugaacauccagaaggagaucgaucggcugaacgagguggccaagaaccugaacgagagccugaucgaccugcaggagcugggcaaguacgagcaguacaucaaguggcccugguacaucuggcugggcuucaucgccggccugaucgccaucgugauggugaccaucaugcugugcugcaugaccagcugcugcagcugccugaagggcuguugcagcugcggcagcugcugcaaguucgacgaggacgacagcgagcccgugcugaagggcgugaagcugcacuacaccugaggacuaguuauaagacugacuagcccgaugggccucccaacgggcccuccuccccuccuugcaccgagagaucucaaaggcucuuuucagagccaccaaaaaaaaaaaaaaaaaaaaaaaaaaaaaaaaaaaaaaaaaaaaaaaaaaaaaaaaaaaaaaaaaaaaaaaaaaaaaaaaaaaaaaaaaaaaaaaaaaaaa

SEQ ID NO: 24560 - RNA, 4035 nt, Artificial Sequence
  SARS-CoV-2/Wuhan/WIV05/2019__EPI_ISL_402128 spike protein mRNA gc (1-1273)(E484K_D614G)
aggagaaagcuuaccauguucguguuccuggugcugcugccccuggugagcagccagugcgugaaccugaccacccggacccagcugccaccagccuacaccaacagcuucacccggggcgucuacuaccccgacaagguguuccggagcagcguccugcacagcacccaggaccuguuccugcccuucuucagcaacgugaccugguuccacgccauccacgugagcggcaccaacggcaccaagcgguucgacaaccccgugcugcccuucaacgacggcguguacuucgccagcaccgagaagagcaacaucauccggggcuggaucuucggcaccacccuggacagcaagacccagagccugcugaucgugaauaacgccaccaacguggugaucaaggugugcgaguuccaguucugcaacgaccccuuccugggcguguacuaccacaagaacaacaagagcuggauggagagcgaguuccggguguacagcagcgccaacaacugcaccuucgaguacgugagccagcccuuccugauggaccuggagggcaagcagggcaacuucaagaaccugcgggaguucguguucaagaacaucgacggcuacuucaagaucuacagcaagcacaccccaaucaaccuggugcgggaucugccccagggcuucucagcccuggagccccugguggaccugcccaucggcaucaacaucacccgguuccagacccugcuggcccugcaccggagcuaccugaccccaggcgacagcagcagcggguggacagcaggcgcggcugcuuacuacgugggcuaccugcagccccggaccuuccugcugaaguacaacgagaacggcaccaucaccgacgccguggacugcgcccuggacccucugagcgagaccaagugcacccugaagagcuucaccguggagaagggcaucuaccagaccagcaacuuccgggugcagcccaccgagagcaucgugcgguuccccaacaucaccaaccugugccccuucggcgagguguucaacgccacccgguucgccagcguguacgccuggaaccggaagcggaucagcaacugcguggccgacuacagcgugcuguacaacagcgccagcuucagcaccuucaagugcuacggcgugagccccaccaagcugaacgaccugugcuucaccaacguguacgccgacagcuucgugauccguggcgacgaggugcggcagaucgcacccggccagacaggcaagaucgccgacuacaacuacaagcugcccgacgacuucaccggcugcgugaucgccuggaacagcaacaaccucgacagcaaggugggcggcaacuacaacuaccuguaccggcuguuccggaagagcaaccugaagcccuucgagcgggacaucagcaccgagaucuaccaagccggcuccaccccuugcaacggcgugaagggcuucaacugcuacuucccucugcagagcuacggcuuccagcccaccaacggcgugggcuaccagcccuaccgggugguggugcugagcuucgagcugcugcacgccccagccaccguguguggccccaagaagagcaccaaccuggugaagaacaagugcgugaacuucaacuucaacggccuuaccggcaccggcgugcugaccgagagcaacaagaaauuccugcccuuucagcaguucggccgggacaucgccgacaccaccgacgcugugcgggauccccagacccuggagauccuggacaucaccccuugcagcuucggcggcgugagcgugaucaccccaggcaccaacaccagcaaccagguggccgugcuguaccagggcgugaacugcaccgaggugcccguggccauccacgccgaccagcugacacccaccuggcgggucuacagcaccggcagcaacguguuccagacccgggccgguugccugaucggcgccgagcacgugaacaacagcuacgagugcgacauccccaucggcgccggcaucugugccagcuaccagacccagaccaauucaccccggagggcaaggagcguggccagccagagcaucaucgccuacaccaugagccugggcgccgagaacagcguggccuacagcaacaacagcaucgccauccccaccaacuucaccaucagcgugaccaccgagauucugcccgugagcaugaccaagaccagcguggacugcaccauguacaucugcggcgacagcaccgagugcagcaaccugcugcugcaguacggcagcuucugcacccagcugaaccgggcccugaccggcaucgccguggagcaggacaagaacacccaggagguguucgcccaggugaagcagaucuacaagaccccucccaucaaggacuucggcggcuucaacuucagccagauccugcccgaccccagcaagcccagcaagcggagcuucaucgaggaccugcuguucaacaaggugacccuagccgacgccggcuucaucaagcaguacggcgacugccucggcgacauagccgcccgggaccugaucugcgcccagaaguucaacggccugaccgugcugccuccccugcugaccgacgagaugaucgcccaguacaccagcgcccuguuagccggaaccaucaccagcggcuggacuuucggcgcuggagccgcucugcagauccccuucgccaugcagauggccuaccgguucaacggcaucggcgugacccagaacgugcuguacgagaaccagaagcugaucgccaaccaguucaacagcgccaucggcaagauccaggacagccugagcagcaccgcuagcgcccugggcaagcugcaggacguggugaaccagaacgcccaggcccugaacacccuggugaagcagcugagcagcaacuucggcgccaucagcagcgugcugaacgacauccugagccggcuggacaaggucgaggccgaggugcagaucgaccggcugaucacuggccggcugcagagccugcagaccuacgugacccagcagcugauccgggccgccgagauucgggccagcgccaaccuggccgccaccaagaugagcgagugcgugcugggccagagcaagcggguggacuucugcggcaagggcuaccaccugaugagcuuuccccagagcgcaccccacggagugguguuccugcacgugaccuacgugcccgcccaggagaagaacuucaccaccgccccagccaucugccacgacggcaaggcccacuuuccccgggagggcguguucgugagcaacggcacccacugguucgugacccagcggaacuucuacgagccccagaucaucaccaccgacaacaccuucgugagcggcaacugcgacguggugaucggcaucgugaacaacaccguguacgauccccugcagcccgagcuggacagcuucaaggaggagcuggacaaguacuucaagaaucacaccagccccgacguggaccugggcgacaucagcggcaucaacgccagcguggugaacauccagaaggagaucgaucggcugaacgagguggccaagaaccugaacgagagccugaucgaccugcaggagcugggcaaguacgagcaguacaucaaguggcccugguacaucuggcugggcuucaucgccggccugaucgccaucgugauggugaccaucaugcugugcugcaugaccagcugcugcagcugccugaagggcuguugcagcugcggcagcugcugcaaguucgacgaggacgacagcgagcccgugcugaagggcgugaagcugcacuacaccugaggacuaguuauaagacugacuagcccgaugggccucccaacgggcccuccuccccuccuugcaccgagagaucucaaaggcucuuuucagagccaccaaaaaaaaaaaaaaaaaaaaaaaaaaaaaaaaaaaaaaaaaaaaaaaaaaaaaaaaaaaaaaaaaaaaaaaaaaaaaaaaaaaaaaaaaaaaaaaaaaaaa

SEQ ID NO: 24561 - RNA, 4035 nt, Artificial Sequence
  SARS-CoV-2/Wuhan/WIV05/2019__EPI_ISL_402128 spike protein mRNA gc (1-1273)(L18F_T20N_P26S_D138Y_R190S_K417T_E484K_N501Y_D614G_H655Y _T1027I)
aggagaaagcuuaccauguucguguuccuggugcugcugccccuggugagcagccagugcgugaacuucaccaaccggacccagcugccaagcgccuacaccaacagcuucacccggggcgucuacuaccccgacaagguguuccggagcagcguccugcacagcacccaggaccuguuccugcccuucuucagcaacgugaccugguuccacgccauccacgugagcggcaccaacggcaccaagcgguucgacaaccccgugcugcccuucaacgacggcguguacuucgccagcaccgagaagagcaacaucauccggggcuggaucuucggcaccacccuggacagcaagacccagagccugcugaucgugaauaacgccaccaacguggugaucaaggugugcgaguuccaguucugcaacuaccccuuccugggcguguacuaccacaagaacaacaagagcuggauggagagcgaguuccggguguacagcagcgccaacaacugcaccuucgaguacgugagccagcccuuccugauggaccuggagggcaagcagggcaacuucaagaaccugagcgaguucguguucaagaacaucgacggcuacuucaagaucuacagcaagcacaccccaaucaaccuggugcgggaucugccccagggcuucucagcccuggagccccugguggaccugcccaucggcaucaacaucacccgguuccagacccugcuggcccugcaccggagcuaccugaccccaggcgacagcagcagcggguggacagcaggcgcggcugcuuacuacgugggcuaccugcagccccggaccuuccugcugaaguacaacgagaacggcaccaucaccgacgccguggacugcgcccuggacccucugagcgagaccaagugcacccugaagagcuucaccguggagaagggcaucuaccagaccagcaacuuccgggugcagcccaccgagagcaucgugcgguuccccaacaucaccaaccugugccccuucggcgagguguucaacgccacccgguucgccagcguguacgccuggaaccggaagcggaucagcaacugcguggccgacuacagcgugcuguacaacagcgccagcuucagcaccuucaagugcuacggcgugagccccaccaagcugaacgaccugugcuucaccaacguguacgccgacagcuucgugauccguggcgacgaggugcggcagaucgcacccggccagacaggcaccaucgccgacuacaacuacaagcugcccgacgacuucaccggcugcgugaucgccuggaacagcaacaaccucgacagcaaggugggcggcaacuacaacuaccuguaccggcuguuccggaagagcaaccugaagcccuucgagcgggacaucagcaccgagaucuaccaagccggcuccaccccuugcaacggcgugaagggcuucaacugcuacuucccucugcagagcuacggcuuccagcccaccuacggcgugggcuaccagcccuaccgggugguggugcugagcuucgagcugcugcacgccccagccaccguguguggccccaagaagagcaccaaccuggugaagaacaagugcgugaacuucaacuucaacggccuuaccggcaccggcgugcugaccgagagcaacaagaaauuccugcccuuucagcaguucggccgggacaucgccgacaccaccgacgcugugcgggauccccagacccuggagauccuggacaucaccccuugcagcuucggcggcgugagcgugaucaccccaggcaccaacaccagcaaccagguggccgugcuguaccagggcgugaacugcaccgaggugcccguggccauccacgccgaccagcugacacccaccuggcgggucuacagcaccggcagcaacguguuccagacccgggccgguugccugaucggcgccgaguacgugaacaacagcuacgagugcgacauccccaucggcgccggcaucugugccagcuaccagacccagaccaauucaccccggagggcaaggagcguggccagccagagcaucaucgccuacaccaugagccugggcgccgagaacagcguggccuacagcaacaacagcaucgccauccccaccaacuucaccaucagcgugaccaccgagauucugcccgugagcaugaccaagaccagcguggacugcaccauguacaucugcggcgacagcaccgagugcagcaaccugcugcugcaguacggcagcuucugcacccagcugaaccgggcccugaccggcaucgccguggagcaggacaagaacacccaggagguguucgcccaggugaagcagaucuacaagaccccucccaucaaggacuucggcggcuucaacuucagccagauccugcccgaccccagcaagcccagcaagcggagcuucaucgaggaccugcuguucaacaaggugacccuagccgacgccggcuucaucaagcaguacggcgacugccucggcgacauagccgcccgggaccugaucugcgcccagaaguucaacggccugaccgugcugccuccccugcugaccgacgagaugaucgcccaguacaccagcgcccuguuagccggaaccaucaccagcggcuggacuuucggcgcuggagccgcucugcagauccccuucgccaugcagauggccuaccgguucaacggcaucggcgugacccagaacgugcuguacgagaaccagaagcugaucgccaaccaguucaacagcgccaucggcaagauccaggacagccugagcagcaccgcuagcgcccugggcaagcugcaggacguggugaaccagaacgcccaggcccugaacacccuggugaagcagcugagcagcaacuucggcgccaucagcagcgugcugaacgacauccugagccggcuggacaaggucgaggccgaggugcagaucgaccggcugaucacuggccggcugcagagccugcagaccuacgugacccagcagcugauccgggccgccgagauucgggccagcgccaaccuggccgccaucaagaugagcgagugcgugcugggccagagcaagcggguggacuucugcggcaagggcuaccaccugaugagcuuuccccagagcgcaccccacggagugguguuccugcacgugaccuacgugcccgcccaggagaagaacuucaccaccgccccagccaucugccacgacggcaaggcccacuuuccccgggagggcguguucgugagcaacggcacccacugguucgugacccagcggaacuucuacgagccccagaucaucaccaccgacaacaccuucgugagcggcaacugcgacguggugaucggcaucgugaacaacaccguguacgauccccugcagcccgagcuggacagcuucaaggaggagcuggacaaguacuucaagaaucacaccagccccgacguggaccugggcgacaucagcggcaucaacgccagcguggugaacauccagaaggagaucgaucggcugaacgagguggccaagaaccugaacgagagccugaucgaccugcaggagcugggcaaguacgagcaguacaucaaguggcccugguacaucuggcugggcuucaucgccggccugaucgccaucgugauggugaccaucaugcugugcugcaugaccagcugcugcagcugccugaagggcuguugcagcugcggcagcugcugcaaguucgacgaggacgacagcgagcccgugcugaagggcgugaagcugcacuacaccugaggacuaguuauaagacugacuagcccgaugggccucccaacgggcccuccuccccuccuugcaccgagagaucucaaaggcucuuuucagagccaccaaaaaaaaaaaaaaaaaaaaaaaaaaaaaaaaaaaaaaaaaaaaaaaaaaaaaaaaaaaaaaaaaaaaaaaaaaaaaaaaaaaaaaaaaaaaaaaaaaaaa

SEQ ID NO: 24562 - RNA, 4035 nt, Artificial Sequence
  SARS-CoV-2/Wuhan/WIV05/2019__EPI_ISL_402128 spike protein mRNA gc (1-1273)(S13I_W152C_L452R_D614G)
aggagaaagcuuaccauguucguguuccuggugcugcugccccuggugagcauccagugcgugaaccugaccacccggacccagcugccaccagccuacaccaacagcuucacccggggcgucuacuaccccgacaagguguuccggagcagcguccugcacagcacccaggaccuguuccugcccuucuucagcaacgugaccugguuccacgccauccacgugagcggcaccaacggcaccaagcgguucgacaaccccgugcugcccuucaacgacggcguguacuucgccagcaccgagaagagcaacaucauccggggcuggaucuucggcaccacccuggacagcaagacccagagccugcugaucgugaauaacgccaccaacguggugaucaaggugugcgaguuccaguucugcaacgaccccuuccugggcguguacuaccacaagaacaacaagagcugcauggagagcgaguuccggguguacagcagcgccaacaacugcaccuucgaguacgugagccagcccuuccugauggaccuggagggcaagcagggcaacuucaagaaccugcgggaguucguguucaagaacaucgacggcuacuucaagaucuacagcaagcacaccccaaucaaccuggugcgggaucugccccagggcuucucagcccuggagccccugguggaccugcccaucggcaucaacaucacccgguuccagacccugcuggcccugcaccggagcuaccugaccccaggcgacagcagcagcggguggacagcaggcgcggcugcuuacuacgugggcuaccugcagccccggaccuuccugcugaaguacaacgagaacggcaccaucaccgacgccguggacugcgcccuggacccucugagcgagaccaagugcacccugaagagcuucaccguggagaagggcaucuaccagaccagcaacuuccgggugcagcccaccgagagcaucgugcgguuccccaacaucaccaaccugugccccuucggcgagguguucaacgccacccgguucgccagcguguacgccuggaaccggaagcggaucagcaacugcguggccgacuacagcgugcuguacaacagcgccagcuucagcaccuucaagugcuacggcgugagccccaccaagcugaacgaccugugcuucaccaacguguacgccgacagcuucgugauccguggcgacgaggugcggcagaucgcacccggccagacaggcaagaucgccgacuacaacuacaagcugcccgacgacuucaccggcugcgugaucgccuggaacagcaacaaccucgacagcaaggugggcggcaacuacaacuaccgcuaccggcuguuccggaagagcaaccugaagcccuucgagcgggacaucagcaccgagaucuaccaagccggcuccaccccuugcaacggcguggagggcuucaacugcuacuucccucugcagagcuacggcuuccagcccaccaacggcgugggcuaccagcccuaccgggugguggugcugagcuucgagcugcugcacgccccagccaccguguguggccccaagaagagcaccaaccuggugaagaacaagugcgugaacuucaacuucaacggccuuaccggcaccggcgugcugaccgagagcaacaagaaauuccugcccuuucagcaguucggccgggacaucgccgacaccaccgacgcugugcgggauccccagacccuggagauccuggacaucaccccuugcagcuucggcggcgugagcgugaucaccccaggcaccaacaccagcaaccagguggccgugcuguaccagggcgugaacugcaccgaggugcccguggccauccacgccgaccagcugacacccaccuggcgggucuacagcaccggcagcaacguguuccagacccgggccgguugccugaucggcgccgagcacgugaacaacagcuacgagugcgacauccccaucggcgccggcaucugugccagcuaccagacccagaccaauucaccccggagggcaaggagcguggccagccagagcaucaucgccuacaccaugagccugggcgccgagaacagcguggccuacagcaacaacagcaucgccauccccaccaacuucaccaucagcgugaccaccgagauucugcccgugagcaugaccaagaccagcguggacugcaccauguacaucugcggcgacagcaccgagugcagcaaccugcugcugcaguacggcagcuucugcacccagcugaaccgggcccugaccggcaucgccguggagcaggacaagaacacccaggagguguucgcccaggugaagcagaucuacaagaccccucccaucaaggacuucggcggcuucaacuucagccagauccugcccgaccccagcaagcccagcaagcggagcuucaucgaggaccugcuguucaacaaggugacccuagccgacgccggcuucaucaagcaguacggcgacugccucggcgacauagccgcccgggaccugaucugcgcccagaaguucaacggccugaccgugcugccuccccugcugaccgacgagaugaucgcccaguacaccagcgcccuguuagccggaaccaucaccagcggcuggacuuucggcgcuggagccgcucugcagauccccuucgccaugcagauggccuaccgguucaacggcaucggcgugacccagaacgugcuguacgagaaccagaagcugaucgccaaccaguucaacagcgccaucggcaagauccaggacagccugagcagcaccgcuagcgcccugggcaagcugcaggacguggugaaccagaacgcccaggcccugaacacccuggugaagcagcugagcagcaacuucggcgccaucagcagcgugcugaacgacauccugagccggcuggacaaggucgaggccgaggugcagaucgaccggcugaucacuggccggcugcagagccugcagaccuacgugacccagcagcugauccgggccgccgagauucgggccagcgccaaccuggccgccaccaagaugagcgagugcgugcugggccagagcaagcggguggacuucugcggcaagggcuaccaccugaugagcuuuccccagagcgcaccccacggagugguguuccugcacgugaccuacgugcccgcccaggagaagaacuucaccaccgccccagccaucugccacgacggcaaggcccacuuuccccgggagggcguguucgugagcaacggcacccacugguucgugacccagcggaacuucuacgagccccagaucaucaccaccgacaacaccuucgugagcggcaacugcgacguggugaucggcaucgugaacaacaccguguacgauccccugcagcccgagcuggacagcuucaaggaggagcuggacaaguacuucaagaaucacaccagccccgacguggaccugggcgacaucagcggcaucaacgccagcguggugaacauccagaaggagaucgaucggcugaacgagguggccaagaaccugaacgagagccugaucgaccugcaggagcugggcaaguacgagcaguacaucaaguggcccugguacaucuggcugggcuucaucgccggccugaucgccaucgugauggugaccaucaugcugugcugcaugaccagcugcugcagcugccugaagggcuguugcagcugcggcagcugcugcaaguucgacgaggacgacagcgagcccgugcugaagggcgugaagcugcacuacaccugaggacuaguuauaagacugacuagcccgaugggccucccaacgggcccuccuccccuccuugcaccgagagaucucaaaggcucuuuucagagccaccaaaaaaaaaaaaaaaaaaaaaaaaaaaaaaaaaaaaaaaaaaaaaaaaaaaaaaaaaaaaaaaaaaaaaaaaaaaaaaaaaaaaaaaaaaaaaaaaaaaaa

SEQ ID NO: 24563 - RNA, 4035 nt, Artificial Sequence
  SARS-CoV-2/Wuhan/WIV05/2019__EPI_ISL_402128 spike protein mRNA gc (1-1273)
aggagaaagcuuaccauguucguguuccuggugcugcugccccuggugagcagccagugcgugaaccugaccacccggacccagcugcccccugccuacaccaacagcuucacccggggcguguacuaccccgacaagguguuccggagcagcgugcugcacagcacccaggaccuguuccugcccuucuucagcaacgugaccugguuccacgccauccacgugagcggcaccaacggcaccaagcgguucgacaacccagugcugcccuucaacgacggcguguacuucgccagcaccgagaagucaaacaucauccggggcuggaucuucggcaccacccuggacagcaagacacagagccugcugaucgugaacaacgccaccaacguggugaucaaggugugcgaguuucaguucugcaacgaccccuuccugggcguguacuaccacaagaacaacaagagcuggauggagagcgaguuccgggucuacagcagcgcuaacaauugcaccuucgaguacgugagccagcccuuccugauggaccucgagggcaagcagggcaacuucaagaaccugcgggaguucguguucaagaacaucgauggcuacuucaagaucuacagcaagcacacccccaucaaccuggugcgggaccugccccagggauucagcgcccuggagccucugguggaccugcccaucggcaucaacaucaccagguuccagacccugcuggcccugcaccggagcuaccugacccccggcgacagcagcagcggcuggaccgccggcgccgccgcauacuacgugggcuaccugcagccacggaccuuccugcugaaguacaacgagaacggcaccaucaccgacgccguggacugcgcccuggacccccugagcgagaccaagugcacccuaaagagcuucaccguggagaagggcaucuaccagaccagcaacuuccgggugcagcccacugagagcaucgugcgguuccccaacauuaccaaccugugucccuucggcgagguguucaacgccacccgguucgccagcguguacgccuggaaccggaagcggaucagcaacugcguggccgacuacagcgugcuguacaacagcgccagcuucagcaccuucaagugcuacggcgugagcccuaccaagcugaacgaccugugcuucaccaacguguacgcugacagcuucgugauccggggcgacgaggugcggcagaucgcccccggccagaccggcaagaucgccgacuacaacuacaagcugcccgacgacuucaccggcugcgugaucgccuggaacagcaacaaccuggacagcaaggugggcggcaacuacaacuaccuguaccggcuguuccguaagagcaaccugaagccauucgagcgggacaucagcaccgagaucuaccaggccggcagcacccccugcaacgguguggagggcuuuaacugcuacuucccccugcagagcuacggcuuccagcccaccaacggcgugggcuaccagcccuaccgggugguggugcugagcuucgagcugcugcacgcccccgccaccgugugcggcccuaaaaagagcaccaaccuggugaagaacaagugcgugaacuucaauuucaacggccugaccggcaccggcgugcugaccgagagcaacaagaaguuccugcccuuccagcaguucggccgggauaucgccgacaccaccgacgcagugcgggacccccagacccuggagauccuggacaucaccccaugcagcuucggcggcgugagcgucaucacccccggcacaaacaccagcaaccagguggccgugcuguaccaggacgugaacugcaccgaggugcccguggccauccacgccgaccagcugacccccaccuggcggguguacagcaccggaagcaacguguuccagacccgggccggcugccugaucggcgccgagcacgugaacaacuccuacgagugcgacauccccaucggcgcuggcaucugcgccagcuaccagacccagaccaacagcccccggcgggcccggagcguggccagccagagcaucaucgccuacaccaugagcuuaggcgccgagaacagcguggccuacagcaacaacagcaucgcgaucccuaccaacuucaccaucagcgugaccaccgagauacugcccgugagcaugaccaagaccagcguggacuguaccauguacaucugcggcgacagcaccgagugcagcaaccugcugcugcaguacggcagcuucugcacccagcugaaccgggcccugaccggcaucgccguggagcaggacaagaacacccaagagguguucgcccaggugaagcagaucuacaagacucccccaaucaaggacuucggcggcuucaacuucagccagauccugcccgaccccagcaagcccagcaagcggagcuucaucgaggaccugcuguucaacaaggugacccuggccgacgccggcuucaucaagcaguacggcgauugccugggcgacaucgccgcucgggaccugaucugcgcccagaaguucaacgggcugaccgugcugcccccucugcugaccgacgagaugaucgcccaguacaccagcgcccugcuugccggcaccaucaccagcggcuggaccuucggcgccggcgcagcccugcagauccccuucgccaugcagauggccuaccgguucaacggcaucggcgugacccagaacgugcuguacgagaaccagaagcugaucgccaaccaguucaacagcgccaucggcaagauccaggacagccugagcagcaccgccagcgcccugggcaagcugcaggacguggugaaccagaacgcucaggcccugaacacccuggugaagcagcugagcagcaacuucggcgccaucagcucagugcugaaugacauccugagcaggcuggacaagguggaggccgaggugcagaucgaccggcugaucaccggccggcugcagagccugcagaccuacgugacccagcagcugauccgggccgccgagauccgggccagcgccaaccuggcagccaccaagaugagcgagugcgugcugggccagagcaagcggguggacuuuugcggcaagggcuaccaccugaugagcuucccccagagcgccccacacggcgugguguuccuccacgucacauacgugcccgcccaggagaagaacuucaccaccgcccccgccauuugccacgacggcaaggcucacuucccccgggagggcguguucgugagcaacggaacccacugguucgugacccagcggaacuucuacgagccccagaucaucaccaccgacaacaccuucgugagcggcaacugcgacguggugaucggcaucgugaacaacaccguguacgacccccugcagccugagcuggacagcuucaaggaggagcuggacaaguacuucaagaaccacaccagccccgauguggaccugggcgacaucagcggcaucaacgccagcguggugaacauccagaaggagaucgaccggcugaacgagguggccaagaaccugaacgagagccugaucgaccugcaggagcugggcaaguacgagcaguacaucaaguggcccugguacaucuggcugggcuucaucgccggccugaucgccaucgugauggugaccaucaugcugugcugcaugaccagcugcuguagcugccugaagggcugcugcagcugcggcagcugcugcaaguucgacgaggacgacagcgagccagugcugaagggcgugaagcugcacuacaccugaggacuaguuauaagacugacuagcccgaugggccucccaacgggcccuccuccccuccuugcaccgagagaucucaaaggcucuuuucagagccaccaaaaaaaaaaaaaaaaaaaaaaaaaaaaaaaaaaaaaaaaaaaaaaaaaaaaaaaaaaaaaaaaaaaaaaaaaaaaaaaaaaaaaaaaaaaaaaaaaaaaa

SEQ ID NO: 24564 - RNA, 4035 nt, Artificial Sequence
  SARS-CoV-2/Wuhan/WIV05/2019__EPI_ISL_402128 spike protein mRNA gc (1-1273)(D614G)
aggagaaagcuuaccauguucguguuccuggugcugcugccccuggugagcagccagugcgugaaccugaccacccggacccagcugcccccugccuacaccaacagcuucacccggggcguguacuaccccgacaagguguuccggagcagcgugcugcacagcacccaggaccuguuccugcccuucuucagcaacgugaccugguuccacgccauccacgugagcggcaccaacggcaccaagcgguucgacaacccagugcugcccuucaacgacggcguguacuucgccagcaccgagaagucaaacaucauccggggcuggaucuucggcaccacccuggacagcaagacacagagccugcugaucgugaacaacgccaccaacguggugaucaaggugugcgaguuucaguucugcaacgaccccuuccugggcguguacuaccacaagaacaacaagagcuggauggagagcgaguuccgggucuacagcagcgcuaacaauugcaccuucgaguacgugagccagcccuuccugauggaccucgagggcaagcagggcaacuucaagaaccugcgggaguucguguucaagaacaucgauggcuacuucaagaucuacagcaagcacacccccaucaaccuggugcgggaccugccccagggauucagcgcccuggagccucugguggaccugcccaucggcaucaacaucaccagguuccagacccugcuggcccugcaccggagcuaccugacccccggcgacagcagcagcggcuggaccgccggcgccgccgcauacuacgugggcuaccugcagccacggaccuuccugcugaaguacaacgagaacggcaccaucaccgacgccguggacugcgcccuggacccccugagcgagaccaagugcacccuaaagagcuucaccguggagaagggcaucuaccagaccagcaacuuccgggugcagcccacugagagcaucgugcgguuccccaacauuaccaaccugugucccuucggcgagguguucaacgccacccgguucgccagcguguacgccuggaaccggaagcggaucagcaacugcguggccgacuacagcgugcuguacaacagcgccagcuucagcaccuucaagugcuacggcgugagcccuaccaagcugaacgaccugugcuucaccaacguguacgcugacagcuucgugauccggggcgacgaggugcggcagaucgcccccggccagaccggcaagaucgccgacuacaacuacaagcugcccgacgacuucaccggcugcgugaucgccuggaacagcaacaaccuggacagcaaggugggcggcaacuacaacuaccuguaccggcuguuccguaagagcaaccugaagccauucgagcgggacaucagcaccgagaucuaccaggccggcagcacccccugcaacgguguggagggcuuuaacugcuacuucccccugcagagcuacggcuuccagcccaccaacggcgugggcuaccagcccuaccgggugguggugcugagcuucgagcugcugcacgcccccgccaccgugugcggcccuaaaaagagcaccaaccuggugaagaacaagugcgugaacuucaauuucaacggccugaccggcaccggcgugcugaccgagagcaacaagaaguuccugcccuuccagcaguucggccgggauaucgccgacaccaccgacgcagugcgggacccccagacccuggagauccuggacaucaccccaugcagcuucggcggcgugagcgucaucacccccggcacaaacaccagcaaccagguggccgugcuguaccagggagugaacugcaccgaggugcccguggccauccacgccgaccagcugacccccaccuggcggguguacagcaccggcagcaacguguuccagacccgggccggcugccugaucggcgccgagcacgugaacaacuccuacgagugcgacauccccaucggcgcuggcaucugcgccagcuaccagacccagaccaacagcccccggcgggcccggagcguggccagccagagcaucaucgccuacaccaugagcuuaggcgccgagaacagcguggccuacagcaacaacagcaucgcgaucccuaccaacuucaccaucagcgugaccaccgagauacugcccgugagcaugaccaagaccagcguggacuguaccauguacaucugcggcgacagcaccgagugcagcaaccugcugcugcaguacggcagcuucugcacccagcugaaccgggcccugaccggcaucgccguggagcaggacaagaacacccaagagguguucgcccaggugaagcagaucuacaagacucccccaaucaaggacuucggcggcuucaacuucagccagauccugcccgaccccagcaagcccagcaagcggagcuucaucgaggaccugcuguucaacaaggugacccuggccgacgccggcuucaucaagcaguacggcgacugccugggggauaucgccgcucgggaccugaucugcgcccagaaguucaacggccugaccgugcugcccccucugcugaccgacgagaugaucgcccaguacaccagcgcccugcuugccggcaccaucaccagcggcuggaccuucggcgccggcgcagcccugcagauccccuucgccaugcagauggccuaccgguucaacggcaucggcgugacccagaacgugcuguacgagaaccagaagcugaucgccaaccaguucaacagcgccaucggcaagauccaggacagccugagcagcaccgccagcgcccugggcaagcugcaggacguggugaaccagaacgcucaggcccugaacacccuggugaagcagcugagcagcaacuucggcgccaucagcucagugcugaaugacauccugagcaggcuggacaagguggaggccgaggugcagaucgaccggcugaucaccggccggcugcagagccugcagaccuacgugacccagcagcugauccgggccgccgagauccgggccagcgccaaccuggcagccaccaagaugagcgagugcgugcugggccagagcaagcggguggacuuuugcggcaagggcuaccaccugaugagcuucccccagagcgccccacacggcgugguguuccuccacgucacauacgugcccgcccaggagaagaacuucaccaccgcccccgccauuugccacgacggcaaggcucacuucccccgggagggaguguucgugagcaacggcacccacugguucgugacccagcggaacuucuacgagccccagaucaucaccaccgacaacaccuucgugagcggcaacugcgacguggugaucggcaucgugaacaacaccguguacgacccccugcagccugagcuggacagcuucaaggaggagcuggacaaguacuucaagaaccacaccagccccgacguggaucugggcgacaucagcggcaucaacgccagcguggugaacauccagaaggagaucgaccggcugaacgagguggccaagaaccugaacgagagccugaucgaccugcaggagcugggcaaguacgagcaguacaucaaguggcccugguacaucuggcugggcuucaucgccggccugaucgccaucgugauggugaccaucaugcugugcugcaugaccagcugcuguagcugccugaagggcugcugcagcugcggcagcugcugcaaguucgacgaggacgacagcgagccagugcugaagggcgugaagcugcacuacaccugaggacuaguuauaagacugacuagcccgaugggccucccaacgggcccuccuccccuccuugcaccgagagaucucaaaggcucuuuucagagccaccaaaaaaaaaaaaaaaaaaaaaaaaaaaaaaaaaaaaaaaaaaaaaaaaaaaaaaaaaaaaaaaaaaaaaaaaaaaaaaaaaaaaaaaaaaaaaaaaaaaaa

SEQ ID NO: 24565 - RNA, 4035 nt, Artificial Sequence
  SARS-CoV-2/Wuhan/WIV05/2019__EPI_ISL_402128 spike protein mRNA gc (1-1273)(A222V_D614G)
aggagaaagcuuaccauguucguguuccuggugcugcugccccuggugagcagccagugcgugaaccugaccacccggacccagcugcccccugccuacaccaacagcuucacccggggcguguacuaccccgacaagguguuccggagcagcgugcugcacagcacccaggaccuguuccugcccuucuucagcaacgugaccugguuccacgccauccacgugagcggcaccaacggcaccaagcgguucgacaacccagugcugcccuucaacgacggcguguacuucgccagcaccgagaagucaaacaucauccggggcuggaucuucggcaccacccuggacagcaagacacagagccugcugaucgugaacaacgccaccaacguggugaucaaggugugcgaguuucaguucugcaacgaccccuuccugggcguguacuaccacaagaacaacaagagcuggauggagagcgaguuccgggucuacagcagcgcuaacaauugcaccuucgaguacgugagccagcccuuccugauggaccucgagggcaagcagggcaacuucaagaaccugcgggaguucguguucaagaacaucgauggcuacuucaagaucuacagcaagcacacccccaucaaccuggugcgggaccugccccagggauucagcgugcuggagccucugguggaccugcccaucggcaucaacaucaccagguuccagacccugcuggcccugcaccggagcuaccugacccccggcgacagcagcagcggcuggaccgccggcgccgccgccuacuacgugggcuaccugcagccacggaccuuccugcugaaguacaacgagaacggcaccaucaccgacgcaguggacugcgcccuggacccccugagcgagaccaagugcacccuaaagagcuucaccguggagaagggcaucuaccagaccagcaacuuccgggugcagcccacugagagcaucgugcgguuccccaacauuaccaaccugugucccuucggcgagguguucaacgccacccgguucgccagcguguacgccuggaaccggaagcggaucagcaacugcguggccgacuacagcgugcuguacaacagcgccagcuucagcaccuucaagugcuacggcgugagcccuaccaagcugaacgaccugugcuucaccaacguguacgccgacagcuucgugauccggggcgacgaggugcggcagaucgcucccggccagaccggcaagaucgccgacuacaacuacaagcugcccgacgacuucaccggcugcgugaucgccuggaacagcaacaaccuggacagcaaggugggcggcaacuacaacuaccuguaccggcuguuccguaagagcaaccugaagccauucgagcgggacaucagcaccgagaucuaccaggccggcagcacccccugcaacgguguggagggcuuuaacugcuacuucccccugcagagcuacggcuuccagcccaccaacggcgugggcuaccagcccuaccgggugguggugcugagcuucgagcugcugcacgcccccgccaccgugugcggcccuaaaaagagcaccaaccuggugaagaacaagugcgugaacuucaauuucaacggccugaccggcaccggcgugcugaccgagagcaacaagaaguuccugcccuuccagcaguucggccgggauaucgccgacaccaccgacgccgugcgggacccccagacccuggagauccuggacaucaccccaugcagcuucggcggcgucagcgugaucacccccggcacaaacaccagcaaccagguggcagugcuguaccagggagugaacugcaccgaggugcccguggccauccacgccgaccagcugacccccaccuggcggguguacagcaccggcagcaacguguuccagacccgggccggcugccugaucggcgccgagcacgugaacaacuccuacgagugcgacauccccaucggcgccggcaucugcgcuagcuaccagacccagaccaacagcccccggcgggcccggagcguggccagccagagcaucaucgccuacaccaugagcuuaggcgccgagaacagcguggccuacagcaacaacagcaucgccaucccuaccaacuucaccaucagcgugaccaccgagauacugcccgugagcaugaccaagaccagcguggacuguaccauguacaucugcggcgacagcaccgagugcagcaaccugcugcugcaguacggcagcuucugcacccagcugaaccgggcgcugaccggcaucgccguggagcaggacaagaacacccaagagguguucgcccaggugaagcagaucuacaagacucccccaaucaaggacuucggcggcuucaacuucagccagauccugcccgaccccagcaagcccagcaagcggagcuucaucgaggaccugcuguucaacaaggugacccuggccgacgccggcuucaucaagcaguacggcgacugccugggggauaucgccgcccgggaccugaucugcgcucagaaguucaacggccugaccgugcugcccccucugcugaccgacgagaugaucgcccaguacaccagcgcccugcuugccggcaccaucaccagcggcuggaccuucggcgccggcgccgcacugcagauccccuucgccaugcagauggccuaccgguucaacggcaucggcgugacccagaacgugcuguacgagaaccagaagcugaucgccaaccaguucaacagcgccaucggcaagauccaggacagccugagcagcaccgccagcgcccugggcaagcugcaggacguggugaaccagaacgcccaggcucugaacacccuggugaagcagcugagcagcaacuucggcgccaucagcucagugcugaaugacauccugagcaggcuggacaagguggaggccgaggugcagaucgaccggcugaucaccggccggcugcagagccugcagaccuacgugacccagcagcugauccgggccgccgagauccgggccagcgccaaccuggccgcaaccaagaugagcgagugcgugcugggccagagcaagcggguggacuuuugcggcaagggcuaccaccugaugagcuucccccagagcgccccacacggcguggucuuccuccacgugacauacgugcccgcccaggagaagaacuucaccaccgcccccgccauuugccacgacggcaaggcccacuucccccgggagggaguguucgugagcaacggcacccacugguucgugacccagcggaacuucuacgagccccagaucaucaccaccgacaacaccuucgugagcggcaacugcgacguggugaucggcaucgugaacaacaccguguacgacccccugcagccugagcuggacagcuucaaggaggagcuggacaaguacuucaagaaccacaccagccccgacguggaucugggcgacaucagcggcaucaacgcuagcguggugaacauccagaaggagaucgaccggcugaacgagguggccaagaaccugaacgagagccugaucgaccugcaggagcugggcaaguacgagcaguacaucaaguggcccugguacaucuggcugggcuucaucgccggccugaucgccaucgugauggugaccaucaugcugugcugcaugaccagcugcuguagcugccugaagggcugcugcagcugcggcagcugcugcaaguucgacgaggacgacagcgagccagugcugaagggcgugaagcugcacuacaccugaggacuaguuauaagacugacuagcccgaugggccucccaacgggcccuccuccccuccuugcaccgagagaucucaaaggcucuuuucagagccaccaaaaaaaaaaaaaaaaaaaaaaaaaaaaaaaaaaaaaaaaaaaaaaaaaaaaaaaaaaaaaaaaaaaaaaaaaaaaaaaaaaaaaaaaaaaaaaaaaaaaa

SEQ ID NO: 24566 - RNA, 4035 nt, Artificial Sequence
  SARS-CoV-2/Wuhan/WIV05/2019__EPI_ISL_402128 spike protein mRNA gc (1-1273)(N439K_D614G)
aggagaaagcuuaccauguucguguuccuggugcugcugccccuggugagcagccagugcgugaaccugaccacccggacccagcugcccccugccuacaccaacagcuucacccggggcguguacuaccccgacaagguguuccggagcagcgugcugcacagcacccaggaccuguuccugcccuucuucagcaacgugaccugguuccacgccauccacgugagcggcaccaacggcaccaagcgguucgacaacccagugcugcccuucaacgacggcguguacuucgccagcaccgagaagucaaacaucauccggggcuggaucuucggcaccacccuggacagcaagacacagagccugcugaucgugaacaacgccaccaacguggugaucaaggugugcgaguuucaguucugcaacgaccccuuccugggcguguacuaccacaagaacaacaagagcuggauggagagcgaguuccgggucuacagcagcgcuaacaauugcaccuucgaguacgugagccagcccuuccugauggaccucgagggcaagcagggcaacuucaagaaccugcgggaguucguguucaagaacaucgauggcuacuucaagaucuacagcaagcacacccccaucaaccuggugcgggaccugccccagggauucagcgcccuggagccucugguggaccugcccaucggcaucaacaucaccagguuccagacccugcuggcccugcaccggagcuaccugacccccggcgacagcagcagcggcuggaccgccggcgccgccgcauacuacgugggcuaccugcagccacggaccuuccugcugaaguacaacgagaacggcaccaucaccgacgccguggacugcgcccuggacccccugagcgagaccaagugcacccuaaagagcuucaccguggagaagggcaucuaccagaccagcaacuuccgggugcagcccacugagagcaucgugcgguuccccaacauuaccaaccugugucccuucggcgagguguucaacgccacccgguucgccagcguguacgccuggaaccggaagcggaucagcaacugcguggccgacuacagcgugcuguacaacagcgccagcuucagcaccuucaagugcuacggcgugagcccuaccaagcugaacgaccugugcuucaccaacguguacgcugacagcuucgugauccggggcgacgaggugcggcagaucgcccccggccagaccggcaagaucgccgacuacaacuacaagcugcccgacgacuucaccggcugcgugaucgccuggaacagcaagaaccuggacagcaaggugggcggcaacuacaacuaccuguaccggcuguuccguaagagcaaccugaagccauucgagcgggacaucagcaccgagaucuaccaggccggcagcacccccugcaacgguguggagggcuuuaacugcuacuucccccugcagagcuacggcuuccagcccaccaacggcgugggcuaccagcccuaccgggugguggugcugagcuucgagcugcugcacgcccccgccaccgugugcggcccuaaaaagagcaccaaccuggugaagaacaagugcgugaacuucaacuucaauggccugaccggcaccggcgugcugaccgagagcaacaagaaguuccugcccuuccagcaguucggccgggauaucgccgacaccaccgacgcagugcgggacccccagacccuggagauccuggacaucaccccaugcagcuucggcggcgugagcgucaucacccccggcacaaacaccagcaaccagguggccgugcuguaccagggagugaacugcaccgaggugcccguggccauccacgccgaccagcugacccccaccuggcggguguacagcaccggcagcaacguguuccagacccgggccggcugccugaucggcgccgagcacgugaacaacuccuacgagugcgacauccccaucggcgcuggcaucugcgccagcuaccagacccagaccaacagcccccggcgggcccggagcguggccagccagagcaucaucgccuacaccaugagcuuaggcgccgagaacagcguggccuacagcaacaacagcaucgcgaucccuaccaacuucaccaucagcgugaccaccgagauacugcccgugagcaugaccaagaccagcguggacuguaccauguacaucugcggcgacagcaccgagugcagcaaccugcugcugcaguacggcagcuucugcacccagcugaaccgggcccugaccggcaucgccguggagcaggacaagaacacccaagagguguucgcccaggugaagcagaucuacaagacucccccaaucaaggacuucggcggcuucaacuucagccagauccugcccgaccccagcaagcccagcaagcggagcuucaucgaggaccugcuguucaacaaggugacccuggccgacgccggcuucaucaagcaguacggcgacugccugggggauaucgccgcucgggaccugaucugcgcccagaaguucaacggccugaccgugcugcccccucugcugaccgacgagaugaucgcccaguacaccagcgcccugcuugccggcaccaucaccagcggcuggaccuucggcgccggcgcagcccugcagauccccuucgccaugcagauggccuaccgguucaacggcaucggcgugacccagaacgugcuguacgagaaccagaagcugaucgccaaccaguucaacagcgccaucggcaagauccaggacagccugagcagcaccgccagcgcccugggcaagcugcaggacguggugaaccagaacgcucaggcccugaacacccuggugaagcagcugagcagcaacuucggcgccaucagcucagugcugaacgacauccugagcaggcuggacaagguggaggccgaggugcagaucgaccggcugaucaccggccggcugcagagccugcagaccuacgugacccagcagcugauccgggccgccgagauccgggccagcgccaaucuggcagccaccaagaugagcgagugcgugcugggccagagcaagcggguggacuuuugcggcaagggcuaccaccugaugagcuucccccagagcgccccacacggcgugguguuccuccacgucacauacgugcccgcccaggagaagaacuucaccaccgcccccgccauuugccacgacggcaaggcucacuucccccgggagggaguguucgugagcaacggcacccacugguucgugacccagcggaacuucuacgagccccagaucaucaccaccgacaacaccuucgugagcggcaacugcgacguggugaucggcaucgugaacaacaccguguacgacccccugcagccugagcuggacagcuucaaggaggagcuggacaaguacuucaagaaccacaccagccccgacguggaucugggcgacaucagcggcaucaacgccagcguggugaacauccagaaggagaucgaccggcugaacgagguggccaagaaccugaacgagagccugaucgaccugcaggagcugggcaaguacgagcaguacaucaaguggcccugguacaucuggcugggcuucaucgccggccugaucgccaucgugauggugaccaucaugcugugcugcaugaccagcugcuguagcugccugaagggcugcugcagcugcggcagcugcugcaaguucgacgaggacgacagcgagccagugcugaagggcgugaagcugcacuacaccugaggacuaguuauaagacugacuagcccgaugggccucccaacgggcccuccuccccuccuugcaccgagagaucucaaaggcucuuuucagagccaccaaaaaaaaaaaaaaaaaaaaaaaaaaaaaaaaaaaaaaaaaaaaaaaaaaaaaaaaaaaaaaaaaaaaaaaaaaaaaaaaaaaaaaaaaaaaaaaaaaaaa

SEQ ID NO: 24567 - RNA, 4035 nt, Artificial Sequence
  SARS-CoV-2/Wuhan/WIV05/2019__EPI_ISL_402128 spike protein mRNA gc (1-1273)(S477N_D614G)
aggagaaagcuuaccauguucguguuccuggugcugcugccccuggugagcagccagugcgugaaccugaccacccggacccagcugcccccugccuacaccaacagcuucacccggggcguguacuaccccgacaagguguuccggagcagcgugcugcacagcacccaggaccuguuccugcccuucuucagcaacgugaccugguuccacgccauccacgugagcggcaccaacggcaccaagcgguucgacaacccagugcugcccuucaacgacggcguguacuucgccagcaccgagaagucaaacaucauccggggcuggaucuucggcaccacccuggacagcaagacacagagccugcugaucgugaacaacgccaccaacguggugaucaaggugugcgaguuucaguucugcaacgaccccuuccugggcguguacuaccacaagaacaacaagagcuggauggagagcgaguuccgggucuacagcagcgcuaacaauugcaccuucgaguacgugagccagcccuuccugauggaccucgagggcaagcagggcaacuucaagaaccugcgggaguucguguucaagaacaucgauggcuacuucaagaucuacagcaagcacacccccaucaaccuggugcgggaccugccccagggauucagcgcccuggagccucugguggaccugcccaucggcaucaacaucaccagguuccagacccugcuggcccugcaccggagcuaccugacccccggcgacagcagcagcggcuggaccgccggcgccgccgcauacuacgugggcuaccugcagccacggaccuuccugcugaaguacaacgagaacggcaccaucaccgacgccguggacugcgcccuggacccccugagcgagaccaagugcacccuaaagagcuucaccguggagaagggcaucuaccagaccagcaacuuccgggugcagcccacugagagcaucgugcgguuccccaacauuaccaaccugugucccuucggcgagguguucaacgccacccgguucgccagcguguacgccuggaaccggaagcggaucagcaacugcguggccgacuacagcgugcuguacaacagcgccagcuucagcaccuucaagugcuacggcgugagcccuaccaagcugaacgaccugugcuucaccaacguguacgcugacagcuucgugauccggggcgacgaggugcggcagaucgcccccggccagaccggcaagaucgccgacuacaacuacaagcugcccgacgacuucaccggcugcgugaucgccuggaacagcaacaaccuggacagcaaggugggcggcaacuacaacuaccuguaccggcuguuccguaagagcaaccugaagccauucgagcgggacaucagcaccgagaucuaccaggccggcaacacccccugcaacgguguggagggcuuuaacugcuacuucccccugcagagcuacggcuuccagcccaccaacggcgugggcuaccagcccuaccgggugguggugcugagcuucgagcugcugcacgcccccgccaccgugugcggcccuaaaaagagcaccaaccuggugaagaacaagugcgugaauuucaacuucaacggccugaccggcaccggcgugcugaccgagagcaacaagaaguuccugcccuuccagcaguucggccgggauaucgccgacaccaccgacgcagugcgggacccccagacccuggagauccuggacaucaccccaugcagcuucggcggcgugagcgucaucacccccggcacaaacaccagcaaccagguggccgugcuguaccagggagugaacugcaccgaggugcccguggccauccacgccgaccagcugacccccaccuggcggguguacagcaccggcagcaacguguuccagacccgggccggcugccugaucggcgccgagcacgugaacaacagcuacgagugcgacauccccaucggcgcuggcaucugcgccuccuaccagacccagaccaacagcccccggcgggcccggagcguggccagccagagcaucaucgccuacaccaugagcuuaggcgccgagaacagcguggccuacagcaacaacagcaucgcgaucccuaccaacuucaccaucagcgugaccaccgagauacugcccgugagcaugaccaagaccagcguggacuguaccauguacaucugcggcgacagcaccgagugcagcaaccugcugcugcaguacggcagcuucugcacccagcugaaccgggcccugaccggcaucgccguggagcaggacaagaacacccaagagguguucgcccaggugaagcagaucuacaagacucccccaaucaaggacuucggcggcuucaacuucagccagauccugcccgaccccagcaagcccagcaagcggagcuucaucgaggaccugcuguucaacaaggugacccuggccgacgccggcuucaucaagcaguacggcgacugccugggggauaucgccgcucgggaccugaucugcgcccagaaguucaacggccugaccgugcugcccccucugcugaccgacgagaugaucgcccaguacaccagcgcccugcuugccggcaccaucaccagcggcuggaccuucggcgccggcgcagcccugcagauccccuucgccaugcagauggccuaccgguucaacggcaucggcgugacccagaacgugcuguacgagaaccagaagcugaucgccaaccaguucaacagcgccaucggcaagauccaggacagccugagcagcaccgccagcgcccugggcaagcugcaggacguggugaaccagaacgcucaggcccugaacacccuggugaagcagcugagcagcaauuucggcgccaucagcagcgugcugaacgacauccugucaaggcuggacaagguggaggccgaggugcagaucgaccggcugaucaccggccggcugcagagccugcagaccuacgugacccagcagcugauccgggccgccgagauccgggccagcgccaaccuggcagccaccaagaugagcgagugcgugcugggccagagcaagcggguggacuuuugcggcaagggcuaccaccugaugagcuucccccagagcgccccacacggcgugguguuccuccacgucacauacgugcccgcccaggagaagaacuucaccaccgcccccgccauuugccacgacggcaaggcucacuucccccgggagggaguguucgugagcaacggcacccacugguucgugacccagcggaacuucuacgagccccagaucaucaccaccgacaacaccuucgugagcggcaacugcgacguggugaucggcaucgugaacaacaccguguacgacccccugcagccugagcuggacagcuucaaggaggagcuggacaaguacuucaagaaccacaccagccccgacguggaucugggcgacaucagcggcaucaacgccagcguggugaacauccagaaggagaucgaccggcugaacgagguggccaagaaccugaacgagagccugaucgaccugcaggagcugggcaaguacgagcaguacaucaaguggcccugguacaucuggcugggcuucaucgccggccugaucgccaucgugauggugaccaucaugcugugcugcaugaccagcugcuguagcugccugaagggcugcugcagcugcggcagcugcugcaaguucgacgaggacgacagcgagccagugcugaagggcgugaagcugcacuacaccugaggacuaguuauaagacugacuagcccgaugggccucccaacgggcccuccuccccuccuugcaccgagagaucucaaaggcucuuuucagagccaccaaaaaaaaaaaaaaaaaaaaaaaaaaaaaaaaaaaaaaaaaaaaaaaaaaaaaaaaaaaaaaaaaaaaaaaaaaaaaaaaaaaaaaaaaaaaaaaaaaaaa

SEQ ID NO: 24568 - RNA, 4035 nt, Artificial Sequence
  SARS-CoV-2/Wuhan/WIV05/2019__EPI_ISL_402128 spike protein mRNA gc (1-1273)(N501Y_D614G)
aggagaaagcuuaccauguucguguuccuggugcugcugccccuggugagcagccagugcgugaaccugaccacccggacccagcugcccccugccuacaccaacagcuucacccggggcguguacuaccccgacaagguguuccggagcagcgugcugcacagcacccaggaccuguuccugcccuucuucagcaacgugaccugguuccacgccauccacgugagcggcaccaacggcaccaagcgguucgacaacccagugcugcccuucaacgacggcguguacuucgccagcaccgagaagucaaacaucauccggggcuggaucuucggcaccacccuggacagcaagacacagagccugcugaucgugaacaacgccaccaacguggugaucaaggugugcgaguuucaguucugcaacgaccccuuccugggcguguacuaccacaagaacaacaagagcuggauggagagcgaguuccgggucuacagcagcgcuaacaauugcaccuucgaguacgugagccagcccuuccugauggaccucgagggcaagcagggcaacuucaagaaccugcgggaguucguguucaagaacaucgauggcuacuucaagaucuacagcaagcacacccccaucaaccuggugcgggaccugccccagggauucagcgcccuggagccucugguggaccugcccaucggcaucaacaucaccagguuccagacccugcuggcccugcaccggagcuaccugacccccggcgacagcagcagcggcuggaccgccggcgccgccgcauacuacgugggcuaccugcagccacggaccuuccugcugaaguacaacgagaacggcaccaucaccgacgccguggacugcgcccuggacccccugagcgagaccaagugcacccuaaagagcuucaccguggagaagggcaucuaccagaccagcaacuuccgggugcagcccacugagagcaucgugcgguuccccaacauuaccaaccugugucccuucggcgagguguucaacgccacccgguucgccagcguguacgccuggaaccggaagcggaucagcaacugcguggccgacuacagcgugcuguacaacagcgccagcuucagcaccuucaagugcuacggcgugagcccuaccaagcugaacgaccugugcuucaccaacguguacgcugacagcuucgugauccggggcgacgaggugcggcagaucgcccccggccagaccggcaagaucgccgacuacaacuacaagcugcccgacgacuucaccggcugcgugaucgccuggaacagcaacaaccuggacagcaaggugggcggcaacuacaacuaccuguaccggcuguuccguaagagcaaccugaagccauucgagcgggacaucagcaccgagaucuaccaggccggcagcacccccugcaacgguguggagggcuuuaacugcuacuucccccugcagagcuacggcuuccagcccaccuacggcgugggcuaccagcccuaccgggugguggugcugagcuucgagcugcugcacgcccccgccaccgugugcggcccuaaaaagagcaccaaccuggugaagaacaagugcgugaacuucaacuucaauggccugaccggcaccggcgugcugaccgagagcaacaagaaguuccugcccuuccagcaguucggccgggauaucgccgacaccaccgacgcagugcgggacccccagacccuggagauccuggacaucaccccaugcagcuucggcggcgugagcgucaucacccccggcacaaacaccagcaaccagguggccgugcuguaccagggagugaacugcaccgaggugcccguggccauccacgccgaccagcugacccccaccuggcggguguacagcaccggcagcaacguguuccagacccgggccggcugccugaucggcgccgagcacgugaacaacuccuacgagugcgacauccccaucggcgcuggcaucugcgccagcuaccagacccagaccaacagcccccggcgggcccggagcguggccagccagagcaucaucgccuacaccaugagcuuaggcgccgagaacagcguggccuacagcaacaacagcaucgcgaucccuaccaacuucaccaucagcgugaccaccgagauacugcccgugagcaugaccaagaccagcguggacuguaccauguacaucugcggcgacagcaccgagugcagcaaccugcugcugcaguacggcagcuucugcacccagcugaaccgggcccugaccggcaucgccguggagcaggacaagaacacccaagagguguucgcccaggugaagcagaucuacaagacucccccaaucaaggacuucggcggcuucaacuucagccagauccugcccgaccccagcaagcccagcaagcggagcuucaucgaggaccugcuguucaacaaggugacccuggccgacgccggcuucaucaagcaguacggcgacugccugggggauaucgccgcucgggaccugaucugcgcccagaaguucaacggccugaccgugcugcccccucugcugaccgacgagaugaucgcccaguacaccagcgcccugcuugccggcaccaucaccagcggcuggaccuucggcgccggcgcagcccugcagauccccuucgccaugcagauggccuaccgguucaacggcaucggcgugacccagaacgugcuguacgagaaccagaagcugaucgccaaccaguucaacagcgccaucggcaagauccaggacagccugagcagcaccgccagcgcccugggcaagcugcaggacguggugaaccagaacgcucaggcccugaacacccuggugaagcagcugagcagcaacuucggcgccaucagcucagugcugaacgacauccugagcaggcuggacaagguggaggccgaggugcagaucgaccggcugaucaccggccggcugcagagccugcagaccuacgugacccagcagcugauccgggccgccgagauccgggccagcgccaaucuggcagccaccaagaugagcgagugcgugcugggccagagcaagcggguggacuuuugcggcaagggcuaccaccugaugagcuucccccagagcgccccacacggcgugguguuccuccacgucacauacgugcccgcccaggagaagaacuucaccaccgcccccgccauuugccacgacggcaaggcucacuucccccgggagggaguguucgugagcaacggcacccacugguucgugacccagcggaacuucuacgagccccagaucaucaccaccgacaacaccuucgugagcggcaacugcgacguggugaucggcaucgugaacaacaccguguacgacccccugcagccugagcuggacagcuucaaggaggagcuggacaaguacuucaagaaccacaccagccccgacguggaucugggcgacaucagcggcaucaacgccagcguggugaacauccagaaggagaucgaccggcugaacgagguggccaagaaccugaacgagagccugaucgaccugcaggagcugggcaaguacgagcaguacaucaaguggcccugguacaucuggcugggcuucaucgccggccugaucgccaucgugauggugaccaucaugcugugcugcaugaccagcugcuguagcugccugaagggcugcugcagcugcggcagcugcugcaaguucgacgaggacgacagcgagccagugcugaagggcgugaagcugcacuacaccugaggacuaguuauaagacugacuagcccgaugggccucccaacgggcccuccuccccuccuugcaccgagagaucucaaaggcucuuuucagagccaccaaaaaaaaaaaaaaaaaaaaaaaaaaaaaaaaaaaaaaaaaaaaaaaaaaaaaaaaaaaaaaaaaaaaaaaaaaaaaaaaaaaaaaaaaaaaaaaaaaaaa

SEQ ID NO: 24569 - RNA, 4029 nt, Artificial Sequence
  SARS-CoV-2/Wuhan/WIV05/2019__EPI_ISL_402128 spike protein mRNA gc (1-1273)(H69del_V70del_D614G)
aggagaaagcuuaccauguucguguuccuggugcugcugccccuggugagcagccagugcgugaaccugaccacccggacccagcugcccccugccuacaccaacagcuucacccggggcguguacuaccccgacaagguguuccggagcagcgugcugcacagcacccaggaccuguuccugcccuucuucagcaacgugaccugguuccacgccaucagcggcaccaacggcaccaagcgguucgacaacccagugcugcccuucaacgacggcguguacuucgccagcaccgagaagucaaacaucauccggggcuggaucuucggcaccacccuggacagcaagacacagagccugcugaucgugaacaacgccaccaacguggugaucaaggugugcgaguuucaguucugcaacgaccccuuccugggcguguacuaccacaagaacaacaagagcuggauggagagcgaguuccggguguacagcagcgcuaacaauugcaccuucgaguacgucagccagcccuuccugauggaccucgagggcaagcagggcaacuucaagaaccugcgggaguucguguucaagaacaucgauggcuacuucaagaucuacagcaagcacacccccaucaaccuggugcgggaccugccccagggauucagcgcccuggagccucugguggaccugcccaucggcaucaacaucaccagguuccagacccugcuggcccugcaccggagcuaccugacccccggcgacagcagcagcggcuggaccgccggcgccgccgcauacuacgugggcuaccugcagccacggaccuuccugcugaaguacaacgagaacggcaccaucaccgacgccguggacugcgcccuggacccccugagcgagaccaagugcacccuaaagagcuucaccguggagaagggcaucuaccagaccagcaacuuccgggugcagcccacugagagcaucgugcgguuccccaacauuaccaaccugugucccuucggcgagguguucaacgccacccgguucgccagcguguacgccuggaaccggaagcggaucagcaacugcguggccgacuacagcgugcuguacaacagcgccagcuucagcaccuucaagugcuacggcgugagcccuaccaagcugaacgaccugugcuucaccaacguguacgcugacagcuucgugauccggggcgacgaggugcggcagaucgcccccggccagaccggcaagaucgccgacuacaacuacaagcugcccgacgacuucaccggcugcgugaucgccuggaacagcaacaaccuggacagcaaggugggcggcaacuacaacuaccuguaccggcuguuccguaagagcaaccugaagccauucgagcgggacaucagcaccgagaucuaccaggccggcagcacccccugcaacgguguggagggcuuuaacugcuacuucccccugcagagcuacggcuuccagcccaccaacggcgugggcuaccagcccuaccgggugguggugcugagcuucgagcugcugcacgcccccgccaccgugugcggcccuaaaaagagcaccaaccuggugaagaacaagugcgugaacuucaauuucaacggccugaccggcaccggcgugcugaccgagagcaacaagaaguuccugcccuuccagcaguucggccgggauaucgccgacaccaccgacgcagugcgggacccccagacccuggagauccuggacaucaccccaugcagcuucggcggcgugagcgugaucacccccggcacaaacaccagcaaccaggucgccgugcuguaccagggagugaacugcaccgaggugcccguggccauccacgccgaccagcugacccccaccuggcggguguacagcaccggcagcaacguguuccagacccgggccggcugccugaucggcgccgagcacgugaacaacuccuacgagugcgacauccccaucggcgcuggcaucugcgccagcuaccagacccagaccaacagcccccggcgggcccggagcguggccagccagagcaucaucgccuacaccaugagcuuaggcgccgagaacagcguggccuacagcaacaacagcaucgcgaucccuaccaacuucaccaucagcgugaccaccgagauacugcccgugagcaugaccaagaccagcguggacuguaccauguacaucugcggcgacagcaccgagugcagcaaccugcugcugcaguacggcagcuucugcacccagcugaaccgggcccugaccggcaucgccguggagcaggacaagaacacccaagagguguucgcccaggugaagcagaucuacaagacucccccaaucaaggacuucggcggcuucaacuucagccagauccugcccgaccccagcaagcccagcaagcggagcuucaucgaggaccugcuguucaacaaggugacccuggccgacgccggcuucaucaagcaguacggcgacugccugggggauaucgccgcucgggaccugaucugcgcccagaaguucaacggccugaccgugcugcccccucugcugaccgacgagaugaucgcccaguacaccagcgcccugcuugccggcaccaucaccagcggcuggaccuucggcgccggcgcagcccugcagauccccuucgccaugcagauggccuaccgguucaacggcaucggcgugacccagaacgugcuguacgagaaccagaagcugaucgccaaccaguucaacagcgccaucggcaagauccaggacagccugagcagcaccgccagcgcccugggcaagcugcaggacguggugaaccagaacgcucaggcccugaacacccuggugaagcagcugagcagcaacuucggcgccaucagcucagugcugaaugacauccugagcaggcuggacaagguggaggccgaggugcagaucgaccggcugaucaccggccggcugcagagccugcagaccuacgugacccagcagcugauccgggccgccgagauccgggccagcgccaaccuggcagccaccaagaugagcgagugcgugcugggccagagcaagcggguggacuuuugcggcaagggcuaccaccugaugagcuucccccagagcgccccacacggcgugguguuccuccacgugacauacguccccgcccaggagaagaacuucaccaccgcccccgccauuugccacgacggcaaggcucacuucccccgggagggaguguucgugagcaacggcacccacugguucgugacccagcggaacuucuacgagccccagaucaucaccaccgacaacaccuucgugagcggcaacugcgacguggugaucggcaucgugaacaacaccguguacgacccccugcagccugagcuggacagcuucaaggaggagcuggacaaguacuucaagaaccacaccagccccgacguggaucugggcgacaucagcggcaucaacgccagcguggugaacauccagaaggagaucgaccggcugaacgagguggccaagaaccugaacgagagccugaucgaccugcaggagcugggcaaguacgagcaguacaucaaguggcccugguacaucuggcugggcuucaucgccggccugaucgccaucgugauggugaccaucaugcugugcugcaugaccagcugcuguagcugccugaagggcugcugcagcugcggcagcugcugcaaguucgacgaggacgacagcgagccagugcugaagggcgugaagcugcacuacaccugaggacuaguuauaagacugacuagcccgaugggccucccaacgggcccuccuccccuccuugcaccgagagaucucaaaggcucuuuucagagccaccaaaaaaaaaaaaaaaaaaaaaaaaaaaaaaaaaaaaaaaaaaaaaaaaaaaaaaaaaaaaaaaaaaaaaaaaaaaaaaaaaaaaaaaaaaaaaaaaaaaaa

SEQ ID NO: 24570 - RNA, 4035 nt, Artificial Sequence
  SARS-CoV-2/Wuhan/WIV05/2019__EPI_ISL_402128 spike protein mRNA gc (1-1273)(Y453F_D614G)
aggagaaagcuuaccauguucguguuccuggugcugcugccccuggugagcagccagugcgugaaccugaccacccggacccagcugcccccugccuacaccaacagcuucacccggggcguguacuaccccgacaagguguuccggagcagcgugcugcacagcacccaggaccuguuccugcccuucuucagcaacgugaccugguuccacgccauccacgugagcggcaccaacggcaccaagcgguucgacaacccagugcugcccuucaacgacggcguguacuucgccagcaccgagaagucaaacaucauccggggcuggaucuucggcaccacccuggacagcaagacacagagccugcugaucgugaacaacgccaccaacguggugaucaaggugugcgaguuucaguucugcaacgaccccuuccugggcguguacuaccacaagaacaacaagagcuggauggagagcgaguuccgggucuacagcagcgcuaacaauugcaccuucgaguacgugagccagcccuuccugauggaccucgagggcaagcagggcaacuucaagaaccugcgggaguucguguucaagaacaucgauggcuacuucaagaucuacagcaagcacacccccaucaaccuggugcgggaccugccccagggauucagcgcccuggagccucugguggaccugcccaucggcaucaacaucaccagguuccagacccugcuggcccugcaccggagcuaccugacccccggcgacagcagcagcggcuggaccgccggcgccgccgcauacuacgugggcuaccugcagccacggaccuuccugcugaaguacaacgagaacggcaccaucaccgacgccguggacugcgcccuggacccccugagcgagaccaagugcacccuaaagagcuucaccguggagaagggcaucuaccagaccagcaacuuccgggugcagcccacugagagcaucgugcgguuccccaacauuaccaaccugugucccuucggcgagguguucaacgccacccgguucgccagcguguacgccuggaaccggaagcggaucagcaacugcguggccgacuacagcgugcuguacaacagcgccagcuucagcaccuucaagugcuacggcgugagcccuaccaagcugaacgaccugugcuucaccaacguguacgcugacagcuucgugauccggggcgacgaggugcggcagaucgcccccggccagaccggcaagaucgccgacuacaacuacaagcugcccgacgacuucaccggcugcgugaucgccuggaacagcaacaaccuggacagcaaggugggcggcaacuacaacuaccuguuccggcuguuccguaagagcaaccugaagccauuugagcgggacaucagcaccgagaucuaccaggccggcagcacccccugcaacgguguggagggcuucaacugcuacuucccccugcagagcuacggcuuccagcccaccaacggcgugggcuaccagcccuaccgggugguggugcugagcuucgagcugcugcacgcccccgccaccgugugcggcccuaaaaagagcaccaaccuggugaagaacaagugcgugaacuucaauuucaacggccugaccggcaccggcgugcugaccgagagcaacaagaaguuccugcccuuccagcaguucggccgggauaucgccgacaccaccgacgcagugcgggacccccagacccuggagauccuggacaucaccccaugcagcuucggcggcgugagcgucaucacccccggcacaaacaccagcaaccagguggccgugcuguaccagggagugaacugcaccgaggugcccguggccauccacgccgaccagcugacccccaccuggcggguguacagcaccggcagcaacguguuccagacccgggccggcugccugaucggcgccgagcacgugaacaacuccuacgagugcgacauccccaucggcgcuggcaucugcgccagcuaccagacccagaccaacagcccccggcgggcccggagcguggccagccagagcaucaucgccuacaccaugagcuuaggcgccgagaacagcguggccuacagcaacaacagcaucgcgaucccuaccaacuucaccaucagcgugaccaccgagauacugcccgugagcaugaccaagaccagcguggacuguaccauguacaucugcggcgacagcaccgagugcagcaaccugcugcugcaguacggcagcuucugcacccagcugaaccgggcccugaccggcaucgccguggagcaggacaagaacacccaagagguguucgcccaggugaagcagaucuacaagacucccccaaucaaggacuucggcggcuucaacuucagccagauccugcccgaccccagcaagcccagcaagcggagcuucaucgaggaccugcuguucaacaaggugacccuggccgacgccggcuucaucaagcaguacggcgacugccugggggauaucgccgcucgggaccugaucugcgcccagaaguucaacggccugaccgugcugcccccucugcugaccgacgagaugaucgcccaguacaccagcgcccugcuugccggcaccaucaccagcggcuggaccuucggcgccggcgcagcccugcagauccccuucgccaugcagauggccuaccgguucaacggcaucggcgugacccagaacgugcuguacgagaaccagaagcugaucgccaaccaguucaacagcgccaucggcaagauccaggacagccugagcagcaccgccagcgcccugggcaagcugcaggacguggugaaccagaacgcucaggcccugaacacccuggugaagcagcugagcagcaacuuuggcgccaucagcucagugcugaaugacauccugagcaggcuggacaagguggaggccgaggugcagaucgaccggcugaucaccggccggcugcagagccugcagaccuacgugacccagcagcugauccgggccgccgagauccgggccagcgccaaccuggcagccaccaagaugagcgagugcgugcugggccagagcaagcggguggacuucugcggcaagggcuaccaccugaugagcuucccccagagcgccccacacggcgugguguuccuccacgucacauacgugcccgcccaggagaagaacuucaccaccgcccccgccauuugccacgacggcaaggcucacuucccccgggagggaguguucgugagcaacggcacccacugguucgugacccagcggaacuucuacgagccccagaucaucaccaccgacaacaccuucgugagcggcaacugcgacguggugaucggcaucgugaacaacaccguguacgacccccugcagccugagcuggacagcuucaaggaggagcuggacaaguacuucaagaaccacaccagccccgacguggaucugggcgacaucagcggcaucaacgccagcguggugaacauccagaaggagaucgaccggcugaacgagguggccaagaaccugaacgagagccugaucgaccugcaggagcugggcaaguacgagcaguacaucaaguggcccugguacaucuggcugggcuucaucgccggccugaucgccaucgugauggugaccaucaugcugugcugcaugaccagcugcuguagcugccugaagggcugcugcagcugcggcagcugcugcaaguucgacgaggacgacagcgagccagugcugaagggcgugaagcugcacuacaccugaggacuaguuauaagacugacuagcccgaugggccucccaacgggcccuccuccccuccuugcaccgagagaucucaaaggcucuuuucagagccaccaaaaaaaaaaaaaaaaaaaaaaaaaaaaaaaaaaaaaaaaaaaaaaaaaaaaaaaaaaaaaaaaaaaaaaaaaaaaaaaaaaaaaaaaaaaaaaaaaaaaa

SEQ ID NO: 24571 - RNA, 4035 nt, Artificial Sequence
  SARS-CoV-2/Wuhan/WIV05/2019__EPI_ISL_402128 spike protein mRNA gc (1-1273)(D614G_I692V)
aggagaaagcuuaccauguucguguuccuggugcugcugccccuggugagcagccagugcgugaaccugaccacccggacccagcugcccccugccuacaccaacagcuucacccggggcguguacuaccccgacaagguguuccggagcagcgugcugcacagcacccaggaccuguuccugcccuucuucagcaacgugaccugguuccacgccauccacgugagcggcaccaacggcaccaagcgguucgacaacccagugcugcccuucaacgacggcguguacuucgccagcaccgagaagucaaacaucauccggggcuggaucuucggcaccacccuggacagcaagacacagagccugcugaucgugaacaacgccaccaacguggugaucaaggugugcgaguuucaguucugcaacgaccccuuccugggcguguacuaccacaagaacaacaagagcuggauggagagcgaguuccgggucuacagcagcgcuaacaauugcaccuucgaguacgugagccagcccuuccugauggaccucgagggcaagcagggcaacuucaagaaccugcgggaguucguguucaagaacaucgauggcuacuucaagaucuacagcaagcacacccccaucaaccuggugcgggaccugccccagggauucagcgcccuggagccucugguggaccugcccaucggcaucaacaucaccagguuccagacccugcuggcccugcaccggagcuaccugacccccggcgacagcagcagcggcuggaccgccggcgccgccgcauacuacgugggcuaccugcagccacggaccuuccugcugaaguacaacgagaacggcaccaucaccgacgccguggacugcgcccuggacccccugagcgagaccaagugcacccuaaagagcuucaccguggagaagggcaucuaccagaccagcaacuuccgggugcagcccacugagagcaucgugcgguuccccaacauuaccaaccugugucccuucggcgagguguucaacgccacccgguucgccagcguguacgccuggaaccggaagcggaucagcaacugcguggccgacuacagcgugcuguacaacagcgccagcuucagcaccuucaagugcuacggcgugagcccuaccaagcugaacgaccugugcuucaccaacguguacgcugacagcuucgugauccggggcgacgaggugcggcagaucgcccccggccagaccggcaagaucgccgacuacaacuacaagcugcccgacgacuucaccggcugcgugaucgccuggaacagcaacaaccuggacagcaaggugggcggcaacuacaacuaccuguaccggcuguuccguaagagcaaccugaagccauucgagcgggacaucagcaccgagaucuaccaggccggcagcacccccugcaacgguguggagggcuuuaacugcuacuucccccugcagagcuacggcuuccagcccaccaacggcgugggcuaccagcccuaccgggugguggugcugagcuucgagcugcugcacgcccccgccaccgugugcggcccuaaaaagagcaccaaccuggugaagaacaagugcgugaacuucaauuucaacggccugaccggcaccggcgugcugaccgagagcaacaagaaguuccugcccuuccagcaguucggccgggauaucgccgacaccaccgacgcagugcgggacccccagacccuggagauccuggacaucaccccaugcagcuucggcggcgugagcgucaucacccccggcacaaacaccagcaaccagguggccgugcuguaccagggagugaacugcaccgaggugcccguggccauccacgccgaccagcugacccccaccuggcggguguacagcaccggcagcaacguguuccagacccgggccggcugccugaucggcgccgagcacgugaacaacuccuacgagugcgacauccccaucggcgcuggcaucugcgccagcuaccagacccagaccaacagcccccggcgggcccggagcguggccagccagagcgugaucgccuacaccaugagcuuaggcgccgagaacagcguggccuacagcaacaacagcaucgcgaucccuaccaacuucaccaucagcgugaccaccgagauccugcccgugagcaugaccaagaccagcguggacuguaccauguacauaugcggcgacagcaccgagugcagcaaccugcugcugcaguacggcagcuucugcacccagcugaaccgggcccugaccggcaucgccguggagcaggacaagaacacccaagagguguucgcccaggugaagcagaucuacaagacucccccaaucaaggacuucggcggcuucaacuucagccagauccugcccgaccccagcaagcccagcaagcggagcuucaucgaggaccugcuguucaacaaggugacccuggccgacgccggcuucaucaagcaguacggcgacugccugggggauaucgccgcucgggaccugaucugcgcccagaaguucaacggccugaccgugcugcccccucugcugaccgacgagaugaucgcccaguacaccagcgcccugcuugccggcaccaucaccagcggcuggaccuucggcgccggcgcagcccugcagauccccuucgccaugcagauggccuaccgguucaacggcaucggcgugacccagaacgugcuguacgagaaccagaagcugaucgccaaccaguucaacagcgccaucggcaagauccaggacagccugagcagcaccgccagcgcccugggcaagcugcaggacguggugaaccagaacgcucaggcccugaacacccuggugaagcagcugagcagcaacuucggcgccaucagcucagugcugaaugacauccugagcaggcuggacaagguggaggccgaggugcagaucgaccggcugaucaccggccggcugcagagccugcagaccuacgugacccagcagcugauccgggccgccgagauccgggccagcgccaaccuggcagccaccaagaugagcgagugcgugcugggccagagcaagcggguggacuuuugcggcaagggcuaccaccugaugagcuucccccagagcgccccacacggcguggucuuccuccacgugacauacgugcccgcccaggagaagaacuucaccaccgcccccgccaucugccacgacggcaaggcucacuucccccgggagggaguguucgugagcaacggcacccacugguucgugacccagcggaacuucuacgagccccagauuaucaccaccgacaacaccuucgugagcggcaacugcgacguggugaucggcaucgugaacaacaccguguacgacccccugcagccugagcuggacagcuucaaggaggagcuggacaaguacuucaagaaccacaccagccccgacguggaucugggcgacaucagcggcaucaacgccagcguggugaacauccagaaggagaucgaccggcugaacgagguggccaagaaccugaacgagagccugaucgaccugcaggagcugggcaaguacgagcaguacaucaaguggcccugguacaucuggcugggcuucaucgccggccugaucgccaucgugauggugaccaucaugcugugcugcaugaccagcugcuguagcugccugaagggcugcugcagcugcggcagcugcugcaaguucgacgaggacgacagcgagccagugcugaagggcgugaagcugcacuacaccugaggacuaguuauaagacugacuagcccgaugggccucccaacgggcccuccuccccuccuugcaccgagagaucucaaaggcucuuuucagagccaccaaaaaaaaaaaaaaaaaaaaaaaaaaaaaaaaaaaaaaaaaaaaaaaaaaaaaaaaaaaaaaaaaaaaaaaaaaaaaaaaaaaaaaaaaaaaaaaaaaaaa

SEQ ID NO: 24572 - RNA, 4035 nt, Artificial Sequence
  SARS-CoV-2/Wuhan/WIV05/2019__EPI_ISL_402128 spike protein mRNA gc (1-1273)(D614G_M1229I)
aggagaaagcuuaccauguucguguuccuggugcugcugccccuggugagcagccagugcgugaaccugaccacccggacccagcugcccccugccuacaccaacagcuucacccggggcguguacuaccccgacaagguguuccggagcagcgugcugcacagcacccaggaccuguuccugcccuucuucagcaacgugaccugguuccacgccauccacgugagcggcaccaacggcaccaagcgguucgacaacccagugcugcccuucaacgacggcguguacuucgccagcaccgagaagucaaacaucauccggggcuggaucuucggcaccacccuggacagcaagacacagagccugcugaucgugaacaacgccaccaacguggugaucaaggugugcgaguuucaguucugcaacgaccccuuccugggcguguacuaccacaagaacaacaagagcuggauggagagcgaguuccgggucuacagcagcgcuaacaauugcaccuucgaguacgugagccagcccuuccugauggaccucgagggcaagcagggcaacuucaagaaccugcgggaguucguguucaagaacaucgauggcuacuucaagaucuacagcaagcacacccccaucaaccuggugcgggaccugccccagggauucagcgcccuggagccucugguggaccugcccaucggcaucaacaucaccagguuccagacccugcuggcccugcaccggagcuaccugacccccggcgacagcagcagcggcuggaccgccggcgccgccgcauacuacgugggcuaccugcagccacggaccuuccugcugaaguacaacgagaacggcaccaucaccgacgccguggacugcgcccuggacccccugagcgagaccaagugcacccuaaagagcuucaccguggagaagggcaucuaccagaccagcaacuuccgggugcagcccacugagagcaucgugcgguuccccaacauuaccaaccugugucccuucggcgagguguucaacgccacccgguucgccagcguguacgccuggaaccggaagcggaucagcaacugcguggccgacuacagcgugcuguacaacagcgccagcuucagcaccuucaagugcuacggcgugagcccuaccaagcugaacgaccugugcuucaccaacguguacgcugacagcuucgugauccggggcgacgaggugcggcagaucgcccccggccagaccggcaagaucgccgacuacaacuacaagcugcccgacgacuucaccggcugcgugaucgccuggaacagcaacaaccuggacagcaaggugggcggcaacuacaacuaccuguaccggcuguuccguaagagcaaccugaagccauucgagcgggacaucagcaccgagaucuaccaggccggcagcacccccugcaacgguguggagggcuuuaacugcuacuucccccugcagagcuacggcuuccagcccaccaacggcgugggcuaccagcccuaccgggugguggugcugagcuucgagcugcugcacgcccccgccaccgugugcggcccuaaaaagagcaccaaccuggugaagaacaagugcgugaacuucaauuucaacggccugaccggcaccggcgugcugaccgagagcaacaagaaguuccugcccuuccagcaguucggccgggauaucgccgacaccaccgacgcagugcgggacccccagacccuggagauccuggacaucaccccaugcagcuucggcggcgugagcgucaucacccccggcacaaacaccagcaaccagguggccgugcuguaccagggagugaacugcaccgaggugcccguggccauccacgccgaccagcugacccccaccuggcggguguacagcaccggcagcaacguguuccagacccgggccggcugccugaucggcgccgagcacgugaacaacuccuacgagugcgacauccccaucggcgcuggcaucugcgccagcuaccagacccagaccaacagcccccggcgggcccggagcguggccagccagagcaucaucgccuacaccaugagcuuaggcgccgagaacagcguggccuacagcaacaacagcaucgcgaucccuaccaacuucaccaucagcgugaccaccgagauacugcccgugagcaugaccaagaccagcguggacuguaccauguacaucugcggcgacagcaccgagugcagcaaccugcugcugcaguacggcagcuucugcacccagcugaaccgggcccugaccggcaucgccguggagcaggacaagaacacccaagagguguucgcccaggugaagcagaucuacaagacucccccaaucaaggacuucggcggcuucaacuucagccagauccugcccgaccccagcaagcccagcaagcggagcuucaucgaggaccugcuguucaacaaggugacccuggccgacgccggcuucaucaagcaguacggcgacugccugggggauaucgccgcucgggaccugaucugcgcccagaaguucaacggccugaccgugcugcccccucugcugaccgacgagaugaucgcccaguacaccagcgcccugcuugccggcaccaucaccagcggcuggaccuucggcgccggcgcagcccugcagauccccuucgccaugcagauggccuaccgguucaacggcaucggcgugacccagaacgugcuguacgagaaccagaagcugaucgccaaccaguucaacagcgccaucggcaagauccaggacagccugagcagcaccgccagcgcccugggcaagcugcaggacguggugaaccagaacgcucaggcccugaacacccuggugaagcagcugagcagcaacuucggcgccaucagcucagugcugaaugacauccugagcaggcuggacaagguggaggccgaggugcagaucgaccggcugaucaccggccggcugcagagccugcagaccuacgugacccagcagcugauccgggccgccgagauccgggccagcgccaaccuggcagccaccaagaugagcgagugcgugcugggccagagcaagcggguggacuuuugcggcaagggcuaccaccugaugagcuucccccagagcgccccacacggcgugguguuccuccacgucacauacgugcccgcccaggagaagaacuucaccaccgcccccgccauuugccacgacggcaaggcucacuucccccgggagggaguguucgugagcaacggcacccacugguucgugacccagcggaacuucuacgagccccagaucaucaccaccgacaacaccuucgugagcggcaacugcgacguggugaucggcaucgugaacaacaccguguacgacccccugcagccugagcuggacagcuucaaggaggagcuggacaaguacuucaagaaccacaccagccccgacguggaucugggcgacaucagcggcaucaacgccagcguggugaacauccagaaggagaucgaccggcugaacgagguggccaagaaccugaacgagagccugaucgaccugcaggagcugggcaaguacgagcaguacaucaaguggcccugguacaucuggcugggcuucaucgccggccugaucgccaucgugaucgugaccaucaugcugugcugcaugaccagcugcuguagcugccugaagggcugcugcagcugcggcagcugcugcaaguucgacgaggacgacagcgagccagugcugaagggcgugaagcugcacuacaccugaggacuaguuauaagacugacuagcccgaugggccucccaacgggcccuccuccccuccuugcaccgagagaucucaaaggcucuuuucagagccaccaaaaaaaaaaaaaaaaaaaaaaaaaaaaaaaaaaaaaaaaaaaaaaaaaaaaaaaaaaaaaaaaaaaaaaaaaaaaaaaaaaaaaaaaaaaaaaaaaaaaa

SEQ ID NO: 24573 - RNA, 4029 nt, Artificial Sequence
  SARS-CoV-2/Wuhan/WIV05/2019__EPI_ISL_402128 spike protein mRNA gc (1-1273)(H69del_V70del_A222V_Y453F_S477N_D614G_I692V)
aggagaaagcuuaccauguucguguuccuggugcugcugccccuggugagcagccagugcgugaaccugaccacccggacccagcugcccccugccuacaccaacagcuucacccggggcguguacuaccccgacaagguguuccggagcagcgugcugcacagcacccaggaccuguuccugcccuucuucagcaacgugaccugguuccacgccaucagcggcaccaacggcaccaagcgguucgacaacccagugcugcccuucaacgacggcguguacuucgccagcaccgagaagucaaacaucauccggggcuggaucuucggcaccacccuggacagcaagacacagagccugcugaucgugaacaacgccaccaacguggugaucaaggugugcgaguuucaguucugcaacgaccccuuccugggcguguacuaccacaagaacaacaagagcuggauggagagcgaguuccggguguacagcagcgcuaacaauugcaccuucgaguacgucagccagcccuuccugauggaccucgagggcaagcagggcaacuucaagaaccugcgggaguucguguucaagaacaucgauggcuacuucaagaucuacagcaagcacacccccaucaaccuggugcgggaccugccccagggauucagcgugcuggagccucugguggaccugcccaucggcaucaacaucaccagguuccagacccugcuggcccugcaccggagcuaccugacccccggcgacagcagcagcggcuggaccgccggcgccgccgccuacuacgugggcuaccugcagccacggaccuuccugcugaaguacaacgagaacggcaccaucaccgacgcaguggacugcgcccuggacccccugagcgagaccaagugcacccuaaagagcuucaccguggagaagggcaucuaccagaccagcaacuuccgggugcagcccacugagagcaucgugcgguuccccaacauuaccaaccugugucccuucggcgagguguucaacgccacccgguucgccagcguguacgccuggaaccggaagcggaucagcaacugcguggccgacuacagcgugcuguacaacagcgccagcuucagcaccuucaagugcuacggcgugagcccuaccaagcugaacgaccugugcuucaccaacguguacgccgacagcuucgugauccggggcgacgaggugcggcagaucgcucccggccagaccggcaagaucgccgacuacaacuacaagcugcccgacgacuucaccggcugcgugaucgccuggaacagcaacaaccuggacagcaaggugggcggcaacuacaacuaccuguuccggcuguuccguaagagcaaccugaagccauuugagcgggacaucagcaccgagaucuaccaggccggcaacacccccugcaacgguguggagggcuucaacugcuacuucccccugcagagcuacggcuuccagcccaccaacggcgugggcuaccagcccuaccgggugguggugcugagcuucgagcugcugcacgcccccgccaccgugugcggcccuaaaaagagcaccaaccuggugaagaacaagugcgugaauuucaacuucaacggccugaccggcaccggcgugcugaccgagagcaacaagaaguuccugcccuuccagcaguucggccgggauaucgccgacaccaccgacgccgugcgggacccccagacccuggagauccuggacaucaccccaugcagcuucggcggcgugagcgucaucacccccggcacaaacaccagcaaccagguggcagugcuguaccagggagugaacugcaccgaggugcccguggccauccacgccgaccagcugacccccaccuggcggguguacagcaccggcagcaacguguuccagacccgggccggcugccugaucggcgccgagcacgugaacaacagcuacgagugcgacauccccaucggcgccggcaucugcgcuuccuaccagacccagaccaacagcccccggcgggcccggagcguggccagccagagcgugaucgccuacaccaugagcuuaggcgccgagaacagcguggccuacagcaacaacagcaucgccaucccuaccaacuucaccaucagcgugaccaccgagauccugcccgugagcaugaccaagaccagcguggacuguaccauguacauaugcggcgacagcaccgagugcagcaaccugcugcugcaguacggcagcuucugcacccagcugaaccgggcgcugaccggcaucgccguggagcaggacaagaacacccaagagguguucgcccaggugaagcagaucuacaagacucccccaaucaaggacuucggcggcuucaacuucagccagauccugcccgaccccagcaagcccagcaagcggagcuucaucgaggaccugcuguucaacaaggugacccuggccgacgccggcuucaucaagcaguacggcgacugccugggggauaucgccgcccgggaccugaucugcgcucagaaguucaacggccugaccgugcugcccccucugcugaccgacgagaugaucgcccaguacaccagcgcccugcuugccggcaccaucaccagcggcuggaccuucggcgccggcgccgcacugcagauccccuucgccaugcagauggccuaccgguucaacggcaucggcgugacccagaacgugcuguacgagaaccagaagcugaucgccaaccaguucaacagcgccaucggcaagauccaggacagccugagcagcaccgccagcgcccugggcaagcugcaggacguggugaaccagaacgcccaggcucugaacacccuggugaagcagcugagcagcaauuuuggcgccaucagcagcgugcugaacgacauccugucaaggcuggacaagguggaggccgaggugcagaucgaccggcugaucaccggccggcugcagagccugcagaccuacgugacccagcagcugauccgggccgccgagauccgggccagcgccaaccuggccgcaaccaagaugagcgagugcgugcugggccagagcaagcggguggacuucugcggcaagggcuaccaccugaugagcuucccccagagcgccccacacggcguggucuuccuccacgugacauacgugcccgcccaggagaagaacuucaccaccgcccccgccaucugccacgacggcaaggcccacuucccccgggagggaguguucgugagcaacggcacccacugguucgugacccagcggaacuucuacgagccccagauuaucaccaccgacaacaccuucgugagcggcaacugcgacguggugaucggcaucgugaacaacaccguguacgacccccugcagccugagcuggacagcuucaaggaggagcuggacaaguacuucaagaaccacaccagccccgacguggaucugggcgacaucagcggcaucaacgcuagcguggugaacauccagaaggagaucgaccggcugaacgagguggccaagaaccugaacgagagccugaucgaccugcaggagcugggcaaguacgagcaguacaucaaguggcccugguacaucuggcugggcuucaucgccggccugaucgccaucgugauggugaccaucaugcugugcugcaugaccagcugcuguagcugccugaagggcugcugcagcugcggcagcugcugcaaguucgacgaggacgacagcgagccagugcugaagggcgugaagcugcacuacaccugaggacuaguuauaagacugacuagcccgaugggccucccaacgggcccuccuccccuccuugcaccgagagaucucaaaggcucuuuucagagccaccaaaaaaaaaaaaaaaaaaaaaaaaaaaaaaaaaaaaaaaaaaaaaaaaaaaaaaaaaaaaaaaaaaaaaaaaaaaaaaaaaaaaaaaaaaaaaaaaaaaaa

SEQ ID NO: 24574 - RNA, 4029 nt, Artificial Sequence
  SARS-CoV-2/Wuhan/WIV05/2019__EPI_ISL_402128 spike protein mRNA gc (1-1273)(H69del_V70del_Y453F_D614G_I692V_M1229I)
aggagaaagcuuaccauguucguguuccuggugcugcugccccuggugagcagccagugcgugaaccugaccacccggacccagcugcccccugccuacaccaacagcuucacccggggcguguacuaccccgacaagguguuccggagcagcgugcugcacagcacccaggaccuguuccugcccuucuucagcaacgugaccugguuccacgccaucagcggcaccaacggcaccaagcgguucgacaacccagugcugcccuucaacgacggcguguacuucgccagcaccgagaagucaaacaucauccggggcuggaucuucggcaccacccuggacagcaagacacagagccugcugaucgugaacaacgccaccaacguggugaucaaggugugcgaguuucaguucugcaacgaccccuuccugggcguguacuaccacaagaacaacaagagcuggauggagagcgaguuccggguguacagcagcgcuaacaauugcaccuucgaguacgucagccagcccuuccugauggaccucgagggcaagcagggcaacuucaagaaccugcgggaguucguguucaagaacaucgauggcuacuucaagaucuacagcaagcacacccccaucaaccuggugcgggaccugccccagggauucagcgcccuggagccucugguggaccugcccaucggcaucaacaucaccagguuccagacccugcuggcccugcaccggagcuaccugacccccggcgacagcagcagcggcuggaccgccggcgccgccgcauacuacgugggcuaccugcagccacggaccuuccugcugaaguacaacgagaacggcaccaucaccgacgccguggacugcgcccuggacccccugagcgagaccaagugcacccuaaagagcuucaccguggagaagggcaucuaccagaccagcaacuuccgggugcagcccacugagagcaucgugcgguuccccaacauuaccaaccugugucccuucggcgagguguucaacgccacccgguucgccagcguguacgccuggaaccggaagcggaucagcaacugcguggccgacuacagcgugcuguacaacagcgccagcuucagcaccuucaagugcuacggcgugagcccuaccaagcugaacgaccugugcuucaccaacguguacgcugacagcuucgugauccggggcgacgaggugcggcagaucgcccccggccagaccggcaagaucgccgacuacaacuacaagcugcccgacgacuucaccggcugcgugaucgccuggaacagcaacaaccuggacagcaaggugggcggcaacuacaacuaccuguuccggcuguuccguaagagcaaccugaagccauuugagcgggacaucagcaccgagaucuaccaggccggcagcacccccugcaacgguguggagggcuucaacugcuacuucccccugcagagcuacggcuuccagcccaccaacggcgugggcuaccagcccuaccgggugguggugcugagcuucgagcugcugcacgcccccgccaccgugugcggcccuaaaaagagcaccaaccuggugaagaacaagugcgugaacuucaauuucaacggccugaccggcaccggcgugcugaccgagagcaacaagaaguuccugcccuuccagcaguucggccgggauaucgccgacaccaccgacgcagugcgggacccccagacccuggagauccuggacaucaccccaugcagcuucggcggcgugagcgugaucacccccggcacaaacaccagcaaccaggucgccgugcuguaccagggagugaacugcaccgaggugcccguggccauccacgccgaccagcugacccccaccuggcggguguacagcaccggcagcaacguguuccagacccgggccggcugccugaucggcgccgagcacgugaacaacuccuacgagugcgacauccccaucggcgcuggcaucugcgccagcuaccagacccagaccaacagcccccggcgggcccggagcguggccagccagagcgugaucgccuacaccaugagcuuaggcgccgagaacagcguggccuacagcaacaacagcaucgcgaucccuaccaacuucaccaucagcgugaccaccgagauccugcccgugagcaugaccaagaccagcguggacuguaccauguacauaugcggcgacagcaccgagugcagcaaccugcugcugcaguacggcagcuucugcacccagcugaaccgggcccugaccggcaucgccguggagcaggacaagaacacccaagagguguucgcccaggugaagcagaucuacaagacucccccaaucaaggacuucggcggcuucaacuucagccagauccugcccgaccccagcaagcccagcaagcggagcuucaucgaggaccugcuguucaacaaggugacccuggccgacgccggcuucaucaagcaguacggcgacugccugggggauaucgccgcucgggaccugaucugcgcccagaaguucaacggccugaccgugcugcccccucugcugaccgacgagaugaucgcccaguacaccagcgcccugcuugccggcaccaucaccagcggcuggaccuucggcgccggcgcagcccugcagauccccuucgccaugcagauggccuaccgguucaacggcaucggcgugacccagaacgugcuguacgagaaccagaagcugaucgccaaccaguucaacagcgccaucggcaagauccaggacagccugagcagcaccgccagcgcccugggcaagcugcaggacguggugaaccagaacgcucaggcccugaacacccuggugaagcagcugagcagcaacuuuggcgccaucagcucagugcugaaugacauccugagcaggcuggacaagguggaggccgaggugcagaucgaccggcugaucaccggccggcugcagagccugcagaccuacgugacccagcagcugauccgggccgccgagauccgggccagcgccaaccuggcagccaccaagaugagcgagugcgugcugggccagagcaagcggguggacuucugcggcaagggcuaccaccugaugagcuucccccagagcgccccacacggcgugguguuccuccacgucacauacgugcccgcccaggagaagaacuucaccaccgcccccgccaucugccacgacggcaaggcucacuucccccgggagggaguguucgugagcaacggcacccacugguucgugacccagcggaacuucuacgagccccagauuaucaccaccgacaacaccuucgugagcggcaacugcgacguggugaucggcaucgugaacaacaccguguacgacccccugcagccugagcuggacagcuucaaggaggagcuggacaaguacuucaagaaccacaccagccccgacguggaucugggcgacaucagcggcaucaacgccagcguggugaacauccagaaggagaucgaccggcugaacgagguggccaagaaccugaacgagagccugaucgaccugcaggagcugggcaaguacgagcaguacaucaaguggcccugguacaucuggcugggcuucaucgccggccugaucgccaucgugaucgugaccaucaugcugugcugcaugaccagcugcuguagcugccugaagggcugcugcagcugcggcagcugcugcaaguucgacgaggacgacagcgagccagugcugaagggcgugaagcugcacuacaccugaggacuaguuauaagacugacuagcccgaugggccucccaacgggcccuccuccccuccuugcaccgagagaucucaaaggcucuuuucagagccaccaaaaaaaaaaaaaaaaaaaaaaaaaaaaaaaaaaaaaaaaaaaaaaaaaaaaaaaaaaaaaaaaaaaaaaaaaaaaaaaaaaaaaaaaaaaaaaaaaaaaa

SEQ ID NO: 24575 - RNA, 4026 nt, Artificial Sequence
  SARS-CoV-2/Wuhan/WIV05/2019__EPI_ISL_402128 spike protein mRNA gc (1-1273)(H69del_V70del_Y144del_N501Y_A570D_D614G_P681H_T716I_S982 A_D1118H)
aggagaaagcuuaccauguucguguuccuggugcugcugccccuggugagcagccagugcgugaaccugaccacccggacccagcugcccccugccuacaccaacagcuucacccggggcguguacuaccccgacaagguguuccggagcagcgugcugcacagcacccaggaccuguuccugcccuucuucagcaacgugaccugguuccacgccaucagcggcaccaacggcaccaagcgguucgacaacccagugcugcccuucaacgacggcguguacuucgccagcaccgagaagucaaacaucauccggggcuggaucuucggcaccacccuggacagcaagacacagagccugcugaucgugaacaacgccaccaacguggugaucaaggugugcgaguuucaguucugcaacgaccccuuccugggcguguaccacaagaacaacaagagcuggauggagagcgaguuccggguguacagcagcgcuaacaauugcaccuucgaguacgucagccagcccuuccugauggaccucgagggcaagcagggcaacuucaagaaccugcgggaguucguguucaagaacaucgauggcuacuucaagaucuacagcaagcacacccccaucaaccuggugcgggaccugccccagggauucagcgcccuggagccucugguggaccugcccaucggcaucaacaucaccagguuccagacccugcuggcccugcaccggagcuaccugacccccggcgacagcagcagcggcuggaccgccggcgccgccgcauacuacgugggcuaccugcagccacggaccuuccugcugaaguacaacgagaacggcaccaucaccgacgccguggacugcgcccuggacccccugagcgagaccaagugcacccuaaagagcuucaccguggagaagggcaucuaccagaccagcaacuuccgggugcagcccacugagagcaucgugcgguuccccaacauuaccaaccugugucccuucggcgagguguucaacgccacccgguucgccagcguguacgccuggaaccggaagcggaucagcaacugcguggccgacuacagcgugcuguacaacagcgccagcuucagcaccuucaagugcuacggcgugagcccuaccaagcugaacgaccugugcuucaccaacguguacgcugacagcuucgugauccggggcgacgaggugcggcagaucgcccccggccagaccggcaagaucgccgacuacaacuacaagcugcccgacgacuucaccggcugcgugaucgccuggaacagcaacaaccuggacagcaaggugggcggcaacuacaacuaccuguaccggcuguuccguaagagcaaccugaagccauucgagcgggacaucagcaccgagaucuaccaggccggcagcacccccugcaacgguguggagggcuuuaacugcuacuucccccugcagagcuacggcuuccagcccaccuacggcgugggcuaccagcccuaccgggugguggugcugagcuucgagcugcugcacgcccccgccaccgugugcggcccuaaaaagagcaccaaccuggugaagaacaagugcgugaacuucaacuucaauggccugaccggcaccggcgugcugaccgagagcaacaagaaguuccugcccuuccagcaguucggccgggauaucgacgacaccaccgacgccgugcgggacccccagacccuggagauccuggacaucaccccaugcagcuucggcggcgugagcgugaucacccccggcacaaacaccagcaaccaggucgcagugcuguaccagggagugaacugcaccgaggugcccguggccauccacgccgaccagcugacccccaccuggcggguguacagcaccggcagcaacguguuccagacccgggccggcugccugaucggcgccgagcacgugaacaacuccuacgagugcgacauccccaucggcgccggcaucugcgcuagcuaccagacccagaccaacagccaccggcgggcccggagcguggccagccagagcaucaucgccuacaccaugagcuuaggcgccgagaacagcguggccuacagcaacaacagcaucgccauccccaucaacuucaccauaagcgugaccaccgagauccugccugugagcaugaccaagaccagcguggacuguaccauguacaucugcggcgacagcaccgagugcagcaaccugcugcugcaguacggcagcuucugcacccagcugaaccgggcgcugaccggcaucgccguggagcaggacaagaacacccaagagguguucgcccaggugaagcagaucuacaagaccccacccaucaaggacuucggcggcuucaacuucagccagauccugcccgaccccagcaagcccagcaagcggagcuucaucgaggaccugcuguucaacaaggugacucuggccgacgccggcuucaucaagcaguacggcgauugccugggggacaucgccgcccgggaccugaucugcgcucagaaguucaacggccugaccgugcugccuccccugcugaccgacgagaugaucgcccaguacaccagcgcccugcuugccggcaccaucaccagcggcuggaccuucggcgccggcgccgcacugcagauccccuucgccaugcagauggccuaccgguucaacggcaucggcgugacccagaacgugcuguacgagaaccagaagcugaucgccaaccaguucaacagcgccaucggcaagauccaggacagccugagcagcaccgccagcgcccugggcaagcugcaggacguggugaaccagaacgcccaggcucugaacacccuggugaagcagcugagcagcaacuucggcgccaucagcucagugcugaacgacauccuggccaggcuggacaagguggaggccgaggugcagaucgaccggcugaucaccggccggcugcagagccugcagaccuacgugacccagcagcugauccgggccgccgagauucgggccagcgccaaucuggcagccaccaagaugagcgagugcgugcugggccagagcaagcggguggacuuuugcggcaagggcuaccaccugaugagcuucccccagagcgcuccccacggcgugguguuccuccacgugaccuacgucccagcccaggagaagaacuucacaaccgcccccgccaucugccacgacggcaaggcccacuucccccgggagggaguguucgugagcaacggcacccacugguucgugacccagcggaacuucuacgagccccagaucaucaccacccacaacaccuucgugagcggcaacugcgacguggugaucggcaucgugaacaacaccguguacgacccccugcagcccgagcuggacagcuucaaggaggagcuggacaaguacuucaagaaccacaccagcccugacguggaucugggcgacaucagcggcaucaacgccagcguggugaacauccagaaggagaucgaccggcugaacgagguggccaagaaccugaacgagagccugaucgaccugcaggagcugggcaaguacgagcaguacaucaaguggcccugguacaucuggcugggcuucaucgccggccugaucgccaucgugauggugaccaucaugcugugcugcaugaccagcugcuguagcugccugaagggcugcugcagcugcggcagcugcugcaaguucgacgaggacgacagcgagcccgugcugaagggcgugaagcugcacuacaccugaggacuaguuauaagacugacuagcccgaugggccucccaacgggcccuccuccccuccuugcaccgagagaucucaaaggcucuuuucagagccaccaaaaaaaaaaaaaaaaaaaaaaaaaaaaaaaaaaaaaaaaaaaaaaaaaaaaaaaaaaaaaaaaaaaaaaaaaaaaaaaaaaaaaaaaaaaaaaaaaaaaa

SEQ ID NO: 24576 - RNA, 4035 nt, Artificial Sequence
  SARS-CoV-2/Wuhan/WIV05/2019__EPI_ISL_402128 spike protein mRNA gc (1-1273)(K417N_E484K_N501Y_D614G)
aggagaaagcuuaccauguucguguuccuggugcugcugccccuggugagcagccagugcgugaaccugaccacccggacccagcugcccccugccuacaccaacagcuucacccggggcguguacuaccccgacaagguguuccggagcagcgugcugcacagcacccaggaccuguuccugcccuucuucagcaacgugaccugguuccacgccauccacgugagcggcaccaacggcaccaagcgguucgacaacccagugcugcccuucaacgacggcguguacuucgccagcaccgagaagucaaacaucauccggggcuggaucuucggcaccacccuggacagcaagacacagagccugcugaucgugaacaacgccaccaacguggugaucaaggugugcgaguuucaguucugcaacgaccccuuccugggcguguacuaccacaagaacaacaagagcuggauggagagcgaguuccgggucuacagcagcgcuaacaauugcaccuucgaguacgugagccagcccuuccugauggaccucgagggcaagcagggcaacuucaagaaccugcgggaguucguguucaagaacaucgauggcuacuucaagaucuacagcaagcacacccccaucaaccuggugcgggaccugccccagggauucagcgcccuggagccucugguggaccugcccaucggcaucaacaucaccagguuccagacccugcuggcccugcaccggagcuaccugacccccggcgacagcagcagcggcuggaccgccggcgccgccgcauacuacgugggcuaccugcagccacggaccuuccugcugaaguacaacgagaacggcaccaucaccgacgccguggacugcgcccuggacccccugagcgagaccaagugcacccuaaagagcuucaccguggagaagggcaucuaccagaccagcaacuuccgggugcagcccacugagagcaucgugcgguuccccaacauuaccaaccugugucccuucggcgagguguucaacgccacccgguucgccagcguguacgccuggaaccggaagcggaucagcaacugcguggccgacuacagcgugcuguacaacagcgccagcuucagcaccuucaagugcuacggcgugagcccuaccaagcugaacgaccugugcuucaccaacguguacgcugacagcuucgugauccggggcgacgaggugcggcagaucgcccccggccagaccggcaacaucgccgacuacaacuacaagcugcccgacgacuucaccggcugcgugaucgccuggaacagcaacaaccuggacagcaaggugggcggcaacuacaacuaccuguaccggcuguuccguaagagcaaccugaagccauucgagcgggacaucagcaccgagaucuaccaggccggcagcacccccugcaacggugugaagggcuuuaacugcuacuucccccugcagagcuacggcuuccagcccaccuacggcgugggcuaccagcccuaccgggugguggugcugagcuucgagcugcugcacgcccccgccaccgugugcggcccuaaaaagagcaccaaccuggugaagaacaagugcgugaacuucaauuucaacggccugaccggcaccggcgugcugaccgagagcaacaagaaguuccugcccuuccagcaguucggccgggauaucgccgacaccaccgacgcagugcgggacccccagacccuggagauccuggacaucaccccaugcagcuucggcggcgugagcgucaucacccccggcacaaacaccagcaaccagguggccgugcuguaccagggagugaacugcaccgaggugcccguggccauccacgccgaccagcugacccccaccuggcggguguacagcaccggcagcaacguguuccagacccgggccggcugccugaucggcgccgagcacgugaacaacuccuacgagugcgacauccccaucggcgcuggcaucugcgccagcuaccagacccagaccaacagcccccggcgggcccggagcguggccagccagagcaucaucgccuacaccaugagcuuaggcgccgagaacagcguggccuacagcaacaacagcaucgcgaucccuaccaacuucaccaucagcgugaccaccgagauacugcccgugagcaugaccaagaccagcguggacuguaccauguacaucugcggcgacagcaccgagugcagcaaccugcugcugcaguacggcagcuucugcacccagcugaaccgggcccugaccggcaucgccguggagcaggacaagaacacccaagagguguucgcccaggugaagcagaucuacaagacucccccaaucaaggacuucggcggcuucaacuucagccagauccugcccgaccccagcaagcccagcaagcggagcuucaucgaggaccugcuguucaacaaggugacccuggccgacgccggcuucaucaagcaguacggcgacugccugggggauaucgccgcucgggaccugaucugcgcccagaaguucaacggccugaccgugcugcccccucugcugaccgacgagaugaucgcccaguacaccagcgcccugcuugccggcaccaucaccagcggcuggaccuucggcgccggcgcagcccugcagauccccuucgccaugcagauggccuaccgguucaacggcaucggcgugacccagaacgugcuguacgagaaccagaagcugaucgccaaccaguucaacagcgccaucggcaagauccaggacagccugagcagcaccgccagcgcccugggcaagcugcaggacguggugaaccagaacgcucaggcccugaacacccuggugaagcagcugagcagcaacuucggcgccaucagcucagugcugaaugacauccugagcaggcuggacaagguggaggccgaggugcagaucgaccggcugaucaccggccggcugcagagccugcagaccuacgugacccagcagcugauccgggccgccgagauccgggccagcgccaaccuggcagccaccaagaugagcgagugcgugcugggccagagcaagcggguggacuuuugcggcaagggcuaccaccugaugagcuucccccagagcgccccacacggcgugguguuccuccacgucacauacgugcccgcccaggagaagaacuucaccaccgcccccgccauuugccacgacggcaaggcucacuucccccgggagggaguguucgugagcaacggcacccacugguucgugacccagcggaacuucuacgagccccagaucaucaccaccgacaacaccuucgugagcggcaacugcgacguggugaucggcaucgugaacaacaccguguacgacccccugcagccugagcuggacagcuucaaggaggagcuggacaaguacuucaagaaccacaccagccccgacguggaucugggcgacaucagcggcaucaacgccagcguggugaacauccagaaggagaucgaccggcugaacgagguggccaagaaccugaacgagagccugaucgaccugcaggagcugggcaaguacgagcaguacaucaaguggcccugguacaucuggcugggcuucaucgccggccugaucgccaucgugauggugaccaucaugcugugcugcaugaccagcugcuguagcugccugaagggcugcugcagcugcggcagcugcugcaaguucgacgaggacgacagcgagccagugcugaagggcgugaagcugcacuacaccugaggacuaguuauaagacugacuagcccgaugggccucccaacgggcccuccuccccuccuugcaccgagagaucucaaaggcucuuuucagagccaccaaaaaaaaaaaaaaaaaaaaaaaaaaaaaaaaaaaaaaaaaaaaaaaaaaaaaaaaaaaaaaaaaaaaaaaaaaaaaaaaaaaaaaaaaaaaaaaaaaaaa

SEQ ID NO: 24577 - RNA, 4026 nt, Artificial Sequence
  SARS-CoV-2/Wuhan/WIV05/2019__EPI_ISL_402128 spike protein mRNA gc (1-1273)(L18F_D80A_D215G_L242del_A243del_L244del_R246I_K417N_E484 K_N501Y_D614G_A701V)
aggagaaagcuuaccauguucguguuccuggugcugcugccccuggugagcagccagugcgugaacuucaccacccggacccagcugcccccugccuacaccaacagcuucacccggggcguguacuaccccgacaagguguuccggagcagcgugcugcacagcacccaggaccuguuccugcccuucuucagcaacgugaccugguuccacgccauccacgugagcggcaccaacggcaccaagcgguucgccaacccagugcugcccuucaacgacggcguguacuucgccagcaccgagaagucaaacaucauccggggcuggaucuuuggcaccacccuggacagcaagacacagagccugcugaucgugaacaacgcuaccaacguggugaucaaggugugcgaguuccaguucugcaacgaccccuuccugggcguguacuaccacaagaacaacaagagcuggauggagagcgaguuccgggucuacagcagcgccaacaauugcaccuucgaguacgugagccagcccuuccugauggaccuggagggcaagcagggcaacuucaagaaccuccgggaguucguguucaagaacaucgacggcuacuucaagaucuacagcaagcacacccccaucaaccuggugcggggacugccccagggcuucagcgcccuggagccucugguggaucugcccaucggcaucaacaucaccagguuccagacccugcacaucagcuaccugacccccggcgacagcagcagcggcuggaccgccggcgccgccgcauacuacgugggcuaccugcagccacggaccuuccugcugaaguacaacgagaacggcaccaucaccgacgccguggacugcgcccuggacccccugagcgagaccaagugcacccuuaagagcuucaccguggagaagggcaucuaccagaccagcaacuuccgggugcagcccacugagagcauugugcgguuccccaacaucaccaaccugugucccuucggcgagguguucaacgccacccgguucgccagcguguacgccuggaaccggaagcggaucagcaacugcguggccgacuacagcgugcuguacaacagcgccagcuucagcaccuucaagugcuacggcgugagcccuaccaagcugaacgaccugugcuucaccaacguguacgcugacagcuucgugauccggggcgacgaggugcggcagaucgcccccggccagaccggcaacaucgccgacuacaacuacaagcugcccgacgacuucaccggcugcgugaucgccuggaacagcaacaaccuggacagcaaggugggcggcaacuacaacuaccuguaccggcuauuccguaagagcaaccugaagccauuugagcgggacaucagcaccgagaucuaccaggccgguagcacccccugcaacggcgugaagggcuucaacugcuacuucccccugcagagcuacggcuuccagcccaccuacggcgugggcuaccagcccuaccgggugguggugcugagcuucgagcugcugcacgcccccgccaccgugugcggcccuaaaaagagcaccaaccuggugaagaacaagugcgugaacuucaauuucaacggccugaccggcaccggcgugcugaccgagagcaacaagaaguuccugcccuuccagcaguucggccgggacaucgccgacaccaccgaugcagugcgggacccccagacccuggagauccuggacaucaccccaugcagcuucggcggcgugagcgucaucacccccggaacaaacaccagcaaccagguggccgugcuguaccagggcgugaacugcaccgaggugcccguggccauccacgccgaccagcugacccccaccuggcggguguacagcaccggcagcaacguguuccagacccgggccggcugccugaucggcgccgagcacgugaacaacuccuacgagugcgacauccccaucggcgcuggcaucugcgccagcuaccagacccagaccaacagcccccggcgggcccggagcguggccagccagagcaucaucgccuacaccaugagccugggcguggagaacagcguggccuacagcaacaacagcaucgccaucccuaccaacuucaccauaagcgugaccaccgagauccugcccgugagcaugaccaagaccagcguggacuguaccauguacaucugcggcgacagcaccgagugcagcaaccuguuacugcaguacggcagcuucugcacccagcugaaccgggcgcugaccggcaucgccguggagcaggacaagaacacccaagagguguucgcccaggugaagcagaucuacaagacucccccaaucaaggacuucggcggcuucaacuucagccagauccugcccgaccccagcaagcccagcaagcggagcuucaucgaggaccugcuguucaacaaggugacccuggccgacgccggcuucaucaagcaguacggggacugccugggcgacaucgccgcccgggaccugaucugcgcucagaaguucaacggccugaccgugcugcccccucugcugaccgaugagaugaucgcccaguacaccagcgcccugcuggccggcaccaucaccagcggcuggaccuucggcgccggcgccgcacugcagauccccuucgccaugcagauggccuaccgguucaacggcaucggcgugacccagaacgugcuguacgagaaccagaagcugaucgccaaccaguucaacagcgccaucggcaagauccaggacagccugagcagcaccgccagcgcccugggcaagcugcaggacguggugaaccagaacgcccaggcucugaacacccuggugaagcagcugagcagcaacuuuggcgccaucagcucagugcugaaugacauccugagccggcuggacaagguggaggccgaggugcagaucgacaggcugaucaccggccggcugcagagccugcagaccuacgugacccagcagcugauccgggccgccgagauucgggccagcgccaaccuggccgcaaccaagaugagcgagugcgugcugggccagagcaagcggguggacuucugcggcaagggcuaccaccugaugagcuucccccagagcgccccacacggcguggucuuccugcacgugacauacgugcccgcccaggagaagaacuucaccaccgcccccgccaucugccacgacggaaaggcccacuucccccgggagggcguguucgugagcaacggcacccacugguucgugacccagcggaacuucuacgagccccagaucaucaccaccgacaacaccuucgugagcggcaacugcgacguggugaucggcaucgugaacaacaccguguacgacccccugcagccugagcuggacagcuucaaggaggagcucgacaaguacuucaagaaccacaccagccccgacguggaccugggcgacaucagcggcaucaacgcuagcguggugaacauccagaaggagaucgaucggcugaacgagguggccaagaaccugaacgagagccugaucgaccugcaggagcugggcaaguacgagcaguacaucaaguggcccugguacaucuggcugggcuucaucgccggccugaucgccaucgugauggugaccaucaugcugugcugcaugaccagcugcuguagcugccugaagggcugcugcagcugcggcagcugcugcaaguucgacgaggacgacagcgagccagugcugaagggcgugaagcugcacuacaccugaggacuaguuauaagacugacuagcccgaugggccucccaacgggcccuccuccccuccuugcaccgagagaucucaaaggcucuuuucagagccaccaaaaaaaaaaaaaaaaaaaaaaaaaaaaaaaaaaaaaaaaaaaaaaaaaaaaaaaaaaaaaaaaaaaaaaaaaaaaaaaaaaaaaaaaaaaaaaaaaaaaa

SEQ ID NO: 24578 - RNA, 4035 nt, Artificial Sequence
  SARS-CoV-2/Wuhan/WIV05/2019__EPI_ISL_402128 spike protein mRNA gc (1-1273)(E484K_D614G)
aggagaaagcuuaccauguucguguuccuggugcugcugccccuggugagcagccagugcgugaaccugaccacccggacccagcugcccccugccuacaccaacagcuucacccggggcguguacuaccccgacaagguguuccggagcagcgugcugcacagcacccaggaccuguuccugcccuucuucagcaacgugaccugguuccacgccauccacgugagcggcaccaacggcaccaagcgguucgacaacccagugcugcccuucaacgacggcguguacuucgccagcaccgagaagucaaacaucauccggggcuggaucuucggcaccacccuggacagcaagacacagagccugcugaucgugaacaacgccaccaacguggugaucaaggugugcgaguuucaguucugcaacgaccccuuccugggcguguacuaccacaagaacaacaagagcuggauggagagcgaguuccgggucuacagcagcgcuaacaauugcaccuucgaguacgugagccagcccuuccugauggaccucgagggcaagcagggcaacuucaagaaccugcgggaguucguguucaagaacaucgauggcuacuucaagaucuacagcaagcacacccccaucaaccuggugcgggaccugccccagggauucagcgcccuggagccucugguggaccugcccaucggcaucaacaucaccagguuccagacccugcuggcccugcaccggagcuaccugacccccggcgacagcagcagcggcuggaccgccggcgccgccgcauacuacgugggcuaccugcagccacggaccuuccugcugaaguacaacgagaacggcaccaucaccgacgccguggacugcgcccuggacccccugagcgagaccaagugcacccuaaagagcuucaccguggagaagggcaucuaccagaccagcaacuuccgggugcagcccacugagagcaucgugcgguuccccaacauuaccaaccugugucccuucggcgagguguucaacgccacccgguucgccagcguguacgccuggaaccggaagcggaucagcaacugcguggccgacuacagcgugcuguacaacagcgccagcuucagcaccuucaagugcuacggcgugagcccuaccaagcugaacgaccugugcuucaccaacguguacgcugacagcuucgugauccggggcgacgaggugcggcagaucgcccccggccagaccggcaagaucgccgacuacaacuacaagcugcccgacgacuucaccggcugcgugaucgccuggaacagcaacaaccuggacagcaaggugggcggcaacuacaacuaccuguaccggcuguuccguaagagcaaccugaagccauucgagcgggacaucagcaccgagaucuaccaggccggcagcacccccugcaacggugugaagggcuuuaacugcuacuucccccugcagagcuacggcuuccagcccaccaacggcgugggcuaccagcccuaccgggugguggugcugagcuucgagcugcugcacgcccccgccaccgugugcggcccuaaaaagagcaccaaccuggugaagaacaagugcgugaacuucaauuucaacggccugaccggcaccggcgugcugaccgagagcaacaagaaguuccugcccuuccagcaguucggccgggauaucgccgacaccaccgacgcagugcgggacccccagacccuggagauccuggacaucaccccaugcagcuucggcggcgugagcgucaucacccccggcacaaacaccagcaaccagguggccgugcuguaccagggagugaacugcaccgaggugcccguggccauccacgccgaccagcugacccccaccuggcggguguacagcaccggcagcaacguguuccagacccgggccggcugccugaucggcgccgagcacgugaacaacuccuacgagugcgacauccccaucggcgcuggcaucugcgccagcuaccagacccagaccaacagcccccggcgggcccggagcguggccagccagagcaucaucgccuacaccaugagcuuaggcgccgagaacagcguggccuacagcaacaacagcaucgcgaucccuaccaacuucaccaucagcgugaccaccgagauacugcccgugagcaugaccaagaccagcguggacuguaccauguacaucugcggcgacagcaccgagugcagcaaccugcugcugcaguacggcagcuucugcacccagcugaaccgggcccugaccggcaucgccguggagcaggacaagaacacccaagagguguucgcccaggugaagcagaucuacaagacucccccaaucaaggacuucggcggcuucaacuucagccagauccugcccgaccccagcaagcccagcaagcggagcuucaucgaggaccugcuguucaacaaggugacccuggccgacgccggcuucaucaagcaguacggcgacugccugggggauaucgccgcucgggaccugaucugcgcccagaaguucaacggccugaccgugcugcccccucugcugaccgacgagaugaucgcccaguacaccagcgcccugcuugccggcaccaucaccagcggcuggaccuucggcgccggcgcagcccugcagauccccuucgccaugcagauggccuaccgguucaacggcaucggcgugacccagaacgugcuguacgagaaccagaagcugaucgccaaccaguucaacagcgccaucggcaagauccaggacagccugagcagcaccgccagcgcccugggcaagcugcaggacguggugaaccagaacgcucaggcccugaacacccuggugaagcagcugagcagcaacuucggcgccaucagcucagugcugaaugacauccugagcaggcuggacaagguggaggccgaggugcagaucgaccggcugaucaccggccggcugcagagccugcagaccuacgugacccagcagcugauccgggccgccgagauccgggccagcgccaaccuggcagccaccaagaugagcgagugcgugcugggccagagcaagcggguggacuuuugcggcaagggcuaccaccugaugagcuucccccagagcgccccacacggcgugguguuccuccacgucacauacgugcccgcccaggagaagaacuucaccaccgcccccgccauuugccacgacggcaaggcucacuucccccgggagggaguguucgugagcaacggcacccacugguucgugacccagcggaacuucuacgagccccagaucaucaccaccgacaacaccuucgugagcggcaacugcgacguggugaucggcaucgugaacaacaccguguacgacccccugcagccugagcuggacagcuucaaggaggagcuggacaaguacuucaagaaccacaccagccccgacguggaucugggcgacaucagcggcaucaacgccagcguggugaacauccagaaggagaucgaccggcugaacgagguggccaagaaccugaacgagagccugaucgaccugcaggagcugggcaaguacgagcaguacaucaaguggcccugguacaucuggcugggcuucaucgccggccugaucgccaucgugauggugaccaucaugcugugcugcaugaccagcugcuguagcugccugaagggcugcugcagcugcggcagcugcugcaaguucgacgaggacgacagcgagccagugcugaagggcgugaagcugcacuacaccugaggacuaguuauaagacugacuagcccgaugggccucccaacgggcccuccuccccuccuugcaccgagagaucucaaaggcucuuuucagagccaccaaaaaaaaaaaaaaaaaaaaaaaaaaaaaaaaaaaaaaaaaaaaaaaaaaaaaaaaaaaaaaaaaaaaaaaaaaaaaaaaaaaaaaaaaaaaaaaaaaaaa

SEQ ID NO: 24579 - RNA, 4035 nt, Artificial Sequence
  SARS-CoV-2/Wuhan/WIV05/2019__EPI_ISL_402128 spike protein mRNA gc (1-1273)(L18F_T20N_P26S_D138Y_R190S_K417T_E484K_N501Y_D614G_H655Y _T1027I)
aggagaaagcuuaccauguucguguuccuggugcugcugccccuggugagcagccagugcgugaacuucaccaaccggacccagcugcccagcgccuacaccaacagcuucacccggggcguguacuacccugacaagguguuccggagcagcgugcugcacagcacccaggaccuguuccugcccuucuucagcaacgugaccugguuccacgccauccacgugagcggcaccaacggcaccaagcgguucgacaaccccgugcugccauucaacgacggcguguacuucgccagcaccgagaagucaaacaucauccggggcuggaucuuuggcaccacccuggacagcaagacccagagccugcugaucgugaacaacgccacaaacguggugaucaaggugugcgaguuccaguucugcaacuaccccuuccugggcguguacuaccacaagaacaacaagagcuggauggagagcgaguuccgggucuacagcagcgcuaauaacugcaccuucgaguacgugagccagcccuuccugauggaccuggagggcaagcagggcaacuucaagaaccucagcgaguucguguucaagaacaucgacggcuacuucaagaucuacagcaagcacacccccaucaaccuggugcgggaucugccccagggauucagcgcccuggagccccugguggaccugccuaucggcaucaacaucacccgguuccagacccugcuggcccugcacaggagcuaccugacccccggcgacagcagcagcggcuggaccgccggcgccgccgcauacuacgugggcuaccugcagccccggaccuuccugcugaaguacaacgagaacggcaccaucaccgacgccguggacugcgcccuggacccacugagcgagaccaagugcacccuaaagagcuucaccguggagaagggcaucuaccagaccagcaacuuccgggugcagcccaccgagagcaucgugcgguuccccaacauuacuaaccugugucccuucggcgagguguucaacgccacccgguucgccagcguguacgccuggaaccggaagcggaucagcaacugcguggccgacuacagcgugcuguacaacagcgccagcuucagcaccuucaagugcuacggcgugagccccaccaagcugaacgaccugugcuucaccaacguguacgcugacagcuucgugauccggggcgacgaggugcggcagaucgccccuggccagaccggcaccaucgccgacuacaacuacaagcugcccgacgacuucaccggcugcgugaucgccuggaacagcaacaaccuggacagcaaggugggcggcaacuacaacuaccuguaccggcuguuccguaagagcaaccugaagcccuuugagcgggacaucagcaccgagaucuaccaggccggcagcaccccaugcaacggugugaagggcuucaacugcuacuucccccugcagagcuacggcuuccagcccaccuacggcgugggcuaccagcccuaccgggugguggugcugagcuucgagcugcugcacgcccccgccaccgugugcggccccaaaaagagcaccaaccuggugaagaacaagugcgugaacuucaauuucaacggccugaccggcaccggcgugcugaccgagagcaacaagaaguuccugccuuuccagcaguucggccgggacaucgccgauaccaccgacgcagugcgggacccccagacccuggagauccuggacaucacccccugcagcuucggcggcgugagcgucaucaccccaggcacaaacaccagcaaccagguggccgugcuguaccagggagugaacugcaccgaggugcccguggccauccacgccgaccagcugacccccaccuggcggguguacuccaccggcagcaacguguuccagacccgggccggcugccugaucggcgccgaguacgugaacaacagcuacgagugcgacauccccaucggcgcuggcaucugcgccagcuaccagacccagaccaacagcccccggcgggcccggagcguggccagccagagcaucaucgccuacaccaugagccugggcgccgagaacagcguggccuacagcaacaacagcaucgcgauccccaccaacuucaccaucagcgugaccaccgagauauuaccugugagcaugaccaagaccagcguggacuguaccauguacaucugcggcgacagcaccgagugcagcaaccugcugcugcaguacggcagcuucugcacccagcugaaccgggcccugaccggcaucgccguggagcaggacaagaacacccaagagguguucgcccaggugaagcagaucuacaagacuccacccaucaaggacuucggcggcuucaacuucagccagauccugcccgaccccagcaagcccagcaagcggagcuucaucgaggaccugcuguucaacaaggugacccuggccgacgccggcuucaucaagcaguacggcgacugccugggggacaucgccgcucgggaucugaucugcgcccagaaguucaacggccugaccgugcugccuccccugcugaccgacgagaugaucgcccaguacaccagcgcccugcuggccggcaccaucaccagcggcuggaccuucggcgccggcgcagcccuucagauccccuucgccaugcagauggccuaccgguucaacggcaucggcgugacccagaacgugcuguacgagaaccagaagcugaucgccaaccaguucaacagcgccaucggcaagauccaggacagccugagcagcaccgccagcgcccugggcaagcugcaggacguggugaaccagaacgcucaggcccugaacacccuggugaagcagcugagcucaaacuuuggcgccaucagcagcgugcugaaugacauccugagccggcuggacaagguggaggccgaggugcagaucgacaggcugaucaccggccggcugcagagccugcagaccuacgugacccagcagcugauccgggccgccgagauccgggccagcgccaaccuggcagccauuaagaugagcgagugcgugcugggccagagcaagcggguggacuucugcggcaagggcuaccaccugaugagcuucccccagagcgcuccccacggcgugguguuccugcacgucaccuacgugccagcccaggagaagaacuucacaaccgcccccgccaucugccacgacggcaaggcccacuucccccgggagggaguguucgugagcaacggcacccacugguucgugacccagcggaacuucuacgagccccagaucaucaccaccgacaacaccuucgugagcggcaacugcgacguggugaucggcaucgugaacaacaccguguacgacccccuccagcccgagcuggacagcuucaaggaggagcuggacaaguacuucaagaaccacaccagcccugacguggaccugggcgauaucagcggcaucaacgccagcguggugaacauccagaaggagaucgaccggcugaacgagguggccaagaaccugaacgagagccugaucgaccugcaggagcugggcaaguacgagcaguacaucaaguggcccugguacaucuggcugggcuucaucgccggccugaucgccaucgugauggugaccaucaugcugugcugcaugaccagcugcuguagcugccugaagggcugcugcagcugcggcagcugcugcaaguucgacgaggacgacagcgagcccgugcugaagggcgugaagcugcacuacaccugaggacuaguuauaagacugacuagcccgaugggccucccaacgggcccuccuccccuccuugcaccgagagaucucaaaggcucuuuucagagccaccaaaaaaaaaaaaaaaaaaaaaaaaaaaaaaaaaaaaaaaaaaaaaaaaaaaaaaaaaaaaaaaaaaaaaaaaaaaaaaaaaaaaaaaaaaaaaaaaaaaaa

SEQ ID NO: 24580 - RNA, 4035 nt, Artificial Sequence
  SARS-CoV-2/Wuhan/WIV05/2019__EPI_ISL_402128 spike protein mRNA gc (1-1273)(S13I_W152C_L452R_D614G)
aggagaaagcuuaccauguucguguuccuggugcugcugccccuggugagcauccagugcgugaaccugaccacccggacccagcugcccccugccuacaccaacagcuucacccggggcguguacuaccccgacaagguguuccggagcagcgugcugcacagcacccaggaccuguuccugcccuucuucagcaacgugaccugguuccacgccauccacgugagcggcaccaacggcaccaagcgguucgacaacccagugcugcccuucaacgacggcguguacuucgccagcaccgagaagucaaacaucauccggggcuggaucuucggcaccacccuggacagcaagacacagagccugcugaucgugaacaacgccaccaacguggugaucaaggugugcgaguuucaguucugcaacgaccccuuccugggcguguacuaccacaagaacaacaagagcugcauggagagcgaguuccgggucuacagcagcgcuaacaauugcaccuucgaguacgugagccagcccuuccugauggaccucgagggcaagcagggcaacuucaagaaccugcgggaguucguguucaagaacaucgauggcuacuucaagaucuacagcaagcacacccccaucaaccuggugcgggaccugccccagggauucagcgcccuggagccucugguggaccugcccaucggcaucaacaucaccagguuccagacccugcuggcccugcaccggagcuaccugacccccggcgacagcagcagcggcuggaccgccggcgccgccgcauacuacgugggcuaccugcagccacggaccuuccugcugaaguacaacgagaacggcaccaucaccgacgccguggacugcgcccuggacccccugagcgagaccaaguguacccuaaagagcuucaccguggagaagggcaucuaccagaccagcaacuuccgggugcagcccacugagagcauugugcgguuccccaacaucaccaaccugugccccuucggcgagguguucaacgccacccgguucgccagcguguacgccuggaaccggaagcggaucagcaacugcguggccgacuacagcgugcuguacaacagcgccagcuucagcaccuucaagugcuacggcgugagcccuaccaagcugaacgaccugugcuucaccaacguguacgcugacagcuucgugauccggggcgacgaggugcggcagaucgcccccggccagaccggcaagaucgccgacuacaacuacaagcugcccgacgacuucaccggcugcgugaucgccuggaacagcaacaaccuggacagcaaggugggcggcaacuacaacuaccgguaccggcuguuccguaagagcaaccugaagccauucgagcgggacaucagcaccgagaucuaccaggccggcagcacccccugcaacgguguggagggcuuuaacugcuacuucccccugcagagcuacggcuuccagcccaccaacggcgugggcuaccagcccuaccgggugguggugcugagcuucgagcugcugcacgcccccgccaccgugugcggcccuaaaaagagcaccaaccuggugaagaacaagugcgugaacuucaauuucaacggccugaccggcaccggcgugcugaccgagagcaacaagaaguuccugcccuuccagcaguucggccgggauaucgccgacaccaccgacgcagugcgggacccccagacccuggagauccuggacaucaccccaugcagcuucggcggcgugagcgucaucacccccggcacaaacaccagcaaccagguggccgugcuguaccagggagugaacugcaccgaggugcccguggccauccacgccgaccagcugacccccaccuggcggguguacagcaccggcagcaacguguuccagacccgggccggcugccugaucggcgccgagcacgugaacaacagcuacgagugcgacauccccaucggcgcuggcaucugugccuccuaccagacccagaccaacagcccccggcgggcccggagcguggccagccagagcaucaucgccuacaccaugagccugggcgccgagaacagcguggccuacagcaacaacagcaucgcgaucccuaccaacuucaccauaagcgugaccaccgagaucuuacccgugagcaugaccaagaccagcguggacugcaccauguacaucugcggcgacagcaccgagugcagcaaccugcugcugcaguacggcagcuucugcacccagcugaaccgggcccugaccggcaucgccguggagcaggacaagaacacccaagagguguucgcccaggugaagcagaucuacaagacucccccaaucaaggacuucggcggcuucaacuucagccagauccugcccgaccccagcaagcccagcaagcggagcuucaucgaggaccugcuguucaacaaggugacccuggccgacgccggcuucaucaagcaguacggcgacugccugggggauaucgccgcucgggaccugaucugcgcccagaaguucaacggccugaccgugcugcccccucugcugaccgacgagaugaucgcccaguacaccagcgcccugcuggccggcaccaucaccagcggcuggaccuucggcgccggcgcagcccuucagauccccuucgccaugcagauggccuacagguucaacggcaucggcgugacccagaacgugcuguacgagaaccagaagcugaucgccaaccaguucaacagcgccaucggcaagauccaggacagccugagcagcaccgccagcgcccugggcaagcugcaggacguggugaaccagaacgcucaggcccugaacacccuggugaagcagcugagcagcaacuucggcgccaucagcagcgugcugaaugacauccugucacggcuggacaagguggaggccgaggugcagaucgaccggcugaucaccggccggcugcagagccugcagaccuacgugacccagcagcugauccgggccgccgagauucgggccagcgccaaccuggcagccaccaagaugagcgagugcgugcugggccagagcaagcggguggacuuuugcggcaagggcuaccaccugaugagcuucccccagagcgccccacacggcgugguguuccugcacgucacauacgugcccgcccaggagaagaacuucaccaccgcccccgccaucugccacgacggcaaggcucacuucccccgggagggaguguucgugagcaacggcacccacugguucgugacccagcggaacuucuacgagccccagaucaucaccaccgacaacaccuucgugagcggcaacugcgacguggugaucggcaucgugaacaacaccguguacgacccccuccagccugagcuggacagcuucaaggaggagcuggacaaguacuucaagaaccacaccagccccgacguggaucugggcgacaucagcggcaucaacgccagcguggugaacauccagaaggagaucgaccggcugaacgagguggccaagaaccugaacgagagccugaucgaccugcaggagcugggcaaguacgagcaguacaucaaguggcccugguacaucuggcugggcuucaucgccggccugaucgccaucgugauggugaccaucaugcugugcugcaugaccagcuguugcagcugccugaagggcugcugcagcugcggcagcugcugcaaguucgacgaggacgacagcgagccagugcugaagggcgugaagcugcacuacaccugaggacuaguuauaagacugacuagcccgaugggccucccaacgggcccuccuccccuccuugcaccgagagaucucaaaggcucuuuucagagccaccaaaaaaaaaaaaaaaaaaaaaaaaaaaaaaaaaaaaaaaaaaaaaaaaaaaaaaaaaaaaaaaaaaaaaaaaaaaaaaaaaaaaaaaaaaaaaaaaaaaaa

SEQ ID NO: 24581 - RNA, 4035 nt, Artificial Sequence
  SARS-CoV-2/Wuhan/WIV05/2019__EPI_ISL_402128 spike protein mRNA gc mod (1-1273)
aggagaaagcuuaccauguucguguuucuggugcugcugccccugguguccagccagugugugaaccugaccaccagaacacagcugccuccagccuacaccaacagcuucaccagaggcguguacuaccccgacaagguguucagauccagcgugcugcacucuacccaggaccuguuccugccuuucuucagcaacgugaccugguuccacgccauccacguguccggcaccaauggcaccaagagauucgacaaccccgugcugcccuucaacgacgggguguacuuugccagcaccgagaaguccaacaucaucagaggcuggaucuucggcaccacacuggacagcaagacccagagccugcugaucgugaacaacgccaccaacguggucaucaaagugugcgaguuccaguucugcaacgaccccuuccugggcgucuacuaccacaagaacaacaagagcuggauggaaagcgaguuccggguguacagcagcgccaacaacugcaccuucgaguacgugucccagccuuuccugauggaccuggaaggcaagcagggcaacuucaagaaccugcgcgaguucguguucaagaacaucgacggcuacuucaaaaucuacagcaagcacaccccuaucaaccucgugcgggaucugccucagggcuucucugcucuggaaccccugguggaucugcccaucggcaucaacaucacccgguuucagacacugcuggcccugcacagaagcuaccugacaccuggcgauagcagcagcggauggacagcuggugccgccgcuuacuaugugggcuaccugcagccuagaaccuuccugcugaaguacaacgagaacggcaccaucaccgacgccguggauugugcucuggauccucugagcgagacaaagugcacccugaaguccuucaccguggaaaagggcaucuaccagaccagcaacuuccgggugcagcccaccgaauccaucgugcgguuccccaauaucaccaaucugugccccuucggcgagguguucaaugccaccagauucgccucuguguacgccuggaaccggaagcggaucagcaauugcguggccgacuacuccgugcuguacaacuccgccagcuucagcaccuucaagugcuacggcguguccccuaccaagcugaacgaccugugcuucacaaacguguacgccgacagcuucgugauccggggagaugaagugcggcagauugccccuggacagacaggcaagaucgccgacuacaacuacaagcugcccgacgacuucaccggcugugugauugccuggaacagcaacaaccuggacuccaaagucggcggcaacuacaauuaccuguaccggcuguuccggaaguccaaucugaagcccuucgagcgggacaucagcaccgaaaucuaucaggccggcagcaccccuugcaacggcguggaaggcuucaacugcuacuucccacugcaguccuacggcuuucagcccacaaauggcgugggcuaucagcccuacagagugguggugcugagcuucgaacugcugcaugcuccugccacagugugcggcccuaagaaaagcaccaaucucgugaagaacaaaugcgugaacuucaacuucaacggccugaccggcaccggcgugcugacagagagcaacaagaaguuccugccauuccagcaguuuggccgggauaucgccgauaccacagacgccguuagagauccccagacacuggaaauccuggacaucaccccaugcagcuucggcggagugucugugaucaccccuggcaccaacaccagcaaucagguggcagugcuguaccaggacgugaacuguaccgaagugcccguggccauucacgccgaucagcugacaccuacauggcggguguacuccaccggcagcaauguguuucagaccagagccggcugucugaucggagccgagcacgugaacaauagcuacgagugcgacauccccaucggcgcuggcaucugugccagcuaccagacacagacaaacagccccagacgggcuagaagcguggccagccagagcaucauugccuacacaaugucucugggcgccgagaacagcguggccuacuccaacaacucuaucgcuauccccaccaacuucaccaucagcgugaccaccgagauccugccuguguccaugaccaagaccagcguggacugcaccauguacaucugcggcgauuccaccgagugcuccaaccugcugcugcaguacggcagcuucugcacccagcugaauagagcccugacagggaucgccguggaacaggacaagaacacccaagagguguucgcccaagugaagcaaaucuacaagaccccuccuaucaaggacuucggcggcuucaauuucagccagauucugcccgauccuagcaagcccagcaagcggagcuucaucgaggaccugcuguucaacaaagugacacuggccgacgccggcuucaucaagcaguauggcgauugucugggcgacauugccgccagggaucugauuugcgcccagaaguuuaacggacugacagugcugccuccucugcugaccgaugagaugaucgcccaguacacaucugcccugcuggccggcacaaucacaagcggcuggacauuuggagcuggcgccgcucugcagauccccuuugcuaugcagauggccuaccgguucaacggcaucggagugacccagaaugugcuguacgagaaccagaagcugaucgccaaccaguucaacagcgccaucggcaagauccaggacagccugagcagcacagcaagcgcccugggaaagcugcaggacguggucaaccagaaugcccaggcacugaacacccuggucaagcagcuguccuccaacuucggcgccaucagcucugugcugaacgauauccugagcagacuggacaaggucgaggccgaggugcagaucgacagacugaucacaggcagacugcagagccuccagacauacgugacccagcagcugaucagagccgccgagauuagagccucugccaaucuggccgccaccaagaugucugagugugugcugggccagagcaagagaguggacuuuugcggcaagggcuaccaccugaugagcuucccucagucugccccucacggcgugguguuucugcacgugacauaugugcccgcucaagagaagaauuucaccaccgcuccagccaucugccacgacggcaaagcccacuuuccuagagaaggcguguucguguccaacggcacccauugguucgugacacagcggaacuucuacgagccccagaucaucaccaccgacaacaccuucgugucuggcaacugcgacguugugaucggcauugugaacaauaccguguacgacccucugcagcccgagcuggacagcuucaaagaggaacuggacaaguacuuuaagaaccacacaagccccgacguggaccugggcgauaucagcggaaucaaugccagcgucgugaacauccagaaagagaucgaccggcugaacgagguggccaagaaucugaacgagagccugaucgaccugcaagaacuggggaaguacgagcaguacaucaaguggcccugguacaucuggcugggcuuuaucgccggacugauugccaucgugauggucacaaucaugcuguguugcaugaccagcugcuguagcugccugaagggcuguuguagcuguggcagcugcugcaaguucgacgaggacgauucugagcccgugcugaagggcgugaaacugcacuacaccugaggacuaguuauaagacugacuagcccgaugggccucccaacgggcccuccuccccuccuugcaccgagagaucucaaaggcucuuuucagagccaccaaaaaaaaaaaaaaaaaaaaaaaaaaaaaaaaaaaaaaaaaaaaaaaaaaaaaaaaaaaaaaaaaaaaaaaaaaaaaaaaaaaaaaaaaaaaaaaaaaaaa

SEQ ID NO: 24582 - RNA, 4035 nt, Artificial Sequence
  SARS-CoV-2/Wuhan/WIV05/2019__EPI_ISL_402128 spike protein mRNA gc mod (1-1273)(D614G)
aggagaaagcuuaccauguucguguuucuggugcugcugccccugguguccagccagugugugaaccugaccaccagaacacagcugccuccagccuacaccaacagcuucaccagaggcguguacuaccccgacaagguguucagauccagcgugcugcacucuacccaggaccuguuccugccuuucuucagcaacgugaccugguuccacgccauccacguguccggcaccaauggcaccaagagauucgacaaccccgugcugcccuucaacgacgggguguacuuugccagcaccgagaaguccaacaucaucagaggcuggaucuucggcaccacacuggacagcaagacccagagccugcugaucgugaacaacgccaccaacguggucaucaaagugugcgaguuccaguucugcaacgaccccuuccugggcgucuacuaccacaagaacaacaagagcuggauggaaagcgaguuccggguguacagcagcgccaacaacugcaccuucgaguacgugucccagccuuuccugauggaccuggaaggcaagcagggcaacuucaagaaccugcgcgaguucguguucaagaacaucgacggcuacuucaaaaucuacagcaagcacaccccuaucaaccucgugcgggaucugccucagggcuucucugcucuggaaccccugguggaucugcccaucggcaucaacaucacccgguuucagacacugcuggcccugcacagaagcuaccugacaccuggcgauagcagcagcggauggacagcuggugccgccgcuuacuaugugggcuaccugcagccuagaaccuuccugcugaaguacaacgagaacggcaccaucaccgacgccguggauugugcucuggauccucugagcgagacaaagugcacccugaaguccuucaccguggaaaagggcaucuaccagaccagcaacuuccgggugcagcccaccgaauccaucgugcgguuccccaauaucaccaaucugugccccuucggcgagguguucaaugccaccagauucgccucuguguacgccuggaaccggaagcggaucagcaauugcguggccgacuacuccgugcuguacaacuccgccagcuucagcaccuucaagugcuacggcguguccccuaccaagcugaacgaccugugcuucacaaacguguacgccgacagcuucgugauccggggagaugaagugcggcagauugccccuggacagacaggcaagaucgccgacuacaacuacaagcugcccgacgacuucaccggcugugugauugccuggaacagcaacaaccuggacuccaaagucggcggcaacuacaauuaccuguaccggcuguuccggaaguccaaucugaagcccuucgagcgggacaucagcaccgaaaucuaucaggccggcagcaccccuugcaacggcguggaaggcuucaacugcuacuucccacugcaguccuacggcuuucagcccacaaauggcgugggcuaucagcccuacagagugguggugcugagcuucgaacugcugcaugcuccugccacagugugcggcccuaagaaaagcaccaaucucgugaagaacaaaugcgugaacuucaacuucaacggccugaccggcaccggcgugcugacagagagcaacaagaaguuccugccauuccagcaguuuggccgggauaucgccgauaccacagacgccguuagagauccccagacacuggaaauccuggacaucaccccaugcagcuucggcggagugucugugaucaccccuggcaccaacaccagcaaucagguggcagugcuguaccagggcgugaacuguaccgaagugcccguggccauucacgccgaucagcugacaccuacauggcggguguacuccaccggcagcaauguguuucagaccagagccggcugucugaucggagccgagcacgugaacaauagcuacgagugcgacauccccaucggcgcuggcaucugugccagcuaccagacacagacaaacagccccagacgggcuagaagcguggccagccagagcaucauugccuacacaaugucucugggcgccgagaacagcguggccuacuccaacaacucuaucgcuauccccaccaacuucaccaucagcgugaccaccgagauccugccuguguccaugaccaagaccagcguggacugcaccauguacaucugcggcgauuccaccgagugcuccaaccugcugcugcaguacggcagcuucugcacccagcugaauagagcccugacagggaucgccguggaacaggacaagaacacccaagagguguucgcccaagugaagcaaaucuacaagaccccuccuaucaaggacuucggcggcuucaauuucagccagauucugcccgauccuagcaagcccagcaagcggagcuucaucgaggaccugcuguucaacaaagugacacuggccgacgccggcuucaucaagcaguauggcgauugucugggcgacauugccgccagggaucugauuugcgcccagaaguuuaacggacugacagugcugccuccucugcugaccgaugagaugaucgcccaguacacaucugcccugcuggccggcacaaucacaagcggcuggacauuuggagcuggcgccgcucugcagauccccuuugcuaugcagauggccuaccgguucaacggcaucggagugacccagaaugugcuguacgagaaccagaagcugaucgccaaccaguucaacagcgccaucggcaagauccaggacagccugagcagcacagcaagcgcccugggaaagcugcaggacguggucaaccagaaugcccaggcacugaacacccuggucaagcagcuguccuccaacuucggcgccaucagcucugugcugaacgauauccugagcagacuggacaaggucgaggccgaggugcagaucgacagacugaucacaggcagacugcagagccuccagacauacgugacccagcagcugaucagagccgccgagauuagagccucugccaaucuggccgccaccaagaugucugagugugugcugggccagagcaagagaguggacuuuugcggcaagggcuaccaccugaugagcuucccucagucugccccucacggcgugguguuucugcacgugacauaugugcccgcucaagagaagaauuucaccaccgcuccagccaucugccacgacggcaaagcccacuuuccuagagaaggcguguucguguccaacggcacccauugguucgugacacagcggaacuucuacgagccccagaucaucaccaccgacaacaccuucgugucuggcaacugcgacguugugaucggcauugugaacaauaccguguacgacccucugcagcccgagcuggacagcuucaaagaggaacuggacaaguacuuuaagaaccacacaagccccgacguggaccugggcgauaucagcggaaucaaugccagcgucgugaacauccagaaagagaucgaccggcugaacgagguggccaagaaucugaacgagagccugaucgaccugcaagaacuggggaaguacgagcaguacaucaaguggcccugguacaucuggcugggcuuuaucgccggacugauugccaucgugauggucacaaucaugcuguguugcaugaccagcugcuguagcugccugaagggcuguuguagcuguggcagcugcugcaaguucgacgaggacgauucugagcccgugcugaagggcgugaaacugcacuacaccugaggacuaguuauaagacugacuagcccgaugggccucccaacgggcccuccuccccuccuugcaccgagagaucucaaaggcucuuuucagagccaccaaaaaaaaaaaaaaaaaaaaaaaaaaaaaaaaaaaaaaaaaaaaaaaaaaaaaaaaaaaaaaaaaaaaaaaaaaaaaaaaaaaaaaaaaaaaaaaaaaaaa

SEQ ID NO: 24583 - RNA, 4035 nt, Artificial Sequence
  SARS-CoV-2/Wuhan/WIV05/2019__EPI_ISL_402128 spike protein mRNA gc mod (1-1273)(A222V_D614G)
aggagaaagcuuaccauguucguguuucuggugcugcugccccugguguccagccagugugugaaccugaccaccagaacacagcugccuccagccuacaccaacagcuucaccagaggcguguacuaccccgacaagguguucagauccagcgugcugcacucuacccaggaccuguuccugccuuucuucagcaacgugaccugguuccacgccauccacguguccggcaccaauggcaccaagagauucgacaaccccgugcugcccuucaacgacgggguguacuuugccagcaccgagaaguccaacaucaucagaggcuggaucuucggcaccacacuggacagcaagacccagagccugcugaucgugaacaacgccaccaacguggucaucaaagugugcgaguuccaguucugcaacgaccccuuccugggcgucuacuaccacaagaacaacaagagcuggauggaaagcgaguuccggguguacagcagcgccaacaacugcaccuucgaguacgugucccagccuuuccugauggaccuggaaggcaagcagggcaacuucaagaaccugcgcgaguucguguucaagaacaucgacggcuacuucaaaaucuacagcaagcacaccccuaucaaccucgugcgggaucugccucagggcuucucugugcuggaaccccugguggaucugcccaucggcaucaacaucacccgguuucagacacugcuggcccugcacagaagcuaccugacaccuggcgauagcagcagcggauggacagcuggugccgccgcuuacuaugugggcuaccugcagccuagaaccuuccugcugaaguacaacgagaacggcaccaucaccgacgccguggauugugcucuggauccucugagcgagacaaagugcacccugaaguccuucaccguggaaaagggcaucuaccagaccagcaacuuccgggugcagcccaccgaauccaucgugcgguuccccaauaucaccaaucugugccccuucggcgagguguucaaugccaccagauucgccucuguguacgccuggaaccggaagcggaucagcaauugcguggccgacuacuccgugcuguacaacuccgccagcuucagcaccuucaagugcuacggcguguccccuaccaagcugaacgaccugugcuucacaaacguguacgccgacagcuucgugauccggggagaugaagugcggcagauugccccuggacagacaggcaagaucgccgacuacaacuacaagcugcccgacgacuucaccggcugugugauugccuggaacagcaacaaccuggacuccaaagucggcggcaacuacaauuaccuguaccggcuguuccggaaguccaaucugaagcccuucgagcgggacaucagcaccgaaaucuaucaggccggcagcaccccuugcaacggcguggaaggcuucaacugcuacuucccacugcaguccuacggcuuucagcccacaaauggcgugggcuaucagcccuacagagugguggugcugagcuucgaacugcugcaugcuccugccacagugugcggcccuaagaaaagcaccaaucucgugaagaacaaaugcgugaacuucaacuucaacggccugaccggcaccggcgugcugacagagagcaacaagaaguuccugccauuccagcaguuuggccgggauaucgccgauaccacagacgccguuagagauccccagacacuggaaauccuggacaucaccccaugcagcuucggcggagugucugugaucaccccuggcaccaacaccagcaaucagguggcagugcuguaccagggcgugaacuguaccgaagugcccguggccauucacgccgaucagcugacaccuacauggcggguguacuccaccggcagcaauguguuucagaccagagccggcugucugaucggagccgagcacgugaacaauagcuacgagugcgacauccccaucggcgcuggcaucugugccagcuaccagacacagacaaacagccccagacgggcuagaagcguggccagccagagcaucauugccuacacaaugucucugggcgccgagaacagcguggccuacuccaacaacucuaucgcuauccccaccaacuucaccaucagcgugaccaccgagauccugccuguguccaugaccaagaccagcguggacugcaccauguacaucugcggcgauuccaccgagugcuccaaccugcugcugcaguacggcagcuucugcacccagcugaauagagcccugacagggaucgccguggaacaggacaagaacacccaagagguguucgcccaagugaagcaaaucuacaagaccccuccuaucaaggacuucggcggcuucaauuucagccagauucugcccgauccuagcaagcccagcaagcggagcuucaucgaggaccugcuguucaacaaagugacacuggccgacgccggcuucaucaagcaguauggcgauugucugggcgacauugccgccagggaucugauuugcgcccagaaguuuaacggacugacagugcugccuccucugcugaccgaugagaugaucgcccaguacacaucugcccugcuggccggcacaaucacaagcggcuggacauuuggagcuggcgccgcucugcagauccccuuugcuaugcagauggccuaccgguucaacggcaucggagugacccagaaugugcuguacgagaaccagaagcugaucgccaaccaguucaacagcgccaucggcaagauccaggacagccugagcagcacagcaagcgcccugggaaagcugcaggacguggucaaccagaaugcccaggcacugaacacccuggucaagcagcuguccuccaacuucggcgccaucagcucugugcugaacgauauccugagcagacuggacaaggucgaggccgaggugcagaucgacagacugaucacaggcagacugcagagccuccagacauacgugacccagcagcugaucagagccgccgagauuagagccucugccaaucuggccgccaccaagaugucugagugugugcugggccagagcaagagaguggacuuuugcggcaagggcuaccaccugaugagcuucccucagucugccccucacggcgugguguuucugcacgugacauaugugcccgcucaagagaagaauuucaccaccgcuccagccaucugccacgacggcaaagcccacuuuccuagagaaggcguguucguguccaacggcacccauugguucgugacacagcggaacuucuacgagccccagaucaucaccaccgacaacaccuucgugucuggcaacugcgacguugugaucggcauugugaacaauaccguguacgacccucugcagcccgagcuggacagcuucaaagaggaacuggacaaguacuuuaagaaccacacaagccccgacguggaccugggcgauaucagcggaaucaaugccagcgucgugaacauccagaaagagaucgaccggcugaacgagguggccaagaaucugaacgagagccugaucgaccugcaagaacuggggaaguacgagcaguacaucaaguggcccugguacaucuggcugggcuuuaucgccggacugauugccaucgugauggucacaaucaugcuguguugcaugaccagcugcuguagcugccugaagggcuguuguagcuguggcagcugcugcaaguucgacgaggacgauucugagcccgugcugaagggcgugaaacugcacuacaccugaggacuaguuauaagacugacuagcccgaugggccucccaacgggcccuccuccccuccuugcaccgagagaucucaaaggcucuuuucagagccaccaaaaaaaaaaaaaaaaaaaaaaaaaaaaaaaaaaaaaaaaaaaaaaaaaaaaaaaaaaaaaaaaaaaaaaaaaaaaaaaaaaaaaaaaaaaaaaaaaaaaa

SEQ ID NO: 24584 - RNA, 4035 nt, Artificial Sequence
  SARS-CoV-2/Wuhan/WIV05/2019__EPI_ISL_402128 spike protein mRNA gc mod (1-1273)(N439K_D614G)
aggagaaagcuuaccauguucguguuucuggugcugcugccccugguguccagccagugugugaaccugaccaccagaacacagcugccuccagccuacaccaacagcuucaccagaggcguguacuaccccgacaagguguucagauccagcgugcugcacucuacccaggaccuguuccugccuuucuucagcaacgugaccugguuccacgccauccacguguccggcaccaauggcaccaagagauucgacaaccccgugcugcccuucaacgacgggguguacuuugccagcaccgagaaguccaacaucaucagaggcuggaucuucggcaccacacuggacagcaagacccagagccugcugaucgugaacaacgccaccaacguggucaucaaagugugcgaguuccaguucugcaacgaccccuuccugggcgucuacuaccacaagaacaacaagagcuggauggaaagcgaguuccggguguacagcagcgccaacaacugcaccuucgaguacgugucccagccuuuccugauggaccuggaaggcaagcagggcaacuucaagaaccugcgcgaguucguguucaagaacaucgacggcuacuucaaaaucuacagcaagcacaccccuaucaaccucgugcgggaucugccucagggcuucucugcucuggaaccccugguggaucugcccaucggcaucaacaucacccgguuucagacacugcuggcccugcacagaagcuaccugacaccuggcgauagcagcagcggauggacagcuggugccgccgcuuacuaugugggcuaccugcagccuagaaccuuccugcugaaguacaacgagaacggcaccaucaccgacgccguggauugugcucuggauccucugagcgagacaaagugcacccugaaguccuucaccguggaaaagggcaucuaccagaccagcaacuuccgggugcagcccaccgaauccaucgugcgguuccccaauaucaccaaucugugccccuucggcgagguguucaaugccaccagauucgccucuguguacgccuggaaccggaagcggaucagcaauugcguggccgacuacuccgugcuguacaacuccgccagcuucagcaccuucaagugcuacggcguguccccuaccaagcugaacgaccugugcuucacaaacguguacgccgacagcuucgugauccggggagaugaagugcggcagauugccccuggacagacaggcaagaucgccgacuacaacuacaagcugcccgacgacuucaccggcugugugauugccuggaacagcaagaaccuggacuccaaagucggcggcaacuacaauuaccuguaccggcuguuccggaaguccaaucugaagcccuucgagcgggacaucagcaccgaaaucuaucaggccggcagcaccccuugcaacggcguggaaggcuucaacugcuacuucccacugcaguccuacggcuuucagcccacaaauggcgugggcuaucagcccuacagagugguggugcugagcuucgaacugcugcaugcuccugccacagugugcggcccuaagaaaagcaccaaucucgugaagaacaaaugcgugaacuucaacuucaacggccugaccggcaccggcgugcugacagagagcaacaagaaguuccugccauuccagcaguuuggccgggauaucgccgauaccacagacgccguuagagauccccagacacuggaaauccuggacaucaccccaugcagcuucggcggagugucugugaucaccccuggcaccaacaccagcaaucagguggcagugcuguaccagggcgugaacuguaccgaagugcccguggccauucacgccgaucagcugacaccuacauggcggguguacuccaccggcagcaauguguuucagaccagagccggcugucugaucggagccgagcacgugaacaauagcuacgagugcgacauccccaucggcgcuggcaucugugccagcuaccagacacagacaaacagccccagacgggcuagaagcguggccagccagagcaucauugccuacacaaugucucugggcgccgagaacagcguggccuacuccaacaacucuaucgcuauccccaccaacuucaccaucagcgugaccaccgagauccugccuguguccaugaccaagaccagcguggacugcaccauguacaucugcggcgauuccaccgagugcuccaaccugcugcugcaguacggcagcuucugcacccagcugaauagagcccugacagggaucgccguggaacaggacaagaacacccaagagguguucgcccaagugaagcaaaucuacaagaccccuccuaucaaggacuucggcggcuucaauuucagccagauucugcccgauccuagcaagcccagcaagcggagcuucaucgaggaccugcuguucaacaaagugacacuggccgacgccggcuucaucaagcaguauggcgauugucugggcgacauugccgccagggaucugauuugcgcccagaaguuuaacggacugacagugcugccuccucugcugaccgaugagaugaucgcccaguacacaucugcccugcuggccggcacaaucacaagcggcuggacauuuggagcuggcgccgcucugcagauccccuuugcuaugcagauggccuaccgguucaacggcaucggagugacccagaaugugcuguacgagaaccagaagcugaucgccaaccaguucaacagcgccaucggcaagauccaggacagccugagcagcacagcaagcgcccugggaaagcugcaggacguggucaaccagaaugcccaggcacugaacacccuggucaagcagcuguccuccaacuucggcgccaucagcucugugcugaacgauauccugagcagacuggacaaggucgaggccgaggugcagaucgacagacugaucacaggcagacugcagagccuccagacauacgugacccagcagcugaucagagccgccgagauuagagccucugccaaucuggccgccaccaagaugucugagugugugcugggccagagcaagagaguggacuuuugcggcaagggcuaccaccugaugagcuucccucagucugccccucacggcgugguguuucugcacgugacauaugugcccgcucaagagaagaauuucaccaccgcuccagccaucugccacgacggcaaagcccacuuuccuagagaaggcguguucguguccaacggcacccauugguucgugacacagcggaacuucuacgagccccagaucaucaccaccgacaacaccuucgugucuggcaacugcgacguugugaucggcauugugaacaauaccguguacgacccucugcagcccgagcuggacagcuucaaagaggaacuggacaaguacuuuaagaaccacacaagccccgacguggaccugggcgauaucagcggaaucaaugccagcgucgugaacauccagaaagagaucgaccggcugaacgagguggccaagaaucugaacgagagccugaucgaccugcaagaacuggggaaguacgagcaguacaucaaguggcccugguacaucuggcugggcuuuaucgccggacugauugccaucgugauggucacaaucaugcuguguugcaugaccagcugcuguagcugccugaagggcuguuguagcuguggcagcugcugcaaguucgacgaggacgauucugagcccgugcugaagggcgugaaacugcacuacaccugaggacuaguuauaagacugacuagcccgaugggccucccaacgggcccuccuccccuccuugcaccgagagaucucaaaggcucuuuucagagccaccaaaaaaaaaaaaaaaaaaaaaaaaaaaaaaaaaaaaaaaaaaaaaaaaaaaaaaaaaaaaaaaaaaaaaaaaaaaaaaaaaaaaaaaaaaaaaaaaaaaaa

SEQ ID NO: 24585 - RNA, 4035 nt, Artificial Sequence
  SARS-CoV-2/Wuhan/WIV05/2019__EPI_ISL_402128 spike protein mRNA gc mod (1-1273)(S477N_D614G)
aggagaaagcuuaccauguucguguuucuggugcugcugccccugguguccagccagugugugaaccugaccaccagaacacagcugccuccagccuacaccaacagcuucaccagaggcguguacuaccccgacaagguguucagauccagcgugcugcacucuacccaggaccuguuccugccuuucuucagcaacgugaccugguuccacgccauccacguguccggcaccaauggcaccaagagauucgacaaccccgugcugcccuucaacgacgggguguacuuugccagcaccgagaaguccaacaucaucagaggcuggaucuucggcaccacacuggacagcaagacccagagccugcugaucgugaacaacgccaccaacguggucaucaaagugugcgaguuccaguucugcaacgaccccuuccugggcgucuacuaccacaagaacaacaagagcuggauggaaagcgaguuccggguguacagcagcgccaacaacugcaccuucgaguacgugucccagccuuuccugauggaccuggaaggcaagcagggcaacuucaagaaccugcgcgaguucguguucaagaacaucgacggcuacuucaaaaucuacagcaagcacaccccuaucaaccucgugcgggaucugccucagggcuucucugcucuggaaccccugguggaucugcccaucggcaucaacaucacccgguuucagacacugcuggcccugcacagaagcuaccugacaccuggcgauagcagcagcggauggacagcuggugccgccgcuuacuaugugggcuaccugcagccuagaaccuuccugcugaaguacaacgagaacggcaccaucaccgacgccguggauugugcucuggauccucugagcgagacaaagugcacccugaaguccuucaccguggaaaagggcaucuaccagaccagcaacuuccgggugcagcccaccgaauccaucgugcgguuccccaauaucaccaaucugugccccuucggcgagguguucaaugccaccagauucgccucuguguacgccuggaaccggaagcggaucagcaauugcguggccgacuacuccgugcuguacaacuccgccagcuucagcaccuucaagugcuacggcguguccccuaccaagcugaacgaccugugcuucacaaacguguacgccgacagcuucgugauccggggagaugaagugcggcagauugccccuggacagacaggcaagaucgccgacuacaacuacaagcugcccgacgacuucaccggcugugugauugccuggaacagcaacaaccuggacuccaaagucggcggcaacuacaauuaccuguaccggcuguuccggaaguccaaucugaagcccuucgagcgggacaucagcaccgaaaucuaucaggccggcaacaccccuugcaacggcguggaaggcuucaacugcuacuucccacugcaguccuacggcuuucagcccacaaauggcgugggcuaucagcccuacagagugguggugcugagcuucgaacugcugcaugcuccugccacagugugcggcccuaagaaaagcaccaaucucgugaagaacaaaugcgugaacuucaacuucaacggccugaccggcaccggcgugcugacagagagcaacaagaaguuccugccauuccagcaguuuggccgggauaucgccgauaccacagacgccguuagagauccccagacacuggaaauccuggacaucaccccaugcagcuucggcggagugucugugaucaccccuggcaccaacaccagcaaucagguggcagugcuguaccagggcgugaacuguaccgaagugcccguggccauucacgccgaucagcugacaccuacauggcggguguacuccaccggcagcaauguguuucagaccagagccggcugucugaucggagccgagcacgugaacaauagcuacgagugcgacauccccaucggcgcuggcaucugugccagcuaccagacacagacaaacagccccagacgggcuagaagcguggccagccagagcaucauugccuacacaaugucucugggcgccgagaacagcguggccuacuccaacaacucuaucgcuauccccaccaacuucaccaucagcgugaccaccgagauccugccuguguccaugaccaagaccagcguggacugcaccauguacaucugcggcgauuccaccgagugcuccaaccugcugcugcaguacggcagcuucugcacccagcugaauagagcccugacagggaucgccguggaacaggacaagaacacccaagagguguucgcccaagugaagcaaaucuacaagaccccuccuaucaaggacuucggcggcuucaauuucagccagauucugcccgauccuagcaagcccagcaagcggagcuucaucgaggaccugcuguucaacaaagugacacuggccgacgccggcuucaucaagcaguauggcgauugucugggcgacauugccgccagggaucugauuugcgcccagaaguuuaacggacugacagugcugccuccucugcugaccgaugagaugaucgcccaguacacaucugcccugcuggccggcacaaucacaagcggcuggacauuuggagcuggcgccgcucugcagauccccuuugcuaugcagauggccuaccgguucaacggcaucggagugacccagaaugugcuguacgagaaccagaagcugaucgccaaccaguucaacagcgccaucggcaagauccaggacagccugagcagcacagcaagcgcccugggaaagcugcaggacguggucaaccagaaugcccaggcacugaacacccuggucaagcagcuguccuccaacuucggcgccaucagcucugugcugaacgauauccugagcagacuggacaaggucgaggccgaggugcagaucgacagacugaucacaggcagacugcagagccuccagacauacgugacccagcagcugaucagagccgccgagauuagagccucugccaaucuggccgccaccaagaugucugagugugugcugggccagagcaagagaguggacuuuugcggcaagggcuaccaccugaugagcuucccucagucugccccucacggcgugguguuucugcacgugacauaugugcccgcucaagagaagaauuucaccaccgcuccagccaucugccacgacggcaaagcccacuuuccuagagaaggcguguucguguccaacggcacccauugguucgugacacagcggaacuucuacgagccccagaucaucaccaccgacaacaccuucgugucuggcaacugcgacguugugaucggcauugugaacaauaccguguacgacccucugcagcccgagcuggacagcuucaaagaggaacuggacaaguacuuuaagaaccacacaagccccgacguggaccugggcgauaucagcggaaucaaugccagcgucgugaacauccagaaagagaucgaccggcugaacgagguggccaagaaucugaacgagagccugaucgaccugcaagaacuggggaaguacgagcaguacaucaaguggcccugguacaucuggcugggcuuuaucgccggacugauugccaucgugauggucacaaucaugcuguguugcaugaccagcugcuguagcugccugaagggcuguuguagcuguggcagcugcugcaaguucgacgaggacgauucugagcccgugcugaagggcgugaaacugcacuacaccugaggacuaguuauaagacugacuagcccgaugggccucccaacgggcccuccuccccuccuugcaccgagagaucucaaaggcucuuuucagagccaccaaaaaaaaaaaaaaaaaaaaaaaaaaaaaaaaaaaaaaaaaaaaaaaaaaaaaaaaaaaaaaaaaaaaaaaaaaaaaaaaaaaaaaaaaaaaaaaaaaaaa

SEQ ID NO: 24586 - RNA, 4035 nt, Artificial Sequence
  SARS-CoV-2/Wuhan/WIV05/2019__EPI_ISL_402128 spike protein mRNA gc mod (1-1273)(N501Y_D614G)
aggagaaagcuuaccauguucguguuucuggugcugcugccccugguguccagccagugugugaaccugaccaccagaacacagcugccuccagccuacaccaacagcuucaccagaggcguguacuaccccgacaagguguucagauccagcgugcugcacucuacccaggaccuguuccugccuuucuucagcaacgugaccugguuccacgccauccacguguccggcaccaauggcaccaagagauucgacaaccccgugcugcccuucaacgacgggguguacuuugccagcaccgagaaguccaacaucaucagaggcuggaucuucggcaccacacuggacagcaagacccagagccugcugaucgugaacaacgccaccaacguggucaucaaagugugcgaguuccaguucugcaacgaccccuuccugggcgucuacuaccacaagaacaacaagagcuggauggaaagcgaguuccggguguacagcagcgccaacaacugcaccuucgaguacgugucccagccuuuccugauggaccuggaaggcaagcagggcaacuucaagaaccugcgcgaguucguguucaagaacaucgacggcuacuucaaaaucuacagcaagcacaccccuaucaaccucgugcgggaucugccucagggcuucucugcucuggaaccccugguggaucugcccaucggcaucaacaucacccgguuucagacacugcuggcccugcacagaagcuaccugacaccuggcgauagcagcagcggauggacagcuggugccgccgcuuacuaugugggcuaccugcagccuagaaccuuccugcugaaguacaacgagaacggcaccaucaccgacgccguggauugugcucuggauccucugagcgagacaaagugcacccugaaguccuucaccguggaaaagggcaucuaccagaccagcaacuuccgggugcagcccaccgaauccaucgugcgguuccccaauaucaccaaucugugccccuucggcgagguguucaaugccaccagauucgccucuguguacgccuggaaccggaagcggaucagcaauugcguggccgacuacuccgugcuguacaacuccgccagcuucagcaccuucaagugcuacggcguguccccuaccaagcugaacgaccugugcuucacaaacguguacgccgacagcuucgugauccggggagaugaagugcggcagauugccccuggacagacaggcaagaucgccgacuacaacuacaagcugcccgacgacuucaccggcugugugauugccuggaacagcaacaaccuggacuccaaagucggcggcaacuacaauuaccuguaccggcuguuccggaaguccaaucugaagcccuucgagcgggacaucagcaccgaaaucuaucaggccggcagcaccccuugcaacggcguggaaggcuucaacugcuacuucccacugcaguccuacggcuuucagcccacauacggcgugggcuaucagcccuacagagugguggugcugagcuucgaacugcugcaugcuccugccacagugugcggcccuaagaaaagcaccaaucucgugaagaacaaaugcgugaacuucaacuucaacggccugaccggcaccggcgugcugacagagagcaacaagaaguuccugccauuccagcaguuuggccgggauaucgccgauaccacagacgccguuagagauccccagacacuggaaauccuggacaucaccccaugcagcuucggcggagugucugugaucaccccuggcaccaacaccagcaaucagguggcagugcuguaccagggcgugaacuguaccgaagugcccguggccauucacgccgaucagcugacaccuacauggcggguguacuccaccggcagcaauguguuucagaccagagccggcugucugaucggagccgagcacgugaacaauagcuacgagugcgacauccccaucggcgcuggcaucugugccagcuaccagacacagacaaacagccccagacgggcuagaagcguggccagccagagcaucauugccuacacaaugucucugggcgccgagaacagcguggccuacuccaacaacucuaucgcuauccccaccaacuucaccaucagcgugaccaccgagauccugccuguguccaugaccaagaccagcguggacugcaccauguacaucugcggcgauuccaccgagugcuccaaccugcugcugcaguacggcagcuucugcacccagcugaauagagcccugacagggaucgccguggaacaggacaagaacacccaagagguguucgcccaagugaagcaaaucuacaagaccccuccuaucaaggacuucggcggcuucaauuucagccagauucugcccgauccuagcaagcccagcaagcggagcuucaucgaggaccugcuguucaacaaagugacacuggccgacgccggcuucaucaagcaguauggcgauugucugggcgacauugccgccagggaucugauuugcgcccagaaguuuaacggacugacagugcugccuccucugcugaccgaugagaugaucgcccaguacacaucugcccugcuggccggcacaaucacaagcggcuggacauuuggagcuggcgccgcucugcagauccccuuugcuaugcagauggccuaccgguucaacggcaucggagugacccagaaugugcuguacgagaaccagaagcugaucgccaaccaguucaacagcgccaucggcaagauccaggacagccugagcagcacagcaagcgcccugggaaagcugcaggacguggucaaccagaaugcccaggcacugaacacccuggucaagcagcuguccuccaacuucggcgccaucagcucugugcugaacgauauccugagcagacuggacaaggucgaggccgaggugcagaucgacagacugaucacaggcagacugcagagccuccagacauacgugacccagcagcugaucagagccgccgagauuagagccucugccaaucuggccgccaccaagaugucugagugugugcugggccagagcaagagaguggacuuuugcggcaagggcuaccaccugaugagcuucccucagucugccccucacggcgugguguuucugcacgugacauaugugcccgcucaagagaagaauuucaccaccgcuccagccaucugccacgacggcaaagcccacuuuccuagagaaggcguguucguguccaacggcacccauugguucgugacacagcggaacuucuacgagccccagaucaucaccaccgacaacaccuucgugucuggcaacugcgacguugugaucggcauugugaacaauaccguguacgacccucugcagcccgagcuggacagcuucaaagaggaacuggacaaguacuuuaagaaccacacaagccccgacguggaccugggcgauaucagcggaaucaaugccagcgucgugaacauccagaaagagaucgaccggcugaacgagguggccaagaaucugaacgagagccugaucgaccugcaagaacuggggaaguacgagcaguacaucaaguggcccugguacaucuggcugggcuuuaucgccggacugauugccaucgugauggucacaaucaugcuguguugcaugaccagcugcuguagcugccugaagggcuguuguagcuguggcagcugcugcaaguucgacgaggacgauucugagcccgugcugaagggcgugaaacugcacuacaccugaggacuaguuauaagacugacuagcccgaugggccucccaacgggcccuccuccccuccuugcaccgagagaucucaaaggcucuuuucagagccaccaaaaaaaaaaaaaaaaaaaaaaaaaaaaaaaaaaaaaaaaaaaaaaaaaaaaaaaaaaaaaaaaaaaaaaaaaaaaaaaaaaaaaaaaaaaaaaaaaaaaa

SEQ ID NO: 24587 - RNA, 4029 nt, Artificial Sequence
  SARS-CoV-2/Wuhan/WIV05/2019__EPI_ISL_402128 spike protein mRNA gc mod (1-1273)(H69del_V70del_D614G)
aggagaaagcuuaccauguucguguuucuggugcugcugccccugguguccagccagugugugaaccugaccaccagaacacagcugccuccagccuacaccaacagcuucaccagaggcguguacuaccccgacaagguguucagauccagcgugcugcacucuacccaggaccuguuccugccuuucuucagcaacgugaccugguuccacgccaucuccggcaccaauggcaccaagagauucgacaaccccgugcugcccuucaacgacgggguguacuuugccagcaccgagaaguccaacaucaucagaggcuggaucuucggcaccacacuggacagcaagacccagagccugcugaucgugaacaacgccaccaacguggucaucaaagugugcgaguuccaguucugcaacgaccccuuccugggcgucuacuaccacaagaacaacaagagcuggauggaaagcgaguuccggguguacagcagcgccaacaacugcaccuucgaguacgugucccagccuuuccugauggaccuggaaggcaagcagggcaacuucaagaaccugcgcgaguucguguucaagaacaucgacggcuacuucaaaaucuacagcaagcacaccccuaucaaccucgugcgggaucugccucagggcuucucugcucuggaaccccugguggaucugcccaucggcaucaacaucacccgguuucagacacugcuggcccugcacagaagcuaccugacaccuggcgauagcagcagcggauggacagcuggugccgccgcuuacuaugugggcuaccugcagccuagaaccuuccugcugaaguacaacgagaacggcaccaucaccgacgccguggauugugcucuggauccucugagcgagacaaagugcacccugaaguccuucaccguggaaaagggcaucuaccagaccagcaacuuccgggugcagcccaccgaauccaucgugcgguuccccaauaucaccaaucugugccccuucggcgagguguucaaugccaccagauucgccucuguguacgccuggaaccggaagcggaucagcaauugcguggccgacuacuccgugcuguacaacuccgccagcuucagcaccuucaagugcuacggcguguccccuaccaagcugaacgaccugugcuucacaaacguguacgccgacagcuucgugauccggggagaugaagugcggcagauugccccuggacagacaggcaagaucgccgacuacaacuacaagcugcccgacgacuucaccggcugugugauugccuggaacagcaacaaccuggacuccaaagucggcggcaacuacaauuaccuguaccggcuguuccggaaguccaaucugaagcccuucgagcgggacaucagcaccgaaaucuaucaggccggcagcaccccuugcaacggcguggaaggcuucaacugcuacuucccacugcaguccuacggcuuucagcccacaaauggcgugggcuaucagcccuacagagugguggugcugagcuucgaacugcugcaugcuccugccacagugugcggcccuaagaaaagcaccaaucucgugaagaacaaaugcgugaacuucaacuucaacggccugaccggcaccggcgugcugacagagagcaacaagaaguuccugccauuccagcaguuuggccgggauaucgccgauaccacagacgccguuagagauccccagacacuggaaauccuggacaucaccccaugcagcuucggcggagugucugugaucaccccuggcaccaacaccagcaaucagguggcagugcuguaccagggcgugaacuguaccgaagugcccguggccauucacgccgaucagcugacaccuacauggcggguguacuccaccggcagcaauguguuucagaccagagccggcugucugaucggagccgagcacgugaacaauagcuacgagugcgacauccccaucggcgcuggcaucugugccagcuaccagacacagacaaacagccccagacgggcuagaagcguggccagccagagcaucauugccuacacaaugucucugggcgccgagaacagcguggccuacuccaacaacucuaucgcuauccccaccaacuucaccaucagcgugaccaccgagauccugccuguguccaugaccaagaccagcguggacugcaccauguacaucugcggcgauuccaccgagugcuccaaccugcugcugcaguacggcagcuucugcacccagcugaauagagcccugacagggaucgccguggaacaggacaagaacacccaagagguguucgcccaagugaagcaaaucuacaagaccccuccuaucaaggacuucggcggcuucaauuucagccagauucugcccgauccuagcaagcccagcaagcggagcuucaucgaggaccugcuguucaacaaagugacacuggccgacgccggcuucaucaagcaguauggcgauugucugggcgacauugccgccagggaucugauuugcgcccagaaguuuaacggacugacagugcugccuccucugcugaccgaugagaugaucgcccaguacacaucugcccugcuggccggcacaaucacaagcggcuggacauuuggagcuggcgccgcucugcagauccccuuugcuaugcagauggccuaccgguucaacggcaucggagugacccagaaugugcuguacgagaaccagaagcugaucgccaaccaguucaacagcgccaucggcaagauccaggacagccugagcagcacagcaagcgcccugggaaagcugcaggacguggucaaccagaaugcccaggcacugaacacccuggucaagcagcuguccuccaacuucggcgccaucagcucugugcugaacgauauccugagcagacuggacaaggucgaggccgaggugcagaucgacagacugaucacaggcagacugcagagccuccagacauacgugacccagcagcugaucagagccgccgagauuagagccucugccaaucuggccgccaccaagaugucugagugugugcugggccagagcaagagaguggacuuuugcggcaagggcuaccaccugaugagcuucccucagucugccccucacggcgugguguuucugcacgugacauaugugcccgcucaagagaagaauuucaccaccgcuccagccaucugccacgacggcaaagcccacuuuccuagagaaggcguguucguguccaacggcacccauugguucgugacacagcggaacuucuacgagccccagaucaucaccaccgacaacaccuucgugucuggcaacugcgacguugugaucggcauugugaacaauaccguguacgacccucugcagcccgagcuggacagcuucaaagaggaacuggacaaguacuuuaagaaccacacaagccccgacguggaccugggcgauaucagcggaaucaaugccagcgucgugaacauccagaaagagaucgaccggcugaacgagguggccaagaaucugaacgagagccugaucgaccugcaagaacuggggaaguacgagcaguacaucaaguggcccugguacaucuggcugggcuuuaucgccggacugauugccaucgugauggucacaaucaugcuguguugcaugaccagcugcuguagcugccugaagggcuguuguagcuguggcagcugcugcaaguucgacgaggacgauucugagcccgugcugaagggcgugaaacugcacuacaccugaggacuaguuauaagacugacuagcccgaugggccucccaacgggcccuccuccccuccuugcaccgagagaucucaaaggcucuuuucagagccaccaaaaaaaaaaaaaaaaaaaaaaaaaaaaaaaaaaaaaaaaaaaaaaaaaaaaaaaaaaaaaaaaaaaaaaaaaaaaaaaaaaaaaaaaaaaaaaaaaaaaa

SEQ ID NO: 24588 - RNA, 4035 nt, Artificial Sequence
  SARS-CoV-2/Wuhan/WIV05/2019__EPI_ISL_402128 spike protein mRNA gc mod (1-1273)(Y453F_D614G)
aggagaaagcuuaccauguucguguuucuggugcugcugccccugguguccagccagugugugaaccugaccaccagaacacagcugccuccagccuacaccaacagcuucaccagaggcguguacuaccccgacaagguguucagauccagcgugcugcacucuacccaggaccuguuccugccuuucuucagcaacgugaccugguuccacgccauccacguguccggcaccaauggcaccaagagauucgacaaccccgugcugcccuucaacgacgggguguacuuugccagcaccgagaaguccaacaucaucagaggcuggaucuucggcaccacacuggacagcaagacccagagccugcugaucgugaacaacgccaccaacguggucaucaaagugugcgaguuccaguucugcaacgaccccuuccugggcgucuacuaccacaagaacaacaagagcuggauggaaagcgaguuccggguguacagcagcgccaacaacugcaccuucgaguacgugucccagccuuuccugauggaccuggaaggcaagcagggcaacuucaagaaccugcgcgaguucguguucaagaacaucgacggcuacuucaaaaucuacagcaagcacaccccuaucaaccucgugcgggaucugccucagggcuucucugcucuggaaccccugguggaucugcccaucggcaucaacaucacccgguuucagacacugcuggcccugcacagaagcuaccugacaccuggcgauagcagcagcggauggacagcuggugccgccgcuuacuaugugggcuaccugcagccuagaaccuuccugcugaaguacaacgagaacggcaccaucaccgacgccguggauugugcucuggauccucugagcgagacaaagugcacccugaaguccuucaccguggaaaagggcaucuaccagaccagcaacuuccgggugcagcccaccgaauccaucgugcgguuccccaauaucaccaaucugugccccuucggcgagguguucaaugccaccagauucgccucuguguacgccuggaaccggaagcggaucagcaauugcguggccgacuacuccgugcuguacaacuccgccagcuucagcaccuucaagugcuacggcguguccccuaccaagcugaacgaccugugcuucacaaacguguacgccgacagcuucgugauccggggagaugaagugcggcagauugccccuggacagacaggcaagaucgccgacuacaacuacaagcugcccgacgacuucaccggcugugugauugccuggaacagcaacaaccuggacuccaaagucggcggcaacuacaauuaccuguuccggcuguuccggaaguccaaucugaagcccuucgagcgggacaucagcaccgaaaucuaucaggccggcagcaccccuugcaacggcguggaaggcuucaacugcuacuucccacugcaguccuacggcuuucagcccacaaauggcgugggcuaucagcccuacagagugguggugcugagcuucgaacugcugcaugcuccugccacagugugcggcccuaagaaaagcaccaaucucgugaagaacaaaugcgugaacuucaacuucaacggccugaccggcaccggcgugcugacagagagcaacaagaaguuccugccauuccagcaguuuggccgggauaucgccgauaccacagacgccguuagagauccccagacacuggaaauccuggacaucaccccaugcagcuucggcggagugucugugaucaccccuggcaccaacaccagcaaucagguggcagugcuguaccagggcgugaacuguaccgaagugcccguggccauucacgccgaucagcugacaccuacauggcggguguacuccaccggcagcaauguguuucagaccagagccggcugucugaucggagccgagcacgugaacaauagcuacgagugcgacauccccaucggcgcuggcaucugugccagcuaccagacacagacaaacagccccagacgggcuagaagcguggccagccagagcaucauugccuacacaaugucucugggcgccgagaacagcguggccuacuccaacaacucuaucgcuauccccaccaacuucaccaucagcgugaccaccgagauccugccuguguccaugaccaagaccagcguggacugcaccauguacaucugcggcgauuccaccgagugcuccaaccugcugcugcaguacggcagcuucugcacccagcugaauagagcccugacagggaucgccguggaacaggacaagaacacccaagagguguucgcccaagugaagcaaaucuacaagaccccuccuaucaaggacuucggcggcuucaauuucagccagauucugcccgauccuagcaagcccagcaagcggagcuucaucgaggaccugcuguucaacaaagugacacuggccgacgccggcuucaucaagcaguauggcgauugucugggcgacauugccgccagggaucugauuugcgcccagaaguuuaacggacugacagugcugccuccucugcugaccgaugagaugaucgcccaguacacaucugcccugcuggccggcacaaucacaagcggcuggacauuuggagcuggcgccgcucugcagauccccuuugcuaugcagauggccuaccgguucaacggcaucggagugacccagaaugugcuguacgagaaccagaagcugaucgccaaccaguucaacagcgccaucggcaagauccaggacagccugagcagcacagcaagcgcccugggaaagcugcaggacguggucaaccagaaugcccaggcacugaacacccuggucaagcagcuguccuccaacuucggcgccaucagcucugugcugaacgauauccugagcagacuggacaaggucgaggccgaggugcagaucgacagacugaucacaggcagacugcagagccuccagacauacgugacccagcagcugaucagagccgccgagauuagagccucugccaaucuggccgccaccaagaugucugagugugugcugggccagagcaagagaguggacuuuugcggcaagggcuaccaccugaugagcuucccucagucugccccucacggcgugguguuucugcacgugacauaugugcccgcucaagagaagaauuucaccaccgcuccagccaucugccacgacggcaaagcccacuuuccuagagaaggcguguucguguccaacggcacccauugguucgugacacagcggaacuucuacgagccccagaucaucaccaccgacaacaccuucgugucuggcaacugcgacguugugaucggcauugugaacaauaccguguacgacccucugcagcccgagcuggacagcuucaaagaggaacuggacaaguacuuuaagaaccacacaagccccgacguggaccugggcgauaucagcggaaucaaugccagcgucgugaacauccagaaagagaucgaccggcugaacgagguggccaagaaucugaacgagagccugaucgaccugcaagaacuggggaaguacgagcaguacaucaaguggcccugguacaucuggcugggcuuuaucgccggacugauugccaucgugauggucacaaucaugcuguguugcaugaccagcugcuguagcugccugaagggcuguuguagcuguggcagcugcugcaaguucgacgaggacgauucugagcccgugcugaagggcgugaaacugcacuacaccugaggacuaguuauaagacugacuagcccgaugggccucccaacgggcccuccuccccuccuugcaccgagagaucucaaaggcucuuuucagagccaccaaaaaaaaaaaaaaaaaaaaaaaaaaaaaaaaaaaaaaaaaaaaaaaaaaaaaaaaaaaaaaaaaaaaaaaaaaaaaaaaaaaaaaaaaaaaaaaaaaaaa

SEQ ID NO: 24589 - RNA, 4035 nt, Artificial Sequence
  SARS-CoV-2/Wuhan/WIV05/2019__EPI_ISL_402128 spike protein mRNA gc mod (1-1273)(D614G_I692V)
aggagaaagcuuaccauguucguguuucuggugcugcugccccugguguccagccagugugugaaccugaccaccagaacacagcugccuccagccuacaccaacagcuucaccagaggcguguacuaccccgacaagguguucagauccagcgugcugcacucuacccaggaccuguuccugccuuucuucagcaacgugaccugguuccacgccauccacguguccggcaccaauggcaccaagagauucgacaaccccgugcugcccuucaacgacgggguguacuuugccagcaccgagaaguccaacaucaucagaggcuggaucuucggcaccacacuggacagcaagacccagagccugcugaucgugaacaacgccaccaacguggucaucaaagugugcgaguuccaguucugcaacgaccccuuccugggcgucuacuaccacaagaacaacaagagcuggauggaaagcgaguuccggguguacagcagcgccaacaacugcaccuucgaguacgugucccagccuuuccugauggaccuggaaggcaagcagggcaacuucaagaaccugcgcgaguucguguucaagaacaucgacggcuacuucaaaaucuacagcaagcacaccccuaucaaccucgugcgggaucugccucagggcuucucugcucuggaaccccugguggaucugcccaucggcaucaacaucacccgguuucagacacugcuggcccugcacagaagcuaccugacaccuggcgauagcagcagcggauggacagcuggugccgccgcuuacuaugugggcuaccugcagccuagaaccuuccugcugaaguacaacgagaacggcaccaucaccgacgccguggauugugcucuggauccucugagcgagacaaagugcacccugaaguccuucaccguggaaaagggcaucuaccagaccagcaacuuccgggugcagcccaccgaauccaucgugcgguuccccaauaucaccaaucugugccccuucggcgagguguucaaugccaccagauucgccucuguguacgccuggaaccggaagcggaucagcaauugcguggccgacuacuccgugcuguacaacuccgccagcuucagcaccuucaagugcuacggcguguccccuaccaagcugaacgaccugugcuucacaaacguguacgccgacagcuucgugauccggggagaugaagugcggcagauugccccuggacagacaggcaagaucgccgacuacaacuacaagcugcccgacgacuucaccggcugugugauugccuggaacagcaacaaccuggacuccaaagucggcggcaacuacaauuaccuguaccggcuguuccggaaguccaaucugaagcccuucgagcgggacaucagcaccgaaaucuaucaggccggcagcaccccuugcaacggcguggaaggcuucaacugcuacuucccacugcaguccuacggcuuucagcccacaaauggcgugggcuaucagcccuacagagugguggugcugagcuucgaacugcugcaugcuccugccacagugugcggcccuaagaaaagcaccaaucucgugaagaacaaaugcgugaacuucaacuucaacggccugaccggcaccggcgugcugacagagagcaacaagaaguuccugccauuccagcaguuuggccgggauaucgccgauaccacagacgccguuagagauccccagacacuggaaauccuggacaucaccccaugcagcuucggcggagugucugugaucaccccuggcaccaacaccagcaaucagguggcagugcuguaccagggcgugaacuguaccgaagugcccguggccauucacgccgaucagcugacaccuacauggcggguguacuccaccggcagcaauguguuucagaccagagccggcugucugaucggagccgagcacgugaacaauagcuacgagugcgacauccccaucggcgcuggcaucugugccagcuaccagacacagacaaacagccccagacgggcuagaagcguggccagccagagcgugauugccuacacaaugucucugggcgccgagaacagcguggccuacuccaacaacucuaucgcuauccccaccaacuucaccaucagcgugaccaccgagauccugccuguguccaugaccaagaccagcguggacugcaccauguacaucugcggcgauuccaccgagugcuccaaccugcugcugcaguacggcagcuucugcacccagcugaauagagcccugacagggaucgccguggaacaggacaagaacacccaagagguguucgcccaagugaagcaaaucuacaagaccccuccuaucaaggacuucggcggcuucaauuucagccagauucugcccgauccuagcaagcccagcaagcggagcuucaucgaggaccugcuguucaacaaagugacacuggccgacgccggcuucaucaagcaguauggcgauugucugggcgacauugccgccagggaucugauuugcgcccagaaguuuaacggacugacagugcugccuccucugcugaccgaugagaugaucgcccaguacacaucugcccugcuggccggcacaaucacaagcggcuggacauuuggagcuggcgccgcucugcagauccccuuugcuaugcagauggccuaccgguucaacggcaucggagugacccagaaugugcuguacgagaaccagaagcugaucgccaaccaguucaacagcgccaucggcaagauccaggacagccugagcagcacagcaagcgcccugggaaagcugcaggacguggucaaccagaaugcccaggcacugaacacccuggucaagcagcuguccuccaacuucggcgccaucagcucugugcugaacgauauccugagcagacuggacaaggucgaggccgaggugcagaucgacagacugaucacaggcagacugcagagccuccagacauacgugacccagcagcugaucagagccgccgagauuagagccucugccaaucuggccgccaccaagaugucugagugugugcugggccagagcaagagaguggacuuuugcggcaagggcuaccaccugaugagcuucccucagucugccccucacggcgugguguuucugcacgugacauaugugcccgcucaagagaagaauuucaccaccgcuccagccaucugccacgacggcaaagcccacuuuccuagagaaggcguguucguguccaacggcacccauugguucgugacacagcggaacuucuacgagccccagaucaucaccaccgacaacaccuucgugucuggcaacugcgacguugugaucggcauugugaacaauaccguguacgacccucugcagcccgagcuggacagcuucaaagaggaacuggacaaguacuuuaagaaccacacaagccccgacguggaccugggcgauaucagcggaaucaaugccagcgucgugaacauccagaaagagaucgaccggcugaacgagguggccaagaaucugaacgagagccugaucgaccugcaagaacuggggaaguacgagcaguacaucaaguggcccugguacaucuggcugggcuuuaucgccggacugauugccaucgugauggucacaaucaugcuguguugcaugaccagcugcuguagcugccugaagggcuguuguagcuguggcagcugcugcaaguucgacgaggacgauucugagcccgugcugaagggcgugaaacugcacuacaccugaggacuaguuauaagacugacuagcccgaugggccucccaacgggcccuccuccccuccuugcaccgagagaucucaaaggcucuuuucagagccaccaaaaaaaaaaaaaaaaaaaaaaaaaaaaaaaaaaaaaaaaaaaaaaaaaaaaaaaaaaaaaaaaaaaaaaaaaaaaaaaaaaaaaaaaaaaaaaaaaaaaa

SEQ ID NO: 24590 - RNA, 4035 nt, Artificial Sequence
  SARS-CoV-2/Wuhan/WIV05/2019__EPI_ISL_402128 spike protein mRNA gc mod (1-1273)(D614G_M1229I)
aggagaaagcuuaccauguucguguuucuggugcugcugccccugguguccagccagugugugaaccugaccaccagaacacagcugccuccagccuacaccaacagcuucaccagaggcguguacuaccccgacaagguguucagauccagcgugcugcacucuacccaggaccuguuccugccuuucuucagcaacgugaccugguuccacgccauccacguguccggcaccaauggcaccaagagauucgacaaccccgugcugcccuucaacgacgggguguacuuugccagcaccgagaaguccaacaucaucagaggcuggaucuucggcaccacacuggacagcaagacccagagccugcugaucgugaacaacgccaccaacguggucaucaaagugugcgaguuccaguucugcaacgaccccuuccugggcgucuacuaccacaagaacaacaagagcuggauggaaagcgaguuccggguguacagcagcgccaacaacugcaccuucgaguacgugucccagccuuuccugauggaccuggaaggcaagcagggcaacuucaagaaccugcgcgaguucguguucaagaacaucgacggcuacuucaaaaucuacagcaagcacaccccuaucaaccucgugcgggaucugccucagggcuucucugcucuggaaccccugguggaucugcccaucggcaucaacaucacccgguuucagacacugcuggcccugcacagaagcuaccugacaccuggcgauagcagcagcggauggacagcuggugccgccgcuuacuaugugggcuaccugcagccuagaaccuuccugcugaaguacaacgagaacggcaccaucaccgacgccguggauugugcucuggauccucugagcgagacaaagugcacccugaaguccuucaccguggaaaagggcaucuaccagaccagcaacuuccgggugcagcccaccgaauccaucgugcgguuccccaauaucaccaaucugugccccuucggcgagguguucaaugccaccagauucgccucuguguacgccuggaaccggaagcggaucagcaauugcguggccgacuacuccgugcuguacaacuccgccagcuucagcaccuucaagugcuacggcguguccccuaccaagcugaacgaccugugcuucacaaacguguacgccgacagcuucgugauccggggagaugaagugcggcagauugccccuggacagacaggcaagaucgccgacuacaacuacaagcugcccgacgacuucaccggcugugugauugccuggaacagcaacaaccuggacuccaaagucggcggcaacuacaauuaccuguaccggcuguuccggaaguccaaucugaagcccuucgagcgggacaucagcaccgaaaucuaucaggccggcagcaccccuugcaacggcguggaaggcuucaacugcuacuucccacugcaguccuacggcuuucagcccacaaauggcgugggcuaucagcccuacagagugguggugcugagcuucgaacugcugcaugcuccugccacagugugcggcccuaagaaaagcaccaaucucgugaagaacaaaugcgugaacuucaacuucaacggccugaccggcaccggcgugcugacagagagcaacaagaaguuccugccauuccagcaguuuggccgggauaucgccgauaccacagacgccguuagagauccccagacacuggaaauccuggacaucaccccaugcagcuucggcggagugucugugaucaccccuggcaccaacaccagcaaucagguggcagugcuguaccagggcgugaacuguaccgaagugcccguggccauucacgccgaucagcugacaccuacauggcggguguacuccaccggcagcaauguguuucagaccagagccggcugucugaucggagccgagcacgugaacaauagcuacgagugcgacauccccaucggcgcuggcaucugugccagcuaccagacacagacaaacagccccagacgggcuagaagcguggccagccagagcaucauugccuacacaaugucucugggcgccgagaacagcguggccuacuccaacaacucuaucgcuauccccaccaacuucaccaucagcgugaccaccgagauccugccuguguccaugaccaagaccagcguggacugcaccauguacaucugcggcgauuccaccgagugcuccaaccugcugcugcaguacggcagcuucugcacccagcugaauagagcccugacagggaucgccguggaacaggacaagaacacccaagagguguucgcccaagugaagcaaaucuacaagaccccuccuaucaaggacuucggcggcuucaauuucagccagauucugcccgauccuagcaagcccagcaagcggagcuucaucgaggaccugcuguucaacaaagugacacuggccgacgccggcuucaucaagcaguauggcgauugucugggcgacauugccgccagggaucugauuugcgcccagaaguuuaacggacugacagugcugccuccucugcugaccgaugagaugaucgcccaguacacaucugcccugcuggccggcacaaucacaagcggcuggacauuuggagcuggcgccgcucugcagauccccuuugcuaugcagauggccuaccgguucaacggcaucggagugacccagaaugugcuguacgagaaccagaagcugaucgccaaccaguucaacagcgccaucggcaagauccaggacagccugagcagcacagcaagcgcccugggaaagcugcaggacguggucaaccagaaugcccaggcacugaacacccuggucaagcagcuguccuccaacuucggcgccaucagcucugugcugaacgauauccugagcagacuggacaaggucgaggccgaggugcagaucgacagacugaucacaggcagacugcagagccuccagacauacgugacccagcagcugaucagagccgccgagauuagagccucugccaaucuggccgccaccaagaugucugagugugugcugggccagagcaagagaguggacuuuugcggcaagggcuaccaccugaugagcuucccucagucugccccucacggcgugguguuucugcacgugacauaugugcccgcucaagagaagaauuucaccaccgcuccagccaucugccacgacggcaaagcccacuuuccuagagaaggcguguucguguccaacggcacccauugguucgugacacagcggaacuucuacgagccccagaucaucaccaccgacaacaccuucgugucuggcaacugcgacguugugaucggcauugugaacaauaccguguacgacccucugcagcccgagcuggacagcuucaaagaggaacuggacaaguacuuuaagaaccacacaagccccgacguggaccugggcgauaucagcggaaucaaugccagcgucgugaacauccagaaagagaucgaccggcugaacgagguggccaagaaucugaacgagagccugaucgaccugcaagaacuggggaaguacgagcaguacaucaaguggcccugguacaucuggcugggcuuuaucgccggacugauugccaucgugaucgucacaaucaugcuguguugcaugaccagcugcuguagcugccugaagggcuguuguagcuguggcagcugcugcaaguucgacgaggacgauucugagcccgugcugaagggcgugaaacugcacuacaccugaggacuaguuauaagacugacuagcccgaugggccucccaacgggcccuccuccccuccuugcaccgagagaucucaaaggcucuuuucagagccaccaaaaaaaaaaaaaaaaaaaaaaaaaaaaaaaaaaaaaaaaaaaaaaaaaaaaaaaaaaaaaaaaaaaaaaaaaaaaaaaaaaaaaaaaaaaaaaaaaaaaa

SEQ ID NO: 24591 - RNA, 4029 nt, Artificial Sequence
  SARS-CoV-2/Wuhan/WIV05/2019__EPI_ISL_402128 spike protein mRNA gc mod (1-1273)(H69del_V70del_A222V_Y453F_S477N_D614G_I692V)
aggagaaagcuuaccauguucguguuucuggugcugcugccccugguguccagccagugugugaaccugaccaccagaacacagcugccuccagccuacaccaacagcuucaccagaggcguguacuaccccgacaagguguucagauccagcgugcugcacucuacccaggaccuguuccugccuuucuucagcaacgugaccugguuccacgccaucuccggcaccaauggcaccaagagauucgacaaccccgugcugcccuucaacgacgggguguacuuugccagcaccgagaaguccaacaucaucagaggcuggaucuucggcaccacacuggacagcaagacccagagccugcugaucgugaacaacgccaccaacguggucaucaaagugugcgaguuccaguucugcaacgaccccuuccugggcgucuacuaccacaagaacaacaagagcuggauggaaagcgaguuccggguguacagcagcgccaacaacugcaccuucgaguacgugucccagccuuuccugauggaccuggaaggcaagcagggcaacuucaagaaccugcgcgaguucguguucaagaacaucgacggcuacuucaaaaucuacagcaagcacaccccuaucaaccucgugcgggaucugccucagggcuucucugugcuggaaccccugguggaucugcccaucggcaucaacaucacccgguuucagacacugcuggcccugcacagaagcuaccugacaccuggcgauagcagcagcggauggacagcuggugccgccgcuuacuaugugggcuaccugcagccuagaaccuuccugcugaaguacaacgagaacggcaccaucaccgacgccguggauugugcucuggauccucugagcgagacaaagugcacccugaaguccuucaccguggaaaagggcaucuaccagaccagcaacuuccgggugcagcccaccgaauccaucgugcgguuccccaauaucaccaaucugugccccuucggcgagguguucaaugccaccagauucgccucuguguacgccuggaaccggaagcggaucagcaauugcguggccgacuacuccgugcuguacaacuccgccagcuucagcaccuucaagugcuacggcguguccccuaccaagcugaacgaccugugcuucacaaacguguacgccgacagcuucgugauccggggagaugaagugcggcagauugccccuggacagacaggcaagaucgccgacuacaacuacaagcugcccgacgacuucaccggcugugugauugccuggaacagcaacaaccuggacuccaaagucggcggcaacuacaauuaccuguuccggcuguuccggaaguccaaucugaagcccuucgagcgggacaucagcaccgaaaucuaucaggccggcaacaccccuugcaacggcguggaaggcuucaacugcuacuucccacugcaguccuacggcuuucagcccacaaauggcgugggcuaucagcccuacagagugguggugcugagcuucgaacugcugcaugcuccugccacagugugcggcccuaagaaaagcaccaaucucgugaagaacaaaugcgugaacuucaacuucaacggccugaccggcaccggcgugcugacagagagcaacaagaaguuccugccauuccagcaguuuggccgggauaucgccgauaccacagacgccguuagagauccccagacacuggaaauccuggacaucaccccaugcagcuucggcggagugucugugaucaccccuggcaccaacaccagcaaucagguggcagugcuguaccagggcgugaacuguaccgaagugcccguggccauucacgccgaucagcugacaccuacauggcggguguacuccaccggcagcaauguguuucagaccagagccggcugucugaucggagccgagcacgugaacaauagcuacgagugcgacauccccaucggcgcuggcaucugugccagcuaccagacacagacaaacagccccagacgggcuagaagcguggccagccagagcgugauugccuacacaaugucucugggcgccgagaacagcguggccuacuccaacaacucuaucgcuauccccaccaacuucaccaucagcgugaccaccgagauccugccuguguccaugaccaagaccagcguggacugcaccauguacaucugcggcgauuccaccgagugcuccaaccugcugcugcaguacggcagcuucugcacccagcugaauagagcccugacagggaucgccguggaacaggacaagaacacccaagagguguucgcccaagugaagcaaaucuacaagaccccuccuaucaaggacuucggcggcuucaauuucagccagauucugcccgauccuagcaagcccagcaagcggagcuucaucgaggaccugcuguucaacaaagugacacuggccgacgccggcuucaucaagcaguauggcgauugucugggcgacauugccgccagggaucugauuugcgcccagaaguuuaacggacugacagugcugccuccucugcugaccgaugagaugaucgcccaguacacaucugcccugcuggccggcacaaucacaagcggcuggacauuuggagcuggcgccgcucugcagauccccuuugcuaugcagauggccuaccgguucaacggcaucggagugacccagaaugugcuguacgagaaccagaagcugaucgccaaccaguucaacagcgccaucggcaagauccaggacagccugagcagcacagcaagcgcccugggaaagcugcaggacguggucaaccagaaugcccaggcacugaacacccuggucaagcagcuguccuccaacuucggcgccaucagcucugugcugaacgauauccugagcagacuggacaaggucgaggccgaggugcagaucgacagacugaucacaggcagacugcagagccuccagacauacgugacccagcagcugaucagagccgccgagauuagagccucugccaaucuggccgccaccaagaugucugagugugugcugggccagagcaagagaguggacuuuugcggcaagggcuaccaccugaugagcuucccucagucugccccucacggcgugguguuucugcacgugacauaugugcccgcucaagagaagaauuucaccaccgcuccagccaucugccacgacggcaaagcccacuuuccuagagaaggcguguucguguccaacggcacccauugguucgugacacagcggaacuucuacgagccccagaucaucaccaccgacaacaccuucgugucuggcaacugcgacguugugaucggcauugugaacaauaccguguacgacccucugcagcccgagcuggacagcuucaaagaggaacuggacaaguacuuuaagaaccacacaagccccgacguggaccugggcgauaucagcggaaucaaugccagcgucgugaacauccagaaagagaucgaccggcugaacgagguggccaagaaucugaacgagagccugaucgaccugcaagaacuggggaaguacgagcaguacaucaaguggcccugguacaucuggcugggcuuuaucgccggacugauugccaucgugauggucacaaucaugcuguguugcaugaccagcugcuguagcugccugaagggcuguuguagcuguggcagcugcugcaaguucgacgaggacgauucugagcccgugcugaagggcgugaaacugcacuacaccugaggacuaguuauaagacugacuagcccgaugggccucccaacgggcccuccuccccuccuugcaccgagagaucucaaaggcucuuuucagagccaccaaaaaaaaaaaaaaaaaaaaaaaaaaaaaaaaaaaaaaaaaaaaaaaaaaaaaaaaaaaaaaaaaaaaaaaaaaaaaaaaaaaaaaaaaaaaaaaaaaaaa

SEQ ID NO: 24592 - RNA, 4029 nt, Artificial Sequence
  SARS-CoV-2/Wuhan/WIV05/2019__EPI_ISL_402128 spike protein mRNA gc mod (1-1273)(H69del_V70del_Y453F_D614G_I692V_M1229I)
aggagaaagcuuaccauguucguguuucuggugcugcugccccugguguccagccagugugugaaccugaccaccagaacacagcugccuccagccuacaccaacagcuucaccagaggcguguacuaccccgacaagguguucagauccagcgugcugcacucuacccaggaccuguuccugccuuucuucagcaacgugaccugguuccacgccaucuccggcaccaauggcaccaagagauucgacaaccccgugcugcccuucaacgacgggguguacuuugccagcaccgagaaguccaacaucaucagaggcuggaucuucggcaccacacuggacagcaagacccagagccugcugaucgugaacaacgccaccaacguggucaucaaagugugcgaguuccaguucugcaacgaccccuuccugggcgucuacuaccacaagaacaacaagagcuggauggaaagcgaguuccggguguacagcagcgccaacaacugcaccuucgaguacgugucccagccuuuccugauggaccuggaaggcaagcagggcaacuucaagaaccugcgcgaguucguguucaagaacaucgacggcuacuucaaaaucuacagcaagcacaccccuaucaaccucgugcgggaucugccucagggcuucucugcucuggaaccccugguggaucugcccaucggcaucaacaucacccgguuucagacacugcuggcccugcacagaagcuaccugacaccuggcgauagcagcagcggauggacagcuggugccgccgcuuacuaugugggcuaccugcagccuagaaccuuccugcugaaguacaacgagaacggcaccaucaccgacgccguggauugugcucuggauccucugagcgagacaaagugcacccugaaguccuucaccguggaaaagggcaucuaccagaccagcaacuuccgggugcagcccaccgaauccaucgugcgguuccccaauaucaccaaucugugccccuucggcgagguguucaaugccaccagauucgccucuguguacgccuggaaccggaagcggaucagcaauugcguggccgacuacuccgugcuguacaacuccgccagcuucagcaccuucaagugcuacggcguguccccuaccaagcugaacgaccugugcuucacaaacguguacgccgacagcuucgugauccggggagaugaagugcggcagauugccccuggacagacaggcaagaucgccgacuacaacuacaagcugcccgacgacuucaccggcugugugauugccuggaacagcaacaaccuggacuccaaagucggcggcaacuacaauuaccuguuccggcuguuccggaaguccaaucugaagcccuucgagcgggacaucagcaccgaaaucuaucaggccggcagcaccccuugcaacggcguggaaggcuucaacugcuacuucccacugcaguccuacggcuuucagcccacaaauggcgugggcuaucagcccuacagagugguggugcugagcuucgaacugcugcaugcuccugccacagugugcggcccuaagaaaagcaccaaucucgugaagaacaaaugcgugaacuucaacuucaacggccugaccggcaccggcgugcugacagagagcaacaagaaguuccugccauuccagcaguuuggccgggauaucgccgauaccacagacgccguuagagauccccagacacuggaaauccuggacaucaccccaugcagcuucggcggagugucugugaucaccccuggcaccaacaccagcaaucagguggcagugcuguaccagggcgugaacuguaccgaagugcccguggccauucacgccgaucagcugacaccuacauggcggguguacuccaccggcagcaauguguuucagaccagagccggcugucugaucggagccgagcacgugaacaauagcuacgagugcgacauccccaucggcgcuggcaucugugccagcuaccagacacagacaaacagccccagacgggcuagaagcguggccagccagagcgugauugccuacacaaugucucugggcgccgagaacagcguggccuacuccaacaacucuaucgcuauccccaccaacuucaccaucagcgugaccaccgagauccugccuguguccaugaccaagaccagcguggacugcaccauguacaucugcggcgauuccaccgagugcuccaaccugcugcugcaguacggcagcuucugcacccagcugaauagagcccugacagggaucgccguggaacaggacaagaacacccaagagguguucgcccaagugaagcaaaucuacaagaccccuccuaucaaggacuucggcggcuucaauuucagccagauucugcccgauccuagcaagcccagcaagcggagcuucaucgaggaccugcuguucaacaaagugacacuggccgacgccggcuucaucaagcaguauggcgauugucugggcgacauugccgccagggaucugauuugcgcccagaaguuuaacggacugacagugcugccuccucugcugaccgaugagaugaucgcccaguacacaucugcccugcuggccggcacaaucacaagcggcuggacauuuggagcuggcgccgcucugcagauccccuuugcuaugcagauggccuaccgguucaacggcaucggagugacccagaaugugcuguacgagaaccagaagcugaucgccaaccaguucaacagcgccaucggcaagauccaggacagccugagcagcacagcaagcgcccugggaaagcugcaggacguggucaaccagaaugcccaggcacugaacacccuggucaagcagcuguccuccaacuucggcgccaucagcucugugcugaacgauauccugagcagacuggacaaggucgaggccgaggugcagaucgacagacugaucacaggcagacugcagagccuccagacauacgugacccagcagcugaucagagccgccgagauuagagccucugccaaucuggccgccaccaagaugucugagugugugcugggccagagcaagagaguggacuuuugcggcaagggcuaccaccugaugagcuucccucagucugccccucacggcgugguguuucugcacgugacauaugugcccgcucaagagaagaauuucaccaccgcuccagccaucugccacgacggcaaagcccacuuuccuagagaaggcguguucguguccaacggcacccauugguucgugacacagcggaacuucuacgagccccagaucaucaccaccgacaacaccuucgugucuggcaacugcgacguugugaucggcauugugaacaauaccguguacgacccucugcagcccgagcuggacagcuucaaagaggaacuggacaaguacuuuaagaaccacacaagccccgacguggaccugggcgauaucagcggaaucaaugccagcgucgugaacauccagaaagagaucgaccggcugaacgagguggccaagaaucugaacgagagccugaucgaccugcaagaacuggggaaguacgagcaguacaucaaguggcccugguacaucuggcugggcuuuaucgccggacugauugccaucgugaucgucacaaucaugcuguguugcaugaccagcugcuguagcugccugaagggcuguuguagcuguggcagcugcugcaaguucgacgaggacgauucugagcccgugcugaagggcgugaaacugcacuacaccugaggacuaguuauaagacugacuagcccgaugggccucccaacgggcccuccuccccuccuugcaccgagagaucucaaaggcucuuuucagagccaccaaaaaaaaaaaaaaaaaaaaaaaaaaaaaaaaaaaaaaaaaaaaaaaaaaaaaaaaaaaaaaaaaaaaaaaaaaaaaaaaaaaaaaaaaaaaaaaaaaaaa

SEQ ID NO: 24593 - RNA, 4026 nt, Artificial Sequence
  SARS-CoV-2/Wuhan/WIV05/2019__EPI_ISL_402128 spike protein mRNA gc mod (1-1273)(H69del_V70del_Y144del_N501Y_A570D_D614G_P681H_T716I_S982 A_D1118H)
aggagaaagcuuaccauguucguguuucuggugcugcugccccugguguccagccagugugugaaccugaccaccagaacacagcugccuccagccuacaccaacagcuucaccagaggcguguacuaccccgacaagguguucagauccagcgugcugcacucuacccaggaccuguuccugccuuucuucagcaacgugaccugguuccacgccaucuccggcaccaauggcaccaagagauucgacaaccccgugcugcccuucaacgacgggguguacuuugccagcaccgagaaguccaacaucaucagaggcuggaucuucggcaccacacuggacagcaagacccagagccugcugaucgugaacaacgccaccaacguggucaucaaagugugcgaguuccaguucugcaacgaccccuuccugggcgucuaccacaagaacaacaagagcuggauggaaagcgaguuccggguguacagcagcgccaacaacugcaccuucgaguacgugucccagccuuuccugauggaccuggaaggcaagcagggcaacuucaagaaccugcgcgaguucguguucaagaacaucgacggcuacuucaaaaucuacagcaagcacaccccuaucaaccucgugcgggaucugccucagggcuucucugcucuggaaccccugguggaucugcccaucggcaucaacaucacccgguuucagacacugcuggcccugcacagaagcuaccugacaccuggcgauagcagcagcggauggacagcuggugccgccgcuuacuaugugggcuaccugcagccuagaaccuuccugcugaaguacaacgagaacggcaccaucaccgacgccguggauugugcucuggauccucugagcgagacaaagugcacccugaaguccuucaccguggaaaagggcaucuaccagaccagcaacuuccgggugcagcccaccgaauccaucgugcgguuccccaauaucaccaaucugugccccuucggcgagguguucaaugccaccagauucgccucuguguacgccuggaaccggaagcggaucagcaauugcguggccgacuacuccgugcuguacaacuccgccagcuucagcaccuucaagugcuacggcguguccccuaccaagcugaacgaccugugcuucacaaacguguacgccgacagcuucgugauccggggagaugaagugcggcagauugccccuggacagacaggcaagaucgccgacuacaacuacaagcugcccgacgacuucaccggcugugugauugccuggaacagcaacaaccuggacuccaaagucggcggcaacuacaauuaccuguaccggcuguuccggaaguccaaucugaagcccuucgagcgggacaucagcaccgaaaucuaucaggccggcagcaccccuugcaacggcguggaaggcuucaacugcuacuucccacugcaguccuacggcuuucagcccacauacggcgugggcuaucagcccuacagagugguggugcugagcuucgaacugcugcaugcuccugccacagugugcggcccuaagaaaagcaccaaucucgugaagaacaaaugcgugaacuucaacuucaacggccugaccggcaccggcgugcugacagagagcaacaagaaguuccugccauuccagcaguuuggccgggauaucgacgauaccacagacgccguuagagauccccagacacuggaaauccuggacaucaccccaugcagcuucggcggagugucugugaucaccccuggcaccaacaccagcaaucagguggcagugcuguaccagggcgugaacuguaccgaagugcccguggccauucacgccgaucagcugacaccuacauggcggguguacuccaccggcagcaauguguuucagaccagagccggcugucugaucggagccgagcacgugaacaauagcuacgagugcgacauccccaucggcgcuggcaucugugccagcuaccagacacagacaaacagccacagacgggcuagaagcguggccagccagagcaucauugccuacacaaugucucugggcgccgagaacagcguggccuacuccaacaacucuaucgcuauccccaucaacuucaccaucagcgugaccaccgagauccugccuguguccaugaccaagaccagcguggacugcaccauguacaucugcggcgauuccaccgagugcuccaaccugcugcugcaguacggcagcuucugcacccagcugaauagagcccugacagggaucgccguggaacaggacaagaacacccaagagguguucgcccaagugaagcaaaucuacaagaccccuccuaucaaggacuucggcggcuucaauuucagccagauucugcccgauccuagcaagcccagcaagcggagcuucaucgaggaccugcuguucaacaaagugacacuggccgacgccggcuucaucaagcaguauggcgauugucugggcgacauugccgccagggaucugauuugcgcccagaaguuuaacggacugacagugcugccuccucugcugaccgaugagaugaucgcccaguacacaucugcccugcuggccggcacaaucacaagcggcuggacauuuggagcuggcgccgcucugcagauccccuuugcuaugcagauggccuaccgguucaacggcaucggagugacccagaaugugcuguacgagaaccagaagcugaucgccaaccaguucaacagcgccaucggcaagauccaggacagccugagcagcacagcaagcgcccugggaaagcugcaggacguggucaaccagaaugcccaggcacugaacacccuggucaagcagcuguccuccaacuucggcgccaucagcucugugcugaacgauauccuggccagacuggacaaggucgaggccgaggugcagaucgacagacugaucacaggcagacugcagagccuccagacauacgugacccagcagcugaucagagccgccgagauuagagccucugccaaucuggccgccaccaagaugucugagugugugcugggccagagcaagagaguggacuuuugcggcaagggcuaccaccugaugagcuucccucagucugccccucacggcgugguguuucugcacgugacauaugugcccgcucaagagaagaauuucaccaccgcuccagccaucugccacgacggcaaagcccacuuuccuagagaaggcguguucguguccaacggcacccauugguucgugacacagcggaacuucuacgagccccagaucaucaccacccacaacaccuucgugucuggcaacugcgacguugugaucggcauugugaacaauaccguguacgacccucugcagcccgagcuggacagcuucaaagaggaacuggacaaguacuuuaagaaccacacaagccccgacguggaccugggcgauaucagcggaaucaaugccagcgucgugaacauccagaaagagaucgaccggcugaacgagguggccaagaaucugaacgagagccugaucgaccugcaagaacuggggaaguacgagcaguacaucaaguggcccugguacaucuggcugggcuuuaucgccggacugauugccaucgugauggucacaaucaugcuguguugcaugaccagcugcuguagcugccugaagggcuguuguagcuguggcagcugcugcaaguucgacgaggacgauucugagcccgugcugaagggcgugaaacugcacuacaccugaggacuaguuauaagacugacuagcccgaugggccucccaacgggcccuccuccccuccuugcaccgagagaucucaaaggcucuuuucagagccaccaaaaaaaaaaaaaaaaaaaaaaaaaaaaaaaaaaaaaaaaaaaaaaaaaaaaaaaaaaaaaaaaaaaaaaaaaaaaaaaaaaaaaaaaaaaaaaaaaaaaa

SEQ ID NO: 24594 - RNA, 4035 nt, Artificial Sequence
  SARS-CoV-2/Wuhan/WIV05/2019__EPI_ISL_402128 spike protein mRNA gc mod (1-1273)(K417N_E484K_N501Y_D614G)
aggagaaagcuuaccauguucguguuucuggugcugcugccccugguguccagccagugugugaaccugaccaccagaacacagcugccuccagccuacaccaacagcuucaccagaggcguguacuaccccgacaagguguucagauccagcgugcugcacucuacccaggaccuguuccugccuuucuucagcaacgugaccugguuccacgccauccacguguccggcaccaauggcaccaagagauucgacaaccccgugcugcccuucaacgacgggguguacuuugccagcaccgagaaguccaacaucaucagaggcuggaucuucggcaccacacuggacagcaagacccagagccugcugaucgugaacaacgccaccaacguggucaucaaagugugcgaguuccaguucugcaacgaccccuuccugggcgucuacuaccacaagaacaacaagagcuggauggaaagcgaguuccggguguacagcagcgccaacaacugcaccuucgaguacgugucccagccuuuccugauggaccuggaaggcaagcagggcaacuucaagaaccugcgcgaguucguguucaagaacaucgacggcuacuucaaaaucuacagcaagcacaccccuaucaaccucgugcgggaucugccucagggcuucucugcucuggaaccccugguggaucugcccaucggcaucaacaucacccgguuucagacacugcuggcccugcacagaagcuaccugacaccuggcgauagcagcagcggauggacagcuggugccgccgcuuacuaugugggcuaccugcagccuagaaccuuccugcugaaguacaacgagaacggcaccaucaccgacgccguggauugugcucuggauccucugagcgagacaaagugcacccugaaguccuucaccguggaaaagggcaucuaccagaccagcaacuuccgggugcagcccaccgaauccaucgugcgguuccccaauaucaccaaucugugccccuucggcgagguguucaaugccaccagauucgccucuguguacgccuggaaccggaagcggaucagcaauugcguggccgacuacuccgugcuguacaacuccgccagcuucagcaccuucaagugcuacggcguguccccuaccaagcugaacgaccugugcuucacaaacguguacgccgacagcuucgugauccggggagaugaagugcggcagauugccccuggacagacaggcaacaucgccgacuacaacuacaagcugcccgacgacuucaccggcugugugauugccuggaacagcaacaaccuggacuccaaagucggcggcaacuacaauuaccuguaccggcuguuccggaaguccaaucugaagcccuucgagcgggacaucagcaccgaaaucuaucaggccggcagcaccccuugcaacggcgugaagggcuucaacugcuacuucccacugcaguccuacggcuuucagcccacauacggcgugggcuaucagcccuacagagugguggugcugagcuucgaacugcugcaugcuccugccacagugugcggcccuaagaaaagcaccaaucucgugaagaacaaaugcgugaacuucaacuucaacggccugaccggcaccggcgugcugacagagagcaacaagaaguuccugccauuccagcaguuuggccgggauaucgccgauaccacagacgccguuagagauccccagacacuggaaauccuggacaucaccccaugcagcuucggcggagugucugugaucaccccuggcaccaacaccagcaaucagguggcagugcuguaccagggcgugaacuguaccgaagugcccguggccauucacgccgaucagcugacaccuacauggcggguguacuccaccggcagcaauguguuucagaccagagccggcugucugaucggagccgagcacgugaacaauagcuacgagugcgacauccccaucggcgcuggcaucugugccagcuaccagacacagacaaacagccccagacgggcuagaagcguggccagccagagcaucauugccuacacaaugucucugggcgccgagaacagcguggccuacuccaacaacucuaucgcuauccccaccaacuucaccaucagcgugaccaccgagauccugccuguguccaugaccaagaccagcguggacugcaccauguacaucugcggcgauuccaccgagugcuccaaccugcugcugcaguacggcagcuucugcacccagcugaauagagcccugacagggaucgccguggaacaggacaagaacacccaagagguguucgcccaagugaagcaaaucuacaagaccccuccuaucaaggacuucggcggcuucaauuucagccagauucugcccgauccuagcaagcccagcaagcggagcuucaucgaggaccugcuguucaacaaagugacacuggccgacgccggcuucaucaagcaguauggcgauugucugggcgacauugccgccagggaucugauuugcgcccagaaguuuaacggacugacagugcugccuccucugcugaccgaugagaugaucgcccaguacacaucugcccugcuggccggcacaaucacaagcggcuggacauuuggagcuggcgccgcucugcagauccccuuugcuaugcagauggccuaccgguucaacggcaucggagugacccagaaugugcuguacgagaaccagaagcugaucgccaaccaguucaacagcgccaucggcaagauccaggacagccugagcagcacagcaagcgcccugggaaagcugcaggacguggucaaccagaaugcccaggcacugaacacccuggucaagcagcuguccuccaacuucggcgccaucagcucugugcugaacgauauccugagcagacuggacaaggucgaggccgaggugcagaucgacagacugaucacaggcagacugcagagccuccagacauacgugacccagcagcugaucagagccgccgagauuagagccucugccaaucuggccgccaccaagaugucugagugugugcugggccagagcaagagaguggacuuuugcggcaagggcuaccaccugaugagcuucccucagucugccccucacggcgugguguuucugcacgugacauaugugcccgcucaagagaagaauuucaccaccgcuccagccaucugccacgacggcaaagcccacuuuccuagagaaggcguguucguguccaacggcacccauugguucgugacacagcggaacuucuacgagccccagaucaucaccaccgacaacaccuucgugucuggcaacugcgacguugugaucggcauugugaacaauaccguguacgacccucugcagcccgagcuggacagcuucaaagaggaacuggacaaguacuuuaagaaccacacaagccccgacguggaccugggcgauaucagcggaaucaaugccagcgucgugaacauccagaaagagaucgaccggcugaacgagguggccaagaaucugaacgagagccugaucgaccugcaagaacuggggaaguacgagcaguacaucaaguggcccugguacaucuggcugggcuuuaucgccggacugauugccaucgugauggucacaaucaugcuguguugcaugaccagcugcuguagcugccugaagggcuguuguagcuguggcagcugcugcaaguucgacgaggacgauucugagcccgugcugaagggcgugaaacugcacuacaccugaggacuaguuauaagacugacuagcccgaugggccucccaacgggcccuccuccccuccuugcaccgagagaucucaaaggcucuuuucagagccaccaaaaaaaaaaaaaaaaaaaaaaaaaaaaaaaaaaaaaaaaaaaaaaaaaaaaaaaaaaaaaaaaaaaaaaaaaaaaaaaaaaaaaaaaaaaaaaaaaaaaa

SEQ ID NO: 24595 - RNA, 4026 nt, Artificial Sequence
  SARS-CoV-2/Wuhan/WIV05/2019__EPI_ISL_402128 spike protein mRNA gc mod (1-1273)(L18F_D80A_D215G_L242del_A243del_L244del_R246I_K417N_E484 K_N501Y_D614G_A701V)
aggagaaagcuuaccauguucguguuucuggugcugcugccccugguguccagccagugugugaacuucaccaccagaacacagcugccuccagccuacaccaacagcuucaccagaggcguguacuaccccgacaagguguucagauccagcgugcugcacucuacccaggaccuguuccugccuuucuucagcaacgugaccugguuccacgccauccacguguccggcaccaauggcaccaagagauucgccaaccccgugcugcccuucaacgacgggguguacuuugccagcaccgagaaguccaacaucaucagaggcuggaucuucggcaccacacuggacagcaagacccagagccugcugaucgugaacaacgccaccaacguggucaucaaagugugcgaguuccaguucugcaacgaccccuuccugggcgucuacuaccacaagaacaacaagagcuggauggaaagcgaguuccggguguacagcagcgccaacaacugcaccuucgaguacgugucccagccuuuccugauggaccuggaaggcaagcagggcaacuucaagaaccugcgcgaguucguguucaagaacaucgacggcuacuucaaaaucuacagcaagcacaccccuaucaaccucgugcggggccugccucagggcuucucugcucuggaaccccugguggaucugcccaucggcaucaacaucacccgguuucagacacugcacaucagcuaccugacaccuggcgauagcagcagcggauggacagcuggugccgccgcuuacuaugugggcuaccugcagccuagaaccuuccugcugaaguacaacgagaacggcaccaucaccgacgccguggauugugcucuggauccucugagcgagacaaagugcacccugaaguccuucaccguggaaaagggcaucuaccagaccagcaacuuccgggugcagcccaccgaauccaucgugcgguuccccaauaucaccaaucugugccccuucggcgagguguucaaugccaccagauucgccucuguguacgccuggaaccggaagcggaucagcaauugcguggccgacuacuccgugcuguacaacuccgccagcuucagcaccuucaagugcuacggcguguccccuaccaagcugaacgaccugugcuucacaaacguguacgccgacagcuucgugauccggggagaugaagugcggcagauugccccuggacagacaggcaacaucgccgacuacaacuacaagcugcccgacgacuucaccggcugugugauugccuggaacagcaacaaccuggacuccaaagucggcggcaacuacaauuaccuguaccggcuguuccggaaguccaaucugaagcccuucgagcgggacaucagcaccgaaaucuaucaggccggcagcaccccuugcaacggcgugaagggcuucaacugcuacuucccacugcaguccuacggcuuucagcccacauacggcgugggcuaucagcccuacagagugguggugcugagcuucgaacugcugcaugcuccugccacagugugcggcccuaagaaaagcaccaaucucgugaagaacaaaugcgugaacuucaacuucaacggccugaccggcaccggcgugcugacagagagcaacaagaaguuccugccauuccagcaguuuggccgggauaucgccgauaccacagacgccguuagagauccccagacacuggaaauccuggacaucaccccaugcagcuucggcggagugucugugaucaccccuggcaccaacaccagcaaucagguggcagugcuguaccagggcgugaacuguaccgaagugcccguggccauucacgccgaucagcugacaccuacauggcggguguacuccaccggcagcaauguguuucagaccagagccggcugucugaucggagccgagcacgugaacaauagcuacgagugcgacauccccaucggcgcuggcaucugugccagcuaccagacacagacaaacagccccagacgggcuagaagcguggccagccagagcaucauugccuacacaaugucucugggcguggagaacagcguggccuacuccaacaacucuaucgcuauccccaccaacuucaccaucagcgugaccaccgagauccugccuguguccaugaccaagaccagcguggacugcaccauguacaucugcggcgauuccaccgagugcuccaaccugcugcugcaguacggcagcuucugcacccagcugaauagagcccugacagggaucgccguggaacaggacaagaacacccaagagguguucgcccaagugaagcaaaucuacaagaccccuccuaucaaggacuucggcggcuucaauuucagccagauucugcccgauccuagcaagcccagcaagcggagcuucaucgaggaccugcuguucaacaaagugacacuggccgacgccggcuucaucaagcaguauggcgauugucugggcgacauugccgccagggaucugauuugcgcccagaaguuuaacggacugacagugcugccuccucugcugaccgaugagaugaucgcccaguacacaucugcccugcuggccggcacaaucacaagcggcuggacauuuggagcuggcgccgcucugcagauccccuuugcuaugcagauggccuaccgguucaacggcaucggagugacccagaaugugcuguacgagaaccagaagcugaucgccaaccaguucaacagcgccaucggcaagauccaggacagccugagcagcacagcaagcgcccugggaaagcugcaggacguggucaaccagaaugcccaggcacugaacacccuggucaagcagcuguccuccaacuucggcgccaucagcucugugcugaacgauauccugagcagacuggacaaggucgaggccgaggugcagaucgacagacugaucacaggcagacugcagagccuccagacauacgugacccagcagcugaucagagccgccgagauuagagccucugccaaucuggccgccaccaagaugucugagugugugcugggccagagcaagagaguggacuuuugcggcaagggcuaccaccugaugagcuucccucagucugccccucacggcgugguguuucugcacgugacauaugugcccgcucaagagaagaauuucaccaccgcuccagccaucugccacgacggcaaagcccacuuuccuagagaaggcguguucguguccaacggcacccauugguucgugacacagcggaacuucuacgagccccagaucaucaccaccgacaacaccuucgugucuggcaacugcgacguugugaucggcauugugaacaauaccguguacgacccucugcagcccgagcuggacagcuucaaagaggaacuggacaaguacuuuaagaaccacacaagccccgacguggaccugggcgauaucagcggaaucaaugccagcgucgugaacauccagaaagagaucgaccggcugaacgagguggccaagaaucugaacgagagccugaucgaccugcaagaacuggggaaguacgagcaguacaucaaguggcccugguacaucuggcugggcuuuaucgccggacugauugccaucgugauggucacaaucaugcuguguugcaugaccagcugcuguagcugccugaagggcuguuguagcuguggcagcugcugcaaguucgacgaggacgauucugagcccgugcugaagggcgugaaacugcacuacaccugaggacuaguuauaagacugacuagcccgaugggccucccaacgggcccuccuccccuccuugcaccgagagaucucaaaggcucuuuucagagccaccaaaaaaaaaaaaaaaaaaaaaaaaaaaaaaaaaaaaaaaaaaaaaaaaaaaaaaaaaaaaaaaaaaaaaaaaaaaaaaaaaaaaaaaaaaaaaaaaaaaaa

SEQ ID NO: 24596 - RNA, 4035 nt, Artificial Sequence
  SARS-CoV-2/Wuhan/WIV05/2019__EPI_ISL_402128 spike protein mRNA gc mod (1-1273)(E484K_D614G)
aggagaaagcuuaccauguucguguuucuggugcugcugccccugguguccagccagugugugaaccugaccaccagaacacagcugccuccagccuacaccaacagcuucaccagaggcguguacuaccccgacaagguguucagauccagcgugcugcacucuacccaggaccuguuccugccuuucuucagcaacgugaccugguuccacgccauccacguguccggcaccaauggcaccaagagauucgacaaccccgugcugcccuucaacgacgggguguacuuugccagcaccgagaaguccaacaucaucagaggcuggaucuucggcaccacacuggacagcaagacccagagccugcugaucgugaacaacgccaccaacguggucaucaaagugugcgaguuccaguucugcaacgaccccuuccugggcgucuacuaccacaagaacaacaagagcuggauggaaagcgaguuccggguguacagcagcgccaacaacugcaccuucgaguacgugucccagccuuuccugauggaccuggaaggcaagcagggcaacuucaagaaccugcgcgaguucguguucaagaacaucgacggcuacuucaaaaucuacagcaagcacaccccuaucaaccucgugcgggaucugccucagggcuucucugcucuggaaccccugguggaucugcccaucggcaucaacaucacccgguuucagacacugcuggcccugcacagaagcuaccugacaccuggcgauagcagcagcggauggacagcuggugccgccgcuuacuaugugggcuaccugcagccuagaaccuuccugcugaaguacaacgagaacggcaccaucaccgacgccguggauugugcucuggauccucugagcgagacaaagugcacccugaaguccuucaccguggaaaagggcaucuaccagaccagcaacuuccgggugcagcccaccgaauccaucgugcgguuccccaauaucaccaaucugugccccuucggcgagguguucaaugccaccagauucgccucuguguacgccuggaaccggaagcggaucagcaauugcguggccgacuacuccgugcuguacaacuccgccagcuucagcaccuucaagugcuacggcguguccccuaccaagcugaacgaccugugcuucacaaacguguacgccgacagcuucgugauccggggagaugaagugcggcagauugccccuggacagacaggcaagaucgccgacuacaacuacaagcugcccgacgacuucaccggcugugugauugccuggaacagcaacaaccuggacuccaaagucggcggcaacuacaauuaccuguaccggcuguuccggaaguccaaucugaagcccuucgagcgggacaucagcaccgaaaucuaucaggccggcagcaccccuugcaacggcgugaagggcuucaacugcuacuucccacugcaguccuacggcuuucagcccacaaauggcgugggcuaucagcccuacagagugguggugcugagcuucgaacugcugcaugcuccugccacagugugcggcccuaagaaaagcaccaaucucgugaagaacaaaugcgugaacuucaacuucaacggccugaccggcaccggcgugcugacagagagcaacaagaaguuccugccauuccagcaguuuggccgggauaucgccgauaccacagacgccguuagagauccccagacacuggaaauccuggacaucaccccaugcagcuucggcggagugucugugaucaccccuggcaccaacaccagcaaucagguggcagugcuguaccagggcgugaacuguaccgaagugcccguggccauucacgccgaucagcugacaccuacauggcggguguacuccaccggcagcaauguguuucagaccagagccggcugucugaucggagccgagcacgugaacaauagcuacgagugcgacauccccaucggcgcuggcaucugugccagcuaccagacacagacaaacagccccagacgggcuagaagcguggccagccagagcaucauugccuacacaaugucucugggcgccgagaacagcguggccuacuccaacaacucuaucgcuauccccaccaacuucaccaucagcgugaccaccgagauccugccuguguccaugaccaagaccagcguggacugcaccauguacaucugcggcgauuccaccgagugcuccaaccugcugcugcaguacggcagcuucugcacccagcugaauagagcccugacagggaucgccguggaacaggacaagaacacccaagagguguucgcccaagugaagcaaaucuacaagaccccuccuaucaaggacuucggcggcuucaauuucagccagauucugcccgauccuagcaagcccagcaagcggagcuucaucgaggaccugcuguucaacaaagugacacuggccgacgccggcuucaucaagcaguauggcgauugucugggcgacauugccgccagggaucugauuugcgcccagaaguuuaacggacugacagugcugccuccucugcugaccgaugagaugaucgcccaguacacaucugcccugcuggccggcacaaucacaagcggcuggacauuuggagcuggcgccgcucugcagauccccuuugcuaugcagauggccuaccgguucaacggcaucggagugacccagaaugugcuguacgagaaccagaagcugaucgccaaccaguucaacagcgccaucggcaagauccaggacagccugagcagcacagcaagcgcccugggaaagcugcaggacguggucaaccagaaugcccaggcacugaacacccuggucaagcagcuguccuccaacuucggcgccaucagcucugugcugaacgauauccugagcagacuggacaaggucgaggccgaggugcagaucgacagacugaucacaggcagacugcagagccuccagacauacgugacccagcagcugaucagagccgccgagauuagagccucugccaaucuggccgccaccaagaugucugagugugugcugggccagagcaagagaguggacuuuugcggcaagggcuaccaccugaugagcuucccucagucugccccucacggcgugguguuucugcacgugacauaugugcccgcucaagagaagaauuucaccaccgcuccagccaucugccacgacggcaaagcccacuuuccuagagaaggcguguucguguccaacggcacccauugguucgugacacagcggaacuucuacgagccccagaucaucaccaccgacaacaccuucgugucuggcaacugcgacguugugaucggcauugugaacaauaccguguacgacccucugcagcccgagcuggacagcuucaaagaggaacuggacaaguacuuuaagaaccacacaagccccgacguggaccugggcgauaucagcggaaucaaugccagcgucgugaacauccagaaagagaucgaccggcugaacgagguggccaagaaucugaacgagagccugaucgaccugcaagaacuggggaaguacgagcaguacaucaaguggcccugguacaucuggcugggcuuuaucgccggacugauugccaucgugauggucacaaucaugcuguguugcaugaccagcugcuguagcugccugaagggcuguuguagcuguggcagcugcugcaaguucgacgaggacgauucugagcccgugcugaagggcgugaaacugcacuacaccugaggacuaguuauaagacugacuagcccgaugggccucccaacgggcccuccuccccuccuugcaccgagagaucucaaaggcucuuuucagagccaccaaaaaaaaaaaaaaaaaaaaaaaaaaaaaaaaaaaaaaaaaaaaaaaaaaaaaaaaaaaaaaaaaaaaaaaaaaaaaaaaaaaaaaaaaaaaaaaaaaaaa

SEQ ID NO: 24597 - RNA, 4035 nt, Artificial Sequence
  SARS-CoV-2/Wuhan/WIV05/2019__EPI_ISL_402128 spike protein mRNA gc mod (1-1273)(L18F_T20N_P26S_D138Y_R190S_K417T_E484K_N501Y_D614G_H655Y _T1027I)
aggagaaagcuuaccauguucguguuucuggugcugcugccccugguguccagccagugugugaacuucaccaacagaacacagcugccuagcgccuacaccaacagcuucaccagaggcguguacuaccccgacaagguguucagauccagcgugcugcacucuacccaggaccuguuccugccuuucuucagcaacgugaccugguuccacgccauccacguguccggcaccaauggcaccaagagauucgacaaccccgugcugcccuucaacgacgggguguacuuugccagcaccgagaaguccaacaucaucagaggcuggaucuucggcaccacacuggacagcaagacccagagccugcugaucgugaacaacgccaccaacguggucaucaaagugugcgaguuccaguucugcaacuaccccuuccugggcgucuacuaccacaagaacaacaagagcuggauggaaagcgaguuccggguguacagcagcgccaacaacugcaccuucgaguacgugucccagccuuuccugauggaccuggaaggcaagcagggcaacuucaagaaccugagcgaguucguguucaagaacaucgacggcuacuucaaaaucuacagcaagcacaccccuaucaaccucgugcgggaucugccucagggcuucucugcucuggaaccccugguggaucugcccaucggcaucaacaucacccgguuucagacacugcuggcccugcacagaagcuaccugacaccuggcgauagcagcagcggauggacagcuggugccgccgcuuacuaugugggcuaccugcagccuagaaccuuccugcugaaguacaacgagaacggcaccaucaccgacgccguggauugugcucuggauccucugagcgagacaaagugcacccugaaguccuucaccguggaaaagggcaucuaccagaccagcaacuuccgggugcagcccaccgaauccaucgugcgguuccccaauaucaccaaucugugccccuucggcgagguguucaaugccaccagauucgccucuguguacgccuggaaccggaagcggaucagcaauugcguggccgacuacuccgugcuguacaacuccgccagcuucagcaccuucaagugcuacggcguguccccuaccaagcugaacgaccugugcuucacaaacguguacgccgacagcuucgugauccggggagaugaagugcggcagauugccccuggacagacaggcaccaucgccgacuacaacuacaagcugcccgacgacuucaccggcugugugauugccuggaacagcaacaaccuggacuccaaagucggcggcaacuacaauuaccuguaccggcuguuccggaaguccaaucugaagcccuucgagcgggacaucagcaccgaaaucuaucaggccggcagcaccccuugcaacggcgugaagggcuucaacugcuacuucccacugcaguccuacggcuuucagcccacauacggcgugggcuaucagcccuacagagugguggugcugagcuucgaacugcugcaugcuccugccacagugugcggcccuaagaaaagcaccaaucucgugaagaacaaaugcgugaacuucaacuucaacggccugaccggcaccggcgugcugacagagagcaacaagaaguuccugccauuccagcaguuuggccgggauaucgccgauaccacagacgccguuagagauccccagacacuggaaauccuggacaucaccccaugcagcuucggcggagugucugugaucaccccuggcaccaacaccagcaaucagguggcagugcuguaccagggcgugaacuguaccgaagugcccguggccauucacgccgaucagcugacaccuacauggcggguguacuccaccggcagcaauguguuucagaccagagccggcugucugaucggagccgaguacgugaacaauagcuacgagugcgacauccccaucggcgcuggcaucugugccagcuaccagacacagacaaacagccccagacgggcuagaagcguggccagccagagcaucauugccuacacaaugucucugggcgccgagaacagcguggccuacuccaacaacucuaucgcuauccccaccaacuucaccaucagcgugaccaccgagauccugccuguguccaugaccaagaccagcguggacugcaccauguacaucugcggcgauuccaccgagugcuccaaccugcugcugcaguacggcagcuucugcacccagcugaauagagcccugacagggaucgccguggaacaggacaagaacacccaagagguguucgcccaagugaagcaaaucuacaagaccccuccuaucaaggacuucggcggcuucaauuucagccagauucugcccgauccuagcaagcccagcaagcggagcuucaucgaggaccugcuguucaacaaagugacacuggccgacgccggcuucaucaagcaguauggcgauugucugggcgacauugccgccagggaucugauuugcgcccagaaguuuaacggacugacagugcugccuccucugcugaccgaugagaugaucgcccaguacacaucugcccugcuggccggcacaaucacaagcggcuggacauuuggagcuggcgccgcucugcagauccccuuugcuaugcagauggccuaccgguucaacggcaucggagugacccagaaugugcuguacgagaaccagaagcugaucgccaaccaguucaacagcgccaucggcaagauccaggacagccugagcagcacagcaagcgcccugggaaagcugcaggacguggucaaccagaaugcccaggcacugaacacccuggucaagcagcuguccuccaacuucggcgccaucagcucugugcugaacgauauccugagcagacuggacaaggucgaggccgaggugcagaucgacagacugaucacaggcagacugcagagccuccagacauacgugacccagcagcugaucagagccgccgagauuagagccucugccaaucuggccgccaucaagaugucugagugugugcugggccagagcaagagaguggacuuuugcggcaagggcuaccaccugaugagcuucccucagucugccccucacggcgugguguuucugcacgugacauaugugcccgcucaagagaagaauuucaccaccgcuccagccaucugccacgacggcaaagcccacuuuccuagagaaggcguguucguguccaacggcacccauugguucgugacacagcggaacuucuacgagccccagaucaucaccaccgacaacaccuucgugucuggcaacugcgacguugugaucggcauugugaacaauaccguguacgacccucugcagcccgagcuggacagcuucaaagaggaacuggacaaguacuuuaagaaccacacaagccccgacguggaccugggcgauaucagcggaaucaaugccagcgucgugaacauccagaaagagaucgaccggcugaacgagguggccaagaaucugaacgagagccugaucgaccugcaagaacuggggaaguacgagcaguacaucaaguggcccugguacaucuggcugggcuuuaucgccggacugauugccaucgugauggucacaaucaugcuguguugcaugaccagcugcuguagcugccugaagggcuguuguagcuguggcagcugcugcaaguucgacgaggacgauucugagcccgugcugaagggcgugaaacugcacuacaccugaggacuaguuauaagacugacuagcccgaugggccucccaacgggcccuccuccccuccuugcaccgagagaucucaaaggcucuuuucagagccaccaaaaaaaaaaaaaaaaaaaaaaaaaaaaaaaaaaaaaaaaaaaaaaaaaaaaaaaaaaaaaaaaaaaaaaaaaaaaaaaaaaaaaaaaaaaaaaaaaaaaa

SEQ ID NO: 24598 - RNA, 4035 nt, Artificial Sequence
  SARS-CoV-2/Wuhan/WIV05/2019__EPI_ISL_402128 spike protein mRNA gc mod (1-1273)(S13I_W152C_L452R_D614G)
aggagaaagcuuaccauguucguguuucuggugcugcugccccugguguccauccagugugugaaccugaccaccagaacacagcugccuccagccuacaccaacagcuucaccagaggcguguacuaccccgacaagguguucagauccagcgugcugcacucuacccaggaccuguuccugccuuucuucagcaacgugaccugguuccacgccauccacguguccggcaccaauggcaccaagagauucgacaaccccgugcugcccuucaacgacgggguguacuuugccagcaccgagaaguccaacaucaucagaggcuggaucuucggcaccacacuggacagcaagacccagagccugcugaucgugaacaacgccaccaacguggucaucaaagugugcgaguuccaguucugcaacgaccccuuccugggcgucuacuaccacaagaacaacaagagcugcauggaaagcgaguuccggguguacagcagcgccaacaacugcaccuucgaguacgugucccagccuuuccugauggaccuggaaggcaagcagggcaacuucaagaaccugcgcgaguucguguucaagaacaucgacggcuacuucaaaaucuacagcaagcacaccccuaucaaccucgugcgggaucugccucagggcuucucugcucuggaaccccugguggaucugcccaucggcaucaacaucacccgguuucagacacugcuggcccugcacagaagcuaccugacaccuggcgauagcagcagcggauggacagcuggugccgccgcuuacuaugugggcuaccugcagccuagaaccuuccugcugaaguacaacgagaacggcaccaucaccgacgccguggauugugcucuggauccucugagcgagacaaagugcacccugaaguccuucaccguggaaaagggcaucuaccagaccagcaacuuccgggugcagcccaccgaauccaucgugcgguuccccaauaucaccaaucugugccccuucggcgagguguucaaugccaccagauucgccucuguguacgccuggaaccggaagcggaucagcaauugcguggccgacuacuccgugcuguacaacuccgccagcuucagcaccuucaagugcuacggcguguccccuaccaagcugaacgaccugugcuucacaaacguguacgccgacagcuucgugauccggggagaugaagugcggcagauugccccuggacagacaggcaagaucgccgacuacaacuacaagcugcccgacgacuucaccggcugugugauugccuggaacagcaacaaccuggacuccaaagucggcggcaacuacaauuaccgcuaccggcuguuccggaaguccaaucugaagcccuucgagcgggacaucagcaccgaaaucuaucaggccggcagcaccccuugcaacggcguggaaggcuucaacugcuacuucccacugcaguccuacggcuuucagcccacaaauggcgugggcuaucagcccuacagagugguggugcugagcuucgaacugcugcaugcuccugccacagugugcggcccuaagaaaagcaccaaucucgugaagaacaaaugcgugaacuucaacuucaacggccugaccggcaccggcgugcugacagagagcaacaagaaguuccugccauuccagcaguuuggccgggauaucgccgauaccacagacgccguuagagauccccagacacuggaaauccuggacaucaccccaugcagcuucggcggagugucugugaucaccccuggcaccaacaccagcaaucagguggcagugcuguaccagggcgugaacuguaccgaagugcccguggccauucacgccgaucagcugacaccuacauggcggguguacuccaccggcagcaauguguuucagaccagagccggcugucugaucggagccgagcacgugaacaauagcuacgagugcgacauccccaucggcgcuggcaucugugccagcuaccagacacagacaaacagccccagacgggcuagaagcguggccagccagagcaucauugccuacacaaugucucugggcgccgagaacagcguggccuacuccaacaacucuaucgcuauccccaccaacuucaccaucagcgugaccaccgagauccugccuguguccaugaccaagaccagcguggacugcaccauguacaucugcggcgauuccaccgagugcuccaaccugcugcugcaguacggcagcuucugcacccagcugaauagagcccugacagggaucgccguggaacaggacaagaacacccaagagguguucgcccaagugaagcaaaucuacaagaccccuccuaucaaggacuucggcggcuucaauuucagccagauucugcccgauccuagcaagcccagcaagcggagcuucaucgaggaccugcuguucaacaaagugacacuggccgacgccggcuucaucaagcaguauggcgauugucugggcgacauugccgccagggaucugauuugcgcccagaaguuuaacggacugacagugcugccuccucugcugaccgaugagaugaucgcccaguacacaucugcccugcuggccggcacaaucacaagcggcuggacauuuggagcuggcgccgcucugcagauccccuuugcuaugcagauggccuaccgguucaacggcaucggagugacccagaaugugcuguacgagaaccagaagcugaucgccaaccaguucaacagcgccaucggcaagauccaggacagccugagcagcacagcaagcgcccugggaaagcugcaggacguggucaaccagaaugcccaggcacugaacacccuggucaagcagcuguccuccaacuucggcgccaucagcucugugcugaacgauauccugagcagacuggacaaggucgaggccgaggugcagaucgacagacugaucacaggcagacugcagagccuccagacauacgugacccagcagcugaucagagccgccgagauuagagccucugccaaucuggccgccaccaagaugucugagugugugcugggccagagcaagagaguggacuuuugcggcaagggcuaccaccugaugagcuucccucagucugccccucacggcgugguguuucugcacgugacauaugugcccgcucaagagaagaauuucaccaccgcuccagccaucugccacgacggcaaagcccacuuuccuagagaaggcguguucguguccaacggcacccauugguucgugacacagcggaacuucuacgagccccagaucaucaccaccgacaacaccuucgugucuggcaacugcgacguugugaucggcauugugaacaauaccguguacgacccucugcagcccgagcuggacagcuucaaagaggaacuggacaaguacuuuaagaaccacacaagccccgacguggaccugggcgauaucagcggaaucaaugccagcgucgugaacauccagaaagagaucgaccggcugaacgagguggccaagaaucugaacgagagccugaucgaccugcaagaacuggggaaguacgagcaguacaucaaguggcccugguacaucuggcugggcuuuaucgccggacugauugccaucgugauggucacaaucaugcuguguugcaugaccagcugcuguagcugccugaagggcuguuguagcuguggcagcugcugcaaguucgacgaggacgauucugagcccgugcugaagggcgugaaacugcacuacaccugaggacuaguuauaagacugacuagcccgaugggccucccaacgggcccuccuccccuccuugcaccgagagaucucaaaggcucuuuucagagccaccaaaaaaaaaaaaaaaaaaaaaaaaaaaaaaaaaaaaaaaaaaaaaaaaaaaaaaaaaaaaaaaaaaaaaaaaaaaaaaaaaaaaaaaaaaaaaaaaaaaaa

SEQ ID NO: 24599 - RNA, 4035 nt, Artificial Sequence
  SARS-CoV-2/Wuhan/WIV05/2019__EPI_ISL_402128 spike protein mRNA gc mod (1-1273)
aggagaaagcuuaccauguucguguuccuggugcugcugccucugguguccagccagugugugaaccugaccaccagaacacagcugccuccagccuacaccaacagcuuuaccagaggcguguacuaccccgacaagguguucagauccagcgugcugcacucuacccaggaccuguuccugccuuucuucagcaacgugaccugguuccacgccauccacguguccggcaccaauggcaccaagagauucgacaaccccgugcugcccuucaacgacgggguguacuuugccagcaccgagaaguccaacaucaucagaggcuggaucuucggcaccacacuggacagcaagacccagagccugcugaucgugaacaacgccaccaacguggucaucaaagugugcgaguuccaguucugcaacgaccccuuccugggcgucuacuaccacaagaacaacaagagcuggauggaaagcgaguuccggguguacagcagcgccaacaacugcaccuucgaguacgugucccagccuuuccugauggaccuggaaggcaagcagggcaacuucaagaaccugcgcgaguucguguuuaagaacaucgacggcuacuucaagaucuacagcaagcacaccccuaucaaccucgugcgggaucugccucagggcuucucugcucuggaaccccugguggaucugcccaucggcaucaacaucacccgguuucagacacugcuggcccugcacagaagcuaccugacaccuggcgauagcagcagcggauggacagcuggugccgccgcuuacuaugugggcuaccugcagccuagaaccuuccugcugaaguacaacgagaacggcaccaucaccgacgccguggauugugcucuggauccucugagcgagacaaagugcacccugaaguccuucaccguggaaaagggcaucuaccagaccagcaacuuccgggugcagcccaccgaauccaucgugcgguuccccaauaucaccaaucugugccccuucggcgagguguucaaugccaccagauucgccucuguguacgccuggaaccggaagcggaucagcaauugcguggccgacuacuccgugcuguacaacuccgccagcuucagcaccuucaagugcuacggcguguccccuaccaagcugaacgaccugugcuucacaaacguguacgccgacagcuucgugauccggggagaugaagugcggcagauugccccuggacagacaggcaagaucgccgacuacaacuacaagcugcccgacgacuucaccggcugugugauugccuggaacagcaacaaccuggacuccaaagucggcggcaacuacaauuaccuguaccggcuguuccggaaguccaaucugaagcccuucgagcgggacaucuccaccgagaucuaucaggccggcagcaccccuuguaacggcguggaaggcuucaacugcuacuucccacugcaguccuacggcuuucagcccacaaauggcgugggcuaucagcccuacagagugguggugcugagcuucgaacugcugcaugccccugccacagugugcggcccuaagaaaagcaccaaucucgugaagaacaaaugcgugaacuucaacuucaacggccugaccggcaccggcgugcugacagagagcaacaagaaguuccugccauuccagcaguuuggccgggauaucgccgauaccacagacgccguuagagauccccagacacuggaaauccuggacaucaccccuugcagcuucggcggagugucugugaucaccccuggcaccaacaccagcaaucagguggcagugcuguaccaggacgugaacuguaccgaagugcccguggccauucacgccgaucagcugacaccuacauggcggguguacuccaccggcagcaauguguuucagaccagagccggcugucugaucggagccgagcacgugaacaauagcuacgagugcgacauccccaucggcgcuggaaucugcgccagcuaccagacacagacaaacagcccucggagagccagaagcguggccagccagagcaucauugccuacacaaugucucugggcgccgagaacagcguggccuacuccaacaacucuaucgcuauccccaccaacuucaccaucagcgugaccacagagauccugccuguguccaugaccaagaccagcguggacugcaccauguacaucugcggcgauuccaccgagugcuccaaccugcugcugcaguacggcagcuucugcacccagcugaauagagcccugacagggaucgccguggaacaggacaagaacacccaagagguguucgcccaagugaagcagaucuacaagaccccuccuaucaaggacuucggcggcuucaauuucagccagauucugcccgauccuagcaagcccagcaagcggagcuucaucgaggaccugcuguucaacaaagugacacuggccgacgccggcuucaucaagcaguauggcgauugucugggcgacauugccgccagggaucugauuugcgcccagaaguuuaacggacugacagugcugccuccucugcugaccgaugagaugaucgcccaguacacaucugcccugcuggccggcacaaucacaagcggcuggacauuuggagcaggcgccgcucugcagauccccuuugcuaugcagauggccuaccgguucaacggcaucggagugacccagaaugugcuguacgagaaccagaagcugaucgccaaccaguucaacagcgccaucggcaagauccaggacagccugagcagcacagcaagcgcccugggaaagcugcaggacguggucaaccagaaugcccaggcacugaacacccuggucaagcagcuguccuccaacuucggcgccaucagcucugugcugaacgauauccugagcagacuggacaaggucgaggccgaggugcagaucgacagacugaucacaggcagacugcagagccuccagacauacgugacccagcagcugaucagagccgccgagauuagagccucugccaaucuggccgccaccaagaugucugagugugugcugggccagagcaagagaguggacuuuugcggcaagggcuaccaccugaugagcuucccucagucugccccucacggcgugguguuucugcacgugacauaugugcccgcucaagagaagaauuucaccaccgcuccagccaucugccacgacggcaaagcccacuuuccuagagaaggcguguucguguccaacggcacccauugguucgugacacagcggaacuucuacgagccccagaucaucaccaccgacaacaccuucgugucuggcaacugcgacgucgugaucggcauugugaacaauaccguguacgacccucugcagcccgagcuggacagcuucaaagaggaacuggacaaguacuuuaagaaccacacaagccccgacguggaccugggcgauaucagcggaaucaaugccagcgucgugaacauccagaaagagaucgaccggcugaacgagguggccaagaaucugaacgagagccugaucgaccugcaagaacuggggaaguacgagcaguacaucaaguggcccugguacaucuggcugggcuuuaucgccggacugauugccaucgugauggucacaaucaugcuguguugcaugaccagcugcuguagcugccugaagggcuguuguagcuguggcagcugcugcaaguucgacgaggacgauucugagcccgugcugaagggcgugaaacugcacuacacaugaggacuaguuauaagacugacuagcccgaugggccucccaacgggcccuccuccccuccuugcaccgagagaucucaaaggcucuuuucagagccaccaaaaaaaaaaaaaaaaaaaaaaaaaaaaaaaaaaaaaaaaaaaaaaaaaaaaaaaaaaaaaaaaaaaaaaaaaaaaaaaaaaaaaaaaaaaaaaaaaaaaa

SEQ ID NO: 24600 - RNA, 4035 nt, Artificial Sequence
  SARS-CoV-2/Wuhan/WIV05/2019__EPI_ISL_402128 spike protein mRNA gc mod (1-1273)(D614G)
aggagaaagcuuaccauguucguguuccuggugcugcugccucugguguccagccagugugugaaccugaccaccagaacacagcugccuccagccuacaccaacagcuuuaccagaggcguguacuaccccgacaagguguucagauccagcgugcugcacucuacccaggaccuguuccugccuuucuucagcaacgugaccugguuccacgccauccacguguccggcaccaauggcaccaagagauucgacaaccccgugcugcccuucaacgacgggguguacuuugccagcaccgagaaguccaacaucaucagaggcuggaucuucggcaccacacuggacagcaagacccagagccugcugaucgugaacaacgccaccaacguggucaucaaagugugcgaguuccaguucugcaacgaccccuuccugggcgucuacuaccacaagaacaacaagagcuggauggaaagcgaguuccggguguacagcagcgccaacaacugcaccuucgaguacgugucccagccuuuccugauggaccuggaaggcaagcagggcaacuucaagaaccugcgcgaguucguguuuaagaacaucgacggcuacuucaagaucuacagcaagcacaccccuaucaaccucgugcgggaucugccucagggcuucucugcucuggaaccccugguggaucugcccaucggcaucaacaucacccgguuucagacacugcuggcccugcacagaagcuaccugacaccuggcgauagcagcagcggauggacagcuggugccgccgcuuacuaugugggcuaccugcagccuagaaccuuccugcugaaguacaacgagaacggcaccaucaccgacgccguggauugugcucuggauccucugagcgagacaaagugcacccugaaguccuucaccguggaaaagggcaucuaccagaccagcaacuuccgggugcagcccaccgaauccaucgugcgguuccccaauaucaccaaucugugccccuucggcgagguguucaaugccaccagauucgccucuguguacgccuggaaccggaagcggaucagcaauugcguggccgacuacuccgugcuguacaacuccgccagcuucagcaccuucaagugcuacggcguguccccuaccaagcugaacgaccugugcuucacaaacguguacgccgacagcuucgugauccggggagaugaagugcggcagauugccccuggacagacaggcaagaucgccgacuacaacuacaagcugcccgacgacuucaccggcugugugauugccuggaacagcaacaaccuggacuccaaagucggcggcaacuacaauuaccuguaccggcuguuccggaaguccaaucugaagcccuucgagcgggacaucuccaccgagaucuaucaggccggcagcaccccuuguaacggcguggaaggcuucaacugcuacuucccacugcaguccuacggcuuucagcccacaaauggcgugggcuaucagcccuacagagugguggugcugagcuucgaacugcugcaugccccugccacagugugcggcccuaagaaaagcaccaaucucgugaagaacaaaugcgugaacuucaacuucaacggccugaccggcaccggcgugcugacagagagcaacaagaaguuccugccauuccagcaguuuggccgggauaucgccgauaccacagacgccguuagagauccccagacacuggaaauccuggacaucaccccuugcagcuucggcggagugucugugaucaccccuggcaccaacaccagcaaucagguggcagugcuguaccagggcgugaacuguaccgaagugcccguggccauucacgccgaucagcugacaccuacauggcggguguacuccaccggcagcaauguguuucagaccagagccggcugucugaucggagccgagcacgugaacaauagcuacgagugcgacauccccaucggcgcuggaaucugcgccagcuaccagacacagacaaacagcccucggagagccagaagcguggccagccagagcaucauugccuacacaaugucucugggcgccgagaacagcguggccuacuccaacaacucuaucgcuauccccaccaacuucaccaucagcgugaccacagagauccugccuguguccaugaccaagaccagcguggacugcaccauguacaucugcggcgauuccaccgagugcuccaaccugcugcugcaguacggcagcuucugcacccagcugaauagagcccugacagggaucgccguggaacaggacaagaacacccaagagguguucgcccaagugaagcagaucuacaagaccccuccuaucaaggacuucggcggcuucaauuucagccagauucugcccgauccuagcaagcccagcaagcggagcuucaucgaggaccugcuguucaacaaagugacacuggccgacgccggcuucaucaagcaguauggcgauugucugggcgacauugccgccagggaucugauuugcgcccagaaguuuaacggacugacagugcugccuccucugcugaccgaugagaugaucgcccaguacacaucugcccugcuggccggcacaaucacaagcggcuggacauuuggagcaggcgccgcucugcagauccccuuugcuaugcagauggccuaccgguucaacggcaucggagugacccagaaugugcuguacgagaaccagaagcugaucgccaaccaguucaacagcgccaucggcaagauccaggacagccugagcagcacagcaagcgcccugggaaagcugcaggacguggucaaccagaaugcccaggcacugaacacccuggucaagcagcuguccuccaacuucggcgccaucagcucugugcugaacgauauccugagcagacuggacaaggucgaggccgaggugcagaucgacagacugaucacaggcagacugcagagccuccagacauacgugacccagcagcugaucagagccgccgagauuagagccucugccaaucuggccgccaccaagaugucugagugugugcugggccagagcaagagaguggacuuuugcggcaagggcuaccaccugaugagcuucccucagucugccccucacggcgugguguuucugcacgugacauaugugcccgcucaagagaagaauuucaccaccgcuccagccaucugccacgacggcaaagcccacuuuccuagagaaggcguguucguguccaacggcacccauugguucgugacacagcggaacuucuacgagccccagaucaucaccaccgacaacaccuucgugucuggcaacugcgacgucgugaucggcauugugaacaauaccguguacgacccucugcagcccgagcuggacagcuucaaagaggaacuggacaaguacuuuaagaaccacacaagccccgacguggaccugggcgauaucagcggaaucaaugccagcgucgugaacauccagaaagagaucgaccggcugaacgagguggccaagaaucugaacgagagccugaucgaccugcaagaacuggggaaguacgagcaguacaucaaguggcccugguacaucuggcugggcuuuaucgccggacugauugccaucgugauggucacaaucaugcuguguugcaugaccagcugcuguagcugccugaagggcuguuguagcuguggcagcugcugcaaguucgacgaggacgauucugagcccgugcugaagggcgugaaacugcacuacacaugaggacuaguuauaagacugacuagcccgaugggccucccaacgggcccuccuccccuccuugcaccgagagaucucaaaggcucuuuucagagccaccaaaaaaaaaaaaaaaaaaaaaaaaaaaaaaaaaaaaaaaaaaaaaaaaaaaaaaaaaaaaaaaaaaaaaaaaaaaaaaaaaaaaaaaaaaaaaaaaaaaaa

SEQ ID NO: 24601 - RNA, 4035 nt, Artificial Sequence
  SARS-CoV-2/Wuhan/WIV05/2019__EPI_ISL_402128 spike protein mRNA gc mod (1-1273)(A222V_D614G)
aggagaaagcuuaccauguucguguuccuggugcugcugccucugguguccagccagugugugaaccugaccaccagaacacagcugccuccagccuacaccaacagcuuuaccagaggcguguacuaccccgacaagguguucagauccagcgugcugcacucuacccaggaccuguuccugccuuucuucagcaacgugaccugguuccacgccauccacguguccggcaccaauggcaccaagagauucgacaaccccgugcugcccuucaacgacgggguguacuuugccagcaccgagaaguccaacaucaucagaggcuggaucuucggcaccacacuggacagcaagacccagagccugcugaucgugaacaacgccaccaacguggucaucaaagugugcgaguuccaguucugcaacgaccccuuccugggcgucuacuaccacaagaacaacaagagcuggauggaaagcgaguuccggguguacagcagcgccaacaacugcaccuucgaguacgugucccagccuuuccugauggaccuggaaggcaagcagggcaacuucaagaaccugcgcgaguucguguuuaagaacaucgacggcuacuucaagaucuacagcaagcacaccccuaucaaccucgugcgggaucugccucagggcuucucugugcuggaaccccugguggaucugcccaucggcaucaacaucacccgguuucagacacugcuggcccugcacagaagcuaccugacaccuggcgauagcagcagcggauggacagcuggugccgccgcuuacuaugugggcuaccugcagccuagaaccuuccugcugaaguacaacgagaacggcaccaucaccgacgccguggauugugcucuggauccucugagcgagacaaagugcacccugaaguccuucaccguggaaaagggcaucuaccagaccagcaacuuccgggugcagcccaccgaauccaucgugcgguuccccaauaucaccaaucugugccccuucggcgagguguucaaugccaccagauucgccucuguguacgccuggaaccggaagcggaucagcaauugcguggccgacuacuccgugcuguacaacuccgccagcuucagcaccuucaagugcuacggcguguccccuaccaagcugaacgaccugugcuucacaaacguguacgccgacagcuucgugauccggggagaugaagugcggcagauugccccuggacagacaggcaagaucgccgacuacaacuacaagcugcccgacgacuucaccggcugugugauugccuggaacagcaacaaccuggacuccaaagucggcggcaacuacaauuaccuguaccggcuguuccggaaguccaaucugaagcccuucgagcgggacaucuccaccgagaucuaucaggccggcagcaccccuuguaacggcguggaaggcuucaacugcuacuucccacugcaguccuacggcuuucagcccacaaauggcgugggcuaucagcccuacagagugguggugcugagcuucgaacugcugcaugccccugccacagugugcggcccuaagaaaagcaccaaucucgugaagaacaaaugcgugaacuucaacuucaacggccugaccggcaccggcgugcugacagagagcaacaagaaguuccugccauuccagcaguuuggccgggauaucgccgauaccacagacgccguuagagauccccagacacuggaaauccuggacaucaccccuugcagcuucggcggagugucugugaucaccccuggcaccaacaccagcaaucagguggcagugcuguaccagggcgugaacuguaccgaagugcccguggccauucacgccgaucagcugacaccuacauggcggguguacuccaccggcagcaauguguuucagaccagagccggcugucugaucggagccgagcacgugaacaauagcuacgagugcgacauccccaucggcgcuggaaucugcgccagcuaccagacacagacaaacagcccucggagagccagaagcguggccagccagagcaucauugccuacacaaugucucugggcgccgagaacagcguggccuacuccaacaacucuaucgcuauccccaccaacuucaccaucagcgugaccacagagauccugccuguguccaugaccaagaccagcguggacugcaccauguacaucugcggcgauuccaccgagugcuccaaccugcugcugcaguacggcagcuucugcacccagcugaauagagcccugacagggaucgccguggaacaggacaagaacacccaagagguguucgcccaagugaagcagaucuacaagaccccuccuaucaaggacuucggcggcuucaauuucagccagauucugcccgauccuagcaagcccagcaagcggagcuucaucgaggaccugcuguucaacaaagugacacuggccgacgccggcuucaucaagcaguauggcgauugucugggcgacauugccgccagggaucugauuugcgcccagaaguuuaacggacugacagugcugccuccucugcugaccgaugagaugaucgcccaguacacaucugcccugcuggccggcacaaucacaagcggcuggacauuuggagcaggcgccgcucugcagauccccuuugcuaugcagauggccuaccgguucaacggcaucggagugacccagaaugugcuguacgagaaccagaagcugaucgccaaccaguucaacagcgccaucggcaagauccaggacagccugagcagcacagcaagcgcccugggaaagcugcaggacguggucaaccagaaugcccaggcacugaacacccuggucaagcagcuguccuccaacuucggcgccaucagcucugugcugaacgauauccugagcagacuggacaaggucgaggccgaggugcagaucgacagacugaucacaggcagacugcagagccuccagacauacgugacccagcagcugaucagagccgccgagauuagagccucugccaaucuggccgccaccaagaugucugagugugugcugggccagagcaagagaguggacuuuugcggcaagggcuaccaccugaugagcuucccucagucugccccucacggcgugguguuucugcacgugacauaugugcccgcucaagagaagaauuucaccaccgcuccagccaucugccacgacggcaaagcccacuuuccuagagaaggcguguucguguccaacggcacccauugguucgugacacagcggaacuucuacgagccccagaucaucaccaccgacaacaccuucgugucuggcaacugcgacgucgugaucggcauugugaacaauaccguguacgacccucugcagcccgagcuggacagcuucaaagaggaacuggacaaguacuuuaagaaccacacaagccccgacguggaccugggcgauaucagcggaaucaaugccagcgucgugaacauccagaaagagaucgaccggcugaacgagguggccaagaaucugaacgagagccugaucgaccugcaagaacuggggaaguacgagcaguacaucaaguggcccugguacaucuggcugggcuuuaucgccggacugauugccaucgugauggucacaaucaugcuguguugcaugaccagcugcuguagcugccugaagggcuguuguagcuguggcagcugcugcaaguucgacgaggacgauucugagcccgugcugaagggcgugaaacugcacuacacaugaggacuaguuauaagacugacuagcccgaugggccucccaacgggcccuccuccccuccuugcaccgagagaucucaaaggcucuuuucagagccaccaaaaaaaaaaaaaaaaaaaaaaaaaaaaaaaaaaaaaaaaaaaaaaaaaaaaaaaaaaaaaaaaaaaaaaaaaaaaaaaaaaaaaaaaaaaaaaaaaaaaa

SEQ ID NO: 24602 - RNA, 4035 nt, Artificial Sequence
  SARS-CoV-2/Wuhan/WIV05/2019__EPI_ISL_402128 spike protein mRNA gc mod (1-1273)(N439K_D614G)
aggagaaagcuuaccauguucguguuccuggugcugcugccucugguguccagccagugugugaaccugaccaccagaacacagcugccuccagccuacaccaacagcuuuaccagaggcguguacuaccccgacaagguguucagauccagcgugcugcacucuacccaggaccuguuccugccuuucuucagcaacgugaccugguuccacgccauccacguguccggcaccaauggcaccaagagauucgacaaccccgugcugcccuucaacgacgggguguacuuugccagcaccgagaaguccaacaucaucagaggcuggaucuucggcaccacacuggacagcaagacccagagccugcugaucgugaacaacgccaccaacguggucaucaaagugugcgaguuccaguucugcaacgaccccuuccugggcgucuacuaccacaagaacaacaagagcuggauggaaagcgaguuccggguguacagcagcgccaacaacugcaccuucgaguacgugucccagccuuuccugauggaccuggaaggcaagcagggcaacuucaagaaccugcgcgaguucguguuuaagaacaucgacggcuacuucaagaucuacagcaagcacaccccuaucaaccucgugcgggaucugccucagggcuucucugcucuggaaccccugguggaucugcccaucggcaucaacaucacccgguuucagacacugcuggcccugcacagaagcuaccugacaccuggcgauagcagcagcggauggacagcuggugccgccgcuuacuaugugggcuaccugcagccuagaaccuuccugcugaaguacaacgagaacggcaccaucaccgacgccguggauugugcucuggauccucugagcgagacaaagugcacccugaaguccuucaccguggaaaagggcaucuaccagaccagcaacuuccgggugcagcccaccgaauccaucgugcgguuccccaauaucaccaaucugugccccuucggcgagguguucaaugccaccagauucgccucuguguacgccuggaaccggaagcggaucagcaauugcguggccgacuacuccgugcuguacaacuccgccagcuucagcaccuucaagugcuacggcguguccccuaccaagcugaacgaccugugcuucacaaacguguacgccgacagcuucgugauccggggagaugaagugcggcagauugccccuggacagacaggcaagaucgccgacuacaacuacaagcugcccgacgacuucaccggcugugugauugccuggaacagcaagaaccuggacuccaaagucggcggcaacuacaauuaccuguaccggcuguuccggaaguccaaucugaagcccuucgagcgggacaucuccaccgagaucuaucaggccggcagcaccccuuguaacggcguggaaggcuucaacugcuacuucccacugcaguccuacggcuuucagcccacaaauggcgugggcuaucagcccuacagagugguggugcugagcuucgaacugcugcaugccccugccacagugugcggcccuaagaaaagcaccaaucucgugaagaacaaaugcgugaacuucaacuucaacggccugaccggcaccggcgugcugacagagagcaacaagaaguuccugccauuccagcaguuuggccgggauaucgccgauaccacagacgccguuagagauccccagacacuggaaauccuggacaucaccccuugcagcuucggcggagugucugugaucaccccuggcaccaacaccagcaaucagguggcagugcuguaccagggcgugaacuguaccgaagugcccguggccauucacgccgaucagcugacaccuacauggcggguguacuccaccggcagcaauguguuucagaccagagccggcugucugaucggagccgagcacgugaacaauagcuacgagugcgacauccccaucggcgcuggaaucugcgccagcuaccagacacagacaaacagcccucggagagccagaagcguggccagccagagcaucauugccuacacaaugucucugggcgccgagaacagcguggccuacuccaacaacucuaucgcuauccccaccaacuucaccaucagcgugaccacagagauccugccuguguccaugaccaagaccagcguggacugcaccauguacaucugcggcgauuccaccgagugcuccaaccugcugcugcaguacggcagcuucugcacccagcugaauagagcccugacagggaucgccguggaacaggacaagaacacccaagagguguucgcccaagugaagcagaucuacaagaccccuccuaucaaggacuucggcggcuucaauuucagccagauucugcccgauccuagcaagcccagcaagcggagcuucaucgaggaccugcuguucaacaaagugacacuggccgacgccggcuucaucaagcaguauggcgauugucugggcgacauugccgccagggaucugauuugcgcccagaaguuuaacggacugacagugcugccuccucugcugaccgaugagaugaucgcccaguacacaucugcccugcuggccggcacaaucacaagcggcuggacauuuggagcaggcgccgcucugcagauccccuuugcuaugcagauggccuaccgguucaacggcaucggagugacccagaaugugcuguacgagaaccagaagcugaucgccaaccaguucaacagcgccaucggcaagauccaggacagccugagcagcacagcaagcgcccugggaaagcugcaggacguggucaaccagaaugcccaggcacugaacacccuggucaagcagcuguccuccaacuucggcgccaucagcucugugcugaacgauauccugagcagacuggacaaggucgaggccgaggugcagaucgacagacugaucacaggcagacugcagagccuccagacauacgugacccagcagcugaucagagccgccgagauuagagccucugccaaucuggccgccaccaagaugucugagugugugcugggccagagcaagagaguggacuuuugcggcaagggcuaccaccugaugagcuucccucagucugccccucacggcgugguguuucugcacgugacauaugugcccgcucaagagaagaauuucaccaccgcuccagccaucugccacgacggcaaagcccacuuuccuagagaaggcguguucguguccaacggcacccauugguucgugacacagcggaacuucuacgagccccagaucaucaccaccgacaacaccuucgugucuggcaacugcgacgucgugaucggcauugugaacaauaccguguacgacccucugcagcccgagcuggacagcuucaaagaggaacuggacaaguacuuuaagaaccacacaagccccgacguggaccugggcgauaucagcggaaucaaugccagcgucgugaacauccagaaagagaucgaccggcugaacgagguggccaagaaucugaacgagagccugaucgaccugcaagaacuggggaaguacgagcaguacaucaaguggcccugguacaucuggcugggcuuuaucgccggacugauugccaucgugauggucacaaucaugcuguguugcaugaccagcugcuguagcugccugaagggcuguuguagcuguggcagcugcugcaaguucgacgaggacgauucugagcccgugcugaagggcgugaaacugcacuacacaugaggacuaguuauaagacugacuagcccgaugggccucccaacgggcccuccuccccuccuugcaccgagagaucucaaaggcucuuuucagagccaccaaaaaaaaaaaaaaaaaaaaaaaaaaaaaaaaaaaaaaaaaaaaaaaaaaaaaaaaaaaaaaaaaaaaaaaaaaaaaaaaaaaaaaaaaaaaaaaaaaaaa

SEQ ID NO: 24603 - RNA, 4035 nt, Artificial Sequence
  SARS-CoV-2/Wuhan/WIV05/2019__EPI_ISL_402128 spike protein mRNA gc mod (1-1273)(S477N_D614G)
aggagaaagcuuaccauguucguguuccuggugcugcugccucugguguccagccagugugugaaccugaccaccagaacacagcugccuccagccuacaccaacagcuuuaccagaggcguguacuaccccgacaagguguucagauccagcgugcugcacucuacccaggaccuguuccugccuuucuucagcaacgugaccugguuccacgccauccacguguccggcaccaauggcaccaagagauucgacaaccccgugcugcccuucaacgacgggguguacuuugccagcaccgagaaguccaacaucaucagaggcuggaucuucggcaccacacuggacagcaagacccagagccugcugaucgugaacaacgccaccaacguggucaucaaagugugcgaguuccaguucugcaacgaccccuuccugggcgucuacuaccacaagaacaacaagagcuggauggaaagcgaguuccggguguacagcagcgccaacaacugcaccuucgaguacgugucccagccuuuccugauggaccuggaaggcaagcagggcaacuucaagaaccugcgcgaguucguguuuaagaacaucgacggcuacuucaagaucuacagcaagcacaccccuaucaaccucgugcgggaucugccucagggcuucucugcucuggaaccccugguggaucugcccaucggcaucaacaucacccgguuucagacacugcuggcccugcacagaagcuaccugacaccuggcgauagcagcagcggauggacagcuggugccgccgcuuacuaugugggcuaccugcagccuagaaccuuccugcugaaguacaacgagaacggcaccaucaccgacgccguggauugugcucuggauccucugagcgagacaaagugcacccugaaguccuucaccguggaaaagggcaucuaccagaccagcaacuuccgggugcagcccaccgaauccaucgugcgguuccccaauaucaccaaucugugccccuucggcgagguguucaaugccaccagauucgccucuguguacgccuggaaccggaagcggaucagcaauugcguggccgacuacuccgugcuguacaacuccgccagcuucagcaccuucaagugcuacggcguguccccuaccaagcugaacgaccugugcuucacaaacguguacgccgacagcuucgugauccggggagaugaagugcggcagauugccccuggacagacaggcaagaucgccgacuacaacuacaagcugcccgacgacuucaccggcugugugauugccuggaacagcaacaaccuggacuccaaagucggcggcaacuacaauuaccuguaccggcuguuccggaaguccaaucugaagcccuucgagcgggacaucuccaccgagaucuaucaggccggcaacaccccuuguaacggcguggaaggcuucaacugcuacuucccacugcaguccuacggcuuucagcccacaaauggcgugggcuaucagcccuacagagugguggugcugagcuucgaacugcugcaugccccugccacagugugcggcccuaagaaaagcaccaaucucgugaagaacaaaugcgugaacuucaacuucaacggccugaccggcaccggcgugcugacagagagcaacaagaaguuccugccauuccagcaguuuggccgggauaucgccgauaccacagacgccguuagagauccccagacacuggaaauccuggacaucaccccuugcagcuucggcggagugucugugaucaccccuggcaccaacaccagcaaucagguggcagugcuguaccagggcgugaacuguaccgaagugcccguggccauucacgccgaucagcugacaccuacauggcggguguacuccaccggcagcaauguguuucagaccagagccggcugucugaucggagccgagcacgugaacaauagcuacgagugcgacauccccaucggcgcuggaaucugcgccagcuaccagacacagacaaacagcccucggagagccagaagcguggccagccagagcaucauugccuacacaaugucucugggcgccgagaacagcguggccuacuccaacaacucuaucgcuauccccaccaacuucaccaucagcgugaccacagagauccugccuguguccaugaccaagaccagcguggacugcaccauguacaucugcggcgauuccaccgagugcuccaaccugcugcugcaguacggcagcuucugcacccagcugaauagagcccugacagggaucgccguggaacaggacaagaacacccaagagguguucgcccaagugaagcagaucuacaagaccccuccuaucaaggacuucggcggcuucaauuucagccagauucugcccgauccuagcaagcccagcaagcggagcuucaucgaggaccugcuguucaacaaagugacacuggccgacgccggcuucaucaagcaguauggcgauugucugggcgacauugccgccagggaucugauuugcgcccagaaguuuaacggacugacagugcugccuccucugcugaccgaugagaugaucgcccaguacacaucugcccugcuggccggcacaaucacaagcggcuggacauuuggagcaggcgccgcucugcagauccccuuugcuaugcagauggccuaccgguucaacggcaucggagugacccagaaugugcuguacgagaaccagaagcugaucgccaaccaguucaacagcgccaucggcaagauccaggacagccugagcagcacagcaagcgcccugggaaagcugcaggacguggucaaccagaaugcccaggcacugaacacccuggucaagcagcuguccuccaacuucggcgccaucagcucugugcugaacgauauccugagcagacuggacaaggucgaggccgaggugcagaucgacagacugaucacaggcagacugcagagccuccagacauacgugacccagcagcugaucagagccgccgagauuagagccucugccaaucuggccgccaccaagaugucugagugugugcugggccagagcaagagaguggacuuuugcggcaagggcuaccaccugaugagcuucccucagucugccccucacggcgugguguuucugcacgugacauaugugcccgcucaagagaagaauuucaccaccgcuccagccaucugccacgacggcaaagcccacuuuccuagagaaggcguguucguguccaacggcacccauugguucgugacacagcggaacuucuacgagccccagaucaucaccaccgacaacaccuucgugucuggcaacugcgacgucgugaucggcauugugaacaauaccguguacgacccucugcagcccgagcuggacagcuucaaagaggaacuggacaaguacuuuaagaaccacacaagccccgacguggaccugggcgauaucagcggaaucaaugccagcgucgugaacauccagaaagagaucgaccggcugaacgagguggccaagaaucugaacgagagccugaucgaccugcaagaacuggggaaguacgagcaguacaucaaguggcccugguacaucuggcugggcuuuaucgccggacugauugccaucgugauggucacaaucaugcuguguugcaugaccagcugcuguagcugccugaagggcuguuguagcuguggcagcugcugcaaguucgacgaggacgauucugagcccgugcugaagggcgugaaacugcacuacacaugaggacuaguuauaagacugacuagcccgaugggccucccaacgggcccuccuccccuccuugcaccgagagaucucaaaggcucuuuucagagccaccaaaaaaaaaaaaaaaaaaaaaaaaaaaaaaaaaaaaaaaaaaaaaaaaaaaaaaaaaaaaaaaaaaaaaaaaaaaaaaaaaaaaaaaaaaaaaaaaaaaaa

SEQ ID NO: 24604 - RNA, 4035 nt, Artificial Sequence
  SARS-CoV-2/Wuhan/WIV05/2019__EPI_ISL_402128 spike protein mRNA gc mod (1-1273)(N501Y_D614G)
aggagaaagcuuaccauguucguguuccuggugcugcugccucugguguccagccagugugugaaccugaccaccagaacacagcugccuccagccuacaccaacagcuuuaccagaggcguguacuaccccgacaagguguucagauccagcgugcugcacucuacccaggaccuguuccugccuuucuucagcaacgugaccugguuccacgccauccacguguccggcaccaauggcaccaagagauucgacaaccccgugcugcccuucaacgacgggguguacuuugccagcaccgagaaguccaacaucaucagaggcuggaucuucggcaccacacuggacagcaagacccagagccugcugaucgugaacaacgccaccaacguggucaucaaagugugcgaguuccaguucugcaacgaccccuuccugggcgucuacuaccacaagaacaacaagagcuggauggaaagcgaguuccggguguacagcagcgccaacaacugcaccuucgaguacgugucccagccuuuccugauggaccuggaaggcaagcagggcaacuucaagaaccugcgcgaguucguguuuaagaacaucgacggcuacuucaagaucuacagcaagcacaccccuaucaaccucgugcgggaucugccucagggcuucucugcucuggaaccccugguggaucugcccaucggcaucaacaucacccgguuucagacacugcuggcccugcacagaagcuaccugacaccuggcgauagcagcagcggauggacagcuggugccgccgcuuacuaugugggcuaccugcagccuagaaccuuccugcugaaguacaacgagaacggcaccaucaccgacgccguggauugugcucuggauccucugagcgagacaaagugcacccugaaguccuucaccguggaaaagggcaucuaccagaccagcaacuuccgggugcagcccaccgaauccaucgugcgguuccccaauaucaccaaucugugccccuucggcgagguguucaaugccaccagauucgccucuguguacgccuggaaccggaagcggaucagcaauugcguggccgacuacuccgugcuguacaacuccgccagcuucagcaccuucaagugcuacggcguguccccuaccaagcugaacgaccugugcuucacaaacguguacgccgacagcuucgugauccggggagaugaagugcggcagauugccccuggacagacaggcaagaucgccgacuacaacuacaagcugcccgacgacuucaccggcugugugauugccuggaacagcaacaaccuggacuccaaagucggcggcaacuacaauuaccuguaccggcuguuccggaaguccaaucugaagcccuucgagcgggacaucuccaccgagaucuaucaggccggcagcaccccuuguaacggcguggaaggcuucaacugcuacuucccacugcaguccuacggcuuucagcccacauacggcgugggcuaucagcccuacagagugguggugcugagcuucgaacugcugcaugccccugccacagugugcggcccuaagaaaagcaccaaucucgugaagaacaaaugcgugaacuucaacuucaacggccugaccggcaccggcgugcugacagagagcaacaagaaguuccugccauuccagcaguuuggccgggauaucgccgauaccacagacgccguuagagauccccagacacuggaaauccuggacaucaccccuugcagcuucggcggagugucugugaucaccccuggcaccaacaccagcaaucagguggcagugcuguaccagggcgugaacuguaccgaagugcccguggccauucacgccgaucagcugacaccuacauggcggguguacuccaccggcagcaauguguuucagaccagagccggcugucugaucggagccgagcacgugaacaauagcuacgagugcgacauccccaucggcgcuggaaucugcgccagcuaccagacacagacaaacagcccucggagagccagaagcguggccagccagagcaucauugccuacacaaugucucugggcgccgagaacagcguggccuacuccaacaacucuaucgcuauccccaccaacuucaccaucagcgugaccacagagauccugccuguguccaugaccaagaccagcguggacugcaccauguacaucugcggcgauuccaccgagugcuccaaccugcugcugcaguacggcagcuucugcacccagcugaauagagcccugacagggaucgccguggaacaggacaagaacacccaagagguguucgcccaagugaagcagaucuacaagaccccuccuaucaaggacuucggcggcuucaauuucagccagauucugcccgauccuagcaagcccagcaagcggagcuucaucgaggaccugcuguucaacaaagugacacuggccgacgccggcuucaucaagcaguauggcgauugucugggcgacauugccgccagggaucugauuugcgcccagaaguuuaacggacugacagugcugccuccucugcugaccgaugagaugaucgcccaguacacaucugcccugcuggccggcacaaucacaagcggcuggacauuuggagcaggcgccgcucugcagauccccuuugcuaugcagauggccuaccgguucaacggcaucggagugacccagaaugugcuguacgagaaccagaagcugaucgccaaccaguucaacagcgccaucggcaagauccaggacagccugagcagcacagcaagcgcccugggaaagcugcaggacguggucaaccagaaugcccaggcacugaacacccuggucaagcagcuguccuccaacuucggcgccaucagcucugugcugaacgauauccugagcagacuggacaaggucgaggccgaggugcagaucgacagacugaucacaggcagacugcagagccuccagacauacgugacccagcagcugaucagagccgccgagauuagagccucugccaaucuggccgccaccaagaugucugagugugugcugggccagagcaagagaguggacuuuugcggcaagggcuaccaccugaugagcuucccucagucugccccucacggcgugguguuucugcacgugacauaugugcccgcucaagagaagaauuucaccaccgcuccagccaucugccacgacggcaaagcccacuuuccuagagaaggcguguucguguccaacggcacccauugguucgugacacagcggaacuucuacgagccccagaucaucaccaccgacaacaccuucgugucuggcaacugcgacgucgugaucggcauugugaacaauaccguguacgacccucugcagcccgagcuggacagcuucaaagaggaacuggacaaguacuuuaagaaccacacaagccccgacguggaccugggcgauaucagcggaaucaaugccagcgucgugaacauccagaaagagaucgaccggcugaacgagguggccaagaaucugaacgagagccugaucgaccugcaagaacuggggaaguacgagcaguacaucaaguggcccugguacaucuggcugggcuuuaucgccggacugauugccaucgugauggucacaaucaugcuguguugcaugaccagcugcuguagcugccugaagggcuguuguagcuguggcagcugcugcaaguucgacgaggacgauucugagcccgugcugaagggcgugaaacugcacuacacaugaggacuaguuauaagacugacuagcccgaugggccucccaacgggcccuccuccccuccuugcaccgagagaucucaaaggcucuuuucagagccaccaaaaaaaaaaaaaaaaaaaaaaaaaaaaaaaaaaaaaaaaaaaaaaaaaaaaaaaaaaaaaaaaaaaaaaaaaaaaaaaaaaaaaaaaaaaaaaaaaaaaa

SEQ ID NO: 24605 - RNA, 4029 nt, Artificial Sequence
  SARS-CoV-2/Wuhan/WIV05/2019__EPI_ISL_402128 spike protein mRNA gc mod (1-1273)(H69del_V70del_D614G)
aggagaaagcuuaccauguucguguuccuggugcugcugccucugguguccagccagugugugaaccugaccaccagaacacagcugccuccagccuacaccaacagcuuuaccagaggcguguacuaccccgacaagguguucagauccagcgugcugcacucuacccaggaccuguuccugccuuucuucagcaacgugaccugguuccacgccaucuccggcaccaauggcaccaagagauucgacaaccccgugcugcccuucaacgacgggguguacuuugccagcaccgagaaguccaacaucaucagaggcuggaucuucggcaccacacuggacagcaagacccagagccugcugaucgugaacaacgccaccaacguggucaucaaagugugcgaguuccaguucugcaacgaccccuuccugggcgucuacuaccacaagaacaacaagagcuggauggaaagcgaguuccggguguacagcagcgccaacaacugcaccuucgaguacgugucccagccuuuccugauggaccuggaaggcaagcagggcaacuucaagaaccugcgcgaguucguguuuaagaacaucgacggcuacuucaagaucuacagcaagcacaccccuaucaaccucgugcgggaucugccucagggcuucucugcucuggaaccccugguggaucugcccaucggcaucaacaucacccgguuucagacacugcuggcccugcacagaagcuaccugacaccuggcgauagcagcagcggauggacagcuggugccgccgcuuacuaugugggcuaccugcagccuagaaccuuccugcugaaguacaacgagaacggcaccaucaccgacgccguggauugugcucuggauccucugagcgagacaaagugcacccugaaguccuucaccguggaaaagggcaucuaccagaccagcaacuuccgggugcagcccaccgaauccaucgugcgguuccccaauaucaccaaucugugccccuucggcgagguguucaaugccaccagauucgccucuguguacgccuggaaccggaagcggaucagcaauugcguggccgacuacuccgugcuguacaacuccgccagcuucagcaccuucaagugcuacggcguguccccuaccaagcugaacgaccugugcuucacaaacguguacgccgacagcuucgugauccggggagaugaagugcggcagauugccccuggacagacaggcaagaucgccgacuacaacuacaagcugcccgacgacuucaccggcugugugauugccuggaacagcaacaaccuggacuccaaagucggcggcaacuacaauuaccuguaccggcuguuccggaaguccaaucugaagcccuucgagcgggacaucuccaccgagaucuaucaggccggcagcaccccuuguaacggcguggaaggcuucaacugcuacuucccacugcaguccuacggcuuucagcccacaaauggcgugggcuaucagcccuacagagugguggugcugagcuucgaacugcugcaugccccugccacagugugcggcccuaagaaaagcaccaaucucgugaagaacaaaugcgugaacuucaacuucaacggccugaccggcaccggcgugcugacagagagcaacaagaaguuccugccauuccagcaguuuggccgggauaucgccgauaccacagacgccguuagagauccccagacacuggaaauccuggacaucaccccuugcagcuucggcggagugucugugaucaccccuggcaccaacaccagcaaucagguggcagugcuguaccagggcgugaacuguaccgaagugcccguggccauucacgccgaucagcugacaccuacauggcggguguacuccaccggcagcaauguguuucagaccagagccggcugucugaucggagccgagcacgugaacaauagcuacgagugcgacauccccaucggcgcuggaaucugcgccagcuaccagacacagacaaacagcccucggagagccagaagcguggccagccagagcaucauugccuacacaaugucucugggcgccgagaacagcguggccuacuccaacaacucuaucgcuauccccaccaacuucaccaucagcgugaccacagagauccugccuguguccaugaccaagaccagcguggacugcaccauguacaucugcggcgauuccaccgagugcuccaaccugcugcugcaguacggcagcuucugcacccagcugaauagagcccugacagggaucgccguggaacaggacaagaacacccaagagguguucgcccaagugaagcagaucuacaagaccccuccuaucaaggacuucggcggcuucaauuucagccagauucugcccgauccuagcaagcccagcaagcggagcuucaucgaggaccugcuguucaacaaagugacacuggccgacgccggcuucaucaagcaguauggcgauugucugggcgacauugccgccagggaucugauuugcgcccagaaguuuaacggacugacagugcugccuccucugcugaccgaugagaugaucgcccaguacacaucugcccugcuggccggcacaaucacaagcggcuggacauuuggagcaggcgccgcucugcagauccccuuugcuaugcagauggccuaccgguucaacggcaucggagugacccagaaugugcuguacgagaaccagaagcugaucgccaaccaguucaacagcgccaucggcaagauccaggacagccugagcagcacagcaagcgcccugggaaagcugcaggacguggucaaccagaaugcccaggcacugaacacccuggucaagcagcuguccuccaacuucggcgccaucagcucugugcugaacgauauccugagcagacuggacaaggucgaggccgaggugcagaucgacagacugaucacaggcagacugcagagccuccagacauacgugacccagcagcugaucagagccgccgagauuagagccucugccaaucuggccgccaccaagaugucugagugugugcugggccagagcaagagaguggacuuuugcggcaagggcuaccaccugaugagcuucccucagucugccccucacggcgugguguuucugcacgugacauaugugcccgcucaagagaagaauuucaccaccgcuccagccaucugccacgacggcaaagcccacuuuccuagagaaggcguguucguguccaacggcacccauugguucgugacacagcggaacuucuacgagccccagaucaucaccaccgacaacaccuucgugucuggcaacugcgacgucgugaucggcauugugaacaauaccguguacgacccucugcagcccgagcuggacagcuucaaagaggaacuggacaaguacuuuaagaaccacacaagccccgacguggaccugggcgauaucagcggaaucaaugccagcgucgugaacauccagaaagagaucgaccggcugaacgagguggccaagaaucugaacgagagccugaucgaccugcaagaacuggggaaguacgagcaguacaucaaguggcccugguacaucuggcugggcuuuaucgccggacugauugccaucgugauggucacaaucaugcuguguugcaugaccagcugcuguagcugccugaagggcuguuguagcuguggcagcugcugcaaguucgacgaggacgauucugagcccgugcugaagggcgugaaacugcacuacacaugaggacuaguuauaagacugacuagcccgaugggccucccaacgggcccuccuccccuccuugcaccgagagaucucaaaggcucuuuucagagccaccaaaaaaaaaaaaaaaaaaaaaaaaaaaaaaaaaaaaaaaaaaaaaaaaaaaaaaaaaaaaaaaaaaaaaaaaaaaaaaaaaaaaaaaaaaaaaaaaaaaaa

SEQ ID NO: 24606 - RNA, 4035 nt, Artificial Sequence
  SARS-CoV-2/Wuhan/WIV05/2019__EPI_ISL_402128 spike protein mRNA gc mod (1-1273)(Y453F_D614G)
aggagaaagcuuaccauguucguguuccuggugcugcugccucugguguccagccagugugugaaccugaccaccagaacacagcugccuccagccuacaccaacagcuuuaccagaggcguguacuaccccgacaagguguucagauccagcgugcugcacucuacccaggaccuguuccugccuuucuucagcaacgugaccugguuccacgccauccacguguccggcaccaauggcaccaagagauucgacaaccccgugcugcccuucaacgacgggguguacuuugccagcaccgagaaguccaacaucaucagaggcuggaucuucggcaccacacuggacagcaagacccagagccugcugaucgugaacaacgccaccaacguggucaucaaagugugcgaguuccaguucugcaacgaccccuuccugggcgucuacuaccacaagaacaacaagagcuggauggaaagcgaguuccggguguacagcagcgccaacaacugcaccuucgaguacgugucccagccuuuccugauggaccuggaaggcaagcagggcaacuucaagaaccugcgcgaguucguguuuaagaacaucgacggcuacuucaagaucuacagcaagcacaccccuaucaaccucgugcgggaucugccucagggcuucucugcucuggaaccccugguggaucugcccaucggcaucaacaucacccgguuucagacacugcuggcccugcacagaagcuaccugacaccuggcgauagcagcagcggauggacagcuggugccgccgcuuacuaugugggcuaccugcagccuagaaccuuccugcugaaguacaacgagaacggcaccaucaccgacgccguggauugugcucuggauccucugagcgagacaaagugcacccugaaguccuucaccguggaaaagggcaucuaccagaccagcaacuuccgggugcagcccaccgaauccaucgugcgguuccccaauaucaccaaucugugccccuucggcgagguguucaaugccaccagauucgccucuguguacgccuggaaccggaagcggaucagcaauugcguggccgacuacuccgugcuguacaacuccgccagcuucagcaccuucaagugcuacggcguguccccuaccaagcugaacgaccugugcuucacaaacguguacgccgacagcuucgugauccggggagaugaagugcggcagauugccccuggacagacaggcaagaucgccgacuacaacuacaagcugcccgacgacuucaccggcugugugauugccuggaacagcaacaaccuggacuccaaagucggcggcaacuacaauuaccuguuccggcuguuccggaaguccaaucugaagcccuucgagcgggacaucuccaccgagaucuaucaggccggcagcaccccuuguaacggcguggaaggcuucaacugcuacuucccacugcaguccuacggcuuucagcccacaaauggcgugggcuaucagcccuacagagugguggugcugagcuucgaacugcugcaugccccugccacagugugcggcccuaagaaaagcaccaaucucgugaagaacaaaugcgugaacuucaacuucaacggccugaccggcaccggcgugcugacagagagcaacaagaaguuccugccauuccagcaguuuggccgggauaucgccgauaccacagacgccguuagagauccccagacacuggaaauccuggacaucaccccuugcagcuucggcggagugucugugaucaccccuggcaccaacaccagcaaucagguggcagugcuguaccagggcgugaacuguaccgaagugcccguggccauucacgccgaucagcugacaccuacauggcggguguacuccaccggcagcaauguguuucagaccagagccggcugucugaucggagccgagcacgugaacaauagcuacgagugcgacauccccaucggcgcuggaaucugcgccagcuaccagacacagacaaacagcccucggagagccagaagcguggccagccagagcaucauugccuacacaaugucucugggcgccgagaacagcguggccuacuccaacaacucuaucgcuauccccaccaacuucaccaucagcgugaccacagagauccugccuguguccaugaccaagaccagcguggacugcaccauguacaucugcggcgauuccaccgagugcuccaaccugcugcugcaguacggcagcuucugcacccagcugaauagagcccugacagggaucgccguggaacaggacaagaacacccaagagguguucgcccaagugaagcagaucuacaagaccccuccuaucaaggacuucggcggcuucaauuucagccagauucugcccgauccuagcaagcccagcaagcggagcuucaucgaggaccugcuguucaacaaagugacacuggccgacgccggcuucaucaagcaguauggcgauugucugggcgacauugccgccagggaucugauuugcgcccagaaguuuaacggacugacagugcugccuccucugcugaccgaugagaugaucgcccaguacacaucugcccugcuggccggcacaaucacaagcggcuggacauuuggagcaggcgccgcucugcagauccccuuugcuaugcagauggccuaccgguucaacggcaucggagugacccagaaugugcuguacgagaaccagaagcugaucgccaaccaguucaacagcgccaucggcaagauccaggacagccugagcagcacagcaagcgcccugggaaagcugcaggacguggucaaccagaaugcccaggcacugaacacccuggucaagcagcuguccuccaacuucggcgccaucagcucugugcugaacgauauccugagcagacuggacaaggucgaggccgaggugcagaucgacagacugaucacaggcagacugcagagccuccagacauacgugacccagcagcugaucagagccgccgagauuagagccucugccaaucuggccgccaccaagaugucugagugugugcugggccagagcaagagaguggacuuuugcggcaagggcuaccaccugaugagcuucccucagucugccccucacggcgugguguuucugcacgugacauaugugcccgcucaagagaagaauuucaccaccgcuccagccaucugccacgacggcaaagcccacuuuccuagagaaggcguguucguguccaacggcacccauugguucgugacacagcggaacuucuacgagccccagaucaucaccaccgacaacaccuucgugucuggcaacugcgacgucgugaucggcauugugaacaauaccguguacgacccucugcagcccgagcuggacagcuucaaagaggaacuggacaaguacuuuaagaaccacacaagccccgacguggaccugggcgauaucagcggaaucaaugccagcgucgugaacauccagaaagagaucgaccggcugaacgagguggccaagaaucugaacgagagccugaucgaccugcaagaacuggggaaguacgagcaguacaucaaguggcccugguacaucuggcugggcuuuaucgccggacugauugccaucgugauggucacaaucaugcuguguugcaugaccagcugcuguagcugccugaagggcuguuguagcuguggcagcugcugcaaguucgacgaggacgauucugagcccgugcugaagggcgugaaacugcacuacacaugaggacuaguuauaagacugacuagcccgaugggccucccaacgggcccuccuccccuccuugcaccgagagaucucaaaggcucuuuucagagccaccaaaaaaaaaaaaaaaaaaaaaaaaaaaaaaaaaaaaaaaaaaaaaaaaaaaaaaaaaaaaaaaaaaaaaaaaaaaaaaaaaaaaaaaaaaaaaaaaaaaaa

SEQ ID NO: 24607 - RNA, 4035 nt, Artificial Sequence
  SARS-CoV-2/Wuhan/WIV05/2019__EPI_ISL_402128 spike protein mRNA gc mod (1-1273)(D614G_I692V)
aggagaaagcuuaccauguucguguuccuggugcugcugccucugguguccagccagugugugaaccugaccaccagaacacagcugccuccagccuacaccaacagcuuuaccagaggcguguacuaccccgacaagguguucagauccagcgugcugcacucuacccaggaccuguuccugccuuucuucagcaacgugaccugguuccacgccauccacguguccggcaccaauggcaccaagagauucgacaaccccgugcugcccuucaacgacgggguguacuuugccagcaccgagaaguccaacaucaucagaggcuggaucuucggcaccacacuggacagcaagacccagagccugcugaucgugaacaacgccaccaacguggucaucaaagugugcgaguuccaguucugcaacgaccccuuccugggcgucuacuaccacaagaacaacaagagcuggauggaaagcgaguuccggguguacagcagcgccaacaacugcaccuucgaguacgugucccagccuuuccugauggaccuggaaggcaagcagggcaacuucaagaaccugcgcgaguucguguuuaagaacaucgacggcuacuucaagaucuacagcaagcacaccccuaucaaccucgugcgggaucugccucagggcuucucugcucuggaaccccugguggaucugcccaucggcaucaacaucacccgguuucagacacugcuggcccugcacagaagcuaccugacaccuggcgauagcagcagcggauggacagcuggugccgccgcuuacuaugugggcuaccugcagccuagaaccuuccugcugaaguacaacgagaacggcaccaucaccgacgccguggauugugcucuggauccucugagcgagacaaagugcacccugaaguccuucaccguggaaaagggcaucuaccagaccagcaacuuccgggugcagcccaccgaauccaucgugcgguuccccaauaucaccaaucugugccccuucggcgagguguucaaugccaccagauucgccucuguguacgccuggaaccggaagcggaucagcaauugcguggccgacuacuccgugcuguacaacuccgccagcuucagcaccuucaagugcuacggcguguccccuaccaagcugaacgaccugugcuucacaaacguguacgccgacagcuucgugauccggggagaugaagugcggcagauugccccuggacagacaggcaagaucgccgacuacaacuacaagcugcccgacgacuucaccggcugugugauugccuggaacagcaacaaccuggacuccaaagucggcggcaacuacaauuaccuguaccggcuguuccggaaguccaaucugaagcccuucgagcgggacaucuccaccgagaucuaucaggccggcagcaccccuuguaacggcguggaaggcuucaacugcuacuucccacugcaguccuacggcuuucagcccacaaauggcgugggcuaucagcccuacagagugguggugcugagcuucgaacugcugcaugccccugccacagugugcggcccuaagaaaagcaccaaucucgugaagaacaaaugcgugaacuucaacuucaacggccugaccggcaccggcgugcugacagagagcaacaagaaguuccugccauuccagcaguuuggccgggauaucgccgauaccacagacgccguuagagauccccagacacuggaaauccuggacaucaccccuugcagcuucggcggagugucugugaucaccccuggcaccaacaccagcaaucagguggcagugcuguaccagggcgugaacuguaccgaagugcccguggccauucacgccgaucagcugacaccuacauggcggguguacuccaccggcagcaauguguuucagaccagagccggcugucugaucggagccgagcacgugaacaauagcuacgagugcgacauccccaucggcgcuggaaucugcgccagcuaccagacacagacaaacagcccucggagagccagaagcguggccagccagagcgugauugccuacacaaugucucugggcgccgagaacagcguggccuacuccaacaacucuaucgcuauccccaccaacuucaccaucagcgugaccacagagauccugccuguguccaugaccaagaccagcguggacugcaccauguacaucugcggcgauuccaccgagugcuccaaccugcugcugcaguacggcagcuucugcacccagcugaauagagcccugacagggaucgccguggaacaggacaagaacacccaagagguguucgcccaagugaagcagaucuacaagaccccuccuaucaaggacuucggcggcuucaauuucagccagauucugcccgauccuagcaagcccagcaagcggagcuucaucgaggaccugcuguucaacaaagugacacuggccgacgccggcuucaucaagcaguauggcgauugucugggcgacauugccgccagggaucugauuugcgcccagaaguuuaacggacugacagugcugccuccucugcugaccgaugagaugaucgcccaguacacaucugcccugcuggccggcacaaucacaagcggcuggacauuuggagcaggcgccgcucugcagauccccuuugcuaugcagauggccuaccgguucaacggcaucggagugacccagaaugugcuguacgagaaccagaagcugaucgccaaccaguucaacagcgccaucggcaagauccaggacagccugagcagcacagcaagcgcccugggaaagcugcaggacguggucaaccagaaugcccaggcacugaacacccuggucaagcagcuguccuccaacuucggcgccaucagcucugugcugaacgauauccugagcagacuggacaaggucgaggccgaggugcagaucgacagacugaucacaggcagacugcagagccuccagacauacgugacccagcagcugaucagagccgccgagauuagagccucugccaaucuggccgccaccaagaugucugagugugugcugggccagagcaagagaguggacuuuugcggcaagggcuaccaccugaugagcuucccucagucugccccucacggcgugguguuucugcacgugacauaugugcccgcucaagagaagaauuucaccaccgcuccagccaucugccacgacggcaaagcccacuuuccuagagaaggcguguucguguccaacggcacccauugguucgugacacagcggaacuucuacgagccccagaucaucaccaccgacaacaccuucgugucuggcaacugcgacgucgugaucggcauugugaacaauaccguguacgacccucugcagcccgagcuggacagcuucaaagaggaacuggacaaguacuuuaagaaccacacaagccccgacguggaccugggcgauaucagcggaaucaaugccagcgucgugaacauccagaaagagaucgaccggcugaacgagguggccaagaaucugaacgagagccugaucgaccugcaagaacuggggaaguacgagcaguacaucaaguggcccugguacaucuggcugggcuuuaucgccggacugauugccaucgugauggucacaaucaugcuguguugcaugaccagcugcuguagcugccugaagggcuguuguagcuguggcagcugcugcaaguucgacgaggacgauucugagcccgugcugaagggcgugaaacugcacuacacaugaggacuaguuauaagacugacuagcccgaugggccucccaacgggcccuccuccccuccuugcaccgagagaucucaaaggcucuuuucagagccaccaaaaaaaaaaaaaaaaaaaaaaaaaaaaaaaaaaaaaaaaaaaaaaaaaaaaaaaaaaaaaaaaaaaaaaaaaaaaaaaaaaaaaaaaaaaaaaaaaaaaa

SEQ ID NO: 24608 - RNA, 4035 nt, Artificial Sequence
  SARS-CoV-2/Wuhan/WIV05/2019__EPI_ISL_402128 spike protein mRNA gc mod (1-1273)(D614G_M1229I)
aggagaaagcuuaccauguucguguuccuggugcugcugccucugguguccagccagugugugaaccugaccaccagaacacagcugccuccagccuacaccaacagcuuuaccagaggcguguacuaccccgacaagguguucagauccagcgugcugcacucuacccaggaccuguuccugccuuucuucagcaacgugaccugguuccacgccauccacguguccggcaccaauggcaccaagagauucgacaaccccgugcugcccuucaacgacgggguguacuuugccagcaccgagaaguccaacaucaucagaggcuggaucuucggcaccacacuggacagcaagacccagagccugcugaucgugaacaacgccaccaacguggucaucaaagugugcgaguuccaguucugcaacgaccccuuccugggcgucuacuaccacaagaacaacaagagcuggauggaaagcgaguuccggguguacagcagcgccaacaacugcaccuucgaguacgugucccagccuuuccugauggaccuggaaggcaagcagggcaacuucaagaaccugcgcgaguucguguuuaagaacaucgacggcuacuucaagaucuacagcaagcacaccccuaucaaccucgugcgggaucugccucagggcuucucugcucuggaaccccugguggaucugcccaucggcaucaacaucacccgguuucagacacugcuggcccugcacagaagcuaccugacaccuggcgauagcagcagcggauggacagcuggugccgccgcuuacuaugugggcuaccugcagccuagaaccuuccugcugaaguacaacgagaacggcaccaucaccgacgccguggauugugcucuggauccucugagcgagacaaagugcacccugaaguccuucaccguggaaaagggcaucuaccagaccagcaacuuccgggugcagcccaccgaauccaucgugcgguuccccaauaucaccaaucugugccccuucggcgagguguucaaugccaccagauucgccucuguguacgccuggaaccggaagcggaucagcaauugcguggccgacuacuccgugcuguacaacuccgccagcuucagcaccuucaagugcuacggcguguccccuaccaagcugaacgaccugugcuucacaaacguguacgccgacagcuucgugauccggggagaugaagugcggcagauugccccuggacagacaggcaagaucgccgacuacaacuacaagcugcccgacgacuucaccggcugugugauugccuggaacagcaacaaccuggacuccaaagucggcggcaacuacaauuaccuguaccggcuguuccggaaguccaaucugaagcccuucgagcgggacaucuccaccgagaucuaucaggccggcagcaccccuuguaacggcguggaaggcuucaacugcuacuucccacugcaguccuacggcuuucagcccacaaauggcgugggcuaucagcccuacagagugguggugcugagcuucgaacugcugcaugccccugccacagugugcggcccuaagaaaagcaccaaucucgugaagaacaaaugcgugaacuucaacuucaacggccugaccggcaccggcgugcugacagagagcaacaagaaguuccugccauuccagcaguuuggccgggauaucgccgauaccacagacgccguuagagauccccagacacuggaaauccuggacaucaccccuugcagcuucggcggagugucugugaucaccccuggcaccaacaccagcaaucagguggcagugcuguaccagggcgugaacuguaccgaagugcccguggccauucacgccgaucagcugacaccuacauggcggguguacuccaccggcagcaauguguuucagaccagagccggcugucugaucggagccgagcacgugaacaauagcuacgagugcgacauccccaucggcgcuggaaucugcgccagcuaccagacacagacaaacagcccucggagagccagaagcguggccagccagagcaucauugccuacacaaugucucugggcgccgagaacagcguggccuacuccaacaacucuaucgcuauccccaccaacuucaccaucagcgugaccacagagauccugccuguguccaugaccaagaccagcguggacugcaccauguacaucugcggcgauuccaccgagugcuccaaccugcugcugcaguacggcagcuucugcacccagcugaauagagcccugacagggaucgccguggaacaggacaagaacacccaagagguguucgcccaagugaagcagaucuacaagaccccuccuaucaaggacuucggcggcuucaauuucagccagauucugcccgauccuagcaagcccagcaagcggagcuucaucgaggaccugcuguucaacaaagugacacuggccgacgccggcuucaucaagcaguauggcgauugucugggcgacauugccgccagggaucugauuugcgcccagaaguuuaacggacugacagugcugccuccucugcugaccgaugagaugaucgcccaguacacaucugcccugcuggccggcacaaucacaagcggcuggacauuuggagcaggcgccgcucugcagauccccuuugcuaugcagauggccuaccgguucaacggcaucggagugacccagaaugugcuguacgagaaccagaagcugaucgccaaccaguucaacagcgccaucggcaagauccaggacagccugagcagcacagcaagcgcccugggaaagcugcaggacguggucaaccagaaugcccaggcacugaacacccuggucaagcagcuguccuccaacuucggcgccaucagcucugugcugaacgauauccugagcagacuggacaaggucgaggccgaggugcagaucgacagacugaucacaggcagacugcagagccuccagacauacgugacccagcagcugaucagagccgccgagauuagagccucugccaaucuggccgccaccaagaugucugagugugugcugggccagagcaagagaguggacuuuugcggcaagggcuaccaccugaugagcuucccucagucugccccucacggcgugguguuucugcacgugacauaugugcccgcucaagagaagaauuucaccaccgcuccagccaucugccacgacggcaaagcccacuuuccuagagaaggcguguucguguccaacggcacccauugguucgugacacagcggaacuucuacgagccccagaucaucaccaccgacaacaccuucgugucuggcaacugcgacgucgugaucggcauugugaacaauaccguguacgacccucugcagcccgagcuggacagcuucaaagaggaacuggacaaguacuuuaagaaccacacaagccccgacguggaccugggcgauaucagcggaaucaaugccagcgucgugaacauccagaaagagaucgaccggcugaacgagguggccaagaaucugaacgagagccugaucgaccugcaagaacuggggaaguacgagcaguacaucaaguggcccugguacaucuggcugggcuuuaucgccggacugauugccaucgugaucgucacaaucaugcuguguugcaugaccagcugcuguagcugccugaagggcuguuguagcuguggcagcugcugcaaguucgacgaggacgauucugagcccgugcugaagggcgugaaacugcacuacacaugaggacuaguuauaagacugacuagcccgaugggccucccaacgggcccuccuccccuccuugcaccgagagaucucaaaggcucuuuucagagccaccaaaaaaaaaaaaaaaaaaaaaaaaaaaaaaaaaaaaaaaaaaaaaaaaaaaaaaaaaaaaaaaaaaaaaaaaaaaaaaaaaaaaaaaaaaaaaaaaaaaaa

SEQ ID NO: 24609 - RNA, 4029 nt, Artificial Sequence
  SARS-CoV-2/Wuhan/WIV05/2019__EPI_ISL_402128 spike protein mRNA gc mod (1-1273)(H69del_V70del_A222V_Y453F_S477N_D614G_I692V)
aggagaaagcuuaccauguucguguuccuggugcugcugccucugguguccagccagugugugaaccugaccaccagaacacagcugccuccagccuacaccaacagcuuuaccagaggcguguacuaccccgacaagguguucagauccagcgugcugcacucuacccaggaccuguuccugccuuucuucagcaacgugaccugguuccacgccaucuccggcaccaauggcaccaagagauucgacaaccccgugcugcccuucaacgacgggguguacuuugccagcaccgagaaguccaacaucaucagaggcuggaucuucggcaccacacuggacagcaagacccagagccugcugaucgugaacaacgccaccaacguggucaucaaagugugcgaguuccaguucugcaacgaccccuuccugggcgucuacuaccacaagaacaacaagagcuggauggaaagcgaguuccggguguacagcagcgccaacaacugcaccuucgaguacgugucccagccuuuccugauggaccuggaaggcaagcagggcaacuucaagaaccugcgcgaguucguguuuaagaacaucgacggcuacuucaagaucuacagcaagcacaccccuaucaaccucgugcgggaucugccucagggcuucucugugcuggaaccccugguggaucugcccaucggcaucaacaucacccgguuucagacacugcuggcccugcacagaagcuaccugacaccuggcgauagcagcagcggauggacagcuggugccgccgcuuacuaugugggcuaccugcagccuagaaccuuccugcugaaguacaacgagaacggcaccaucaccgacgccguggauugugcucuggauccucugagcgagacaaagugcacccugaaguccuucaccguggaaaagggcaucuaccagaccagcaacuuccgggugcagcccaccgaauccaucgugcgguuccccaauaucaccaaucugugccccuucggcgagguguucaaugccaccagauucgccucuguguacgccuggaaccggaagcggaucagcaauugcguggccgacuacuccgugcuguacaacuccgccagcuucagcaccuucaagugcuacggcguguccccuaccaagcugaacgaccugugcuucacaaacguguacgccgacagcuucgugauccggggagaugaagugcggcagauugccccuggacagacaggcaagaucgccgacuacaacuacaagcugcccgacgacuucaccggcugugugauugccuggaacagcaacaaccuggacuccaaagucggcggcaacuacaauuaccuguuccggcuguuccggaaguccaaucugaagcccuucgagcgggacaucuccaccgagaucuaucaggccggcaacaccccuuguaacggcguggaaggcuucaacugcuacuucccacugcaguccuacggcuuucagcccacaaauggcgugggcuaucagcccuacagagugguggugcugagcuucgaacugcugcaugccccugccacagugugcggcccuaagaaaagcaccaaucucgugaagaacaaaugcgugaacuucaacuucaacggccugaccggcaccggcgugcugacagagagcaacaagaaguuccugccauuccagcaguuuggccgggauaucgccgauaccacagacgccguuagagauccccagacacuggaaauccuggacaucaccccuugcagcuucggcggagugucugugaucaccccuggcaccaacaccagcaaucagguggcagugcuguaccagggcgugaacuguaccgaagugcccguggccauucacgccgaucagcugacaccuacauggcggguguacuccaccggcagcaauguguuucagaccagagccggcugucugaucggagccgagcacgugaacaauagcuacgagugcgacauccccaucggcgcuggaaucugcgccagcuaccagacacagacaaacagcccucggagagccagaagcguggccagccagagcgugauugccuacacaaugucucugggcgccgagaacagcguggccuacuccaacaacucuaucgcuauccccaccaacuucaccaucagcgugaccacagagauccugccuguguccaugaccaagaccagcguggacugcaccauguacaucugcggcgauuccaccgagugcuccaaccugcugcugcaguacggcagcuucugcacccagcugaauagagcccugacagggaucgccguggaacaggacaagaacacccaagagguguucgcccaagugaagcagaucuacaagaccccuccuaucaaggacuucggcggcuucaauuucagccagauucugcccgauccuagcaagcccagcaagcggagcuucaucgaggaccugcuguucaacaaagugacacuggccgacgccggcuucaucaagcaguauggcgauugucugggcgacauugccgccagggaucugauuugcgcccagaaguuuaacggacugacagugcugccuccucugcugaccgaugagaugaucgcccaguacacaucugcccugcuggccggcacaaucacaagcggcuggacauuuggagcaggcgccgcucugcagauccccuuugcuaugcagauggccuaccgguucaacggcaucggagugacccagaaugugcuguacgagaaccagaagcugaucgccaaccaguucaacagcgccaucggcaagauccaggacagccugagcagcacagcaagcgcccugggaaagcugcaggacguggucaaccagaaugcccaggcacugaacacccuggucaagcagcuguccuccaacuucggcgccaucagcucugugcugaacgauauccugagcagacuggacaaggucgaggccgaggugcagaucgacagacugaucacaggcagacugcagagccuccagacauacgugacccagcagcugaucagagccgccgagauuagagccucugccaaucuggccgccaccaagaugucugagugugugcugggccagagcaagagaguggacuuuugcggcaagggcuaccaccugaugagcuucccucagucugccccucacggcgugguguuucugcacgugacauaugugcccgcucaagagaagaauuucaccaccgcuccagccaucugccacgacggcaaagcccacuuuccuagagaaggcguguucguguccaacggcacccauugguucgugacacagcggaacuucuacgagccccagaucaucaccaccgacaacaccuucgugucuggcaacugcgacgucgugaucggcauugugaacaauaccguguacgacccucugcagcccgagcuggacagcuucaaagaggaacuggacaaguacuuuaagaaccacacaagccccgacguggaccugggcgauaucagcggaaucaaugccagcgucgugaacauccagaaagagaucgaccggcugaacgagguggccaagaaucugaacgagagccugaucgaccugcaagaacuggggaaguacgagcaguacaucaaguggcccugguacaucuggcugggcuuuaucgccggacugauugccaucgugauggucacaaucaugcuguguugcaugaccagcugcuguagcugccugaagggcuguuguagcuguggcagcugcugcaaguucgacgaggacgauucugagcccgugcugaagggcgugaaacugcacuacacaugaggacuaguuauaagacugacuagcccgaugggccucccaacgggcccuccuccccuccuugcaccgagagaucucaaaggcucuuuucagagccaccaaaaaaaaaaaaaaaaaaaaaaaaaaaaaaaaaaaaaaaaaaaaaaaaaaaaaaaaaaaaaaaaaaaaaaaaaaaaaaaaaaaaaaaaaaaaaaaaaaaaa

SEQ ID NO: 24610 - RNA, 4029 nt, Artificial Sequence
  SARS-CoV-2/Wuhan/WIV05/2019__EPI_ISL_402128 spike protein mRNA gc mod (1-1273)(H69del_V70del_Y453F_D614G_I692V_M1229I)
aggagaaagcuuaccauguucguguuccuggugcugcugccucugguguccagccagugugugaaccugaccaccagaacacagcugccuccagccuacaccaacagcuuuaccagaggcguguacuaccccgacaagguguucagauccagcgugcugcacucuacccaggaccuguuccugccuuucuucagcaacgugaccugguuccacgccaucuccggcaccaauggcaccaagagauucgacaaccccgugcugcccuucaacgacgggguguacuuugccagcaccgagaaguccaacaucaucagaggcuggaucuucggcaccacacuggacagcaagacccagagccugcugaucgugaacaacgccaccaacguggucaucaaagugugcgaguuccaguucugcaacgaccccuuccugggcgucuacuaccacaagaacaacaagagcuggauggaaagcgaguuccggguguacagcagcgccaacaacugcaccuucgaguacgugucccagccuuuccugauggaccuggaaggcaagcagggcaacuucaagaaccugcgcgaguucguguuuaagaacaucgacggcuacuucaagaucuacagcaagcacaccccuaucaaccucgugcgggaucugccucagggcuucucugcucuggaaccccugguggaucugcccaucggcaucaacaucacccgguuucagacacugcuggcccugcacagaagcuaccugacaccuggcgauagcagcagcggauggacagcuggugccgccgcuuacuaugugggcuaccugcagccuagaaccuuccugcugaaguacaacgagaacggcaccaucaccgacgccguggauugugcucuggauccucugagcgagacaaagugcacccugaaguccuucaccguggaaaagggcaucuaccagaccagcaacuuccgggugcagcccaccgaauccaucgugcgguuccccaauaucaccaaucugugccccuucggcgagguguucaaugccaccagauucgccucuguguacgccuggaaccggaagcggaucagcaauugcguggccgacuacuccgugcuguacaacuccgccagcuucagcaccuucaagugcuacggcguguccccuaccaagcugaacgaccugugcuucacaaacguguacgccgacagcuucgugauccggggagaugaagugcggcagauugccccuggacagacaggcaagaucgccgacuacaacuacaagcugcccgacgacuucaccggcugugugauugccuggaacagcaacaaccuggacuccaaagucggcggcaacuacaauuaccuguuccggcuguuccggaaguccaaucugaagcccuucgagcgggacaucuccaccgagaucuaucaggccggcagcaccccuuguaacggcguggaaggcuucaacugcuacuucccacugcaguccuacggcuuucagcccacaaauggcgugggcuaucagcccuacagagugguggugcugagcuucgaacugcugcaugccccugccacagugugcggcccuaagaaaagcaccaaucucgugaagaacaaaugcgugaacuucaacuucaacggccugaccggcaccggcgugcugacagagagcaacaagaaguuccugccauuccagcaguuuggccgggauaucgccgauaccacagacgccguuagagauccccagacacuggaaauccuggacaucaccccuugcagcuucggcggagugucugugaucaccccuggcaccaacaccagcaaucagguggcagugcuguaccagggcgugaacuguaccgaagugcccguggccauucacgccgaucagcugacaccuacauggcggguguacuccaccggcagcaauguguuucagaccagagccggcugucugaucggagccgagcacgugaacaauagcuacgagugcgacauccccaucggcgcuggaaucugcgccagcuaccagacacagacaaacagcccucggagagccagaagcguggccagccagagcgugauugccuacacaaugucucugggcgccgagaacagcguggccuacuccaacaacucuaucgcuauccccaccaacuucaccaucagcgugaccacagagauccugccuguguccaugaccaagaccagcguggacugcaccauguacaucugcggcgauuccaccgagugcuccaaccugcugcugcaguacggcagcuucugcacccagcugaauagagcccugacagggaucgccguggaacaggacaagaacacccaagagguguucgcccaagugaagcagaucuacaagaccccuccuaucaaggacuucggcggcuucaauuucagccagauucugcccgauccuagcaagcccagcaagcggagcuucaucgaggaccugcuguucaacaaagugacacuggccgacgccggcuucaucaagcaguauggcgauugucugggcgacauugccgccagggaucugauuugcgcccagaaguuuaacggacugacagugcugccuccucugcugaccgaugagaugaucgcccaguacacaucugcccugcuggccggcacaaucacaagcggcuggacauuuggagcaggcgccgcucugcagauccccuuugcuaugcagauggccuaccgguucaacggcaucggagugacccagaaugugcuguacgagaaccagaagcugaucgccaaccaguucaacagcgccaucggcaagauccaggacagccugagcagcacagcaagcgcccugggaaagcugcaggacguggucaaccagaaugcccaggcacugaacacccuggucaagcagcuguccuccaacuucggcgccaucagcucugugcugaacgauauccugagcagacuggacaaggucgaggccgaggugcagaucgacagacugaucacaggcagacugcagagccuccagacauacgugacccagcagcugaucagagccgccgagauuagagccucugccaaucuggccgccaccaagaugucugagugugugcugggccagagcaagagaguggacuuuugcggcaagggcuaccaccugaugagcuucccucagucugccccucacggcgugguguuucugcacgugacauaugugcccgcucaagagaagaauuucaccaccgcuccagccaucugccacgacggcaaagcccacuuuccuagagaaggcguguucguguccaacggcacccauugguucgugacacagcggaacuucuacgagccccagaucaucaccaccgacaacaccuucgugucuggcaacugcgacgucgugaucggcauugugaacaauaccguguacgacccucugcagcccgagcuggacagcuucaaagaggaacuggacaaguacuuuaagaaccacacaagccccgacguggaccugggcgauaucagcggaaucaaugccagcgucgugaacauccagaaagagaucgaccggcugaacgagguggccaagaaucugaacgagagccugaucgaccugcaagaacuggggaaguacgagcaguacaucaaguggcccugguacaucuggcugggcuuuaucgccggacugauugccaucgugaucgucacaaucaugcuguguugcaugaccagcugcuguagcugccugaagggcuguuguagcuguggcagcugcugcaaguucgacgaggacgauucugagcccgugcugaagggcgugaaacugcacuacacaugaggacuaguuauaagacugacuagcccgaugggccucccaacgggcccuccuccccuccuugcaccgagagaucucaaaggcucuuuucagagccaccaaaaaaaaaaaaaaaaaaaaaaaaaaaaaaaaaaaaaaaaaaaaaaaaaaaaaaaaaaaaaaaaaaaaaaaaaaaaaaaaaaaaaaaaaaaaaaaaaaaaa

SEQ ID NO: 24611 - RNA, 4026 nt, Artificial Sequence
  SARS-CoV-2/Wuhan/WIV05/2019__EPI_ISL_402128 spike protein mRNA gc mod (1-1273)(H69del_V70del_Y144del_N501Y_A570D_D614G_P681H_T716I_S982 A_D1118H)
aggagaaagcuuaccauguucguguuccuggugcugcugccucugguguccagccagugugugaaccugaccaccagaacacagcugccuccagccuacaccaacagcuuuaccagaggcguguacuaccccgacaagguguucagauccagcgugcugcacucuacccaggaccuguuccugccuuucuucagcaacgugaccugguuccacgccaucuccggcaccaauggcaccaagagauucgacaaccccgugcugcccuucaacgacgggguguacuuugccagcaccgagaaguccaacaucaucagaggcuggaucuucggcaccacacuggacagcaagacccagagccugcugaucgugaacaacgccaccaacguggucaucaaagugugcgaguuccaguucugcaacgaccccuuccugggcgucuaccacaagaacaacaagagcuggauggaaagcgaguuccggguguacagcagcgccaacaacugcaccuucgaguacgugucccagccuuuccugauggaccuggaaggcaagcagggcaacuucaagaaccugcgcgaguucguguuuaagaacaucgacggcuacuucaagaucuacagcaagcacaccccuaucaaccucgugcgggaucugccucagggcuucucugcucuggaaccccugguggaucugcccaucggcaucaacaucacccgguuucagacacugcuggcccugcacagaagcuaccugacaccuggcgauagcagcagcggauggacagcuggugccgccgcuuacuaugugggcuaccugcagccuagaaccuuccugcugaaguacaacgagaacggcaccaucaccgacgccguggauugugcucuggauccucugagcgagacaaagugcacccugaaguccuucaccguggaaaagggcaucuaccagaccagcaacuuccgggugcagcccaccgaauccaucgugcgguuccccaauaucaccaaucugugccccuucggcgagguguucaaugccaccagauucgccucuguguacgccuggaaccggaagcggaucagcaauugcguggccgacuacuccgugcuguacaacuccgccagcuucagcaccuucaagugcuacggcguguccccuaccaagcugaacgaccugugcuucacaaacguguacgccgacagcuucgugauccggggagaugaagugcggcagauugccccuggacagacaggcaagaucgccgacuacaacuacaagcugcccgacgacuucaccggcugugugauugccuggaacagcaacaaccuggacuccaaagucggcggcaacuacaauuaccuguaccggcuguuccggaaguccaaucugaagcccuucgagcgggacaucuccaccgagaucuaucaggccggcagcaccccuuguaacggcguggaaggcuucaacugcuacuucccacugcaguccuacggcuuucagcccacauacggcgugggcuaucagcccuacagagugguggugcugagcuucgaacugcugcaugccccugccacagugugcggcccuaagaaaagcaccaaucucgugaagaacaaaugcgugaacuucaacuucaacggccugaccggcaccggcgugcugacagagagcaacaagaaguuccugccauuccagcaguuuggccgggauaucgacgauaccacagacgccguuagagauccccagacacuggaaauccuggacaucaccccuugcagcuucggcggagugucugugaucaccccuggcaccaacaccagcaaucagguggcagugcuguaccagggcgugaacuguaccgaagugcccguggccauucacgccgaucagcugacaccuacauggcggguguacuccaccggcagcaauguguuucagaccagagccggcugucugaucggagccgagcacgugaacaauagcuacgagugcgacauccccaucggcgcuggaaucugcgccagcuaccagacacagacaaacagccaccggagagccagaagcguggccagccagagcaucauugccuacacaaugucucugggcgccgagaacagcguggccuacuccaacaacucuaucgcuauccccaucaacuucaccaucagcgugaccacagagauccugccuguguccaugaccaagaccagcguggacugcaccauguacaucugcggcgauuccaccgagugcuccaaccugcugcugcaguacggcagcuucugcacccagcugaauagagcccugacagggaucgccguggaacaggacaagaacacccaagagguguucgcccaagugaagcagaucuacaagaccccuccuaucaaggacuucggcggcuucaauuucagccagauucugcccgauccuagcaagcccagcaagcggagcuucaucgaggaccugcuguucaacaaagugacacuggccgacgccggcuucaucaagcaguauggcgauugucugggcgacauugccgccagggaucugauuugcgcccagaaguuuaacggacugacagugcugccuccucugcugaccgaugagaugaucgcccaguacacaucugcccugcuggccggcacaaucacaagcggcuggacauuuggagcaggcgccgcucugcagauccccuuugcuaugcagauggccuaccgguucaacggcaucggagugacccagaaugugcuguacgagaaccagaagcugaucgccaaccaguucaacagcgccaucggcaagauccaggacagccugagcagcacagcaagcgcccugggaaagcugcaggacguggucaaccagaaugcccaggcacugaacacccuggucaagcagcuguccuccaacuucggcgccaucagcucugugcugaacgauauccuggccagacuggacaaggucgaggccgaggugcagaucgacagacugaucacaggcagacugcagagccuccagacauacgugacccagcagcugaucagagccgccgagauuagagccucugccaaucuggccgccaccaagaugucugagugugugcugggccagagcaagagaguggacuuuugcggcaagggcuaccaccugaugagcuucccucagucugccccucacggcgugguguuucugcacgugacauaugugcccgcucaagagaagaauuucaccaccgcuccagccaucugccacgacggcaaagcccacuuuccuagagaaggcguguucguguccaacggcacccauugguucgugacacagcggaacuucuacgagccccagaucaucaccacccacaacaccuucgugucuggcaacugcgacgucgugaucggcauugugaacaauaccguguacgacccucugcagcccgagcuggacagcuucaaagaggaacuggacaaguacuuuaagaaccacacaagccccgacguggaccugggcgauaucagcggaaucaaugccagcgucgugaacauccagaaagagaucgaccggcugaacgagguggccaagaaucugaacgagagccugaucgaccugcaagaacuggggaaguacgagcaguacaucaaguggcccugguacaucuggcugggcuuuaucgccggacugauugccaucgugauggucacaaucaugcuguguugcaugaccagcugcuguagcugccugaagggcuguuguagcuguggcagcugcugcaaguucgacgaggacgauucugagcccgugcugaagggcgugaaacugcacuacacaugaggacuaguuauaagacugacuagcccgaugggccucccaacgggcccuccuccccuccuugcaccgagagaucucaaaggcucuuuucagagccaccaaaaaaaaaaaaaaaaaaaaaaaaaaaaaaaaaaaaaaaaaaaaaaaaaaaaaaaaaaaaaaaaaaaaaaaaaaaaaaaaaaaaaaaaaaaaaaaaaaaaa

SEQ ID NO: 24612 - RNA, 4035 nt, Artificial Sequence
  SARS-CoV-2/Wuhan/WIV05/2019__EPI_ISL_402128 spike protein mRNA gc mod (1-1273)(K417N_E484K_N501Y_D614G)
aggagaaagcuuaccauguucguguuccuggugcugcugccucugguguccagccagugugugaaccugaccaccagaacacagcugccuccagccuacaccaacagcuuuaccagaggcguguacuaccccgacaagguguucagauccagcgugcugcacucuacccaggaccuguuccugccuuucuucagcaacgugaccugguuccacgccauccacguguccggcaccaauggcaccaagagauucgacaaccccgugcugcccuucaacgacgggguguacuuugccagcaccgagaaguccaacaucaucagaggcuggaucuucggcaccacacuggacagcaagacccagagccugcugaucgugaacaacgccaccaacguggucaucaaagugugcgaguuccaguucugcaacgaccccuuccugggcgucuacuaccacaagaacaacaagagcuggauggaaagcgaguuccggguguacagcagcgccaacaacugcaccuucgaguacgugucccagccuuuccugauggaccuggaaggcaagcagggcaacuucaagaaccugcgcgaguucguguuuaagaacaucgacggcuacuucaagaucuacagcaagcacaccccuaucaaccucgugcgggaucugccucagggcuucucugcucuggaaccccugguggaucugcccaucggcaucaacaucacccgguuucagacacugcuggcccugcacagaagcuaccugacaccuggcgauagcagcagcggauggacagcuggugccgccgcuuacuaugugggcuaccugcagccuagaaccuuccugcugaaguacaacgagaacggcaccaucaccgacgccguggauugugcucuggauccucugagcgagacaaagugcacccugaaguccuucaccguggaaaagggcaucuaccagaccagcaacuuccgggugcagcccaccgaauccaucgugcgguuccccaauaucaccaaucugugccccuucggcgagguguucaaugccaccagauucgccucuguguacgccuggaaccggaagcggaucagcaauugcguggccgacuacuccgugcuguacaacuccgccagcuucagcaccuucaagugcuacggcguguccccuaccaagcugaacgaccugugcuucacaaacguguacgccgacagcuucgugauccggggagaugaagugcggcagauugccccuggacagacaggcaacaucgccgacuacaacuacaagcugcccgacgacuucaccggcugugugauugccuggaacagcaacaaccuggacuccaaagucggcggcaacuacaauuaccuguaccggcuguuccggaaguccaaucugaagcccuucgagcgggacaucuccaccgagaucuaucaggccggcagcaccccuuguaacggcgugaagggcuucaacugcuacuucccacugcaguccuacggcuuucagcccacauacggcgugggcuaucagcccuacagagugguggugcugagcuucgaacugcugcaugccccugccacagugugcggcccuaagaaaagcaccaaucucgugaagaacaaaugcgugaacuucaacuucaacggccugaccggcaccggcgugcugacagagagcaacaagaaguuccugccauuccagcaguuuggccgggauaucgccgauaccacagacgccguuagagauccccagacacuggaaauccuggacaucaccccuugcagcuucggcggagugucugugaucaccccuggcaccaacaccagcaaucagguggcagugcuguaccagggcgugaacuguaccgaagugcccguggccauucacgccgaucagcugacaccuacauggcggguguacuccaccggcagcaauguguuucagaccagagccggcugucugaucggagccgagcacgugaacaauagcuacgagugcgacauccccaucggcgcuggaaucugcgccagcuaccagacacagacaaacagcccucggagagccagaagcguggccagccagagcaucauugccuacacaaugucucugggcgccgagaacagcguggccuacuccaacaacucuaucgcuauccccaccaacuucaccaucagcgugaccacagagauccugccuguguccaugaccaagaccagcguggacugcaccauguacaucugcggcgauuccaccgagugcuccaaccugcugcugcaguacggcagcuucugcacccagcugaauagagcccugacagggaucgccguggaacaggacaagaacacccaagagguguucgcccaagugaagcagaucuacaagaccccuccuaucaaggacuucggcggcuucaauuucagccagauucugcccgauccuagcaagcccagcaagcggagcuucaucgaggaccugcuguucaacaaagugacacuggccgacgccggcuucaucaagcaguauggcgauugucugggcgacauugccgccagggaucugauuugcgcccagaaguuuaacggacugacagugcugccuccucugcugaccgaugagaugaucgcccaguacacaucugcccugcuggccggcacaaucacaagcggcuggacauuuggagcaggcgccgcucugcagauccccuuugcuaugcagauggccuaccgguucaacggcaucggagugacccagaaugugcuguacgagaaccagaagcugaucgccaaccaguucaacagcgccaucggcaagauccaggacagccugagcagcacagcaagcgcccugggaaagcugcaggacguggucaaccagaaugcccaggcacugaacacccuggucaagcagcuguccuccaacuucggcgccaucagcucugugcugaacgauauccugagcagacuggacaaggucgaggccgaggugcagaucgacagacugaucacaggcagacugcagagccuccagacauacgugacccagcagcugaucagagccgccgagauuagagccucugccaaucuggccgccaccaagaugucugagugugugcugggccagagcaagagaguggacuuuugcggcaagggcuaccaccugaugagcuucccucagucugccccucacggcgugguguuucugcacgugacauaugugcccgcucaagagaagaauuucaccaccgcuccagccaucugccacgacggcaaagcccacuuuccuagagaaggcguguucguguccaacggcacccauugguucgugacacagcggaacuucuacgagccccagaucaucaccaccgacaacaccuucgugucuggcaacugcgacgucgugaucggcauugugaacaauaccguguacgacccucugcagcccgagcuggacagcuucaaagaggaacuggacaaguacuuuaagaaccacacaagccccgacguggaccugggcgauaucagcggaaucaaugccagcgucgugaacauccagaaagagaucgaccggcugaacgagguggccaagaaucugaacgagagccugaucgaccugcaagaacuggggaaguacgagcaguacaucaaguggcccugguacaucuggcugggcuuuaucgccggacugauugccaucgugauggucacaaucaugcuguguugcaugaccagcugcuguagcugccugaagggcuguuguagcuguggcagcugcugcaaguucgacgaggacgauucugagcccgugcugaagggcgugaaacugcacuacacaugaggacuaguuauaagacugacuagcccgaugggccucccaacgggcccuccuccccuccuugcaccgagagaucucaaaggcucuuuucagagccaccaaaaaaaaaaaaaaaaaaaaaaaaaaaaaaaaaaaaaaaaaaaaaaaaaaaaaaaaaaaaaaaaaaaaaaaaaaaaaaaaaaaaaaaaaaaaaaaaaaaaa

SEQ ID NO: 24613 - RNA, 4026 nt, Artificial Sequence
  SARS-CoV-2/Wuhan/WIV05/2019__EPI_ISL_402128 spike protein mRNA gc mod (1-1273)(L18F_D80A_D215G_L242del_A243del_L244del_R246I_K417N_E484 K_N501Y_D614G_A701V)
aggagaaagcuuaccauguucguguuccuggugcugcugccucugguguccagccagugugugaacuucaccaccagaacacagcugccuccagccuacaccaacagcuuuaccagaggcguguacuaccccgacaagguguucagauccagcgugcugcacucuacccaggaccuguuccugccuuucuucagcaacgugaccugguuccacgccauccacguguccggcaccaauggcaccaagagauucgccaaccccgugcugcccuucaacgacgggguguacuuugccagcaccgagaaguccaacaucaucagaggcuggaucuucggcaccacacuggacagcaagacccagagccugcugaucgugaacaacgccaccaacguggucaucaaagugugcgaguuccaguucugcaacgaccccuuccugggcgucuacuaccacaagaacaacaagagcuggauggaaagcgaguuccggguguacagcagcgccaacaacugcaccuucgaguacgugucccagccuuuccugauggaccuggaaggcaagcagggcaacuucaagaaccugcgcgaguucguguuuaagaacaucgacggcuacuucaagaucuacagcaagcacaccccuaucaaccucgugcggggccugccucagggcuucucugcucuggaaccccugguggaucugcccaucggcaucaacaucacccgguuucagacacugcacaucagcuaccugacaccuggcgauagcagcagcggauggacagcuggugccgccgcuuacuaugugggcuaccugcagccuagaaccuuccugcugaaguacaacgagaacggcaccaucaccgacgccguggauugugcucuggauccucugagcgagacaaagugcacccugaaguccuucaccguggaaaagggcaucuaccagaccagcaacuuccgggugcagcccaccgaauccaucgugcgguuccccaauaucaccaaucugugccccuucggcgagguguucaaugccaccagauucgccucuguguacgccuggaaccggaagcggaucagcaauugcguggccgacuacuccgugcuguacaacuccgccagcuucagcaccuucaagugcuacggcguguccccuaccaagcugaacgaccugugcuucacaaacguguacgccgacagcuucgugauccggggagaugaagugcggcagauugccccuggacagacaggcaacaucgccgacuacaacuacaagcugcccgacgacuucaccggcugugugauugccuggaacagcaacaaccuggacuccaaagucggcggcaacuacaauuaccuguaccggcuguuccggaaguccaaucugaagcccuucgagcgggacaucuccaccgagaucuaucaggccggcagcaccccuuguaacggcgugaagggcuucaacugcuacuucccacugcaguccuacggcuuucagcccacauacggcgugggcuaucagcccuacagagugguggugcugagcuucgaacugcugcaugccccugccacagugugcggcccuaagaaaagcaccaaucucgugaagaacaaaugcgugaacuucaacuucaacggccugaccggcaccggcgugcugacagagagcaacaagaaguuccugccauuccagcaguuuggccgggauaucgccgauaccacagacgccguuagagauccccagacacuggaaauccuggacaucaccccuugcagcuucggcggagugucugugaucaccccuggcaccaacaccagcaaucagguggcagugcuguaccagggcgugaacuguaccgaagugcccguggccauucacgccgaucagcugacaccuacauggcggguguacuccaccggcagcaauguguuucagaccagagccggcugucugaucggagccgagcacgugaacaauagcuacgagugcgacauccccaucggcgcuggaaucugcgccagcuaccagacacagacaaacagcccucggagagccagaagcguggccagccagagcaucauugccuacacaaugucucugggcguggagaacagcguggccuacuccaacaacucuaucgcuauccccaccaacuucaccaucagcgugaccacagagauccugccuguguccaugaccaagaccagcguggacugcaccauguacaucugcggcgauuccaccgagugcuccaaccugcugcugcaguacggcagcuucugcacccagcugaauagagcccugacagggaucgccguggaacaggacaagaacacccaagagguguucgcccaagugaagcagaucuacaagaccccuccuaucaaggacuucggcggcuucaauuucagccagauucugcccgauccuagcaagcccagcaagcggagcuucaucgaggaccugcuguucaacaaagugacacuggccgacgccggcuucaucaagcaguauggcgauugucugggcgacauugccgccagggaucugauuugcgcccagaaguuuaacggacugacagugcugccuccucugcugaccgaugagaugaucgcccaguacacaucugcccugcuggccggcacaaucacaagcggcuggacauuuggagcaggcgccgcucugcagauccccuuugcuaugcagauggccuaccgguucaacggcaucggagugacccagaaugugcuguacgagaaccagaagcugaucgccaaccaguucaacagcgccaucggcaagauccaggacagccugagcagcacagcaagcgcccugggaaagcugcaggacguggucaaccagaaugcccaggcacugaacacccuggucaagcagcuguccuccaacuucggcgccaucagcucugugcugaacgauauccugagcagacuggacaaggucgaggccgaggugcagaucgacagacugaucacaggcagacugcagagccuccagacauacgugacccagcagcugaucagagccgccgagauuagagccucugccaaucuggccgccaccaagaugucugagugugugcugggccagagcaagagaguggacuuuugcggcaagggcuaccaccugaugagcuucccucagucugccccucacggcgugguguuucugcacgugacauaugugcccgcucaagagaagaauuucaccaccgcuccagccaucugccacgacggcaaagcccacuuuccuagagaaggcguguucguguccaacggcacccauugguucgugacacagcggaacuucuacgagccccagaucaucaccaccgacaacaccuucgugucuggcaacugcgacgucgugaucggcauugugaacaauaccguguacgacccucugcagcccgagcuggacagcuucaaagaggaacuggacaaguacuuuaagaaccacacaagccccgacguggaccugggcgauaucagcggaaucaaugccagcgucgugaacauccagaaagagaucgaccggcugaacgagguggccaagaaucugaacgagagccugaucgaccugcaagaacuggggaaguacgagcaguacaucaaguggcccugguacaucuggcugggcuuuaucgccggacugauugccaucgugauggucacaaucaugcuguguugcaugaccagcugcuguagcugccugaagggcuguuguagcuguggcagcugcugcaaguucgacgaggacgauucugagcccgugcugaagggcgugaaacugcacuacacaugaggacuaguuauaagacugacuagcccgaugggccucccaacgggcccuccuccccuccuugcaccgagagaucucaaaggcucuuuucagagccaccaaaaaaaaaaaaaaaaaaaaaaaaaaaaaaaaaaaaaaaaaaaaaaaaaaaaaaaaaaaaaaaaaaaaaaaaaaaaaaaaaaaaaaaaaaaaaaaaaaaaa

SEQ ID NO: 24614 - RNA, 4035 nt, Artificial Sequence
  SARS-CoV-2/Wuhan/WIV05/2019__EPI_ISL_402128 spike protein mRNA gc mod (1-1273)(E484K_D614G)
aggagaaagcuuaccauguucguguuccuggugcugcugccucugguguccagccagugugugaaccugaccaccagaacacagcugccuccagccuacaccaacagcuuuaccagaggcguguacuaccccgacaagguguucagauccagcgugcugcacucuacccaggaccuguuccugccuuucuucagcaacgugaccugguuccacgccauccacguguccggcaccaauggcaccaagagauucgacaaccccgugcugcccuucaacgacgggguguacuuugccagcaccgagaaguccaacaucaucagaggcuggaucuucggcaccacacuggacagcaagacccagagccugcugaucgugaacaacgccaccaacguggucaucaaagugugcgaguuccaguucugcaacgaccccuuccugggcgucuacuaccacaagaacaacaagagcuggauggaaagcgaguuccggguguacagcagcgccaacaacugcaccuucgaguacgugucccagccuuuccugauggaccuggaaggcaagcagggcaacuucaagaaccugcgcgaguucguguuuaagaacaucgacggcuacuucaagaucuacagcaagcacaccccuaucaaccucgugcgggaucugccucagggcuucucugcucuggaaccccugguggaucugcccaucggcaucaacaucacccgguuucagacacugcuggcccugcacagaagcuaccugacaccuggcgauagcagcagcggauggacagcuggugccgccgcuuacuaugugggcuaccugcagccuagaaccuuccugcugaaguacaacgagaacggcaccaucaccgacgccguggauugugcucuggauccucugagcgagacaaagugcacccugaaguccuucaccguggaaaagggcaucuaccagaccagcaacuuccgggugcagcccaccgaauccaucgugcgguuccccaauaucaccaaucugugccccuucggcgagguguucaaugccaccagauucgccucuguguacgccuggaaccggaagcggaucagcaauugcguggccgacuacuccgugcuguacaacuccgccagcuucagcaccuucaagugcuacggcguguccccuaccaagcugaacgaccugugcuucacaaacguguacgccgacagcuucgugauccggggagaugaagugcggcagauugccccuggacagacaggcaagaucgccgacuacaacuacaagcugcccgacgacuucaccggcugugugauugccuggaacagcaacaaccuggacuccaaagucggcggcaacuacaauuaccuguaccggcuguuccggaaguccaaucugaagcccuucgagcgggacaucuccaccgagaucuaucaggccggcagcaccccuuguaacggcgugaagggcuucaacugcuacuucccacugcaguccuacggcuuucagcccacaaauggcgugggcuaucagcccuacagagugguggugcugagcuucgaacugcugcaugccccugccacagugugcggcccuaagaaaagcaccaaucucgugaagaacaaaugcgugaacuucaacuucaacggccugaccggcaccggcgugcugacagagagcaacaagaaguuccugccauuccagcaguuuggccgggauaucgccgauaccacagacgccguuagagauccccagacacuggaaauccuggacaucaccccuugcagcuucggcggagugucugugaucaccccuggcaccaacaccagcaaucagguggcagugcuguaccagggcgugaacuguaccgaagugcccguggccauucacgccgaucagcugacaccuacauggcggguguacuccaccggcagcaauguguuucagaccagagccggcugucugaucggagccgagcacgugaacaauagcuacgagugcgacauccccaucggcgcuggaaucugcgccagcuaccagacacagacaaacagcccucggagagccagaagcguggccagccagagcaucauugccuacacaaugucucugggcgccgagaacagcguggccuacuccaacaacucuaucgcuauccccaccaacuucaccaucagcgugaccacagagauccugccuguguccaugaccaagaccagcguggacugcaccauguacaucugcggcgauuccaccgagugcuccaaccugcugcugcaguacggcagcuucugcacccagcugaauagagcccugacagggaucgccguggaacaggacaagaacacccaagagguguucgcccaagugaagcagaucuacaagaccccuccuaucaaggacuucggcggcuucaauuucagccagauucugcccgauccuagcaagcccagcaagcggagcuucaucgaggaccugcuguucaacaaagugacacuggccgacgccggcuucaucaagcaguauggcgauugucugggcgacauugccgccagggaucugauuugcgcccagaaguuuaacggacugacagugcugccuccucugcugaccgaugagaugaucgcccaguacacaucugcccugcuggccggcacaaucacaagcggcuggacauuuggagcaggcgccgcucugcagauccccuuugcuaugcagauggccuaccgguucaacggcaucggagugacccagaaugugcuguacgagaaccagaagcugaucgccaaccaguucaacagcgccaucggcaagauccaggacagccugagcagcacagcaagcgcccugggaaagcugcaggacguggucaaccagaaugcccaggcacugaacacccuggucaagcagcuguccuccaacuucggcgccaucagcucugugcugaacgauauccugagcagacuggacaaggucgaggccgaggugcagaucgacagacugaucacaggcagacugcagagccuccagacauacgugacccagcagcugaucagagccgccgagauuagagccucugccaaucuggccgccaccaagaugucugagugugugcugggccagagcaagagaguggacuuuugcggcaagggcuaccaccugaugagcuucccucagucugccccucacggcgugguguuucugcacgugacauaugugcccgcucaagagaagaauuucaccaccgcuccagccaucugccacgacggcaaagcccacuuuccuagagaaggcguguucguguccaacggcacccauugguucgugacacagcggaacuucuacgagccccagaucaucaccaccgacaacaccuucgugucuggcaacugcgacgucgugaucggcauugugaacaauaccguguacgacccucugcagcccgagcuggacagcuucaaagaggaacuggacaaguacuuuaagaaccacacaagccccgacguggaccugggcgauaucagcggaaucaaugccagcgucgugaacauccagaaagagaucgaccggcugaacgagguggccaagaaucugaacgagagccugaucgaccugcaagaacuggggaaguacgagcaguacaucaaguggcccugguacaucuggcugggcuuuaucgccggacugauugccaucgugauggucacaaucaugcuguguugcaugaccagcugcuguagcugccugaagggcuguuguagcuguggcagcugcugcaaguucgacgaggacgauucugagcccgugcugaagggcgugaaacugcacuacacaugaggacuaguuauaagacugacuagcccgaugggccucccaacgggcccuccuccccuccuugcaccgagagaucucaaaggcucuuuucagagccaccaaaaaaaaaaaaaaaaaaaaaaaaaaaaaaaaaaaaaaaaaaaaaaaaaaaaaaaaaaaaaaaaaaaaaaaaaaaaaaaaaaaaaaaaaaaaaaaaaaaaa

SEQ ID NO: 24615 - RNA, 4035 nt, Artificial Sequence
  SARS-CoV-2/Wuhan/WIV05/2019__EPI_ISL_402128 spike protein mRNA gc mod (1-1273)(L18F_T20N_P26S_D138Y_R190S_K417T_E484K_N501Y_D614G_H655Y _T1027I)
aggagaaagcuuaccauguucguguuccuggugcugcugccucugguguccagccagugugugaacuucaccaacagaacacagcugccuagcgccuacaccaacagcuuuaccagaggcguguacuaccccgacaagguguucagauccagcgugcugcacucuacccaggaccuguuccugccuuucuucagcaacgugaccugguuccacgccauccacguguccggcaccaauggcaccaagagauucgacaaccccgugcugcccuucaacgacgggguguacuuugccagcaccgagaaguccaacaucaucagaggcuggaucuucggcaccacacuggacagcaagacccagagccugcugaucgugaacaacgccaccaacguggucaucaaagugugcgaguuccaguucugcaacuaccccuuccugggcgucuacuaccacaagaacaacaagagcuggauggaaagcgaguuccggguguacagcagcgccaacaacugcaccuucgaguacgugucccagccuuuccugauggaccuggaaggcaagcagggcaacuucaagaaccugagcgaguucguguuuaagaacaucgacggcuacuucaagaucuacagcaagcacaccccuaucaaccucgugcgggaucugccucagggcuucucugcucuggaaccccugguggaucugcccaucggcaucaacaucacccgguuucagacacugcuggcccugcacagaagcuaccugacaccuggcgauagcagcagcggauggacagcuggugccgccgcuuacuaugugggcuaccugcagccuagaaccuuccugcugaaguacaacgagaacggcaccaucaccgacgccguggauugugcucuggauccucugagcgagacaaagugcacccugaaguccuucaccguggaaaagggcaucuaccagaccagcaacuuccgggugcagcccaccgaauccaucgugcgguuccccaauaucaccaaucugugccccuucggcgagguguucaaugccaccagauucgccucuguguacgccuggaaccggaagcggaucagcaauugcguggccgacuacuccgugcuguacaacuccgccagcuucagcaccuucaagugcuacggcguguccccuaccaagcugaacgaccugugcuucacaaacguguacgccgacagcuucgugauccggggagaugaagugcggcagauugccccuggacagacaggcaccaucgccgacuacaacuacaagcugcccgacgacuucaccggcugugugauugccuggaacagcaacaaccuggacuccaaagucggcggcaacuacaauuaccuguaccggcuguuccggaaguccaaucugaagcccuucgagcgggacaucuccaccgagaucuaucaggccggcagcaccccuuguaacggcgugaagggcuucaacugcuacuucccacugcaguccuacggcuuucagcccacauacggcgugggcuaucagcccuacagagugguggugcugagcuucgaacugcugcaugccccugccacagugugcggcccuaagaaaagcaccaaucucgugaagaacaaaugcgugaacuucaacuucaacggccugaccggcaccggcgugcugacagagagcaacaagaaguuccugccauuccagcaguuuggccgggauaucgccgauaccacagacgccguuagagauccccagacacuggaaauccuggacaucaccccuugcagcuucggcggagugucugugaucaccccuggcaccaacaccagcaaucagguggcagugcuguaccagggcgugaacuguaccgaagugcccguggccauucacgccgaucagcugacaccuacauggcggguguacuccaccggcagcaauguguuucagaccagagccggcugucugaucggagccgaguacgugaacaauagcuacgagugcgacauccccaucggcgcuggaaucugcgccagcuaccagacacagacaaacagcccucggagagccagaagcguggccagccagagcaucauugccuacacaaugucucugggcgccgagaacagcguggccuacuccaacaacucuaucgcuauccccaccaacuucaccaucagcgugaccacagagauccugccuguguccaugaccaagaccagcguggacugcaccauguacaucugcggcgauuccaccgagugcuccaaccugcugcugcaguacggcagcuucugcacccagcugaauagagcccugacagggaucgccguggaacaggacaagaacacccaagagguguucgcccaagugaagcagaucuacaagaccccuccuaucaaggacuucggcggcuucaauuucagccagauucugcccgauccuagcaagcccagcaagcggagcuucaucgaggaccugcuguucaacaaagugacacuggccgacgccggcuucaucaagcaguauggcgauugucugggcgacauugccgccagggaucugauuugcgcccagaaguuuaacggacugacagugcugccuccucugcugaccgaugagaugaucgcccaguacacaucugcccugcuggccggcacaaucacaagcggcuggacauuuggagcaggcgccgcucugcagauccccuuugcuaugcagauggccuaccgguucaacggcaucggagugacccagaaugugcuguacgagaaccagaagcugaucgccaaccaguucaacagcgccaucggcaagauccaggacagccugagcagcacagcaagcgcccugggaaagcugcaggacguggucaaccagaaugcccaggcacugaacacccuggucaagcagcuguccuccaacuucggcgccaucagcucugugcugaacgauauccugagcagacuggacaaggucgaggccgaggugcagaucgacagacugaucacaggcagacugcagagccuccagacauacgugacccagcagcugaucagagccgccgagauuagagccucugccaaucuggccgccaucaagaugucugagugugugcugggccagagcaagagaguggacuuuugcggcaagggcuaccaccugaugagcuucccucagucugccccucacggcgugguguuucugcacgugacauaugugcccgcucaagagaagaauuucaccaccgcuccagccaucugccacgacggcaaagcccacuuuccuagagaaggcguguucguguccaacggcacccauugguucgugacacagcggaacuucuacgagccccagaucaucaccaccgacaacaccuucgugucuggcaacugcgacgucgugaucggcauugugaacaauaccguguacgacccucugcagcccgagcuggacagcuucaaagaggaacuggacaaguacuuuaagaaccacacaagccccgacguggaccugggcgauaucagcggaaucaaugccagcgucgugaacauccagaaagagaucgaccggcugaacgagguggccaagaaucugaacgagagccugaucgaccugcaagaacuggggaaguacgagcaguacaucaaguggcccugguacaucuggcugggcuuuaucgccggacugauugccaucgugauggucacaaucaugcuguguugcaugaccagcugcuguagcugccugaagggcuguuguagcuguggcagcugcugcaaguucgacgaggacgauucugagcccgugcugaagggcgugaaacugcacuacacaugaggacuaguuauaagacugacuagcccgaugggccucccaacgggcccuccuccccuccuugcaccgagagaucucaaaggcucuuuucagagccaccaaaaaaaaaaaaaaaaaaaaaaaaaaaaaaaaaaaaaaaaaaaaaaaaaaaaaaaaaaaaaaaaaaaaaaaaaaaaaaaaaaaaaaaaaaaaaaaaaaaaa

SEQ ID NO: 24616 - RNA, 4035 nt, Artificial Sequence
  SARS-CoV-2/Wuhan/WIV05/2019__EPI_ISL_402128 spike protein mRNA gc mod (1-1273)(S13I_W152C_L452R_D614G)
aggagaaagcuuaccauguucguguuccuggugcugcugccucugguguccauccagugugugaaccugaccaccagaacacagcugccuccagccuacaccaacagcuuuaccagaggcguguacuaccccgacaagguguucagauccagcgugcugcacucuacccaggaccuguuccugccuuucuucagcaacgugaccugguuccacgccauccacguguccggcaccaauggcaccaagagauucgacaaccccgugcugcccuucaacgacgggguguacuuugccagcaccgagaaguccaacaucaucagaggcuggaucuucggcaccacacuggacagcaagacccagagccugcugaucgugaacaacgccaccaacguggucaucaaagugugcgaguuccaguucugcaacgaccccuuccugggcgucuacuaccacaagaacaacaagagcugcauggaaagcgaguuccggguguacagcagcgccaacaacugcaccuucgaguacgugucccagccuuuccugauggaccuggaaggcaagcagggcaacuucaagaaccugcgcgaguucguguuuaagaacaucgacggcuacuucaagaucuacagcaagcacaccccuaucaaccucgugcgggaucugccucagggcuucucugcucuggaaccccugguggaucugcccaucggcaucaacaucacccgguuucagacacugcuggcccugcacagaagcuaccugacaccuggcgauagcagcagcggauggacagcuggugccgccgcuuacuaugugggcuaccugcagccuagaaccuuccugcugaaguacaacgagaacggcaccaucaccgacgccguggauugugcucuggauccucugagcgagacaaagugcacccugaaguccuucaccguggaaaagggcaucuaccagaccagcaacuuccgggugcagcccaccgaauccaucgugcgguuccccaauaucaccaaucugugccccuucggcgagguguucaaugccaccagauucgccucuguguacgccuggaaccggaagcggaucagcaauugcguggccgacuacuccgugcuguacaacuccgccagcuucagcaccuucaagugcuacggcguguccccuaccaagcugaacgaccugugcuucacaaacguguacgccgacagcuucgugauccggggagaugaagugcggcagauugccccuggacagacaggcaagaucgccgacuacaacuacaagcugcccgacgacuucaccggcugugugauugccuggaacagcaacaaccuggacuccaaagucggcggcaacuacaauuaccgcuaccggcuguuccggaaguccaaucugaagcccuucgagcgggacaucuccaccgagaucuaucaggccggcagcaccccuuguaacggcguggaaggcuucaacugcuacuucccacugcaguccuacggcuuucagcccacaaauggcgugggcuaucagcccuacagagugguggugcugagcuucgaacugcugcaugccccugccacagugugcggcccuaagaaaagcaccaaucucgugaagaacaaaugcgugaacuucaacuucaacggccugaccggcaccggcgugcugacagagagcaacaagaaguuccugccauuccagcaguuuggccgggauaucgccgauaccacagacgccguuagagauccccagacacuggaaauccuggacaucaccccuugcagcuucggcggagugucugugaucaccccuggcaccaacaccagcaaucagguggcagugcuguaccagggcgugaacuguaccgaagugcccguggccauucacgccgaucagcugacaccuacauggcggguguacuccaccggcagcaauguguuucagaccagagccggcugucugaucggagccgagcacgugaacaauagcuacgagugcgacauccccaucggcgcuggaaucugcgccagcuaccagacacagacaaacagcccucggagagccagaagcguggccagccagagcaucauugccuacacaaugucucugggcgccgagaacagcguggccuacuccaacaacucuaucgcuauccccaccaacuucaccaucagcgugaccacagagauccugccuguguccaugaccaagaccagcguggacugcaccauguacaucugcggcgauuccaccgagugcuccaaccugcugcugcaguacggcagcuucugcacccagcugaauagagcccugacagggaucgccguggaacaggacaagaacacccaagagguguucgcccaagugaagcagaucuacaagaccccuccuaucaaggacuucggcggcuucaauuucagccagauucugcccgauccuagcaagcccagcaagcggagcuucaucgaggaccugcuguucaacaaagugacacuggccgacgccggcuucaucaagcaguauggcgauugucugggcgacauugccgccagggaucugauuugcgcccagaaguuuaacggacugacagugcugccuccucugcugaccgaugagaugaucgcccaguacacaucugcccugcuggccggcacaaucacaagcggcuggacauuuggagcaggcgccgcucugcagauccccuuugcuaugcagauggccuaccgguucaacggcaucggagugacccagaaugugcuguacgagaaccagaagcugaucgccaaccaguucaacagcgccaucggcaagauccaggacagccugagcagcacagcaagcgcccugggaaagcugcaggacguggucaaccagaaugcccaggcacugaacacccuggucaagcagcuguccuccaacuucggcgccaucagcucugugcugaacgauauccugagcagacuggacaaggucgaggccgaggugcagaucgacagacugaucacaggcagacugcagagccuccagacauacgugacccagcagcugaucagagccgccgagauuagagccucugccaaucuggccgccaccaagaugucugagugugugcugggccagagcaagagaguggacuuuugcggcaagggcuaccaccugaugagcuucccucagucugccccucacggcgugguguuucugcacgugacauaugugcccgcucaagagaagaauuucaccaccgcuccagccaucugccacgacggcaaagcccacuuuccuagagaaggcguguucguguccaacggcacccauugguucgugacacagcggaacuucuacgagccccagaucaucaccaccgacaacaccuucgugucuggcaacugcgacgucgugaucggcauugugaacaauaccguguacgacccucugcagcccgagcuggacagcuucaaagaggaacuggacaaguacuuuaagaaccacacaagccccgacguggaccugggcgauaucagcggaaucaaugccagcgucgugaacauccagaaagagaucgaccggcugaacgagguggccaagaaucugaacgagagccugaucgaccugcaagaacuggggaaguacgagcaguacaucaaguggcccugguacaucuggcugggcuuuaucgccggacugauugccaucgugauggucacaaucaugcuguguugcaugaccagcugcuguagcugccugaagggcuguuguagcuguggcagcugcugcaaguucgacgaggacgauucugagcccgugcugaagggcgugaaacugcacuacacaugaggacuaguuauaagacugacuagcccgaugggccucccaacgggcccuccuccccuccuugcaccgagagaucucaaaggcucuuuucagagccaccaaaaaaaaaaaaaaaaaaaaaaaaaaaaaaaaaaaaaaaaaaaaaaaaaaaaaaaaaaaaaaaaaaaaaaaaaaaaaaaaaaaaaaaaaaaaaaaaaaaaa

SEQ ID NO: 24617 - RNA, 4035 nt, Artificial Sequence
  SARS-CoV-2/Wuhan/WIV05/2019__EPI_ISL_402128 spike protein mRNA gc (1-1273)(K986P_V987P)
aggagaaagcuuaccauguucguguuccugguccuccugccccuggugagcucccagugcgugaaccucaccacccgcacgcagcugccgcccgccuacaccaacagcuucacccggggcgucuacuaccccgacaagguguuccgcuccagcgugcugcacuccacccaggaccucuuccugcccuucuucagcaacgucacgugguuccacgccauccacguguccgggaccaacggcaccaagcgguucgacaacccggugcugcccuucaacgacggggucuacuucgcgagcaccgagaaguccaacaucauccgcggcuggaucuucgggacgacccucgacagcaagacccagucccugcugaucgugaacaacgccaccaacguggucaucaaggugugcgaguuccaguucugcaacgaccccuuccucggcguguacuaccacaagaacaacaagagcuggauggaguccgaguuccgggucuacagcuccgccaacaacugcacguucgaguacgugagccagcccuuccugauggaccuggagggcaagcaggggaacuucaagaaccuccgcgaguucguguucaagaacaucgacggcuacuucaagaucuacuccaagcacaccccgaucaaccugguccgggaccugccccagggguucagcgcccucgagccccugguggaccugcccaucggcaucaacaucacccgcuuccagacccuccuggcccugcaccgguccuaccucacgccgggggacagcagcuccggcuggaccgcgggcgccgccgccuacuacgugggguaccugcagccccgcaccuuccugcucaaguacaacgagaacggcaccaucacggacgcggucgacugcgcccuggacccccugagcgagaccaagugcacccucaaguccuucaccguggagaaggggaucuaccagacgagcaacuuccgggugcagcccaccgaguccaucguccgcuucccgaacaucaccaaccugugccccuucggcgagguguucaacgccacccgguucgccagcgucuacgccuggaaccgcaagcggaucuccaacugcguggcggacuacagcgugcuguacaacuccgccagcuucuccacguucaagugcuacggcgucagccccaccaagcucaacgaccugugcuucaccaacguguacgccgacuccuucgugauccgcggggacgagguccggcagaucgcccccggccagaccgggaagaucgccgacuacaacuacaagcugccggacgacuucacgggcugcgugaucgcguggaacagcaacaaccucgacuccaaggucgggggcaacuacaacuaccuguaccgccuguuccgcaagagcaaccucaagcccuucgagcgggacaucuccaccgagaucuaccaggccggcagcacccccugcaacgggguggagggcuucaacugcuacuucccccugcaguccuacggguuccagccgaccaacggcgugggguaccagcccuaccggguggucgugcugagcuucgagcuccugcacgcccccgccacggugugcggccccaagaaguccaccaaccuggucaagaacaagugcgugaacuucaacuucaacggccucaccgggaccggcgugcugaccgagagcaacaagaaguuccugccguuccagcaguucgggcgcgacaucgccgacacgaccgacgcgguccgcgacccccagacccuggagauccucgacaucacccccugcagcuucggcgggguguccgugaucacgccgggcaccaacaccagcaaccaggucgccgugcuguaccaggacgugaacugcaccgagguccccguggccauccacgccgaccagcugacgcccaccuggcggguguacuccaccggcagcaacgucuuccagacccgcgccgggugccucaucggcgcggagcacgugaacaacuccuacgagugcgacauccccaucggggccggcaucugcgccagcuaccagacgcagaccaacuccccgcggcgcgcccggagcguggcgucccagagcaucaucgccuacaccaugucccugggcgccgagaacagcgucgccuacuccaacaacagcaucgccauccccaccaacuucacgaucuccgugaccaccgagauccugcccgugagcaugaccaagacgagcgucgacugcaccauguacaucugcggggacuccaccgagugcagcaaccuccugcugcaguacggcuccuucugcacccagcucaaccgcgcgcugacggggaucgccguggagcaggacaagaacacccaggagguguucgcccaggucaagcagaucuacaagacgcccccgaucaaggacuucggcggguucaacuucagccagauccugcccgaccccuccaagcccagcaagcgguccuucaucgaggaccuccuguucaacaaggugacccuggccgacgccggcuucaucaagcaguacggcgacugccucggggacaucgcggcccgcgaccugaucugcgcccagaaguucaacggccugaccgugcucccgccccugcugaccgacgagaugaucgcccaguacaccagcgcccuccuggcggggaccaucacguccggcuggaccuucggggccggcgccgcccugcagauccccuucgcgaugcagauggccuaccgguucaacggcaucggggucacccagaacgugcucuacgagaaccagaagcugaucgccaaccaguucaacagcgccaucggcaagauccaggacucccugagcuccaccgccagcgcgcucgggaagcugcaggacguggucaaccagaacgcccaggcccugaacacgcucgugaagcagcuguccagcaacuucggcgccaucuccagcgugcugaacgacauccucucccgccuggacccgcccgaggccgaggugcagaucgaccggcugaucaccgggcgccuccagagccugcagaccuacgugacccagcagcugauccgggcggccgagauccgcgccagcgccaaccucgccgcgaccaagauguccgagugcguccugggccagagcaagcggguggacuucugcggcaagggguaccaccugauguccuucccccagagcgccccgcacggcguggucuuccuccacgugacguacguccccgcccaggagaagaacuucaccaccgcccccgcgaucugccacgacgggaaggcccacuucccccgcgagggcguguucguguccaacgggacccacugguucgucacgcagcggaacuucuacgagccgcagaucaucaccaccgacaacaccuucgugagcggcaacugcgacguggucaucggcaucgugaacaacacgguguacgacccccugcagcccgagcuggacuccuucaaggaggagcucgacaaguacuucaagaaccacaccagccccgacgucgaccugggggacaucuccggcaucaacgccagcguggugaacauccagaaggagaucgaccgccugaacgaggucgccaagaaccucaacgagucccugaucgaccugcaggagcucgggaaguacgagcaguacaucaaguggccgugguacaucuggcugggcuucaucgccggccugaucgcgaucgugauggugaccaucaugcucugcugcaugaccagcugcugcuccugccugaaggggugcugcagcugcggcuccugcugcaaguucgacgaggacgacagcgagcccguccugaagggggugaagcuccacuacacgugaggacuaguuauaagacugacuagcccgaugggccucccaacgggcccuccuccccuccuugcaccgagagaucucaaaggcucuuuucagagccaccaaaaaaaaaaaaaaaaaaaaaaaaaaaaaaaaaaaaaaaaaaaaaaaaaaaaaaaaaaaaaaaaaaaaaaaaaaaaaaaaaaaaaaaaaaaaaaaaaaaaa

SEQ ID NO: 24618 - RNA, 4035 nt, Artificial Sequence
  SARS-CoV-2/Wuhan/WIV05/2019__EPI_ISL_402128 spike protein mRNA gc (1-1273)(K986P_V987P_ D614G)
aggagaaagcuuaccauguucguguuccugguccuccugccccuggugagcucccagugcgugaaccucaccacccgcacgcagcugccgcccgccuacaccaacagcuucacccggggcgucuacuaccccgacaagguguuccgcuccagcgugcugcacuccacccaggaccucuuccugcccuucuucagcaacgucacgugguuccacgccauccacguguccgggaccaacggcaccaagcgguucgacaacccggugcugcccuucaacgacggggucuacuucgcgagcaccgagaaguccaacaucauccgcggcuggaucuucgggacgacccucgacagcaagacccagucccugcugaucgugaacaacgccaccaacguggucaucaaggugugcgaguuccaguucugcaacgaccccuuccucggcguguacuaccacaagaacaacaagagcuggauggaguccgaguuccgggucuacagcuccgccaacaacugcacguucgaguacgugagccagcccuuccugauggaccuggagggcaagcaggggaacuucaagaaccuccgcgaguucguguucaagaacaucgacggcuacuucaagaucuacuccaagcacaccccgaucaaccugguccgggaccugccccagggguucagcgcccucgagccccugguggaccugcccaucggcaucaacaucacccgcuuccagacccuccuggcccugcaccgguccuaccucacgccgggggacagcagcuccggcuggaccgcgggcgccgccgccuacuacgugggguaccugcagccccgcaccuuccugcucaaguacaacgagaacggcaccaucacggacgcggucgacugcgcccuggacccccugagcgagaccaagugcacccucaaguccuucaccguggagaaggggaucuaccagacgagcaacuuccgggugcagcccaccgaguccaucguccgcuucccgaacaucaccaaccugugccccuucggcgagguguucaacgccacccgguucgccagcgucuacgccuggaaccgcaagcggaucuccaacugcguggcggacuacagcgugcuguacaacuccgccagcuucuccacguucaagugcuacggcgucagccccaccaagcucaacgaccugugcuucaccaacguguacgccgacuccuucgugauccgcggggacgagguccggcagaucgcccccggccagaccgggaagaucgccgacuacaacuacaagcugccggacgacuucacgggcugcgugaucgcguggaacagcaacaaccucgacuccaaggucgggggcaacuacaacuaccuguaccgccuguuccgcaagagcaaccucaagcccuucgagcgggacaucuccaccgagaucuaccaggccggcagcacccccugcaacgggguggagggcuucaacugcuacuucccccugcaguccuacggguuccagccgaccaacggcgugggguaccagcccuaccggguggucgugcugagcuucgagcuccugcacgcccccgccacggugugcggccccaagaaguccaccaaccuggucaagaacaagugcgugaacuucaacuucaacggccucaccgggaccggcgugcugaccgagagcaacaagaaguuccugccguuccagcaguucgggcgcgacaucgccgacacgaccgacgcgguccgcgacccccagacccuggagauccucgacaucacccccugcagcuucggcgggguguccgugaucacgccgggcaccaacaccagcaaccaggucgccgugcuguaccagggcgugaacugcaccgagguccccguggccauccacgccgaccagcugacgcccaccuggcggguguacuccaccggcagcaacgucuuccagacccgcgccgggugccucaucggcgcggagcacgugaacaacuccuacgagugcgacauccccaucggggccggcaucugcgccagcuaccagacgcagaccaacuccccgcggcgcgcccggagcguggcgucccagagcaucaucgccuacaccaugucccugggcgccgagaacagcgucgccuacuccaacaacagcaucgccauccccaccaacuucacgaucuccgugaccaccgagauccugcccgugagcaugaccaagacgagcgucgacugcaccauguacaucugcggggacuccaccgagugcagcaaccuccugcugcaguacggcuccuucugcacccagcucaaccgcgcgcugacggggaucgccguggagcaggacaagaacacccaggagguguucgcccaggucaagcagaucuacaagacgcccccgaucaaggacuucggcggguucaacuucagccagauccugcccgaccccuccaagcccagcaagcgguccuucaucgaggaccuccuguucaacaaggugacccuggccgacgccggcuucaucaagcaguacggcgacugccucggggacaucgcggcccgcgaccugaucugcgcccagaaguucaacggccugaccgugcucccgccccugcugaccgacgagaugaucgcccaguacaccagcgcccuccuggcggggaccaucacguccggcuggaccuucggggccggcgccgcccugcagauccccuucgcgaugcagauggccuaccgguucaacggcaucggggucacccagaacgugcucuacgagaaccagaagcugaucgccaaccaguucaacagcgccaucggcaagauccaggacucccugagcuccaccgccagcgcgcucgggaagcugcaggacguggucaaccagaacgcccaggcccugaacacgcucgugaagcagcuguccagcaacuucggcgccaucuccagcgugcugaacgacauccucucccgccuggacccgcccgaggccgaggugcagaucgaccggcugaucaccgggcgccuccagagccugcagaccuacgugacccagcagcugauccgggcggccgagauccgcgccagcgccaaccucgccgcgaccaagauguccgagugcguccugggccagagcaagcggguggacuucugcggcaagggguaccaccugauguccuucccccagagcgccccgcacggcguggucuuccuccacgugacguacguccccgcccaggagaagaacuucaccaccgcccccgcgaucugccacgacgggaaggcccacuucccccgcgagggcguguucguguccaacgggacccacugguucgucacgcagcggaacuucuacgagccgcagaucaucaccaccgacaacaccuucgugagcggcaacugcgacguggucaucggcaucgugaacaacacgguguacgacccccugcagcccgagcuggacuccuucaaggaggagcucgacaaguacuucaagaaccacaccagccccgacgucgaccugggggacaucuccggcaucaacgccagcguggugaacauccagaaggagaucgaccgccugaacgaggucgccaagaaccucaacgagucccugaucgaccugcaggagcucgggaaguacgagcaguacaucaaguggccgugguacaucuggcugggcuucaucgccggccugaucgcgaucgugauggugaccaucaugcucugcugcaugaccagcugcugcuccugccugaaggggugcugcagcugcggcuccugcugcaaguucgacgaggacgacagcgagcccguccugaagggggugaagcuccacuacacgugaggacuaguuauaagacugacuagcccgaugggccucccaacgggcccuccuccccuccuugcaccgagagaucucaaaggcucuuuucagagccaccaaaaaaaaaaaaaaaaaaaaaaaaaaaaaaaaaaaaaaaaaaaaaaaaaaaaaaaaaaaaaaaaaaaaaaaaaaaaaaaaaaaaaaaaaaaaaaaaaaaaa

SEQ ID NO: 24619 - RNA, 4035 nt, Artificial Sequence
  SARS-CoV-2/Wuhan/WIV05/2019__EPI_ISL_402128 spike protein mRNA gc (1-1273)(K986P_V987P_A222V_D614G)
aggagaaagcuuaccauguucguguuccugguccuccugccccuggugagcucccagugcgugaaccucaccacccgcacgcagcugccgcccgccuacaccaacagcuucacccggggcgucuacuaccccgacaagguguuccgcuccagcgugcugcacuccacccaggaccucuuccugcccuucuucagcaacgucacgugguuccacgccauccacguguccgggaccaacggcaccaagcgguucgacaacccggugcugcccuucaacgacggggucuacuucgcgagcaccgagaaguccaacaucauccgcggcuggaucuucgggacgacccucgacagcaagacccagucccugcugaucgugaacaacgccaccaacguggucaucaaggugugcgaguuccaguucugcaacgaccccuuccucggcguguacuaccacaagaacaacaagagcuggauggaguccgaguuccgggucuacagcuccgccaacaacugcacguucgaguacgugagccagcccuuccugauggaccuggagggcaagcaggggaacuucaagaaccuccgcgaguucguguucaagaacaucgacggcuacuucaagaucuacuccaagcacaccccgaucaaccugguccgggaccugccccagggguucagcguccucgagccccugguggaccugcccaucggcaucaacaucacccgcuuccagacccuccuggcccugcaccgguccuaccucacgccgggggacagcagcuccggcuggaccgcgggcgccgccgccuacuacgugggguaccugcagccccgcaccuuccugcucaaguacaacgagaacggcaccaucacggacgcggucgacugcgcccuggacccccugagcgagaccaagugcacccucaaguccuucaccguggagaaggggaucuaccagacgagcaacuuccgggugcagcccaccgaguccaucguccgcuucccgaacaucaccaaccugugccccuucggcgagguguucaacgccacccgguucgccagcgucuacgccuggaaccgcaagcggaucuccaacugcguggcggacuacagcgugcuguacaacuccgccagcuucuccacguucaagugcuacggcgucagccccaccaagcucaacgaccugugcuucaccaacguguacgccgacuccuucgugauccgcggggacgagguccggcagaucgcccccggccagaccgggaagaucgccgacuacaacuacaagcugccggacgacuucacgggcugcgugaucgcguggaacagcaacaaccucgacuccaaggucgggggcaacuacaacuaccuguaccgccuguuccgcaagagcaaccucaagcccuucgagcgggacaucuccaccgagaucuaccaggccggcagcacccccugcaacgggguggagggcuucaacugcuacuucccccugcaguccuacggguuccagccgaccaacggcgugggguaccagcccuaccggguggucgugcugagcuucgagcuccugcacgcccccgccacggugugcggccccaagaaguccaccaaccuggucaagaacaagugcgugaacuucaacuucaacggccucaccgggaccggcgugcugaccgagagcaacaagaaguuccugccguuccagcaguucgggcgcgacaucgccgacacgaccgacgcgguccgcgacccccagacccuggagauccucgacaucacccccugcagcuucggcgggguguccgugaucacgccgggcaccaacaccagcaaccaggucgccgugcuguaccagggcgugaacugcaccgagguccccguggccauccacgccgaccagcugacgcccaccuggcggguguacuccaccggcagcaacgucuuccagacccgcgccgggugccucaucggcgcggagcacgugaacaacuccuacgagugcgacauccccaucggggccggcaucugcgccagcuaccagacgcagaccaacuccccgcggcgcgcccggagcguggcgucccagagcaucaucgccuacaccaugucccugggcgccgagaacagcgucgccuacuccaacaacagcaucgccauccccaccaacuucacgaucuccgugaccaccgagauccugcccgugagcaugaccaagacgagcgucgacugcaccauguacaucugcggggacuccaccgagugcagcaaccuccugcugcaguacggcuccuucugcacccagcucaaccgcgcgcugacggggaucgccguggagcaggacaagaacacccaggagguguucgcccaggucaagcagaucuacaagacgcccccgaucaaggacuucggcggguucaacuucagccagauccugcccgaccccuccaagcccagcaagcgguccuucaucgaggaccuccuguucaacaaggugacccuggccgacgccggcuucaucaagcaguacggcgacugccucggggacaucgcggcccgcgaccugaucugcgcccagaaguucaacggccugaccgugcucccgccccugcugaccgacgagaugaucgcccaguacaccagcgcccuccuggcggggaccaucacguccggcuggaccuucggggccggcgccgcccugcagauccccuucgcgaugcagauggccuaccgguucaacggcaucggggucacccagaacgugcucuacgagaaccagaagcugaucgccaaccaguucaacagcgccaucggcaagauccaggacucccugagcuccaccgccagcgcgcucgggaagcugcaggacguggucaaccagaacgcccaggcccugaacacgcucgugaagcagcuguccagcaacuucggcgccaucuccagcgugcugaacgacauccucucccgccuggacccgcccgaggccgaggugcagaucgaccggcugaucaccgggcgccuccagagccugcagaccuacgugacccagcagcugauccgggcggccgagauccgcgccagcgccaaccucgccgcgaccaagauguccgagugcguccugggccagagcaagcggguggacuucugcggcaagggguaccaccugauguccuucccccagagcgccccgcacggcguggucuuccuccacgugacguacguccccgcccaggagaagaacuucaccaccgcccccgcgaucugccacgacgggaaggcccacuucccccgcgagggcguguucguguccaacgggacccacugguucgucacgcagcggaacuucuacgagccgcagaucaucaccaccgacaacaccuucgugagcggcaacugcgacguggucaucggcaucgugaacaacacgguguacgacccccugcagcccgagcuggacuccuucaaggaggagcucgacaaguacuucaagaaccacaccagccccgacgucgaccugggggacaucuccggcaucaacgccagcguggugaacauccagaaggagaucgaccgccugaacgaggucgccaagaaccucaacgagucccugaucgaccugcaggagcucgggaaguacgagcaguacaucaaguggccgugguacaucuggcugggcuucaucgccggccugaucgcgaucgugauggugaccaucaugcucugcugcaugaccagcugcugcuccugccugaaggggugcugcagcugcggcuccugcugcaaguucgacgaggacgacagcgagcccguccugaagggggugaagcuccacuacacgugaggacuaguuauaagacugacuagcccgaugggccucccaacgggcccuccuccccuccuugcaccgagagaucucaaaggcucuuuucagagccaccaaaaaaaaaaaaaaaaaaaaaaaaaaaaaaaaaaaaaaaaaaaaaaaaaaaaaaaaaaaaaaaaaaaaaaaaaaaaaaaaaaaaaaaaaaaaaaaaaaaaa

SEQ ID NO: 24620 - RNA, 4035 nt, Artificial Sequence
  SARS-CoV-2/Wuhan/WIV05/2019__EPI_ISL_402128 spike protein mRNA gc (1-1273)(K986P_V987P_N439K_D614G)
aggagaaagcuuaccauguucguguuccugguccuccugccccuggugagcucccagugcgugaaccucaccacccgcacgcagcugccgcccgccuacaccaacagcuucacccggggcgucuacuaccccgacaagguguuccgcuccagcgugcugcacuccacccaggaccucuuccugcccuucuucagcaacgucacgugguuccacgccauccacguguccgggaccaacggcaccaagcgguucgacaacccggugcugcccuucaacgacggggucuacuucgcgagcaccgagaaguccaacaucauccgcggcuggaucuucgggacgacccucgacagcaagacccagucccugcugaucgugaacaacgccaccaacguggucaucaaggugugcgaguuccaguucugcaacgaccccuuccucggcguguacuaccacaagaacaacaagagcuggauggaguccgaguuccgggucuacagcuccgccaacaacugcacguucgaguacgugagccagcccuuccugauggaccuggagggcaagcaggggaacuucaagaaccuccgcgaguucguguucaagaacaucgacggcuacuucaagaucuacuccaagcacaccccgaucaaccugguccgggaccugccccagggguucagcgcccucgagccccugguggaccugcccaucggcaucaacaucacccgcuuccagacccuccuggcccugcaccgguccuaccucacgccgggggacagcagcuccggcuggaccgcgggcgccgccgccuacuacgugggguaccugcagccccgcaccuuccugcucaaguacaacgagaacggcaccaucacggacgcggucgacugcgcccuggacccccugagcgagaccaagugcacccucaaguccuucaccguggagaaggggaucuaccagacgagcaacuuccgggugcagcccaccgaguccaucguccgcuucccgaacaucaccaaccugugccccuucggcgagguguucaacgccacccgguucgccagcgucuacgccuggaaccgcaagcggaucuccaacugcguggcggacuacagcgugcuguacaacuccgccagcuucuccacguucaagugcuacggcgucagccccaccaagcucaacgaccugugcuucaccaacguguacgccgacuccuucgugauccgcggggacgagguccggcagaucgcccccggccagaccgggaagaucgccgacuacaacuacaagcugccggacgacuucacgggcugcgugaucgcguggaacagcaagaaccucgacuccaaggucgggggcaacuacaacuaccuguaccgccuguuccgcaagagcaaccucaagcccuucgagcgggacaucuccaccgagaucuaccaggccggcagcacccccugcaacgggguggagggcuucaacugcuacuucccccugcaguccuacggguuccagccgaccaacggcgugggguaccagcccuaccggguggucgugcugagcuucgagcuccugcacgcccccgccacggugugcggccccaagaaguccaccaaccuggucaagaacaagugcgugaacuucaacuucaacggccucaccgggaccggcgugcugaccgagagcaacaagaaguuccugccguuccagcaguucgggcgcgacaucgccgacacgaccgacgcgguccgcgacccccagacccuggagauccucgacaucacccccugcagcuucggcgggguguccgugaucacgccgggcaccaacaccagcaaccaggucgccgugcuguaccagggcgugaacugcaccgagguccccguggccauccacgccgaccagcugacgcccaccuggcggguguacuccaccggcagcaacgucuuccagacccgcgccgggugccucaucggcgcggagcacgugaacaacuccuacgagugcgacauccccaucggggccggcaucugcgccagcuaccagacgcagaccaacuccccgcggcgcgcccggagcguggcgucccagagcaucaucgccuacaccaugucccugggcgccgagaacagcgucgccuacuccaacaacagcaucgccauccccaccaacuucacgaucuccgugaccaccgagauccugcccgugagcaugaccaagacgagcgucgacugcaccauguacaucugcggggacuccaccgagugcagcaaccuccugcugcaguacggcuccuucugcacccagcucaaccgcgcgcugacggggaucgccguggagcaggacaagaacacccaggagguguucgcccaggucaagcagaucuacaagacgcccccgaucaaggacuucggcggguucaacuucagccagauccugcccgaccccuccaagcccagcaagcgguccuucaucgaggaccuccuguucaacaaggugacccuggccgacgccggcuucaucaagcaguacggcgacugccucggggacaucgcggcccgcgaccugaucugcgcccagaaguucaacggccugaccgugcucccgccccugcugaccgacgagaugaucgcccaguacaccagcgcccuccuggcggggaccaucacguccggcuggaccuucggggccggcgccgcccugcagauccccuucgcgaugcagauggccuaccgguucaacggcaucggggucacccagaacgugcucuacgagaaccagaagcugaucgccaaccaguucaacagcgccaucggcaagauccaggacucccugagcuccaccgccagcgcgcucgggaagcugcaggacguggucaaccagaacgcccaggcccugaacacgcucgugaagcagcuguccagcaacuucggcgccaucuccagcgugcugaacgacauccucucccgccuggacccgcccgaggccgaggugcagaucgaccggcugaucaccgggcgccuccagagccugcagaccuacgugacccagcagcugauccgggcggccgagauccgcgccagcgccaaccucgccgcgaccaagauguccgagugcguccugggccagagcaagcggguggacuucugcggcaagggguaccaccugauguccuucccccagagcgccccgcacggcguggucuuccuccacgugacguacguccccgcccaggagaagaacuucaccaccgcccccgcgaucugccacgacgggaaggcccacuucccccgcgagggcguguucguguccaacgggacccacugguucgucacgcagcggaacuucuacgagccgcagaucaucaccaccgacaacaccuucgugagcggcaacugcgacguggucaucggcaucgugaacaacacgguguacgacccccugcagcccgagcuggacuccuucaaggaggagcucgacaaguacuucaagaaccacaccagccccgacgucgaccugggggacaucuccggcaucaacgccagcguggugaacauccagaaggagaucgaccgccugaacgaggucgccaagaaccucaacgagucccugaucgaccugcaggagcucgggaaguacgagcaguacaucaaguggccgugguacaucuggcugggcuucaucgccggccugaucgcgaucgugauggugaccaucaugcucugcugcaugaccagcugcugcuccugccugaaggggugcugcagcugcggcuccugcugcaaguucgacgaggacgacagcgagcccguccugaagggggugaagcuccacuacacgugaggacuaguuauaagacugacuagcccgaugggccucccaacgggcccuccuccccuccuugcaccgagagaucucaaaggcucuuuucagagccaccaaaaaaaaaaaaaaaaaaaaaaaaaaaaaaaaaaaaaaaaaaaaaaaaaaaaaaaaaaaaaaaaaaaaaaaaaaaaaaaaaaaaaaaaaaaaaaaaaaaaa

SEQ ID NO: 24621 - RNA, 4035 nt, Artificial Sequence
  SARS-CoV-2/Wuhan/WIV05/2019__EPI_ISL_402128 spike protein mRNA gc (1-1273)(K986P_V987P_S477N_D614G)
aggagaaagcuuaccauguucguguuccugguccuccugccccuggugagcucccagugcgugaaccucaccacccgcacgcagcugccgcccgccuacaccaacagcuucacccggggcgucuacuaccccgacaagguguuccgcuccagcgugcugcacuccacccaggaccucuuccugcccuucuucagcaacgucacgugguuccacgccauccacguguccgggaccaacggcaccaagcgguucgacaacccggugcugcccuucaacgacggggucuacuucgcgagcaccgagaaguccaacaucauccgcggcuggaucuucgggacgacccucgacagcaagacccagucccugcugaucgugaacaacgccaccaacguggucaucaaggugugcgaguuccaguucugcaacgaccccuuccucggcguguacuaccacaagaacaacaagagcuggauggaguccgaguuccgggucuacagcuccgccaacaacugcacguucgaguacgugagccagcccuuccugauggaccuggagggcaagcaggggaacuucaagaaccuccgcgaguucguguucaagaacaucgacggcuacuucaagaucuacuccaagcacaccccgaucaaccugguccgggaccugccccagggguucagcgcccucgagccccugguggaccugcccaucggcaucaacaucacccgcuuccagacccuccuggcccugcaccgguccuaccucacgccgggggacagcagcuccggcuggaccgcgggcgccgccgccuacuacgugggguaccugcagccccgcaccuuccugcucaaguacaacgagaacggcaccaucacggacgcggucgacugcgcccuggacccccugagcgagaccaagugcacccucaaguccuucaccguggagaaggggaucuaccagacgagcaacuuccgggugcagcccaccgaguccaucguccgcuucccgaacaucaccaaccugugccccuucggcgagguguucaacgccacccgguucgccagcgucuacgccuggaaccgcaagcggaucuccaacugcguggcggacuacagcgugcuguacaacuccgccagcuucuccacguucaagugcuacggcgucagccccaccaagcucaacgaccugugcuucaccaacguguacgccgacuccuucgugauccgcggggacgagguccggcagaucgcccccggccagaccgggaagaucgccgacuacaacuacaagcugccggacgacuucacgggcugcgugaucgcguggaacagcaacaaccucgacuccaaggucgggggcaacuacaacuaccuguaccgccuguuccgcaagagcaaccucaagcccuucgagcgggacaucuccaccgagaucuaccaggccggcaacacccccugcaacgggguggagggcuucaacugcuacuucccccugcaguccuacggguuccagccgaccaacggcgugggguaccagcccuaccggguggucgugcugagcuucgagcuccugcacgcccccgccacggugugcggccccaagaaguccaccaaccuggucaagaacaagugcgugaacuucaacuucaacggccucaccgggaccggcgugcugaccgagagcaacaagaaguuccugccguuccagcaguucgggcgcgacaucgccgacacgaccgacgcgguccgcgacccccagacccuggagauccucgacaucacccccugcagcuucggcgggguguccgugaucacgccgggcaccaacaccagcaaccaggucgccgugcuguaccagggcgugaacugcaccgagguccccguggccauccacgccgaccagcugacgcccaccuggcggguguacuccaccggcagcaacgucuuccagacccgcgccgggugccucaucggcgcggagcacgugaacaacuccuacgagugcgacauccccaucggggccggcaucugcgccagcuaccagacgcagaccaacuccccgcggcgcgcccggagcguggcgucccagagcaucaucgccuacaccaugucccugggcgccgagaacagcgucgccuacuccaacaacagcaucgccauccccaccaacuucacgaucuccgugaccaccgagauccugcccgugagcaugaccaagacgagcgucgacugcaccauguacaucugcggggacuccaccgagugcagcaaccuccugcugcaguacggcuccuucugcacccagcucaaccgcgcgcugacggggaucgccguggagcaggacaagaacacccaggagguguucgcccaggucaagcagaucuacaagacgcccccgaucaaggacuucggcggguucaacuucagccagauccugcccgaccccuccaagcccagcaagcgguccuucaucgaggaccuccuguucaacaaggugacccuggccgacgccggcuucaucaagcaguacggcgacugccucggggacaucgcggcccgcgaccugaucugcgcccagaaguucaacggccugaccgugcucccgccccugcugaccgacgagaugaucgcccaguacaccagcgcccuccuggcggggaccaucacguccggcuggaccuucggggccggcgccgcccugcagauccccuucgcgaugcagauggccuaccgguucaacggcaucggggucacccagaacgugcucuacgagaaccagaagcugaucgccaaccaguucaacagcgccaucggcaagauccaggacucccugagcuccaccgccagcgcgcucgggaagcugcaggacguggucaaccagaacgcccaggcccugaacacgcucgugaagcagcuguccagcaacuucggcgccaucuccagcgugcugaacgacauccucucccgccuggacccgcccgaggccgaggugcagaucgaccggcugaucaccgggcgccuccagagccugcagaccuacgugacccagcagcugauccgggcggccgagauccgcgccagcgccaaccucgccgcgaccaagauguccgagugcguccugggccagagcaagcggguggacuucugcggcaagggguaccaccugauguccuucccccagagcgccccgcacggcguggucuuccuccacgugacguacguccccgcccaggagaagaacuucaccaccgcccccgcgaucugccacgacgggaaggcccacuucccccgcgagggcguguucguguccaacgggacccacugguucgucacgcagcggaacuucuacgagccgcagaucaucaccaccgacaacaccuucgugagcggcaacugcgacguggucaucggcaucgugaacaacacgguguacgacccccugcagcccgagcuggacuccuucaaggaggagcucgacaaguacuucaagaaccacaccagccccgacgucgaccugggggacaucuccggcaucaacgccagcguggugaacauccagaaggagaucgaccgccugaacgaggucgccaagaaccucaacgagucccugaucgaccugcaggagcucgggaaguacgagcaguacaucaaguggccgugguacaucuggcugggcuucaucgccggccugaucgcgaucgugauggugaccaucaugcucugcugcaugaccagcugcugcuccugccugaaggggugcugcagcugcggcuccugcugcaaguucgacgaggacgacagcgagcccguccugaagggggugaagcuccacuacacgugaggacuaguuauaagacugacuagcccgaugggccucccaacgggcccuccuccccuccuugcaccgagagaucucaaaggcucuuuucagagccaccaaaaaaaaaaaaaaaaaaaaaaaaaaaaaaaaaaaaaaaaaaaaaaaaaaaaaaaaaaaaaaaaaaaaaaaaaaaaaaaaaaaaaaaaaaaaaaaaaaaaa

SEQ ID NO: 24622 - RNA, 4035 nt, Artificial Sequence
  SARS-CoV-2/Wuhan/WIV05/2019__EPI_ISL_402128 spike protein mRNA gc (1-1273)(K986P_V987P_N501Y_D614G)
aggagaaagcuuaccauguucguguuccugguccuccugccccuggugagcucccagugcgugaaccucaccacccgcacgcagcugccgcccgccuacaccaacagcuucacccggggcgucuacuaccccgacaagguguuccgcuccagcgugcugcacuccacccaggaccucuuccugcccuucuucagcaacgucacgugguuccacgccauccacguguccgggaccaacggcaccaagcgguucgacaacccggugcugcccuucaacgacggggucuacuucgcgagcaccgagaaguccaacaucauccgcggcuggaucuucgggacgacccucgacagcaagacccagucccugcugaucgugaacaacgccaccaacguggucaucaaggugugcgaguuccaguucugcaacgaccccuuccucggcguguacuaccacaagaacaacaagagcuggauggaguccgaguuccgggucuacagcuccgccaacaacugcacguucgaguacgugagccagcccuuccugauggaccuggagggcaagcaggggaacuucaagaaccuccgcgaguucguguucaagaacaucgacggcuacuucaagaucuacuccaagcacaccccgaucaaccugguccgggaccugccccagggguucagcgcccucgagccccugguggaccugcccaucggcaucaacaucacccgcuuccagacccuccuggcccugcaccgguccuaccucacgccgggggacagcagcuccggcuggaccgcgggcgccgccgccuacuacgugggguaccugcagccccgcaccuuccugcucaaguacaacgagaacggcaccaucacggacgcggucgacugcgcccuggacccccugagcgagaccaagugcacccucaaguccuucaccguggagaaggggaucuaccagacgagcaacuuccgggugcagcccaccgaguccaucguccgcuucccgaacaucaccaaccugugccccuucggcgagguguucaacgccacccgguucgccagcgucuacgccuggaaccgcaagcggaucuccaacugcguggcggacuacagcgugcuguacaacuccgccagcuucuccacguucaagugcuacggcgucagccccaccaagcucaacgaccugugcuucaccaacguguacgccgacuccuucgugauccgcggggacgagguccggcagaucgcccccggccagaccgggaagaucgccgacuacaacuacaagcugccggacgacuucacgggcugcgugaucgcguggaacagcaacaaccucgacuccaaggucgggggcaacuacaacuaccuguaccgccuguuccgcaagagcaaccucaagcccuucgagcgggacaucuccaccgagaucuaccaggccggcagcacccccugcaacgggguggagggcuucaacugcuacuucccccugcaguccuacggguuccagccgaccuacggcgugggguaccagcccuaccggguggucgugcugagcuucgagcuccugcacgcccccgccacggugugcggccccaagaaguccaccaaccuggucaagaacaagugcgugaacuucaacuucaacggccucaccgggaccggcgugcugaccgagagcaacaagaaguuccugccguuccagcaguucgggcgcgacaucgccgacacgaccgacgcgguccgcgacccccagacccuggagauccucgacaucacccccugcagcuucggcgggguguccgugaucacgccgggcaccaacaccagcaaccaggucgccgugcuguaccagggcgugaacugcaccgagguccccguggccauccacgccgaccagcugacgcccaccuggcggguguacuccaccggcagcaacgucuuccagacccgcgccgggugccucaucggcgcggagcacgugaacaacuccuacgagugcgacauccccaucggggccggcaucugcgccagcuaccagacgcagaccaacuccccgcggcgcgcccggagcguggcgucccagagcaucaucgccuacaccaugucccugggcgccgagaacagcgucgccuacuccaacaacagcaucgccauccccaccaacuucacgaucuccgugaccaccgagauccugcccgugagcaugaccaagacgagcgucgacugcaccauguacaucugcggggacuccaccgagugcagcaaccuccugcugcaguacggcuccuucugcacccagcucaaccgcgcgcugacggggaucgccguggagcaggacaagaacacccaggagguguucgcccaggucaagcagaucuacaagacgcccccgaucaaggacuucggcggguucaacuucagccagauccugcccgaccccuccaagcccagcaagcgguccuucaucgaggaccuccuguucaacaaggugacccuggccgacgccggcuucaucaagcaguacggcgacugccucggggacaucgcggcccgcgaccugaucugcgcccagaaguucaacggccugaccgugcucccgccccugcugaccgacgagaugaucgcccaguacaccagcgcccuccuggcggggaccaucacguccggcuggaccuucggggccggcgccgcccugcagauccccuucgcgaugcagauggccuaccgguucaacggcaucggggucacccagaacgugcucuacgagaaccagaagcugaucgccaaccaguucaacagcgccaucggcaagauccaggacucccugagcuccaccgccagcgcgcucgggaagcugcaggacguggucaaccagaacgcccaggcccugaacacgcucgugaagcagcuguccagcaacuucggcgccaucuccagcgugcugaacgacauccucucccgccuggacccgcccgaggccgaggugcagaucgaccggcugaucaccgggcgccuccagagccugcagaccuacgugacccagcagcugauccgggcggccgagauccgcgccagcgccaaccucgccgcgaccaagauguccgagugcguccugggccagagcaagcggguggacuucugcggcaagggguaccaccugauguccuucccccagagcgccccgcacggcguggucuuccuccacgugacguacguccccgcccaggagaagaacuucaccaccgcccccgcgaucugccacgacgggaaggcccacuucccccgcgagggcguguucguguccaacgggacccacugguucgucacgcagcggaacuucuacgagccgcagaucaucaccaccgacaacaccuucgugagcggcaacugcgacguggucaucggcaucgugaacaacacgguguacgacccccugcagcccgagcuggacuccuucaaggaggagcucgacaaguacuucaagaaccacaccagccccgacgucgaccugggggacaucuccggcaucaacgccagcguggugaacauccagaaggagaucgaccgccugaacgaggucgccaagaaccucaacgagucccugaucgaccugcaggagcucgggaaguacgagcaguacaucaaguggccgugguacaucuggcugggcuucaucgccggccugaucgcgaucgugauggugaccaucaugcucugcugcaugaccagcugcugcuccugccugaaggggugcugcagcugcggcuccugcugcaaguucgacgaggacgacagcgagcccguccugaagggggugaagcuccacuacacgugaggacuaguuauaagacugacuagcccgaugggccucccaacgggcccuccuccccuccuugcaccgagagaucucaaaggcucuuuucagagccaccaaaaaaaaaaaaaaaaaaaaaaaaaaaaaaaaaaaaaaaaaaaaaaaaaaaaaaaaaaaaaaaaaaaaaaaaaaaaaaaaaaaaaaaaaaaaaaaaaaaaa

SEQ ID NO: 24623 - RNA, 4029 nt, Artificial Sequence
  SARS-CoV-2/Wuhan/WIV05/2019__EPI_ISL_402128 spike protein mRNA gc (1-1273)(K986P_V987P_H69del_V70del_D614G)
aggagaaagcuuaccauguucguguuccugguccuccugccccuggugagcucccagugcgugaaccucaccacccgcacgcagcugccgcccgccuacaccaacagcuucacccggggcgucuacuaccccgacaagguguuccgcuccagcgugcugcacuccacccaggaccucuuccugcccuucuucagcaacgucacgugguuccacgccaucuccgggaccaacggcaccaagcgguucgacaacccggugcugcccuucaacgacggggucuacuucgcgagcaccgagaaguccaacaucauccgcggcuggaucuucgggacgacccucgacagcaagacccagucccugcugaucgugaacaacgccaccaacguggucaucaaggugugcgaguuccaguucugcaacgaccccuuccucggcguguacuaccacaagaacaacaagagcuggauggaguccgaguuccgggucuacagcuccgccaacaacugcacguucgaguacgugagccagcccuuccugauggaccuggagggcaagcaggggaacuucaagaaccuccgcgaguucguguucaagaacaucgacggcuacuucaagaucuacuccaagcacaccccgaucaaccugguccgggaccugccccagggguucagcgcccucgagccccugguggaccugcccaucggcaucaacaucacccgcuuccagacccuccuggcccugcaccgguccuaccucacgccgggggacagcagcuccggcuggaccgcgggcgccgccgccuacuacgugggguaccugcagccccgcaccuuccugcucaaguacaacgagaacggcaccaucacggacgcggucgacugcgcccuggacccccugagcgagaccaagugcacccucaaguccuucaccguggagaaggggaucuaccagacgagcaacuuccgggugcagcccaccgaguccaucguccgcuucccgaacaucaccaaccugugccccuucggcgagguguucaacgccacccgguucgccagcgucuacgccuggaaccgcaagcggaucuccaacugcguggcggacuacagcgugcuguacaacuccgccagcuucuccacguucaagugcuacggcgucagccccaccaagcucaacgaccugugcuucaccaacguguacgccgacuccuucgugauccgcggggacgagguccggcagaucgcccccggccagaccgggaagaucgccgacuacaacuacaagcugccggacgacuucacgggcugcgugaucgcguggaacagcaacaaccucgacuccaaggucgggggcaacuacaacuaccuguaccgccuguuccgcaagagcaaccucaagcccuucgagcgggacaucuccaccgagaucuaccaggccggcagcacccccugcaacgggguggagggcuucaacugcuacuucccccugcaguccuacggguuccagccgaccaacggcgugggguaccagcccuaccggguggucgugcugagcuucgagcuccugcacgcccccgccacggugugcggccccaagaaguccaccaaccuggucaagaacaagugcgugaacuucaacuucaacggccucaccgggaccggcgugcugaccgagagcaacaagaaguuccugccguuccagcaguucgggcgcgacaucgccgacacgaccgacgcgguccgcgacccccagacccuggagauccucgacaucacccccugcagcuucggcgggguguccgugaucacgccgggcaccaacaccagcaaccaggucgccgugcuguaccagggcgugaacugcaccgagguccccguggccauccacgccgaccagcugacgcccaccuggcggguguacuccaccggcagcaacgucuuccagacccgcgccgggugccucaucggcgcggagcacgugaacaacuccuacgagugcgacauccccaucggggccggcaucugcgccagcuaccagacgcagaccaacuccccgcggcgcgcccggagcguggcgucccagagcaucaucgccuacaccaugucccugggcgccgagaacagcgucgccuacuccaacaacagcaucgccauccccaccaacuucacgaucuccgugaccaccgagauccugcccgugagcaugaccaagacgagcgucgacugcaccauguacaucugcggggacuccaccgagugcagcaaccuccugcugcaguacggcuccuucugcacccagcucaaccgcgcgcugacggggaucgccguggagcaggacaagaacacccaggagguguucgcccaggucaagcagaucuacaagacgcccccgaucaaggacuucggcggguucaacuucagccagauccugcccgaccccuccaagcccagcaagcgguccuucaucgaggaccuccuguucaacaaggugacccuggccgacgccggcuucaucaagcaguacggcgacugccucggggacaucgcggcccgcgaccugaucugcgcccagaaguucaacggccugaccgugcucccgccccugcugaccgacgagaugaucgcccaguacaccagcgcccuccuggcggggaccaucacguccggcuggaccuucggggccggcgccgcccugcagauccccuucgcgaugcagauggccuaccgguucaacggcaucggggucacccagaacgugcucuacgagaaccagaagcugaucgccaaccaguucaacagcgccaucggcaagauccaggacucccugagcuccaccgccagcgcgcucgggaagcugcaggacguggucaaccagaacgcccaggcccugaacacgcucgugaagcagcuguccagcaacuucggcgccaucuccagcgugcugaacgacauccucucccgccuggacccgcccgaggccgaggugcagaucgaccggcugaucaccgggcgccuccagagccugcagaccuacgugacccagcagcugauccgggcggccgagauccgcgccagcgccaaccucgccgcgaccaagauguccgagugcguccugggccagagcaagcggguggacuucugcggcaagggguaccaccugauguccuucccccagagcgccccgcacggcguggucuuccuccacgugacguacguccccgcccaggagaagaacuucaccaccgcccccgcgaucugccacgacgggaaggcccacuucccccgcgagggcguguucguguccaacgggacccacugguucgucacgcagcggaacuucuacgagccgcagaucaucaccaccgacaacaccuucgugagcggcaacugcgacguggucaucggcaucgugaacaacacgguguacgacccccugcagcccgagcuggacuccuucaaggaggagcucgacaaguacuucaagaaccacaccagccccgacgucgaccugggggacaucuccggcaucaacgccagcguggugaacauccagaaggagaucgaccgccugaacgaggucgccaagaaccucaacgagucccugaucgaccugcaggagcucgggaaguacgagcaguacaucaaguggccgugguacaucuggcugggcuucaucgccggccugaucgcgaucgugauggugaccaucaugcucugcugcaugaccagcugcugcuccugccugaaggggugcugcagcugcggcuccugcugcaaguucgacgaggacgacagcgagcccguccugaagggggugaagcuccacuacacgugaggacuaguuauaagacugacuagcccgaugggccucccaacgggcccuccuccccuccuugcaccgagagaucucaaaggcucuuuucagagccaccaaaaaaaaaaaaaaaaaaaaaaaaaaaaaaaaaaaaaaaaaaaaaaaaaaaaaaaaaaaaaaaaaaaaaaaaaaaaaaaaaaaaaaaaaaaaaaaaaaaaa

SEQ ID NO: 24624 - RNA, 4035 nt, Artificial Sequence
  SARS-CoV-2/Wuhan/WIV05/2019__EPI_ISL_402128 spike protein mRNA gc (1-1273)(K986P_V987P_Y453F_D614G)
aggagaaagcuuaccauguucguguuccugguccuccugccccuggugagcucccagugcgugaaccucaccacccgcacgcagcugccgcccgccuacaccaacagcuucacccggggcgucuacuaccccgacaagguguuccgcuccagcgugcugcacuccacccaggaccucuuccugcccuucuucagcaacgucacgugguuccacgccauccacguguccgggaccaacggcaccaagcgguucgacaacccggugcugcccuucaacgacggggucuacuucgcgagcaccgagaaguccaacaucauccgcggcuggaucuucgggacgacccucgacagcaagacccagucccugcugaucgugaacaacgccaccaacguggucaucaaggugugcgaguuccaguucugcaacgaccccuuccucggcguguacuaccacaagaacaacaagagcuggauggaguccgaguuccgggucuacagcuccgccaacaacugcacguucgaguacgugagccagcccuuccugauggaccuggagggcaagcaggggaacuucaagaaccuccgcgaguucguguucaagaacaucgacggcuacuucaagaucuacuccaagcacaccccgaucaaccugguccgggaccugccccagggguucagcgcccucgagccccugguggaccugcccaucggcaucaacaucacccgcuuccagacccuccuggcccugcaccgguccuaccucacgccgggggacagcagcuccggcuggaccgcgggcgccgccgccuacuacgugggguaccugcagccccgcaccuuccugcucaaguacaacgagaacggcaccaucacggacgcggucgacugcgcccuggacccccugagcgagaccaagugcacccucaaguccuucaccguggagaaggggaucuaccagacgagcaacuuccgggugcagcccaccgaguccaucguccgcuucccgaacaucaccaaccugugccccuucggcgagguguucaacgccacccgguucgccagcgucuacgccuggaaccgcaagcggaucuccaacugcguggcggacuacagcgugcuguacaacuccgccagcuucuccacguucaagugcuacggcgucagccccaccaagcucaacgaccugugcuucaccaacguguacgccgacuccuucgugauccgcggggacgagguccggcagaucgcccccggccagaccgggaagaucgccgacuacaacuacaagcugccggacgacuucacgggcugcgugaucgcguggaacagcaacaaccucgacuccaaggucgggggcaacuacaacuaccuguuccgccuguuccgcaagagcaaccucaagcccuucgagcgggacaucuccaccgagaucuaccaggccggcagcacccccugcaacgggguggagggcuucaacugcuacuucccccugcaguccuacggguuccagccgaccaacggcgugggguaccagcccuaccggguggucgugcugagcuucgagcuccugcacgcccccgccacggugugcggccccaagaaguccaccaaccuggucaagaacaagugcgugaacuucaacuucaacggccucaccgggaccggcgugcugaccgagagcaacaagaaguuccugccguuccagcaguucgggcgcgacaucgccgacacgaccgacgcgguccgcgacccccagacccuggagauccucgacaucacccccugcagcuucggcgggguguccgugaucacgccgggcaccaacaccagcaaccaggucgccgugcuguaccagggcgugaacugcaccgagguccccguggccauccacgccgaccagcugacgcccaccuggcggguguacuccaccggcagcaacgucuuccagacccgcgccgggugccucaucggcgcggagcacgugaacaacuccuacgagugcgacauccccaucggggccggcaucugcgccagcuaccagacgcagaccaacuccccgcggcgcgcccggagcguggcgucccagagcaucaucgccuacaccaugucccugggcgccgagaacagcgucgccuacuccaacaacagcaucgccauccccaccaacuucacgaucuccgugaccaccgagauccugcccgugagcaugaccaagacgagcgucgacugcaccauguacaucugcggggacuccaccgagugcagcaaccuccugcugcaguacggcuccuucugcacccagcucaaccgcgcgcugacggggaucgccguggagcaggacaagaacacccaggagguguucgcccaggucaagcagaucuacaagacgcccccgaucaaggacuucggcggguucaacuucagccagauccugcccgaccccuccaagcccagcaagcgguccuucaucgaggaccuccuguucaacaaggugacccuggccgacgccggcuucaucaagcaguacggcgacugccucggggacaucgcggcccgcgaccugaucugcgcccagaaguucaacggccugaccgugcucccgccccugcugaccgacgagaugaucgcccaguacaccagcgcccuccuggcggggaccaucacguccggcuggaccuucggggccggcgccgcccugcagauccccuucgcgaugcagauggccuaccgguucaacggcaucggggucacccagaacgugcucuacgagaaccagaagcugaucgccaaccaguucaacagcgccaucggcaagauccaggacucccugagcuccaccgccagcgcgcucgggaagcugcaggacguggucaaccagaacgcccaggcccugaacacgcucgugaagcagcuguccagcaacuucggcgccaucuccagcgugcugaacgacauccucucccgccuggacccgcccgaggccgaggugcagaucgaccggcugaucaccgggcgccuccagagccugcagaccuacgugacccagcagcugauccgggcggccgagauccgcgccagcgccaaccucgccgcgaccaagauguccgagugcguccugggccagagcaagcggguggacuucugcggcaagggguaccaccugauguccuucccccagagcgccccgcacggcguggucuuccuccacgugacguacguccccgcccaggagaagaacuucaccaccgcccccgcgaucugccacgacgggaaggcccacuucccccgcgagggcguguucguguccaacgggacccacugguucgucacgcagcggaacuucuacgagccgcagaucaucaccaccgacaacaccuucgugagcggcaacugcgacguggucaucggcaucgugaacaacacgguguacgacccccugcagcccgagcuggacuccuucaaggaggagcucgacaaguacuucaagaaccacaccagccccgacgucgaccugggggacaucuccggcaucaacgccagcguggugaacauccagaaggagaucgaccgccugaacgaggucgccaagaaccucaacgagucccugaucgaccugcaggagcucgggaaguacgagcaguacaucaaguggccgugguacaucuggcugggcuucaucgccggccugaucgcgaucgugauggugaccaucaugcucugcugcaugaccagcugcugcuccugccugaaggggugcugcagcugcggcuccugcugcaaguucgacgaggacgacagcgagcccguccugaagggggugaagcuccacuacacgugaggacuaguuauaagacugacuagcccgaugggccucccaacgggcccuccuccccuccuugcaccgagagaucucaaaggcucuuuucagagccaccaaaaaaaaaaaaaaaaaaaaaaaaaaaaaaaaaaaaaaaaaaaaaaaaaaaaaaaaaaaaaaaaaaaaaaaaaaaaaaaaaaaaaaaaaaaaaaaaaaaaa

SEQ ID NO: 24625 - RNA, 4035 nt, Artificial Sequence
  SARS-CoV-2/Wuhan/WIV05/2019__EPI_ISL_402128 spike protein mRNA gc (1-1273)(K986P_V987P_D614G_I692V)
aggagaaagcuuaccauguucguguuccugguccuccugccccuggugagcucccagugcgugaaccucaccacccgcacgcagcugccgcccgccuacaccaacagcuucacccggggcgucuacuaccccgacaagguguuccgcuccagcgugcugcacuccacccaggaccucuuccugcccuucuucagcaacgucacgugguuccacgccauccacguguccgggaccaacggcaccaagcgguucgacaacccggugcugcccuucaacgacggggucuacuucgcgagcaccgagaaguccaacaucauccgcggcuggaucuucgggacgacccucgacagcaagacccagucccugcugaucgugaacaacgccaccaacguggucaucaaggugugcgaguuccaguucugcaacgaccccuuccucggcguguacuaccacaagaacaacaagagcuggauggaguccgaguuccgggucuacagcuccgccaacaacugcacguucgaguacgugagccagcccuuccugauggaccuggagggcaagcaggggaacuucaagaaccuccgcgaguucguguucaagaacaucgacggcuacuucaagaucuacuccaagcacaccccgaucaaccugguccgggaccugccccagggguucagcgcccucgagccccugguggaccugcccaucggcaucaacaucacccgcuuccagacccuccuggcccugcaccgguccuaccucacgccgggggacagcagcuccggcuggaccgcgggcgccgccgccuacuacgugggguaccugcagccccgcaccuuccugcucaaguacaacgagaacggcaccaucacggacgcggucgacugcgcccuggacccccugagcgagaccaagugcacccucaaguccuucaccguggagaaggggaucuaccagacgagcaacuuccgggugcagcccaccgaguccaucguccgcuucccgaacaucaccaaccugugccccuucggcgagguguucaacgccacccgguucgccagcgucuacgccuggaaccgcaagcggaucuccaacugcguggcggacuacagcgugcuguacaacuccgccagcuucuccacguucaagugcuacggcgucagccccaccaagcucaacgaccugugcuucaccaacguguacgccgacuccuucgugauccgcggggacgagguccggcagaucgcccccggccagaccgggaagaucgccgacuacaacuacaagcugccggacgacuucacgggcugcgugaucgcguggaacagcaacaaccucgacuccaaggucgggggcaacuacaacuaccuguaccgccuguuccgcaagagcaaccucaagcccuucgagcgggacaucuccaccgagaucuaccaggccggcagcacccccugcaacgggguggagggcuucaacugcuacuucccccugcaguccuacggguuccagccgaccaacggcgugggguaccagcccuaccggguggucgugcugagcuucgagcuccugcacgcccccgccacggugugcggccccaagaaguccaccaaccuggucaagaacaagugcgugaacuucaacuucaacggccucaccgggaccggcgugcugaccgagagcaacaagaaguuccugccguuccagcaguucgggcgcgacaucgccgacacgaccgacgcgguccgcgacccccagacccuggagauccucgacaucacccccugcagcuucggcgggguguccgugaucacgccgggcaccaacaccagcaaccaggucgccgugcuguaccagggcgugaacugcaccgagguccccguggccauccacgccgaccagcugacgcccaccuggcggguguacuccaccggcagcaacgucuuccagacccgcgccgggugccucaucggcgcggagcacgugaacaacuccuacgagugcgacauccccaucggggccggcaucugcgccagcuaccagacgcagaccaacuccccgcggcgcgcccggagcguggcgucccagagcgucaucgccuacaccaugucccugggcgccgagaacagcgucgccuacuccaacaacagcaucgccauccccaccaacuucacgaucuccgugaccaccgagauccugcccgugagcaugaccaagacgagcgucgacugcaccauguacaucugcggggacuccaccgagugcagcaaccuccugcugcaguacggcuccuucugcacccagcucaaccgcgcgcugacggggaucgccguggagcaggacaagaacacccaggagguguucgcccaggucaagcagaucuacaagacgcccccgaucaaggacuucggcggguucaacuucagccagauccugcccgaccccuccaagcccagcaagcgguccuucaucgaggaccuccuguucaacaaggugacccuggccgacgccggcuucaucaagcaguacggcgacugccucggggacaucgcggcccgcgaccugaucugcgcccagaaguucaacggccugaccgugcucccgccccugcugaccgacgagaugaucgcccaguacaccagcgcccuccuggcggggaccaucacguccggcuggaccuucggggccggcgccgcccugcagauccccuucgcgaugcagauggccuaccgguucaacggcaucggggucacccagaacgugcucuacgagaaccagaagcugaucgccaaccaguucaacagcgccaucggcaagauccaggacucccugagcuccaccgccagcgcgcucgggaagcugcaggacguggucaaccagaacgcccaggcccugaacacgcucgugaagcagcuguccagcaacuucggcgccaucuccagcgugcugaacgacauccucucccgccuggacccgcccgaggccgaggugcagaucgaccggcugaucaccgggcgccuccagagccugcagaccuacgugacccagcagcugauccgggcggccgagauccgcgccagcgccaaccucgccgcgaccaagauguccgagugcguccugggccagagcaagcggguggacuucugcggcaagggguaccaccugauguccuucccccagagcgccccgcacggcguggucuuccuccacgugacguacguccccgcccaggagaagaacuucaccaccgcccccgcgaucugccacgacgggaaggcccacuucccccgcgagggcguguucguguccaacgggacccacugguucgucacgcagcggaacuucuacgagccgcagaucaucaccaccgacaacaccuucgugagcggcaacugcgacguggucaucggcaucgugaacaacacgguguacgacccccugcagcccgagcuggacuccuucaaggaggagcucgacaaguacuucaagaaccacaccagccccgacgucgaccugggggacaucuccggcaucaacgccagcguggugaacauccagaaggagaucgaccgccugaacgaggucgccaagaaccucaacgagucccugaucgaccugcaggagcucgggaaguacgagcaguacaucaaguggccgugguacaucuggcugggcuucaucgccggccugaucgcgaucgugauggugaccaucaugcucugcugcaugaccagcugcugcuccugccugaaggggugcugcagcugcggcuccugcugcaaguucgacgaggacgacagcgagcccguccugaagggggugaagcuccacuacacgugaggacuaguuauaagacugacuagcccgaugggccucccaacgggcccuccuccccuccuugcaccgagagaucucaaaggcucuuuucagagccaccaaaaaaaaaaaaaaaaaaaaaaaaaaaaaaaaaaaaaaaaaaaaaaaaaaaaaaaaaaaaaaaaaaaaaaaaaaaaaaaaaaaaaaaaaaaaaaaaaaaaa

SEQ ID NO: 24626 - RNA, 4035 nt, Artificial Sequence
  SARS-CoV-2/Wuhan/WIV05/2019__EPI_ISL_402128 spike protein mRNA gc (1-1273)(K986P_V987P_D614G_M1229I)
aggagaaagcuuaccauguucguguuccugguccuccugccccuggugagcucccagugcgugaaccucaccacccgcacgcagcugccgcccgccuacaccaacagcuucacccggggcgucuacuaccccgacaagguguuccgcuccagcgugcugcacuccacccaggaccucuuccugcccuucuucagcaacgucacgugguuccacgccauccacguguccgggaccaacggcaccaagcgguucgacaacccggugcugcccuucaacgacggggucuacuucgcgagcaccgagaaguccaacaucauccgcggcuggaucuucgggacgacccucgacagcaagacccagucccugcugaucgugaacaacgccaccaacguggucaucaaggugugcgaguuccaguucugcaacgaccccuuccucggcguguacuaccacaagaacaacaagagcuggauggaguccgaguuccgggucuacagcuccgccaacaacugcacguucgaguacgugagccagcccuuccugauggaccuggagggcaagcaggggaacuucaagaaccuccgcgaguucguguucaagaacaucgacggcuacuucaagaucuacuccaagcacaccccgaucaaccugguccgggaccugccccagggguucagcgcccucgagccccugguggaccugcccaucggcaucaacaucacccgcuuccagacccuccuggcccugcaccgguccuaccucacgccgggggacagcagcuccggcuggaccgcgggcgccgccgccuacuacgugggguaccugcagccccgcaccuuccugcucaaguacaacgagaacggcaccaucacggacgcggucgacugcgcccuggacccccugagcgagaccaagugcacccucaaguccuucaccguggagaaggggaucuaccagacgagcaacuuccgggugcagcccaccgaguccaucguccgcuucccgaacaucaccaaccugugccccuucggcgagguguucaacgccacccgguucgccagcgucuacgccuggaaccgcaagcggaucuccaacugcguggcggacuacagcgugcuguacaacuccgccagcuucuccacguucaagugcuacggcgucagccccaccaagcucaacgaccugugcuucaccaacguguacgccgacuccuucgugauccgcggggacgagguccggcagaucgcccccggccagaccgggaagaucgccgacuacaacuacaagcugccggacgacuucacgggcugcgugaucgcguggaacagcaacaaccucgacuccaaggucgggggcaacuacaacuaccuguaccgccuguuccgcaagagcaaccucaagcccuucgagcgggacaucuccaccgagaucuaccaggccggcagcacccccugcaacgggguggagggcuucaacugcuacuucccccugcaguccuacggguuccagccgaccaacggcgugggguaccagcccuaccggguggucgugcugagcuucgagcuccugcacgcccccgccacggugugcggccccaagaaguccaccaaccuggucaagaacaagugcgugaacuucaacuucaacggccucaccgggaccggcgugcugaccgagagcaacaagaaguuccugccguuccagcaguucgggcgcgacaucgccgacacgaccgacgcgguccgcgacccccagacccuggagauccucgacaucacccccugcagcuucggcgggguguccgugaucacgccgggcaccaacaccagcaaccaggucgccgugcuguaccagggcgugaacugcaccgagguccccguggccauccacgccgaccagcugacgcccaccuggcggguguacuccaccggcagcaacgucuuccagacccgcgccgggugccucaucggcgcggagcacgugaacaacuccuacgagugcgacauccccaucggggccggcaucugcgccagcuaccagacgcagaccaacuccccgcggcgcgcccggagcguggcgucccagagcaucaucgccuacaccaugucccugggcgccgagaacagcgucgccuacuccaacaacagcaucgccauccccaccaacuucacgaucuccgugaccaccgagauccugcccgugagcaugaccaagacgagcgucgacugcaccauguacaucugcggggacuccaccgagugcagcaaccuccugcugcaguacggcuccuucugcacccagcucaaccgcgcgcugacggggaucgccguggagcaggacaagaacacccaggagguguucgcccaggucaagcagaucuacaagacgcccccgaucaaggacuucggcggguucaacuucagccagauccugcccgaccccuccaagcccagcaagcgguccuucaucgaggaccuccuguucaacaaggugacccuggccgacgccggcuucaucaagcaguacggcgacugccucggggacaucgcggcccgcgaccugaucugcgcccagaaguucaacggccugaccgugcucccgccccugcugaccgacgagaugaucgcccaguacaccagcgcccuccuggcggggaccaucacguccggcuggaccuucggggccggcgccgcccugcagauccccuucgcgaugcagauggccuaccgguucaacggcaucggggucacccagaacgugcucuacgagaaccagaagcugaucgccaaccaguucaacagcgccaucggcaagauccaggacucccugagcuccaccgccagcgcgcucgggaagcugcaggacguggucaaccagaacgcccaggcccugaacacgcucgugaagcagcuguccagcaacuucggcgccaucuccagcgugcugaacgacauccucucccgccuggacccgcccgaggccgaggugcagaucgaccggcugaucaccgggcgccuccagagccugcagaccuacgugacccagcagcugauccgggcggccgagauccgcgccagcgccaaccucgccgcgaccaagauguccgagugcguccugggccagagcaagcggguggacuucugcggcaagggguaccaccugauguccuucccccagagcgccccgcacggcguggucuuccuccacgugacguacguccccgcccaggagaagaacuucaccaccgcccccgcgaucugccacgacgggaaggcccacuucccccgcgagggcguguucguguccaacgggacccacugguucgucacgcagcggaacuucuacgagccgcagaucaucaccaccgacaacaccuucgugagcggcaacugcgacguggucaucggcaucgugaacaacacgguguacgacccccugcagcccgagcuggacuccuucaaggaggagcucgacaaguacuucaagaaccacaccagccccgacgucgaccugggggacaucuccggcaucaacgccagcguggugaacauccagaaggagaucgaccgccugaacgaggucgccaagaaccucaacgagucccugaucgaccugcaggagcucgggaaguacgagcaguacaucaaguggccgugguacaucuggcugggcuucaucgccggccugaucgcgaucgugaucgugaccaucaugcucugcugcaugaccagcugcugcuccugccugaaggggugcugcagcugcggcuccugcugcaaguucgacgaggacgacagcgagcccguccugaagggggugaagcuccacuacacgugaggacuaguuauaagacugacuagcccgaugggccucccaacgggcccuccuccccuccuugcaccgagagaucucaaaggcucuuuucagagccaccaaaaaaaaaaaaaaaaaaaaaaaaaaaaaaaaaaaaaaaaaaaaaaaaaaaaaaaaaaaaaaaaaaaaaaaaaaaaaaaaaaaaaaaaaaaaaaaaaaaaa

SEQ ID NO: 24627 - RNA, 4029 nt, Artificial Sequence
  SARS-CoV-2/Wuhan/WIV05/2019__EPI_ISL_402128 spike protein mRNA gc (1-1273)(K986P_V987P_H69del_V70del_A222V_Y453F_S477N_D614G_I692V)
aggagaaagcuuaccauguucguguuccugguccuccugccccuggugagcucccagugcgugaaccucaccacccgcacgcagcugccgcccgccuacaccaacagcuucacccggggcgucuacuaccccgacaagguguuccgcuccagcgugcugcacuccacccaggaccucuuccugcccuucuucagcaacgucacgugguuccacgccaucuccgggaccaacggcaccaagcgguucgacaacccggugcugcccuucaacgacggggucuacuucgcgagcaccgagaaguccaacaucauccgcggcuggaucuucgggacgacccucgacagcaagacccagucccugcugaucgugaacaacgccaccaacguggucaucaaggugugcgaguuccaguucugcaacgaccccuuccucggcguguacuaccacaagaacaacaagagcuggauggaguccgaguuccgggucuacagcuccgccaacaacugcacguucgaguacgugagccagcccuuccugauggaccuggagggcaagcaggggaacuucaagaaccuccgcgaguucguguucaagaacaucgacggcuacuucaagaucuacuccaagcacaccccgaucaaccugguccgggaccugccccagggguucagcguccucgagccccugguggaccugcccaucggcaucaacaucacccgcuuccagacccuccuggcccugcaccgguccuaccucacgccgggggacagcagcuccggcuggaccgcgggcgccgccgccuacuacgugggguaccugcagccccgcaccuuccugcucaaguacaacgagaacggcaccaucacggacgcggucgacugcgcccuggacccccugagcgagaccaagugcacccucaaguccuucaccguggagaaggggaucuaccagacgagcaacuuccgggugcagcccaccgaguccaucguccgcuucccgaacaucaccaaccugugccccuucggcgagguguucaacgccacccgguucgccagcgucuacgccuggaaccgcaagcggaucuccaacugcguggcggacuacagcgugcuguacaacuccgccagcuucuccacguucaagugcuacggcgucagccccaccaagcucaacgaccugugcuucaccaacguguacgccgacuccuucgugauccgcggggacgagguccggcagaucgcccccggccagaccgggaagaucgccgacuacaacuacaagcugccggacgacuucacgggcugcgugaucgcguggaacagcaacaaccucgacuccaaggucgggggcaacuacaacuaccuguuccgccuguuccgcaagagcaaccucaagcccuucgagcgggacaucuccaccgagaucuaccaggccggcaacacccccugcaacgggguggagggcuucaacugcuacuucccccugcaguccuacggguuccagccgaccaacggcgugggguaccagcccuaccggguggucgugcugagcuucgagcuccugcacgcccccgccacggugugcggccccaagaaguccaccaaccuggucaagaacaagugcgugaacuucaacuucaacggccucaccgggaccggcgugcugaccgagagcaacaagaaguuccugccguuccagcaguucgggcgcgacaucgccgacacgaccgacgcgguccgcgacccccagacccuggagauccucgacaucacccccugcagcuucggcgggguguccgugaucacgccgggcaccaacaccagcaaccaggucgccgugcuguaccagggcgugaacugcaccgagguccccguggccauccacgccgaccagcugacgcccaccuggcggguguacuccaccggcagcaacgucuuccagacccgcgccgggugccucaucggcgcggagcacgugaacaacuccuacgagugcgacauccccaucggggccggcaucugcgccagcuaccagacgcagaccaacuccccgcggcgcgcccggagcguggcgucccagagcgucaucgccuacaccaugucccugggcgccgagaacagcgucgccuacuccaacaacagcaucgccauccccaccaacuucacgaucuccgugaccaccgagauccugcccgugagcaugaccaagacgagcgucgacugcaccauguacaucugcggggacuccaccgagugcagcaaccuccugcugcaguacggcuccuucugcacccagcucaaccgcgcgcugacggggaucgccguggagcaggacaagaacacccaggagguguucgcccaggucaagcagaucuacaagacgcccccgaucaaggacuucggcggguucaacuucagccagauccugcccgaccccuccaagcccagcaagcgguccuucaucgaggaccuccuguucaacaaggugacccuggccgacgccggcuucaucaagcaguacggcgacugccucggggacaucgcggcccgcgaccugaucugcgcccagaaguucaacggccugaccgugcucccgccccugcugaccgacgagaugaucgcccaguacaccagcgcccuccuggcggggaccaucacguccggcuggaccuucggggccggcgccgcccugcagauccccuucgcgaugcagauggccuaccgguucaacggcaucggggucacccagaacgugcucuacgagaaccagaagcugaucgccaaccaguucaacagcgccaucggcaagauccaggacucccugagcuccaccgccagcgcgcucgggaagcugcaggacguggucaaccagaacgcccaggcccugaacacgcucgugaagcagcuguccagcaacuucggcgccaucuccagcgugcugaacgacauccucucccgccuggacccgcccgaggccgaggugcagaucgaccggcugaucaccgggcgccuccagagccugcagaccuacgugacccagcagcugauccgggcggccgagauccgcgccagcgccaaccucgccgcgaccaagauguccgagugcguccugggccagagcaagcggguggacuucugcggcaagggguaccaccugauguccuucccccagagcgccccgcacggcguggucuuccuccacgugacguacguccccgcccaggagaagaacuucaccaccgcccccgcgaucugccacgacgggaaggcccacuucccccgcgagggcguguucguguccaacgggacccacugguucgucacgcagcggaacuucuacgagccgcagaucaucaccaccgacaacaccuucgugagcggcaacugcgacguggucaucggcaucgugaacaacacgguguacgacccccugcagcccgagcuggacuccuucaaggaggagcucgacaaguacuucaagaaccacaccagccccgacgucgaccugggggacaucuccggcaucaacgccagcguggugaacauccagaaggagaucgaccgccugaacgaggucgccaagaaccucaacgagucccugaucgaccugcaggagcucgggaaguacgagcaguacaucaaguggccgugguacaucuggcugggcuucaucgccggccugaucgcgaucgugauggugaccaucaugcucugcugcaugaccagcugcugcuccugccugaaggggugcugcagcugcggcuccugcugcaaguucgacgaggacgacagcgagcccguccugaagggggugaagcuccacuacacgugaggacuaguuauaagacugacuagcccgaugggccucccaacgggcccuccuccccuccuugcaccgagagaucucaaaggcucuuuucagagccaccaaaaaaaaaaaaaaaaaaaaaaaaaaaaaaaaaaaaaaaaaaaaaaaaaaaaaaaaaaaaaaaaaaaaaaaaaaaaaaaaaaaaaaaaaaaaaaaaaaaaa

SEQ ID NO: 24628 - RNA, 4029 nt, Artificial Sequence
  SARS-CoV-2/Wuhan/WIV05/2019__EPI_ISL_402128 spike protein mRNA gc (1-1273)(K986P_V987P_H69del_V70del_Y453F_D614G_I692V_M1229I)
aggagaaagcuuaccauguucguguuccugguccuccugccccuggugagcucccagugcgugaaccucaccacccgcacgcagcugccgcccgccuacaccaacagcuucacccggggcgucuacuaccccgacaagguguuccgcuccagcgugcugcacuccacccaggaccucuuccugcccuucuucagcaacgucacgugguuccacgccaucuccgggaccaacggcaccaagcgguucgacaacccggugcugcccuucaacgacggggucuacuucgcgagcaccgagaaguccaacaucauccgcggcuggaucuucgggacgacccucgacagcaagacccagucccugcugaucgugaacaacgccaccaacguggucaucaaggugugcgaguuccaguucugcaacgaccccuuccucggcguguacuaccacaagaacaacaagagcuggauggaguccgaguuccgggucuacagcuccgccaacaacugcacguucgaguacgugagccagcccuuccugauggaccuggagggcaagcaggggaacuucaagaaccuccgcgaguucguguucaagaacaucgacggcuacuucaagaucuacuccaagcacaccccgaucaaccugguccgggaccugccccagggguucagcgcccucgagccccugguggaccugcccaucggcaucaacaucacccgcuuccagacccuccuggcccugcaccgguccuaccucacgccgggggacagcagcuccggcuggaccgcgggcgccgccgccuacuacgugggguaccugcagccccgcaccuuccugcucaaguacaacgagaacggcaccaucacggacgcggucgacugcgcccuggacccccugagcgagaccaagugcacccucaaguccuucaccguggagaaggggaucuaccagacgagcaacuuccgggugcagcccaccgaguccaucguccgcuucccgaacaucaccaaccugugccccuucggcgagguguucaacgccacccgguucgccagcgucuacgccuggaaccgcaagcggaucuccaacugcguggcggacuacagcgugcuguacaacuccgccagcuucuccacguucaagugcuacggcgucagccccaccaagcucaacgaccugugcuucaccaacguguacgccgacuccuucgugauccgcggggacgagguccggcagaucgcccccggccagaccgggaagaucgccgacuacaacuacaagcugccggacgacuucacgggcugcgugaucgcguggaacagcaacaaccucgacuccaaggucgggggcaacuacaacuaccuguuccgccuguuccgcaagagcaaccucaagcccuucgagcgggacaucuccaccgagaucuaccaggccggcagcacccccugcaacgggguggagggcuucaacugcuacuucccccugcaguccuacggguuccagccgaccaacggcgugggguaccagcccuaccggguggucgugcugagcuucgagcuccugcacgcccccgccacggugugcggccccaagaaguccaccaaccuggucaagaacaagugcgugaacuucaacuucaacggccucaccgggaccggcgugcugaccgagagcaacaagaaguuccugccguuccagcaguucgggcgcgacaucgccgacacgaccgacgcgguccgcgacccccagacccuggagauccucgacaucacccccugcagcuucggcgggguguccgugaucacgccgggcaccaacaccagcaaccaggucgccgugcuguaccagggcgugaacugcaccgagguccccguggccauccacgccgaccagcugacgcccaccuggcggguguacuccaccggcagcaacgucuuccagacccgcgccgggugccucaucggcgcggagcacgugaacaacuccuacgagugcgacauccccaucggggccggcaucugcgccagcuaccagacgcagaccaacuccccgcggcgcgcccggagcguggcgucccagagcgugaucgccuacaccaugucccugggcgccgagaacagcgucgccuacuccaacaacagcaucgccauccccaccaacuucacgaucuccgugaccaccgagauccugcccgugagcaugaccaagacgagcgucgacugcaccauguacaucugcggggacuccaccgagugcagcaaccuccugcugcaguacggcuccuucugcacccagcucaaccgcgcgcugacggggaucgccguggagcaggacaagaacacccaggagguguucgcccaggucaagcagaucuacaagacgcccccgaucaaggacuucggcggguucaacuucagccagauccugcccgaccccuccaagcccagcaagcgguccuucaucgaggaccuccuguucaacaaggugacccuggccgacgccggcuucaucaagcaguacggcgacugccucggggacaucgcggcccgcgaccugaucugcgcccagaaguucaacggccugaccgugcucccgccccugcugaccgacgagaugaucgcccaguacaccagcgcccuccuggcggggaccaucacguccggcuggaccuucggggccggcgccgcccugcagauccccuucgcgaugcagauggccuaccgguucaacggcaucggggucacccagaacgugcucuacgagaaccagaagcugaucgccaaccaguucaacagcgccaucggcaagauccaggacucccugagcuccaccgccagcgcgcucgggaagcugcaggacguggucaaccagaacgcccaggcccugaacacgcucgugaagcagcuguccagcaacuucggcgccaucuccagcgugcugaacgacauccucucccgccuggacccgcccgaggccgaggugcagaucgaccggcugaucaccgggcgccuccagagccugcagaccuacgugacccagcagcugauccgggcggccgagauccgcgccagcgccaaccucgccgcgaccaagauguccgagugcguccugggccagagcaagcggguggacuucugcggcaagggguaccaccugauguccuucccccagagcgccccgcacggcguggucuuccuccacgugacguacguccccgcccaggagaagaacuucaccaccgcccccgcgaucugccacgacgggaaggcccacuucccccgcgagggcguguucguguccaacgggacccacugguucgucacgcagcggaacuucuacgagccgcagaucaucaccaccgacaacaccuucgugagcggcaacugcgacguggucaucggcaucgugaacaacacgguguacgacccccugcagcccgagcuggacuccuucaaggaggagcucgacaaguacuucaagaaccacaccagccccgacgucgaccugggggacaucuccggcaucaacgccagcguggugaacauccagaaggagaucgaccgccugaacgaggucgccaagaaccucaacgagucccugaucgaccugcaggagcucgggaaguacgagcaguacaucaaguggccgugguacaucuggcugggcuucaucgccggccugaucgcgaucgugaucgugaccaucaugcucugcugcaugaccagcugcugcuccugccugaaggggugcugcagcugcggcuccugcugcaaguucgacgaggacgacagcgagcccguccugaagggggugaagcuccacuacacgugaggacuaguuauaagacugacuagcccgaugggccucccaacgggcccuccuccccuccuugcaccgagagaucucaaaggcucuuuucagagccaccaaaaaaaaaaaaaaaaaaaaaaaaaaaaaaaaaaaaaaaaaaaaaaaaaaaaaaaaaaaaaaaaaaaaaaaaaaaaaaaaaaaaaaaaaaaaaaaaaaaaa

SEQ ID NO: 24629 - RNA, 4026 nt, Artificial Sequence
  SARS-CoV-2/Wuhan/WIV05/2019__EPI_ISL_402128 spike protein mRNA gc (1-1273)(K986P_V987P_K986P_V987P_H69del_V70del_Y144del_N501Y_A570 D_D614G_P681H_T716I_S982A_D1118H)
aggagaaagcuuaccauguucguguuccugguccuccugccccuggugagcucccagugcgugaaccucaccacccgcacgcagcugccgcccgccuacaccaacagcuucacccggggcgucuacuaccccgacaagguguuccgcuccagcgugcugcacuccacccaggaccucuuccugcccuucuucagcaacgucacgugguuccacgccaucuccgggaccaacggcaccaagcgguucgacaacccggugcugcccuucaacgacggggucuacuucgcgagcaccgagaaguccaacaucauccgcggcuggaucuucgggacgacccucgacagcaagacccagucccugcugaucgugaacaacgccaccaacguggucaucaaggugugcgaguuccaguucugcaacgaccccuuccucggcguguaccacaagaacaacaagagcuggauggaguccgaguuccgggucuacagcuccgccaacaacugcacguucgaguacgugagccagcccuuccugauggaccuggagggcaagcaggggaacuucaagaaccuccgcgaguucguguucaagaacaucgacggcuacuucaagaucuacuccaagcacaccccgaucaaccugguccgggaccugccccagggguucagcgcccucgagccccugguggaccugcccaucggcaucaacaucacccgcuuccagacccuccuggcccugcaccgguccuaccucacgccgggggacagcagcuccggcuggaccgcgggcgccgccgccuacuacgugggguaccugcagccccgcaccuuccugcucaaguacaacgagaacggcaccaucacggacgcggucgacugcgcccuggacccccugagcgagaccaagugcacccucaaguccuucaccguggagaaggggaucuaccagacgagcaacuuccgggugcagcccaccgaguccaucguccgcuucccgaacaucaccaaccugugccccuucggcgagguguucaacgccacccgguucgccagcgucuacgccuggaaccgcaagcggaucuccaacugcguggcggacuacagcgugcuguacaacuccgccagcuucuccacguucaagugcuacggcgucagccccaccaagcucaacgaccugugcuucaccaacguguacgccgacuccuucgugauccgcggggacgagguccggcagaucgcccccggccagaccgggaagaucgccgacuacaacuacaagcugccggacgacuucacgggcugcgugaucgcguggaacagcaacaaccucgacuccaaggucgggggcaacuacaacuaccuguaccgccuguuccgcaagagcaaccucaagcccuucgagcgggacaucuccaccgagaucuaccaggccggcagcacccccugcaacgggguggagggcuucaacugcuacuucccccugcaguccuacggguuccagccgaccuacggcgugggguaccagcccuaccggguggucgugcugagcuucgagcuccugcacgcccccgccacggugugcggccccaagaaguccaccaaccuggucaagaacaagugcgugaacuucaacuucaacggccucaccgggaccggcgugcugaccgagagcaacaagaaguuccugccguuccagcaguucgggcgcgacaucgacgacacgaccgacgcgguccgcgacccccagacccuggagauccucgacaucacccccugcagcuucggcgggguguccgugaucacgccgggcaccaacaccagcaaccaggucgccgugcuguaccagggcgugaacugcaccgagguccccguggccauccacgccgaccagcugacgcccaccuggcggguguacuccaccggcagcaacgucuuccagacccgcgccgggugccucaucggcgcggagcacgugaacaacuccuacgagugcgacauccccaucggggccggcaucugcgccagcuaccagacgcagaccaacucccaccggcgcgcccggagcguggcgucccagagcaucaucgccuacaccaugucccugggcgccgagaacagcgucgccuacuccaacaacagcaucgccauccccaucaacuucacgaucuccgugaccaccgagauccugcccgugagcaugaccaagacgagcgucgacugcaccauguacaucugcggggacuccaccgagugcagcaaccuccugcugcaguacggcuccuucugcacccagcucaaccgcgcgcugacggggaucgccguggagcaggacaagaacacccaggagguguucgcccaggucaagcagaucuacaagacgcccccgaucaaggacuucggcggguucaacuucagccagauccugcccgaccccuccaagcccagcaagcgguccuucaucgaggaccuccuguucaacaaggugacccuggccgacgccggcuucaucaagcaguacggcgacugccucggggacaucgcggcccgcgaccugaucugcgcccagaaguucaacggccugaccgugcucccgccccugcugaccgacgagaugaucgcccaguacaccagcgcccuccuggcggggaccaucacguccggcuggaccuucggggccggcgccgcccugcagauccccuucgcgaugcagauggccuaccgguucaacggcaucggggucacccagaacgugcucuacgagaaccagaagcugaucgccaaccaguucaacagcgccaucggcaagauccaggacucccugagcuccaccgccagcgcgcucgggaagcugcaggacguggucaaccagaacgcccaggcccugaacacgcucgugaagcagcuguccagcaacuucggcgccaucuccagcgugcugaacgacauccucgcccgccuggacccgcccgaggccgaggugcagaucgaccggcugaucaccgggcgccuccagagccugcagaccuacgugacccagcagcugauccgggcggccgagauccgcgccagcgccaaccucgccgcgaccaagauguccgagugcguccugggccagagcaagcggguggacuucugcggcaagggguaccaccugauguccuucccccagagcgccccgcacggcguggucuuccuccacgugacguacguccccgcccaggagaagaacuucaccaccgcccccgcgaucugccacgacgggaaggcccacuucccccgcgagggcguguucguguccaacgggacccacugguucgucacgcagcggaacuucuacgagccgcagaucaucaccacccacaacaccuucgugagcggcaacugcgacguggucaucggcaucgugaacaacacgguguacgacccccugcagcccgagcuggacuccuucaaggaggagcucgacaaguacuucaagaaccacaccagccccgacgucgaccugggggacaucuccggcaucaacgccagcguggugaacauccagaaggagaucgaccgccugaacgaggucgccaagaaccucaacgagucccugaucgaccugcaggagcucgggaaguacgagcaguacaucaaguggccgugguacaucuggcugggcuucaucgccggccugaucgcgaucgugauggugaccaucaugcucugcugcaugaccagcugcugcuccugccugaaggggugcugcagcugcggcuccugcugcaaguucgacgaggacgacagcgagcccguccugaagggggugaagcuccacuacacgugaggacuaguuauaagacugacuagcccgaugggccucccaacgggcccuccuccccuccuugcaccgagagaucucaaaggcucuuuucagagccaccaaaaaaaaaaaaaaaaaaaaaaaaaaaaaaaaaaaaaaaaaaaaaaaaaaaaaaaaaaaaaaaaaaaaaaaaaaaaaaaaaaaaaaaaaaaaaaaaaaaaa

SEQ ID NO: 24630 - RNA, 4035 nt, Artificial Sequence
  SARS-CoV-2/Wuhan/WIV05/2019__EPI_ISL_402128 spike protein mRNA gc (1-1273)(K986P_V987P_K986P_V987P_K417N_E484K_N501Y_D614G)
aggagaaagcuuaccauguucguguuccugguccuccugccccuggugagcucccagugcgugaaccucaccacccgcacgcagcugccgcccgccuacaccaacagcuucacccggggcgucuacuaccccgacaagguguuccgcuccagcgugcugcacuccacccaggaccucuuccugcccuucuucagcaacgucacgugguuccacgccauccacguguccgggaccaacggcaccaagcgguucgacaacccggugcugcccuucaacgacggggucuacuucgcgagcaccgagaaguccaacaucauccgcggcuggaucuucgggacgacccucgacagcaagacccagucccugcugaucgugaacaacgccaccaacguggucaucaaggugugcgaguuccaguucugcaacgaccccuuccucggcguguacuaccacaagaacaacaagagcuggauggaguccgaguuccgggucuacagcuccgccaacaacugcacguucgaguacgugagccagcccuuccugauggaccuggagggcaagcaggggaacuucaagaaccuccgcgaguucguguucaagaacaucgacggcuacuucaagaucuacuccaagcacaccccgaucaaccugguccgggaccugccccagggguucagcgcccucgagccccugguggaccugcccaucggcaucaacaucacccgcuuccagacccuccuggcccugcaccgguccuaccucacgccgggggacagcagcuccggcuggaccgcgggcgccgccgccuacuacgugggguaccugcagccccgcaccuuccugcucaaguacaacgagaacggcaccaucacggacgcggucgacugcgcccuggacccccugagcgagaccaagugcacccucaaguccuucaccguggagaaggggaucuaccagacgagcaacuuccgggugcagcccaccgaguccaucguccgcuucccgaacaucaccaaccugugccccuucggcgagguguucaacgccacccgguucgccagcgucuacgccuggaaccgcaagcggaucuccaacugcguggcggacuacagcgugcuguacaacuccgccagcuucuccacguucaagugcuacggcgucagccccaccaagcucaacgaccugugcuucaccaacguguacgccgacuccuucgugauccgcggggacgagguccggcagaucgcccccggccagaccgggaacaucgccgacuacaacuacaagcugccggacgacuucacgggcugcgugaucgcguggaacagcaacaaccucgacuccaaggucgggggcaacuacaacuaccuguaccgccuguuccgcaagagcaaccucaagcccuucgagcgggacaucuccaccgagaucuaccaggccggcagcacccccugcaacggggugaagggcuucaacugcuacuucccccugcaguccuacggguuccagccgaccuacggcgugggguaccagcccuaccggguggucgugcugagcuucgagcuccugcacgcccccgccacggugugcggccccaagaaguccaccaaccuggucaagaacaagugcgugaacuucaacuucaacggccucaccgggaccggcgugcugaccgagagcaacaagaaguuccugccguuccagcaguucgggcgcgacaucgccgacacgaccgacgcgguccgcgacccccagacccuggagauccucgacaucacccccugcagcuucggcgggguguccgugaucacgccgggcaccaacaccagcaaccaggucgccgugcuguaccagggcgugaacugcaccgagguccccguggccauccacgccgaccagcugacgcccaccuggcggguguacuccaccggcagcaacgucuuccagacccgcgccgggugccucaucggcgcggagcacgugaacaacuccuacgagugcgacauccccaucggggccggcaucugcgccagcuaccagacgcagaccaacuccccgcggcgcgcccggagcguggcgucccagagcaucaucgccuacaccaugucccugggcgccgagaacagcgucgccuacuccaacaacagcaucgccauccccaccaacuucacgaucuccgugaccaccgagauccugcccgugagcaugaccaagacgagcgucgacugcaccauguacaucugcggggacuccaccgagugcagcaaccuccugcugcaguacggcuccuucugcacccagcucaaccgcgcgcugacggggaucgccguggagcaggacaagaacacccaggagguguucgcccaggucaagcagaucuacaagacgcccccgaucaaggacuucggcggguucaacuucagccagauccugcccgaccccuccaagcccagcaagcgguccuucaucgaggaccuccuguucaacaaggugacccuggccgacgccggcuucaucaagcaguacggcgacugccucggggacaucgcggcccgcgaccugaucugcgcccagaaguucaacggccugaccgugcucccgccccugcugaccgacgagaugaucgcccaguacaccagcgcccuccuggcggggaccaucacguccggcuggaccuucggggccggcgccgcccugcagauccccuucgcgaugcagauggccuaccgguucaacggcaucggggucacccagaacgugcucuacgagaaccagaagcugaucgccaaccaguucaacagcgccaucggcaagauccaggacucccugagcuccaccgccagcgcgcucgggaagcugcaggacguggucaaccagaacgcccaggcccugaacacgcucgugaagcagcuguccagcaacuucggcgccaucuccagcgugcugaacgacauccucucccgccuggacccgcccgaggccgaggugcagaucgaccggcugaucaccgggcgccuccagagccugcagaccuacgugacccagcagcugauccgggcggccgagauccgcgccagcgccaaccucgccgcgaccaagauguccgagugcguccugggccagagcaagcggguggacuucugcggcaagggguaccaccugauguccuucccccagagcgccccgcacggcguggucuuccuccacgugacguacguccccgcccaggagaagaacuucaccaccgcccccgcgaucugccacgacgggaaggcccacuucccccgcgagggcguguucguguccaacgggacccacugguucgucacgcagcggaacuucuacgagccgcagaucaucaccaccgacaacaccuucgugagcggcaacugcgacguggucaucggcaucgugaacaacacgguguacgacccccugcagcccgagcuggacuccuucaaggaggagcucgacaaguacuucaagaaccacaccagccccgacgucgaccugggggacaucuccggcaucaacgccagcguggugaacauccagaaggagaucgaccgccugaacgaggucgccaagaaccucaacgagucccugaucgaccugcaggagcucgggaaguacgagcaguacaucaaguggccgugguacaucuggcugggcuucaucgccggccugaucgcgaucgugauggugaccaucaugcucugcugcaugaccagcugcugcuccugccugaaggggugcugcagcugcggcuccugcugcaaguucgacgaggacgacagcgagcccguccugaagggggugaagcuccacuacacgugaggacuaguuauaagacugacuagcccgaugggccucccaacgggcccuccuccccuccuugcaccgagagaucucaaaggcucuuuucagagccaccaaaaaaaaaaaaaaaaaaaaaaaaaaaaaaaaaaaaaaaaaaaaaaaaaaaaaaaaaaaaaaaaaaaaaaaaaaaaaaaaaaaaaaaaaaaaaaaaaaaaa

SEQ ID NO: 24631 - RNA, 4026 nt, Artificial Sequence
  SARS-CoV-2/Wuhan/WIV05/2019__EPI_ISL_402128 spike protein mRNA gc (1-1273)(K986P_V987P_K986P_V987P_L18F_D80A_D215G_L242del_A243del_ L244del_R246I_K417N_E484K_N501Y_D614G_A701V)
aggagaaagcuuaccauguucguguuccugguccuccugccccuggugagcucccagugcgugaacuucaccacccgcacgcagcugccgcccgccuacaccaacagcuucacccggggcgucuacuaccccgacaagguguuccgcuccagcgugcugcacuccacccaggaccucuuccugcccuucuucagcaacgucacgugguuccacgccauccacguguccgggaccaacggcaccaagcgguucgccaacccggugcugcccuucaacgacggggucuacuucgcgagcaccgagaaguccaacaucauccgcggcuggaucuucgggacgacccucgacagcaagacccagucccugcugaucgugaacaacgccaccaacguggucaucaaggugugcgaguuccaguucugcaacgaccccuuccucggcguguacuaccacaagaacaacaagagcuggauggaguccgaguuccgggucuacagcuccgccaacaacugcacguucgaguacgugagccagcccuuccugauggaccuggagggcaagcaggggaacuucaagaaccuccgcgaguucguguucaagaacaucgacggcuacuucaagaucuacuccaagcacaccccgaucaaccugguccggggccugccccagggguucagcgcccucgagccccugguggaccugcccaucggcaucaacaucacccgcuuccagacccuccacaucuccuaccucacgccgggggacagcagcuccggcuggaccgcgggcgccgccgccuacuacgugggguaccugcagccccgcaccuuccugcucaaguacaacgagaacggcaccaucacggacgcggucgacugcgcccuggacccccugagcgagaccaagugcacccucaaguccuucaccguggagaaggggaucuaccagacgagcaacuuccgggugcagcccaccgaguccaucguccgcuucccgaacaucaccaaccugugccccuucggcgagguguucaacgccacccgguucgccagcgucuacgccuggaaccgcaagcggaucuccaacugcguggcggacuacagcgugcuguacaacuccgccagcuucuccacguucaagugcuacggcgucagccccaccaagcucaacgaccugugcuucaccaacguguacgccgacuccuucgugauccgcggggacgagguccggcagaucgcccccggccagaccgggaacaucgccgacuacaacuacaagcugccggacgacuucacgggcugcgugaucgcguggaacagcaacaaccucgacuccaaggucgggggcaacuacaacuaccuguaccgccuguuccgcaagagcaaccucaagcccuucgagcgggacaucuccaccgagaucuaccaggccggcagcacccccugcaacggggugaagggcuucaacugcuacuucccccugcaguccuacggguuccagccgaccuacggcgugggguaccagcccuaccggguggucgugcugagcuucgagcuccugcacgcccccgccacggugugcggccccaagaaguccaccaaccuggucaagaacaagugcgugaacuucaacuucaacggccucaccgggaccggcgugcugaccgagagcaacaagaaguuccugccguuccagcaguucgggcgcgacaucgccgacacgaccgacgcgguccgcgacccccagacccuggagauccucgacaucacccccugcagcuucggcgggguguccgugaucacgccgggcaccaacaccagcaaccaggucgccgugcuguaccagggcgugaacugcaccgagguccccguggccauccacgccgaccagcugacgcccaccuggcggguguacuccaccggcagcaacgucuuccagacccgcgccgggugccucaucggcgcggagcacgugaacaacuccuacgagugcgacauccccaucggggccggcaucugcgccagcuaccagacgcagaccaacuccccgcggcgcgcccggagcguggcgucccagagcaucaucgccuacaccaugucccugggcguggagaacagcgucgccuacuccaacaacagcaucgccauccccaccaacuucacgaucuccgugaccaccgagauccugcccgugagcaugaccaagacgagcgucgacugcaccauguacaucugcggggacuccaccgagugcagcaaccuccugcugcaguacggcuccuucugcacccagcucaaccgcgcgcugacggggaucgccguggagcaggacaagaacacccaggagguguucgcccaggucaagcagaucuacaagacgcccccgaucaaggacuucggcggguucaacuucagccagauccugcccgaccccuccaagcccagcaagcgguccuucaucgaggaccuccuguucaacaaggugacccuggccgacgccggcuucaucaagcaguacggcgacugccucggggacaucgcggcccgcgaccugaucugcgcccagaaguucaacggccugaccgugcucccgccccugcugaccgacgagaugaucgcccaguacaccagcgcccuccuggcggggaccaucacguccggcuggaccuucggggccggcgccgcccugcagauccccuucgcgaugcagauggccuaccgguucaacggcaucggggucacccagaacgugcucuacgagaaccagaagcugaucgccaaccaguucaacagcgccaucggcaagauccaggacucccugagcuccaccgccagcgcgcucgggaagcugcaggacguggucaaccagaacgcccaggcccugaacacgcucgugaagcagcuguccagcaacuucggcgccaucuccagcgugcugaacgacauccucucccgccuggacccgcccgaggccgaggugcagaucgaccggcugaucaccgggcgccuccagagccugcagaccuacgugacccagcagcugauccgggcggccgagauccgcgccagcgccaaccucgccgcgaccaagauguccgagugcguccugggccagagcaagcggguggacuucugcggcaagggguaccaccugauguccuucccccagagcgccccgcacggcguggucuuccuccacgugacguacguccccgcccaggagaagaacuucaccaccgcccccgcgaucugccacgacgggaaggcccacuucccccgcgagggcguguucguguccaacgggacccacugguucgucacgcagcggaacuucuacgagccgcagaucaucaccaccgacaacaccuucgugagcggcaacugcgacguggucaucggcaucgugaacaacacgguguacgacccccugcagcccgagcuggacuccuucaaggaggagcucgacaaguacuucaagaaccacaccagccccgacgucgaccugggggacaucuccggcaucaacgccagcguggugaacauccagaaggagaucgaccgccugaacgaggucgccaagaaccucaacgagucccugaucgaccugcaggagcucgggaaguacgagcaguacaucaaguggccgugguacaucuggcugggcuucaucgccggccugaucgcgaucgugauggugaccaucaugcucugcugcaugaccagcugcugcuccugccugaaggggugcugcagcugcggcuccugcugcaaguucgacgaggacgacagcgagcccguccugaagggggugaagcuccacuacacgugaggacuaguuauaagacugacuagcccgaugggccucccaacgggcccuccuccccuccuugcaccgagagaucucaaaggcucuuuucagagccaccaaaaaaaaaaaaaaaaaaaaaaaaaaaaaaaaaaaaaaaaaaaaaaaaaaaaaaaaaaaaaaaaaaaaaaaaaaaaaaaaaaaaaaaaaaaaaaaaaaaaa

SEQ ID NO: 24632 - RNA, 4035 nt, Artificial Sequence
  SARS-CoV-2/Wuhan/WIV05/2019__EPI_ISL_402128 spike protein mRNA gc (1-1273)(K986P_V987P_K986P_V987P_E484K_D614G)
aggagaaagcuuaccauguucguguuccugguccuccugccccuggugagcucccagugcgugaaccucaccacccgcacgcagcugccgcccgccuacaccaacagcuucacccggggcgucuacuaccccgacaagguguuccgcuccagcgugcugcacuccacccaggaccucuuccugcccuucuucagcaacgucacgugguuccacgccauccacguguccgggaccaacggcaccaagcgguucgacaacccggugcugcccuucaacgacggggucuacuucgcgagcaccgagaaguccaacaucauccgcggcuggaucuucgggacgacccucgacagcaagacccagucccugcugaucgugaacaacgccaccaacguggucaucaaggugugcgaguuccaguucugcaacgaccccuuccucggcguguacuaccacaagaacaacaagagcuggauggaguccgaguuccgggucuacagcuccgccaacaacugcacguucgaguacgugagccagcccuuccugauggaccuggagggcaagcaggggaacuucaagaaccuccgcgaguucguguucaagaacaucgacggcuacuucaagaucuacuccaagcacaccccgaucaaccugguccgggaccugccccagggguucagcgcccucgagccccugguggaccugcccaucggcaucaacaucacccgcuuccagacccuccuggcccugcaccgguccuaccucacgccgggggacagcagcuccggcuggaccgcgggcgccgccgccuacuacgugggguaccugcagccccgcaccuuccugcucaaguacaacgagaacggcaccaucacggacgcggucgacugcgcccuggacccccugagcgagaccaagugcacccucaaguccuucaccguggagaaggggaucuaccagacgagcaacuuccgggugcagcccaccgaguccaucguccgcuucccgaacaucaccaaccugugccccuucggcgagguguucaacgccacccgguucgccagcgucuacgccuggaaccgcaagcggaucuccaacugcguggcggacuacagcgugcuguacaacuccgccagcuucuccacguucaagugcuacggcgucagccccaccaagcucaacgaccugugcuucaccaacguguacgccgacuccuucgugauccgcggggacgagguccggcagaucgcccccggccagaccgggaagaucgccgacuacaacuacaagcugccggacgacuucacgggcugcgugaucgcguggaacagcaacaaccucgacuccaaggucgggggcaacuacaacuaccuguaccgccuguuccgcaagagcaaccucaagcccuucgagcgggacaucuccaccgagaucuaccaggccggcagcacccccugcaacggggugaagggcuucaacugcuacuucccccugcaguccuacggguuccagccgaccaacggcgugggguaccagcccuaccggguggucgugcugagcuucgagcuccugcacgcccccgccacggugugcggccccaagaaguccaccaaccuggucaagaacaagugcgugaacuucaacuucaacggccucaccgggaccggcgugcugaccgagagcaacaagaaguuccugccguuccagcaguucgggcgcgacaucgccgacacgaccgacgcgguccgcgacccccagacccuggagauccucgacaucacccccugcagcuucggcgggguguccgugaucacgccgggcaccaacaccagcaaccaggucgccgugcuguaccagggcgugaacugcaccgagguccccguggccauccacgccgaccagcugacgcccaccuggcggguguacuccaccggcagcaacgucuuccagacccgcgccgggugccucaucggcgcggagcacgugaacaacuccuacgagugcgacauccccaucggggccggcaucugcgccagcuaccagacgcagaccaacuccccgcggcgcgcccggagcguggcgucccagagcaucaucgccuacaccaugucccugggcgccgagaacagcgucgccuacuccaacaacagcaucgccauccccaccaacuucacgaucuccgugaccaccgagauccugcccgugagcaugaccaagacgagcgucgacugcaccauguacaucugcggggacuccaccgagugcagcaaccuccugcugcaguacggcuccuucugcacccagcucaaccgcgcgcugacggggaucgccguggagcaggacaagaacacccaggagguguucgcccaggucaagcagaucuacaagacgcccccgaucaaggacuucggcggguucaacuucagccagauccugcccgaccccuccaagcccagcaagcgguccuucaucgaggaccuccuguucaacaaggugacccuggccgacgccggcuucaucaagcaguacggcgacugccucggggacaucgcggcccgcgaccugaucugcgcccagaaguucaacggccugaccgugcucccgccccugcugaccgacgagaugaucgcccaguacaccagcgcccuccuggcggggaccaucacguccggcuggaccuucggggccggcgccgcccugcagauccccuucgcgaugcagauggccuaccgguucaacggcaucggggucacccagaacgugcucuacgagaaccagaagcugaucgccaaccaguucaacagcgccaucggcaagauccaggacucccugagcuccaccgccagcgcgcucgggaagcugcaggacguggucaaccagaacgcccaggcccugaacacgcucgugaagcagcuguccagcaacuucggcgccaucuccagcgugcugaacgacauccucucccgccuggacccgcccgaggccgaggugcagaucgaccggcugaucaccgggcgccuccagagccugcagaccuacgugacccagcagcugauccgggcggccgagauccgcgccagcgccaaccucgccgcgaccaagauguccgagugcguccugggccagagcaagcggguggacuucugcggcaagggguaccaccugauguccuucccccagagcgccccgcacggcguggucuuccuccacgugacguacguccccgcccaggagaagaacuucaccaccgcccccgcgaucugccacgacgggaaggcccacuucccccgcgagggcguguucguguccaacgggacccacugguucgucacgcagcggaacuucuacgagccgcagaucaucaccaccgacaacaccuucgugagcggcaacugcgacguggucaucggcaucgugaacaacacgguguacgacccccugcagcccgagcuggacuccuucaaggaggagcucgacaaguacuucaagaaccacaccagccccgacgucgaccugggggacaucuccggcaucaacgccagcguggugaacauccagaaggagaucgaccgccugaacgaggucgccaagaaccucaacgagucccugaucgaccugcaggagcucgggaaguacgagcaguacaucaaguggccgugguacaucuggcugggcuucaucgccggccugaucgcgaucgugauggugaccaucaugcucugcugcaugaccagcugcugcuccugccugaaggggugcugcagcugcggcuccugcugcaaguucgacgaggacgacagcgagcccguccugaagggggugaagcuccacuacacgugaggacuaguuauaagacugacuagcccgaugggccucccaacgggcccuccuccccuccuugcaccgagagaucucaaaggcucuuuucagagccaccaaaaaaaaaaaaaaaaaaaaaaaaaaaaaaaaaaaaaaaaaaaaaaaaaaaaaaaaaaaaaaaaaaaaaaaaaaaaaaaaaaaaaaaaaaaaaaaaaaaaa

SEQ ID NO: 24633 - RNA, 4035 nt, Artificial Sequence
  SARS-CoV-2/Wuhan/WIV05/2019__EPI_ISL_402128 spike protein mRNA gc (1-1273)(K986P_V987P_K986P_V987P_L18F_T20N_P26S_D138Y_R190S_K417T _E484K_N501Y_D614G_H655Y_T1027I)
aggagaaagcuuaccauguucguguuccugguccuccugccccuggugagcucccagugcgugaacuucaccaaccgcacgcagcugccgagcgccuacaccaacagcuucacccggggcgucuacuaccccgacaagguguuccgcuccagcgugcugcacuccacccaggaccucuuccugcccuucuucagcaacgucacgugguuccacgccauccacguguccgggaccaacggcaccaagcgguucgacaacccggugcugcccuucaacgacggggucuacuucgcgagcaccgagaaguccaacaucauccgcggcuggaucuucgggacgacccucgacagcaagacccagucccugcugaucgugaacaacgccaccaacguggucaucaaggugugcgaguuccaguucugcaacuaccccuuccucggcguguacuaccacaagaacaacaagagcuggauggaguccgaguuccgggucuacagcuccgccaacaacugcacguucgaguacgugagccagcccuuccugauggaccuggagggcaagcaggggaacuucaagaaccucagcgaguucguguucaagaacaucgacggcuacuucaagaucuacuccaagcacaccccgaucaaccugguccgggaccugccccagggguucagcgcccucgagccccugguggaccugcccaucggcaucaacaucacccgcuuccagacccuccuggcccugcaccgguccuaccucacgccgggggacagcagcuccggcuggaccgcgggcgccgccgccuacuacgugggguaccugcagccccgcaccuuccugcucaaguacaacgagaacggcaccaucacggacgcggucgacugcgcccuggacccccugagcgagaccaagugcacccucaaguccuucaccguggagaaggggaucuaccagacgagcaacuuccgggugcagcccaccgaguccaucguccgcuucccgaacaucaccaaccugugccccuucggcgagguguucaacgccacccgguucgccagcgucuacgccuggaaccgcaagcggaucuccaacugcguggcggacuacagcgugcuguacaacuccgccagcuucuccacguucaagugcuacggcgucagccccaccaagcucaacgaccugugcuucaccaacguguacgccgacuccuucgugauccgcggggacgagguccggcagaucgcccccggccagaccgggaccaucgccgacuacaacuacaagcugccggacgacuucacgggcugcgugaucgcguggaacagcaacaaccucgacuccaaggucgggggcaacuacaacuaccuguaccgccuguuccgcaagagcaaccucaagcccuucgagcgggacaucuccaccgagaucuaccaggccggcagcacccccugcaacggggugaagggcuucaacugcuacuucccccugcaguccuacggguuccagccgaccuacggcgugggguaccagcccuaccggguggucgugcugagcuucgagcuccugcacgcccccgccacggugugcggccccaagaaguccaccaaccuggucaagaacaagugcgugaacuucaacuucaacggccucaccgggaccggcgugcugaccgagagcaacaagaaguuccugccguuccagcaguucgggcgcgacaucgccgacacgaccgacgcgguccgcgacccccagacccuggagauccucgacaucacccccugcagcuucggcgggguguccgugaucacgccgggcaccaacaccagcaaccaggucgccgugcuguaccagggcgugaacugcaccgagguccccguggccauccacgccgaccagcugacgcccaccuggcggguguacuccaccggcagcaacgucuuccagacccgcgccgggugccucaucggcgcggaguacgugaacaacuccuacgagugcgacauccccaucggggccggcaucugcgccagcuaccagacgcagaccaacuccccgcggcgcgcccggagcguggcgucccagagcaucaucgccuacaccaugucccugggcgccgagaacagcgucgccuacuccaacaacagcaucgccauccccaccaacuucacgaucuccgugaccaccgagauccugcccgugagcaugaccaagacgagcgucgacugcaccauguacaucugcggggacuccaccgagugcagcaaccuccugcugcaguacggcuccuucugcacccagcucaaccgcgcgcugacggggaucgccguggagcaggacaagaacacccaggagguguucgcccaggucaagcagaucuacaagacgcccccgaucaaggacuucggcggguucaacuucagccagauccugcccgaccccuccaagcccagcaagcgguccuucaucgaggaccuccuguucaacaaggugacccuggccgacgccggcuucaucaagcaguacggcgacugccucggggacaucgcggcccgcgaccugaucugcgcccagaaguucaacggccugaccgugcucccgccccugcugaccgacgagaugaucgcccaguacaccagcgcccuccuggcggggaccaucacguccggcuggaccuucggggccggcgccgcccugcagauccccuucgcgaugcagauggccuaccgguucaacggcaucggggucacccagaacgugcucuacgagaaccagaagcugaucgccaaccaguucaacagcgccaucggcaagauccaggacucccugagcuccaccgccagcgcgcucgggaagcugcaggacguggucaaccagaacgcccaggcccugaacacgcucgugaagcagcuguccagcaacuucggcgccaucuccagcgugcugaacgacauccucucccgccuggacccgcccgaggccgaggugcagaucgaccggcugaucaccgggcgccuccagagccugcagaccuacgugacccagcagcugauccgggcggccgagauccgcgccagcgccaaccucgccgcgaucaagauguccgagugcguccugggccagagcaagcggguggacuucugcggcaagggguaccaccugauguccuucccccagagcgccccgcacggcguggucuuccuccacgugacguacguccccgcccaggagaagaacuucaccaccgcccccgcgaucugccacgacgggaaggcccacuucccccgcgagggcguguucguguccaacgggacccacugguucgucacgcagcggaacuucuacgagccgcagaucaucaccaccgacaacaccuucgugagcggcaacugcgacguggucaucggcaucgugaacaacacgguguacgacccccugcagcccgagcuggacuccuucaaggaggagcucgacaaguacuucaagaaccacaccagccccgacgucgaccugggggacaucuccggcaucaacgccagcguggugaacauccagaaggagaucgaccgccugaacgaggucgccaagaaccucaacgagucccugaucgaccugcaggagcucgggaaguacgagcaguacaucaaguggccgugguacaucuggcugggcuucaucgccggccugaucgcgaucgugauggugaccaucaugcucugcugcaugaccagcugcugcuccugccugaaggggugcugcagcugcggcuccugcugcaaguucgacgaggacgacagcgagcccguccugaagggggugaagcuccacuacacgugaggacuaguuauaagacugacuagcccgaugggccucccaacgggcccuccuccccuccuugcaccgagagaucucaaaggcucuuuucagagccaccaaaaaaaaaaaaaaaaaaaaaaaaaaaaaaaaaaaaaaaaaaaaaaaaaaaaaaaaaaaaaaaaaaaaaaaaaaaaaaaaaaaaaaaaaaaaaaaaaaaaa

SEQ ID NO: 24634 - RNA, 4035 nt, Artificial Sequence
  SARS-CoV-2/Wuhan/WIV05/2019__EPI_ISL_402128 spike protein mRNA gc (1-1273)(K986P_V987P_K986P_V987P_S13I_W152C_L452R_D614G)
aggagaaagcuuaccauguucguguuccugguccuccugccccuggugagcauccagugcgugaaccucaccacccgcacgcagcugccgcccgccuacaccaacagcuucacccggggcgucuacuaccccgacaagguguuccgcuccagcgugcugcacuccacccaggaccucuuccugcccuucuucagcaacgucacgugguuccacgccauccacguguccgggaccaacggcaccaagcgguucgacaacccggugcugcccuucaacgacggggucuacuucgcgagcaccgagaaguccaacaucauccgcggcuggaucuucgggacgacccucgacagcaagacccagucccugcugaucgugaacaacgccaccaacguggucaucaaggugugcgaguuccaguucugcaacgaccccuuccucggcguguacuaccacaagaacaacaagagcugcauggaguccgaguuccgggucuacagcuccgccaacaacugcacguucgaguacgugagccagcccuuccugauggaccuggagggcaagcaggggaacuucaagaaccuccgcgaguucguguucaagaacaucgacggcuacuucaagaucuacuccaagcacaccccgaucaaccugguccgggaccugccccagggguucagcgcccucgagccccugguggaccugcccaucggcaucaacaucacccgcuuccagacccuccuggcccugcaccgguccuaccucacgccgggggacagcagcuccggcuggaccgcgggcgccgccgccuacuacgugggguaccugcagccccgcaccuuccugcucaaguacaacgagaacggcaccaucacggacgcggucgacugcgcccuggacccccugagcgagaccaagugcacccucaaguccuucaccguggagaaggggaucuaccagacgagcaacuuccgggugcagcccaccgaguccaucguccgcuucccgaacaucaccaaccugugccccuucggcgagguguucaacgccacccgguucgccagcgucuacgccuggaaccgcaagcggaucuccaacugcguggcggacuacagcgugcuguacaacuccgccagcuucuccacguucaagugcuacggcgucagccccaccaagcucaacgaccugugcuucaccaacguguacgccgacuccuucgugauccgcggggacgagguccggcagaucgcccccggccagaccgggaagaucgccgacuacaacuacaagcugccggacgacuucacgggcugcgugaucgcguggaacagcaacaaccucgacuccaaggucgggggcaacuacaacuaccgcuaccgccuguuccgcaagagcaaccucaagcccuucgagcgggacaucuccaccgagaucuaccaggccggcagcacccccugcaacgggguggagggcuucaacugcuacuucccccugcaguccuacggguuccagccgaccaacggcgugggguaccagcccuaccggguggucgugcugagcuucgagcuccugcacgcccccgccacggugugcggccccaagaaguccaccaaccuggucaagaacaagugcgugaacuucaacuucaacggccucaccgggaccggcgugcugaccgagagcaacaagaaguuccugccguuccagcaguucgggcgcgacaucgccgacacgaccgacgcgguccgcgacccccagacccuggagauccucgacaucacccccugcagcuucggcgggguguccgugaucacgccgggcaccaacaccagcaaccaggucgccgugcuguaccagggcgugaacugcaccgagguccccguggccauccacgccgaccagcugacgcccaccuggcggguguacuccaccggcagcaacgucuuccagacccgcgccgggugccucaucggcgcggagcacgugaacaacuccuacgagugcgacauccccaucggggccggcaucugcgccagcuaccagacgcagaccaacuccccgcggcgcgcccggagcguggcgucccagagcaucaucgccuacaccaugucccugggcgccgagaacagcgucgccuacuccaacaacagcaucgccauccccaccaacuucacgaucuccgugaccaccgagauccugcccgugagcaugaccaagacgagcgucgacugcaccauguacaucugcggggacuccaccgagugcagcaaccuccugcugcaguacggcuccuucugcacccagcucaaccgcgcgcugacggggaucgccguggagcaggacaagaacacccaggagguguucgcccaggucaagcagaucuacaagacgcccccgaucaaggacuucggcggguucaacuucagccagauccugcccgaccccuccaagcccagcaagcgguccuucaucgaggaccuccuguucaacaaggugacccuggccgacgccggcuucaucaagcaguacggcgacugccucggggacaucgcggcccgcgaccugaucugcgcccagaaguucaacggccugaccgugcucccgccccugcugaccgacgagaugaucgcccaguacaccagcgcccuccuggcggggaccaucacguccggcuggaccuucggggccggcgccgcccugcagauccccuucgcgaugcagauggccuaccgguucaacggcaucggggucacccagaacgugcucuacgagaaccagaagcugaucgccaaccaguucaacagcgccaucggcaagauccaggacucccugagcuccaccgccagcgcgcucgggaagcugcaggacguggucaaccagaacgcccaggcccugaacacgcucgugaagcagcuguccagcaacuucggcgccaucuccagcgugcugaacgacauccucucccgccuggacccgcccgaggccgaggugcagaucgaccggcugaucaccgggcgccuccagagccugcagaccuacgugacccagcagcugauccgggcggccgagauccgcgccagcgccaaccucgccgcgaccaagauguccgagugcguccugggccagagcaagcggguggacuucugcggcaagggguaccaccugauguccuucccccagagcgccccgcacggcguggucuuccuccacgugacguacguccccgcccaggagaagaacuucaccaccgcccccgcgaucugccacgacgggaaggcccacuucccccgcgagggcguguucguguccaacgggacccacugguucgucacgcagcggaacuucuacgagccgcagaucaucaccaccgacaacaccuucgugagcggcaacugcgacguggucaucggcaucgugaacaacacgguguacgacccccugcagcccgagcuggacuccuucaaggaggagcucgacaaguacuucaagaaccacaccagccccgacgucgaccugggggacaucuccggcaucaacgccagcguggugaacauccagaaggagaucgaccgccugaacgaggucgccaagaaccucaacgagucccugaucgaccugcaggagcucgggaaguacgagcaguacaucaaguggccgugguacaucuggcugggcuucaucgccggccugaucgcgaucgugauggugaccaucaugcucugcugcaugaccagcugcugcuccugccugaaggggugcugcagcugcggcuccugcugcaaguucgacgaggacgacagcgagcccguccugaagggggugaagcuccacuacacgugaggacuaguuauaagacugacuagcccgaugggccucccaacgggcccuccuccccuccuugcaccgagagaucucaaaggcucuuuucagagccaccaaaaaaaaaaaaaaaaaaaaaaaaaaaaaaaaaaaaaaaaaaaaaaaaaaaaaaaaaaaaaaaaaaaaaaaaaaaaaaaaaaaaaaaaaaaaaaaaaaaaa

SEQ ID NO: 24635 - RNA, 4035 nt, Artificial Sequence
  SARS-CoV-2/Wuhan/WIV05/2019__EPI_ISL_402128 spike protein mRNA gc (1-1273)(K986P_V987P)
aggagaaagcuuaccauguucguguuccugguccuccugccccuggugagcucccagugcgugaaccucaccacccgcacgcagcugccgcccgccuacaccaacagcuucacccggggcgucuacuaccccgacaagguguuccgcuccagcgugcugcacuccacccaggaccucuuccugcccuucuucagcaacgucacgugguuccacgccauccacguguccgggaccaacggcaccaagcgguucgacaacccggugcugcccuucaacgacggggucuacuucgcgagcaccgagaaguccaacaucauccgcggcuggaucuucgggacgacccucgacagcaagacccagucccugcugaucgugaacaacgccaccaacguggucaucaaggugugcgaguuccaguucugcaacgaccccuuccucggcguguacuaccacaagaacaacaagagcuggauggaguccgaguuccgggucuacagcuccgccaacaacugcacguucgaguacgugagccagcccuuccugauggaccuggagggcaagcaggggaacuucaagaaccuccgcgaguucguguucaagaacaucgacggcuacuucaagaucuacuccaagcacaccccgaucaaccugguccgggaccugccccagggguucagcgcccucgagccccugguggaccugcccaucggcaucaacaucacccgcuuccagacccuccuggcccugcaccgguccuaccucacgccgggggacagcagcuccggcuggaccgcgggcgccgccgccuacuacgugggguaccugcagccccgcaccuuccugcucaaguacaacgagaacggcaccaucacggacgcggucgacugcgcccuggacccccugagcgagaccaagugcacccucaaguccuucaccguggagaaggggaucuaccagacgagcaacuuccgggugcagcccaccgaguccaucguccgcuucccgaacaucaccaaccugugccccuucggcgagguguucaacgccacccgguucgccagcgucuacgccuggaaccgcaagcggaucuccaacugcguggcggacuacagcgugcuguacaacuccgccagcuucuccacguucaagugcuacggcgucagccccaccaagcucaacgaccugugcuucaccaacguguacgccgacuccuucgugauccgcggggacgagguccggcagaucgcccccggccagaccgggaagaucgccgacuacaacuacaagcugccggacgacuucacgggcugcgugaucgcguggaacagcaacaaccucgacuccaaggucgggggcaacuacaacuaccuguaccgccuguuccgcaagagcaaccucaagcccuucgagcgggacaucuccaccgagaucuaccaggccggcagcacccccugcaacgggguggagggcuucaacugcuacuucccccugcaguccuacggguuccagccgaccaacggcgugggguaccagcccuaccggguggucgugcugagcuucgagcuccugcacgcccccgccacggugugcggccccaagaaguccaccaaccuggucaagaacaagugcgugaacuucaacuucaacggccucaccgggaccggcgugcugaccgagagcaacaagaaguuccugccguuccagcaguucgggcgcgacaucgccgacacgaccgacgcgguccgcgacccccagacccuggagauccucgacaucacccccugcagcuucggcgggguguccgugaucacgccgggcaccaacaccagcaaccaggucgccgugcuguaccaggacgugaacugcaccgagguccccguggccauccacgccgaccagcugacgcccaccuggcggguguacuccaccggcagcaacgucuuccagacccgcgccgggugccucaucggcgcggagcacgugaacaacuccuacgagugcgacauccccaucggggccggcaucugcgccagcuaccagacgcagaccaacuccccgcggcgcgcccggagcguggcgucccagagcaucaucgccuacaccaugucccugggcgccgagaacagcgucgccuacuccaacaacagcaucgccauccccaccaacuucacgaucuccgugaccaccgagauccugcccgugagcaugaccaagacgagcgucgacugcaccauguacaucugcggggacuccaccgagugcagcaaccuccugcugcaguacggcuccuucugcacccagcucaaccgcgcgcugacggggaucgccguggagcaggacaagaacacccaggagguguucgcccaggucaagcagaucuacaagacgcccccgaucaaggacuucggcggguucaacuucagccagauccugcccgaccccuccaagcccagcaagcgguccuucaucgaggaccuccuguucaacaaggugacccuggccgacgccggcuucaucaagcaguacggcgacugccucggggacaucgcggcccgcgaccugaucugcgcccagaaguucaacggccugaccgugcucccgccccugcugaccgacgagaugaucgcccaguacaccagcgcccuccuggcggggaccaucacguccggcuggaccuucggggccggcgccgcccugcagauccccuucgcgaugcagauggccuaccgguucaacggcaucggggucacccagaacgugcucuacgagaaccagaagcugaucgccaaccaguucaacagcgccaucggcaagauccaggacucccugagcuccaccgccagcgcgcucgggaagcugcaggacguggucaaccagaacgcccaggcccugaacacgcucgugaagcagcuguccagcaacuucggcgccaucuccagcgugcugaacgacauccucucccgccuggacccgcccgaggccgagguccagaucgaccggcugaucaccgggcgccuccagagccugcagaccuacgugacccagcagcugauccgggcggccgagauccgcgccagcgccaaccucgccgcgaccaagauguccgagugcgugcugggccagagcaagcgggucgacuucugcggcaagggguaccaccugauguccuucccccagagcgcgccccacggcgugguguuccuccacgucacguacgugcccgcccaggagaagaacuucaccaccgccccggccaucugccacgacgggaaggcccacuucccccgcgagggcgucuucguguccaacgggacccacugguucgugacgcagcggaacuucuacgagccccagaucaucaccaccgacaacaccuucgucagcggcaacugcgacguggugaucggcaucgucaacaacacgguguacgacccccugcagccggagcuggacuccuucaaggaggagcucgacaaguacuucaagaaccacaccagccccgacguggaccugggggacaucuccggcaucaacgccagcgucgugaacauccagaaggagaucgaccgccugaacgagguggccaagaaccucaacgagucccugaucgaccugcaggagcucgggaaguacgagcaguacaucaaguggcccugguacaucuggcugggcuucaucgccggccugaucgcgaucgucauggugaccaucaugcucugcugcaugaccagcugcugcuccugccugaaggggugcugcagcugcggcuccugcugcaaguucgacgaggacgacagcgagccggugcugaagggggucaagcuccacuacacgugaggacuaguuauaagacugacuagcccgaugggccucccaacgggcccuccuccccuccuugcaccgagagaucucaaaggcucuuuucagagccaccaaaaaaaaaaaaaaaaaaaaaaaaaaaaaaaaaaaaaaaaaaaaaaaaaaaaaaaaaaaaaaaaaaaaaaaaaaaaaaaaaaaaaaaaaaaaaaaaaaaaa

SEQ ID NO: 24636 - RNA, 4035 nt, Artificial Sequence
  SARS-CoV-2/Wuhan/WIV05/2019__EPI_ISL_402128 spike protein mRNA gc (1-1273)(K986P_V987P_ D614G)
aggagaaagcuuaccauguucguguuccugguccuccugccccuggugagcucccagugcgugaaccucaccacccgcacgcagcugccgcccgccuacaccaacagcuucacccggggcgucuacuaccccgacaagguguuccgcuccagcgugcugcacuccacccaggaccucuuccugcccuucuucagcaacgucacgugguuccacgccauccacguguccgggaccaacggcaccaagcgguucgacaacccggugcugcccuucaacgacggggucuacuucgcgagcaccgagaaguccaacaucauccgcggcuggaucuucgggacgacccucgacagcaagacccagucccugcugaucgugaacaacgccaccaacguggucaucaaggugugcgaguuccaguucugcaacgaccccuuccucggcguguacuaccacaagaacaacaagagcuggauggaguccgaguuccgggucuacagcuccgccaacaacugcacguucgaguacgugagccagcccuuccugauggaccuggagggcaagcaggggaacuucaagaaccuccgcgaguucguguucaagaacaucgacggcuacuucaagaucuacuccaagcacaccccgaucaaccugguccgggaccugccccagggguucagcgcccucgagccccugguggaccugcccaucggcaucaacaucacccgcuuccagacccuccuggcccugcaccgguccuaccucacgccgggggacagcagcuccggcuggaccgcgggcgccgccgccuacuacgugggguaccugcagccccgcaccuuccugcucaaguacaacgagaacggcaccaucacggacgcggucgacugcgcccuggacccccugagcgagaccaagugcacccucaaguccuucaccguggagaaggggaucuaccagacgagcaacuuccgggugcagcccaccgaguccaucguccgcuucccgaacaucaccaaccugugccccuucggcgagguguucaacgccacccgguucgccagcgucuacgccuggaaccgcaagcggaucuccaacugcguggcggacuacagcgugcuguacaacuccgccagcuucuccacguucaagugcuacggcgucagccccaccaagcucaacgaccugugcuucaccaacguguacgccgacuccuucgugauccgcggggacgagguccggcagaucgcccccggccagaccgggaagaucgccgacuacaacuacaagcugccggacgacuucacgggcugcgugaucgcguggaacagcaacaaccucgacuccaaggucgggggcaacuacaacuaccuguaccgccuguuccgcaagagcaaccucaagcccuucgagcgggacaucuccaccgagaucuaccaggccggcagcacccccugcaacgggguggagggcuucaacugcuacuucccccugcaguccuacggguuccagccgaccaacggcgugggguaccagcccuaccggguggucgugcugagcuucgagcuccugcacgcccccgccacggugugcggccccaagaaguccaccaaccuggucaagaacaagugcgugaacuucaacuucaacggccucaccgggaccggcgugcugaccgagagcaacaagaaguuccugccguuccagcaguucgggcgcgacaucgccgacacgaccgacgcgguccgcgacccccagacccuggagauccucgacaucacccccugcagcuucggcgggguguccgugaucacgccgggcaccaacaccagcaaccaggucgccgugcuguaccagggcgugaacugcaccgagguccccguggccauccacgccgaccagcugacgcccaccuggcggguguacuccaccgggagcaacgucuuccagacccgcgccggcugccucaucggggcggagcacgugaacaacuccuacgagugcgacauccccaucggcgccggcaucugcgccagcuaccagacgcagaccaacuccccgcggcgcgcccggagcguggcgucccagagcaucaucgccuacaccaugucccugggggccgagaacagcgucgccuacuccaacaacagcaucgccauccccaccaacuucacgaucuccgugaccaccgagauccugcccgugagcaugaccaagacgagcgucgacugcaccauguacaucugcggcgacuccaccgagugcagcaaccuccugcugcaguacggguccuucugcacccagcucaaccgcgcgcugacgggcaucgccguggagcaggacaagaacacccaggagguguucgcccaggucaagcagaucuacaagacgcccccgaucaaggacuucgggggcuucaacuucagccagauccugcccgaccccuccaagcccagcaagcgguccuucaucgaggaccuccuguucaacaaggugacccuggccgacgccggcuucaucaagcaguacggggacugccucggcgacaucgcggcccgcgaccugaucugcgcccagaaguucaacgggcugaccgugcucccgccccugcugaccgacgagaugaucgcccaguacaccagcgcccuccuggcgggcaccaucacguccggguggaccuucggcgccggcgccgcccugcagauccccuucgcgaugcagauggccuaccgguucaacgggaucggcgucacccagaacgugcucuacgagaaccagaagcugaucgccaaccaguucaacagcgccaucgggaagauccaggacucccugagcuccaccgccagcgcgcucggcaagcugcaggacguggucaaccagaacgcccaggcccugaacacgcucgugaagcagcuguccagcaacuucggggccaucuccagcgugcugaacgacauccucucccgccuggacccgcccgaggccgagguccagaucgaccggcugaucaccggccgccuccagagccugcagaccuacgugacccagcagcugauccgggcggccgagauccgcgccagcgccaaccucgccgcgaccaagauguccgagugcgugcugggccagagcaagcgggucgacuucugcgggaagggcuaccaccugauguccuucccccagagcgcgccccacggggugguguuccuccacgucacguacgugcccgcccaggagaagaacuucaccaccgccccggccaucugccacgacggcaaggcccacuucccccgcgagggggucuucguguccaacggcacccacugguucgugacgcagcggaacuucuacgagccccagaucaucaccaccgacaacaccuucgucagcggcaacugcgacguggugaucgggaucgucaacaacacgguguacgacccccugcagccggagcuggacuccuucaaggaggagcucgacaaguacuucaagaaccacaccagccccgacguggaccugggcgacaucuccgggaucaacgccagcgucgugaacauccagaaggagaucgaccgccugaacgagguggccaagaaccucaacgagucccugaucgaccugcaggagcucggcaaguacgagcaguacaucaaguggcccugguacaucuggcugggcuucaucgccgggcugaucgcgaucgucauggugaccaucaugcucugcugcaugaccagcugcugcuccugccugaagggcugcugcagcugcggguccugcugcaaguucgacgaggacgacagcgagccggugcugaagggcgucaagcuccacuacacgugaggacuaguuauaagacugacuagcccgaugggccucccaacgggcccuccuccccuccuugcaccgagagaucucaaaggcucuuuucagagccaccaaaaaaaaaaaaaaaaaaaaaaaaaaaaaaaaaaaaaaaaaaaaaaaaaaaaaaaaaaaaaaaaaaaaaaaaaaaaaaaaaaaaaaaaaaaaaaaaaaaaa

SEQ ID NO: 24637 - RNA, 4035 nt, Artificial Sequence
  SARS-CoV-2/Wuhan/WIV05/2019__EPI_ISL_402128 spike protein mRNA gc (1-1273)(K986P_V987P_A222V_D614G)
aggagaaagcuuaccauguucguguuccugguccuccugccccuggugagcucccagugcgugaaccucaccacccgcacgcagcugccgcccgccuacaccaacagcuucacccggggcgucuacuaccccgacaagguguuccgcuccagcgugcugcacuccacccaggaccucuuccugcccuucuucagcaacgucacgugguuccacgccauccacguguccgggaccaacggcaccaagcgguucgacaacccggugcugcccuucaacgacggggucuacuucgcgagcaccgagaaguccaacaucauccgcggcuggaucuucgggacgacccucgacagcaagacccagucccugcugaucgugaacaacgccaccaacguggucaucaaggugugcgaguuccaguucugcaacgaccccuuccucggcguguacuaccacaagaacaacaagagcuggauggaguccgaguuccgggucuacagcuccgccaacaacugcacguucgaguacgugagccagcccuuccugauggaccuggagggcaagcaggggaacuucaagaaccuccgcgaguucguguucaagaacaucgacggcuacuucaagaucuacuccaagcacaccccgaucaaccugguccgggaccugccccagggguucagcgugcucgagccccugguggaccugcccaucggcaucaacaucacccgcuuccagacccuccuggcccugcaccgguccuaccucacgccgggggacagcagcuccggcuggaccgccggcgcggccgccuacuacgucggguaccugcagccccgcaccuuccugcucaaguacaacgagaacggcaccaucacggacgccguggacugcgcgcuggacccccugagcgagaccaagugcacccucaaguccuucaccguggagaaggggaucuaccagacgagcaacuuccggguccagcccaccgaguccaucgugcgcuucccgaacaucaccaaccugugccccuucggcgaggucuucaacgccacccgguucgccagcguguacgccuggaaccgcaagcggaucuccaacugcguggccgacuacagcguccuguacaacuccgcgagcuucuccacguucaagugcuacggcgugagccccaccaagcucaacgaccugugcuucaccaacguguacgccgacuccuucgucauccgcggggacgaggugcggcagaucgcccccggccagaccgggaagaucgccgacuacaacuacaagcugccggacgacuucacgggcugcgugaucgccuggaacagcaacaaccucgacuccaaggucgggggcaacuacaacuaccuguaccgccuguuccgcaagagcaaccucaagcccuucgagcgggacaucuccaccgagaucuaccaggcgggcagcacccccugcaacgggguggagggcuucaacugcuacuucccccugcaguccuacggguuccagccgaccaacggcgugggguaccagcccuaccgggucguggugcugagcuucgagcuccugcacgcccccgccacggucugcggccccaagaaguccaccaaccuggugaagaacaagugcgugaacuucaacuucaacggccucaccgggaccggcguccugaccgagagcaacaagaaguuccugccguuccagcaguucgggcgcgacaucgccgacacgaccgacgccgugcgcgacccccagacccuggagauccucgacaucacccccugcagcuucggcgggguguccgucaucacgccgggcaccaacaccagcaaccagguggcggugcuguaccagggcgucaacugcaccgaggugcccguggccauccacgccgaccagcugacgcccaccuggcgggucuacuccaccgggagcaacguguuccagacccgcgccggcugccucaucggggccgagcacgugaacaacuccuacgagugcgacauccccaucggcgcgggcaucugcgccagcuaccagacgcagaccaacuccccgcggcgcgcccggagcgucgccucccagagcaucaucgcguacaccaugucccugggggccgagaacagcguggccuacuccaacaacagcaucgccauccccaccaacuucacgaucuccgugaccaccgagauccugcccgucagcaugaccaagacgagcguggacugcaccauguacaucugcggcgacuccaccgagugcagcaaccuccugcugcaguacggguccuucugcacccagcucaaccgcgcccugacgggcaucgcgguggagcaggacaagaacacccaggaggucuucgcccaggugaagcagaucuacaagacgcccccgaucaaggacuucgggggcuucaacuucagccagauccugcccgaccccuccaagcccagcaagcgguccuucaucgaggaccuccuguucaacaaggugacccuggccgacgccggcuucaucaagcaguacggggacugccucggcgacaucgccgcgcgcgaccugaucugcgcccagaaguucaacgggcugaccguccucccgccccugcugaccgacgagaugaucgcccaguacaccagcgcccuccuggccggcaccaucacguccggguggaccuucggcgcgggcgccgcccugcagauccccuucgccaugcagauggcguaccgguucaacgggaucggcgugacccagaacgugcucuacgagaaccagaagcugaucgccaaccaguucaacagcgccaucgggaagauccaggacucccugagcuccaccgccagcgcccucggcaagcugcaggacgucgugaaccagaacgcgcaggcccugaacacgcucgugaagcagcuguccagcaacuucggggccaucuccagcguccugaacgacauccucucccgccuggacccgcccgaggccgaggugcagaucgaccggcugaucaccggccgccuccagagccugcagaccuacgugacccagcagcugauccgggccgcggagauccgcgccagcgccaaccucgccgccaccaagauguccgagugcguccugggccagagcaagcggguggacuucugcgggaagggcuaccaccugauguccuucccccagagcgcgccccacgggguggucuuccuccacgugacguacguccccgcccaggagaagaacuucaccaccgccccggccaucugccacgacggcaaggcgcacuucccccgcgaggggguguucguguccaacggcacccacugguucgucacgcagcggaacuucuacgagccccagaucaucaccaccgacaacaccuucgugagcggcaacugcgacguggucaucgggaucgugaacaacacgguguacgacccccugcagccggagcuggacuccuucaaggaggagcucgacaaguacuucaagaaccacaccagccccgacgucgaccugggcgacaucuccgggaucaacgccagcguggugaacauccagaaggagaucgaccgccugaacgaggucgccaagaaccucaacgagucccugaucgaccugcaggagcucggcaaguacgagcaguacaucaaguggcccugguacaucuggcugggcuucaucgccgggcugaucgccaucgugauggugaccaucaugcucugcugcaugaccagcugcugcuccugccugaagggcugcugcagcugcggguccugcugcaaguucgacgaggacgacagcgagccgguccugaagggcgugaagcuccacuacacgugaggacuaguuauaagacugacuagcccgaugggccucccaacgggcccuccuccccuccuugcaccgagagaucucaaaggcucuuuucagagccaccaaaaaaaaaaaaaaaaaaaaaaaaaaaaaaaaaaaaaaaaaaaaaaaaaaaaaaaaaaaaaaaaaaaaaaaaaaaaaaaaaaaaaaaaaaaaaaaaaaaaa

SEQ ID NO: 24638 - RNA, 4035 nt, Artificial Sequence
  SARS-CoV-2/Wuhan/WIV05/2019__EPI_ISL_402128 spike protein mRNA gc (1-1273)(K986P_V987P_N439K_D614G)
aggagaaagcuuaccauguucguguuccugguccuccugccccuggugagcucccagugcgugaaccucaccacccgcacgcagcugccgcccgccuacaccaacagcuucacccggggcgucuacuaccccgacaagguguuccgcuccagcgugcugcacuccacccaggaccucuuccugcccuucuucagcaacgucacgugguuccacgccauccacguguccgggaccaacggcaccaagcgguucgacaacccggugcugcccuucaacgacggggucuacuucgcgagcaccgagaaguccaacaucauccgcggcuggaucuucgggacgacccucgacagcaagacccagucccugcugaucgugaacaacgccaccaacguggucaucaaggugugcgaguuccaguucugcaacgaccccuuccucggcguguacuaccacaagaacaacaagagcuggauggaguccgaguuccgggucuacagcuccgccaacaacugcacguucgaguacgugagccagcccuuccugauggaccuggagggcaagcaggggaacuucaagaaccuccgcgaguucguguucaagaacaucgacggcuacuucaagaucuacuccaagcacaccccgaucaaccugguccgggaccugccccagggguucagcgcccucgagccccugguggaccugcccaucggcaucaacaucacccgcuuccagacccuccuggcccugcaccgguccuaccucacgccgggggacagcagcuccggcuggaccgcgggcgccgccgccuacuacgugggguaccugcagccccgcaccuuccugcucaaguacaacgagaacggcaccaucacggacgcggucgacugcgcccuggacccccugagcgagaccaagugcacccucaaguccuucaccguggagaaggggaucuaccagacgagcaacuuccgggugcagcccaccgaguccaucguccgcuucccgaacaucaccaaccugugccccuucggcgagguguucaacgccacccgguucgccagcgucuacgccuggaaccgcaagcggaucuccaacugcguggcggacuacagcgugcuguacaacuccgccagcuucuccacguucaagugcuacggcgucagccccaccaagcucaacgaccugugcuucaccaacguguacgccgacuccuucgugauccgcggggacgagguccggcagaucgcccccggccagaccgggaagaucgccgacuacaacuacaagcugccggacgacuucacgggcugcgugaucgcguggaacagcaagaaccucgacuccaaggucgggggcaacuacaacuaccuguaccgccuguuccgcaagagcaaccucaagcccuucgagcgggacaucuccaccgagaucuaccaggccggcagcacccccugcaacgggguggagggcuucaacugcuacuucccccugcaguccuacggguuccagccgaccaacggcgugggguaccagcccuaccggguggucgugcugagcuucgagcuccugcacgcccccgccacggugugcggccccaagaaguccaccaaccuggucaagaacaagugcgugaacuucaacuucaacggccucaccgggaccggcgugcugaccgagagcaacaagaaguuccugccguuccagcaguucgggcgcgacaucgccgacacgaccgacgcgguccgcgacccccagacccuggagauccucgacaucacccccugcagcuucggcgggguguccgugaucacgccgggcaccaacaccagcaaccaggucgccgugcuguaccagggcgugaacugcaccgagguccccguggccauccacgccgaccagcugacgcccaccuggcggguguacuccaccgggagcaacgucuuccagacccgcgccggcugccucaucggggcggagcacgugaacaacuccuacgagugcgacauccccaucggcgccggcaucugcgccagcuaccagacgcagaccaacuccccgcggcgcgcccggagcguggcgucccagagcaucaucgccuacaccaugucccugggggccgagaacagcgucgccuacuccaacaacagcaucgccauccccaccaacuucacgaucuccgugaccaccgagauccugcccgugagcaugaccaagacgagcgucgacugcaccauguacaucugcggcgacuccaccgagugcagcaaccuccugcugcaguacggguccuucugcacccagcucaaccgcgcgcugacgggcaucgccguggagcaggacaagaacacccaggagguguucgcccaggucaagcagaucuacaagacgcccccgaucaaggacuucgggggcuucaacuucagccagauccugcccgaccccuccaagcccagcaagcgguccuucaucgaggaccuccuguucaacaaggugacccuggccgacgccggcuucaucaagcaguacggggacugccucggcgacaucgcggcccgcgaccugaucugcgcccagaaguucaacgggcugaccgugcucccgccccugcugaccgacgagaugaucgcccaguacaccagcgcccuccuggcgggcaccaucacguccggguggaccuucggcgccggcgccgcccugcagauccccuucgcgaugcagauggccuaccgguucaacgggaucggcgucacccagaacgugcucuacgagaaccagaagcugaucgccaaccaguucaacagcgccaucgggaagauccaggacucccugagcuccaccgccagcgcgcucggcaagcugcaggacguggucaaccagaacgcccaggcccugaacacgcucgugaagcagcuguccagcaacuucggggccaucuccagcgugcugaacgacauccucucccgccuggacccgcccgaggccgagguccagaucgaccggcugaucaccggccgccuccagagccugcagaccuacgugacccagcagcugauccgggcggccgagauccgcgccagcgccaaccucgccgcgaccaagauguccgagugcgugcugggccagagcaagcgggucgacuucugcgggaagggcuaccaccugauguccuucccccagagcgcgccccacggggugguguuccuccacgucacguacgugcccgcccaggagaagaacuucaccaccgccccggccaucugccacgacggcaaggcccacuucccccgcgagggggucuucguguccaacggcacccacugguucgugacgcagcggaacuucuacgagccccagaucaucaccaccgacaacaccuucgucagcggcaacugcgacguggugaucgggaucgucaacaacacgguguacgacccccugcagccggagcuggacuccuucaaggaggagcucgacaaguacuucaagaaccacaccagccccgacguggaccugggcgacaucuccgggaucaacgccagcgucgugaacauccagaaggagaucgaccgccugaacgagguggccaagaaccucaacgagucccugaucgaccugcaggagcucggcaaguacgagcaguacaucaaguggcccugguacaucuggcugggcuucaucgccgggcugaucgcgaucgucauggugaccaucaugcucugcugcaugaccagcugcugcuccugccugaagggcugcugcagcugcggguccugcugcaaguucgacgaggacgacagcgagccggugcugaagggcgucaagcuccacuacacgugaggacuaguuauaagacugacuagcccgaugggccucccaacgggcccuccuccccuccuugcaccgagagaucucaaaggcucuuuucagagccaccaaaaaaaaaaaaaaaaaaaaaaaaaaaaaaaaaaaaaaaaaaaaaaaaaaaaaaaaaaaaaaaaaaaaaaaaaaaaaaaaaaaaaaaaaaaaaaaaaaaaa

SEQ ID NO: 24639 - RNA, 4035 nt, Artificial Sequence
  SARS-CoV-2/Wuhan/WIV05/2019__EPI_ISL_402128 spike protein mRNA gc (1-1273)(K986P_V987P_S477N_D614G)
aggagaaagcuuaccauguucguguuccugguccuccugccccuggugagcucccagugcgugaaccucaccacccgcacgcagcugccgcccgccuacaccaacagcuucacccggggcgucuacuaccccgacaagguguuccgcuccagcgugcugcacuccacccaggaccucuuccugcccuucuucagcaacgucacgugguuccacgccauccacguguccgggaccaacggcaccaagcgguucgacaacccggugcugcccuucaacgacggggucuacuucgcgagcaccgagaaguccaacaucauccgcggcuggaucuucgggacgacccucgacagcaagacccagucccugcugaucgugaacaacgccaccaacguggucaucaaggugugcgaguuccaguucugcaacgaccccuuccucggcguguacuaccacaagaacaacaagagcuggauggaguccgaguuccgggucuacagcuccgccaacaacugcacguucgaguacgugagccagcccuuccugauggaccuggagggcaagcaggggaacuucaagaaccuccgcgaguucguguucaagaacaucgacggcuacuucaagaucuacuccaagcacaccccgaucaaccugguccgggaccugccccagggguucagcgcccucgagccccugguggaccugcccaucggcaucaacaucacccgcuuccagacccuccuggcccugcaccgguccuaccucacgccgggggacagcagcuccggcuggaccgcgggcgccgccgccuacuacgugggguaccugcagccccgcaccuuccugcucaaguacaacgagaacggcaccaucacggacgcggucgacugcgcccuggacccccugagcgagaccaagugcacccucaaguccuucaccguggagaaggggaucuaccagacgagcaacuuccgggugcagcccaccgaguccaucguccgcuucccgaacaucaccaaccugugccccuucggcgagguguucaacgccacccgguucgccagcgucuacgccuggaaccgcaagcggaucuccaacugcguggcggacuacagcgugcuguacaacuccgccagcuucuccacguucaagugcuacggcgucagccccaccaagcucaacgaccugugcuucaccaacguguacgccgacuccuucgugauccgcggggacgagguccggcagaucgcccccggccagaccgggaagaucgccgacuacaacuacaagcugccggacgacuucacgggcugcgugaucgcguggaacagcaacaaccucgacuccaaggucgggggcaacuacaacuaccuguaccgccuguuccgcaagagcaaccucaagcccuucgagcgggacaucuccaccgagaucuaccaggccggcaacacccccugcaacgggguggagggcuucaacugcuacuucccccugcagagcuacggguuccagccgaccaacggcgugggguaccagcccuaccggguggucgugcuguccuucgagcuccugcacgcccccgccacggugugcggccccaagaaguccaccaaccuggucaagaacaagugcgugaacuucaacuucaacggccucaccgggaccggcgugcugaccgagagcaacaagaaguuccugccguuccagcaguucgggcgcgacaucgccgacacgaccgacgcgguccgcgacccccagacccuggagauccucgacaucacccccugcagcuucggcggggugagcgugaucacgccgggcaccaacaccuccaaccaggucgccgugcuguaccagggcgugaacugcaccgagguccccguggccauccacgccgaccagcugacgcccaccuggcggguguacagcaccggguccaacgucuuccagacccgcgccggcugccucaucggggcggagcacgugaacaacagcuacgagugcgacauccccaucggcgccggcaucugcgccuccuaccagacgcagaccaacagcccgcggcgcgcccgguccguggcgagccaguccaucaucgccuacaccaugagccugggggccgagaacuccgucgccuacagcaacaacuccaucgccauccccaccaacuucacgaucagcgugaccaccgagauccugcccguguccaugaccaagacgagcgucgacugcaccauguacaucugcggcgacagcaccgagugcuccaaccuccugcugcaguacgggagcuucugcacccagcucaaccgcgcgcugacgggcaucgccguggagcaggacaagaacacccaggagguguucgcccaggucaagcagaucuacaagacgcccccgaucaaggacuucgggggcuucaacuucucccagauccugcccgaccccagcaagcccuccaagcggagcuucaucgaggaccuccuguucaacaaggugacccuggccgacgccggcuucaucaagcaguacggggacugccucggcgacaucgcggcccgcgaccugaucugcgcccagaaguucaacgggcugaccgugcucccgccccugcugaccgacgagaugaucgcccaguacaccuccgcccuccuggcgggcaccaucacgagcggguggaccuucggcgccggcgccgcccugcagauccccuucgcgaugcagauggccuaccgguucaacgggaucggcgucacccagaacgugcucuacgagaaccagaagcugaucgccaaccaguucaacuccgccaucgggaagauccaggacagccuguccagcaccgccuccgcgcucggcaagcugcaggacguggucaaccagaacgcccaggcccugaacacgcucgugaagcagcugagcuccaacuucggggccaucagcuccgugcugaacgacauccucagccgccuggacccgcccgaggccgagguccagaucgaccggcugaucaccggccgccuccagucccugcagaccuacgugacccagcagcugauccgggcggccgagauccgcgccagcgccaaccucgccgcgaccaagaugagcgagugcgugcugggccaguccaagcgggucgacuucugcgggaagggcuaccaccugaugagcuucccccaguccgcgccccacggggugguguuccuccacgucacguacgugcccgcccaggagaagaacuucaccaccgccccggccaucugccacgacggcaaggcccacuucccccgcgagggggucuucgugagcaacggcacccacugguucgugacgcagcggaacuucuacgagccccagaucaucaccaccgacaacaccuucgucuccggcaacugcgacguggugaucgggaucgucaacaacacgguguacgacccccugcagccggagcuggacagcuucaaggaggagcucgacaaguacuucaagaaccacaccucccccgacguggaccugggcgacaucagcgggaucaacgccuccgucgugaacauccagaaggagaucgaccgccugaacgagguggccaagaaccucaacgagagccugaucgaccugcaggagcucggcaaguacgagcaguacaucaaguggcccugguacaucuggcugggcuucaucgccgggcugaucgcgaucgucauggugaccaucaugcucugcugcaugaccuccugcugcagcugccugaagggcugcugcuccugcgggagcugcugcaaguucgacgaggacgacuccgagccggugcugaagggcgucaagcuccacuacacgugaggacuaguuauaagacugacuagcccgaugggccucccaacgggcccuccuccccuccuugcaccgagagaucucaaaggcucuuuucagagccaccaaaaaaaaaaaaaaaaaaaaaaaaaaaaaaaaaaaaaaaaaaaaaaaaaaaaaaaaaaaaaaaaaaaaaaaaaaaaaaaaaaaaaaaaaaaaaaaaaaaaa

SEQ ID NO: 24640 - RNA, 4035 nt, Artificial Sequence
  SARS-CoV-2/Wuhan/WIV05/2019__EPI_ISL_402128 spike protein mRNA gc (1-1273)(K986P_V987P_N501Y_D614G)
aggagaaagcuuaccauguucguguuccugguccuccugccccuggugagcucccagugcgugaaccucaccacccgcacgcagcugccgcccgccuacaccaacagcuucacccggggcgucuacuaccccgacaagguguuccgcuccagcgugcugcacuccacccaggaccucuuccugcccuucuucagcaacgucacgugguuccacgccauccacguguccgggaccaacggcaccaagcgguucgacaacccggugcugcccuucaacgacggggucuacuucgcgagcaccgagaaguccaacaucauccgcggcuggaucuucgggacgacccucgacagcaagacccagucccugcugaucgugaacaacgccaccaacguggucaucaaggugugcgaguuccaguucugcaacgaccccuuccucggcguguacuaccacaagaacaacaagagcuggauggaguccgaguuccgggucuacagcuccgccaacaacugcacguucgaguacgugagccagcccuuccugauggaccuggagggcaagcaggggaacuucaagaaccuccgcgaguucguguucaagaacaucgacggcuacuucaagaucuacuccaagcacaccccgaucaaccugguccgggaccugccccagggguucagcgcccucgagccccugguggaccugcccaucggcaucaacaucacccgcuuccagacccuccuggcccugcaccgguccuaccucacgccgggggacagcagcuccggcuggaccgcgggcgccgccgccuacuacgugggguaccugcagccccgcaccuuccugcucaaguacaacgagaacggcaccaucacggacgcggucgacugcgcccuggacccccugagcgagaccaagugcacccucaaguccuucaccguggagaaggggaucuaccagacgagcaacuuccgggugcagcccaccgaguccaucguccgcuucccgaacaucaccaaccugugccccuucggcgagguguucaacgccacccgguucgccagcgucuacgccuggaaccgcaagcggaucuccaacugcguggcggacuacagcgugcuguacaacuccgccagcuucuccacguucaagugcuacggcgucagccccaccaagcucaacgaccugugcuucaccaacguguacgccgacuccuucgugauccgcggggacgagguccggcagaucgcccccggccagaccgggaagaucgccgacuacaacuacaagcugccggacgacuucacgggcugcgugaucgcguggaacagcaacaaccucgacuccaaggucgggggcaacuacaacuaccuguaccgccuguuccgcaagagcaaccucaagcccuucgagcgggacaucuccaccgagaucuaccaggccggcagcacccccugcaacgggguggagggcuucaacugcuacuucccccugcaguccuacggguuccagccgaccuacggcgugggguaccagcccuaccggguggucgugcugagcuucgagcuccugcacgcccccgccacggugugcggccccaagaaguccaccaaccuggucaagaacaagugcgugaacuucaacuucaacggccucaccgggaccggcgugcugaccgagagcaacaagaaguuccugccguuccagcaguucgggcgcgacaucgccgacacgaccgacgcgguccgcgacccccagacccuggagauccucgacaucacccccugcagcuucggcgggguguccgugaucacgccgggcaccaacaccagcaaccaggucgccgugcuguaccagggcgugaacugcaccgagguccccguggccauccacgccgaccagcugacgcccaccuggcggguguacuccaccgggagcaacgucuuccagacccgcgccggcugccucaucggggcggagcacgugaacaacuccuacgagugcgacauccccaucggcgccggcaucugcgccagcuaccagacgcagaccaacuccccgcggcgcgcccggagcguggcgucccagagcaucaucgccuacaccaugucccugggggccgagaacagcgucgccuacuccaacaacagcaucgccauccccaccaacuucacgaucuccgugaccaccgagauccugcccgugagcaugaccaagacgagcgucgacugcaccauguacaucugcggcgacuccaccgagugcagcaaccuccugcugcaguacggguccuucugcacccagcucaaccgcgcgcugacgggcaucgccguggagcaggacaagaacacccaggagguguucgcccaggucaagcagaucuacaagacgcccccgaucaaggacuucgggggcuucaacuucagccagauccugcccgaccccuccaagcccagcaagcgguccuucaucgaggaccuccuguucaacaaggugacccuggccgacgccggcuucaucaagcaguacggggacugccucggcgacaucgcggcccgcgaccugaucugcgcccagaaguucaacgggcugaccgugcucccgccccugcugaccgacgagaugaucgcccaguacaccagcgcccuccuggcgggcaccaucacguccggguggaccuucggcgccggcgccgcccugcagauccccuucgcgaugcagauggccuaccgguucaacgggaucggcgucacccagaacgugcucuacgagaaccagaagcugaucgccaaccaguucaacagcgccaucgggaagauccaggacucccugagcuccaccgccagcgcgcucggcaagcugcaggacguggucaaccagaacgcccaggcccugaacacgcucgugaagcagcuguccagcaacuucggggccaucuccagcgugcugaacgacauccucucccgccuggacccgcccgaggccgagguccagaucgaccggcugaucaccggccgccuccagagccugcagaccuacgugacccagcagcugauccgggcggccgagauccgcgccagcgccaaccucgccgcgaccaagauguccgagugcgugcugggccagagcaagcgggucgacuucugcgggaagggcuaccaccugauguccuucccccagagcgcgccccacggggugguguuccuccacgucacguacgugcccgcccaggagaagaacuucaccaccgccccggccaucugccacgacggcaaggcccacuucccccgcgagggggucuucguguccaacggcacccacugguucgugacgcagcggaacuucuacgagccccagaucaucaccaccgacaacaccuucgucagcggcaacugcgacguggugaucgggaucgucaacaacacgguguacgacccccugcagccggagcuggacuccuucaaggaggagcucgacaaguacuucaagaaccacaccagccccgacguggaccugggcgacaucuccgggaucaacgccagcgucgugaacauccagaaggagaucgaccgccugaacgagguggccaagaaccucaacgagucccugaucgaccugcaggagcucggcaaguacgagcaguacaucaaguggcccugguacaucuggcugggcuucaucgccgggcugaucgcgaucgucauggugaccaucaugcucugcugcaugaccagcugcugcuccugccugaagggcugcugcagcugcggguccugcugcaaguucgacgaggacgacagcgagccggugcugaagggcgucaagcuccacuacacgugaggacuaguuauaagacugacuagcccgaugggccucccaacgggcccuccuccccuccuugcaccgagagaucucaaaggcucuuuucagagccaccaaaaaaaaaaaaaaaaaaaaaaaaaaaaaaaaaaaaaaaaaaaaaaaaaaaaaaaaaaaaaaaaaaaaaaaaaaaaaaaaaaaaaaaaaaaaaaaaaaaaa

SEQ ID NO: 24641 - RNA, 4029 nt, Artificial Sequence
  SARS-CoV-2/Wuhan/WIV05/2019__EPI_ISL_402128 spike protein mRNA gc (1-1273)(K986P_V987P_H69del_V70del_D614G)
aggagaaagcuuaccauguucguguuccugguccuccugccccuggugagcucccagugcgugaaccucaccacccgcacgcagcugccgcccgccuacaccaacagcuucacccggggcgucuacuaccccgacaagguguuccgcuccagcgugcugcacuccacccaggaccucuuccugcccuucuucagcaacgucacgugguuccacgccaucuccgggaccaacggcaccaagcgguucgacaacccggugcugcccuucaacgacgggguguacuucgcgagcaccgagaaguccaacaucauccgcggcuggaucuucgggacgacccucgacagcaagacccagucccugcugaucgucaacaacgccaccaacguggugaucaaggucugcgaguuccaguucugcaacgaccccuuccucggcguguacuaccacaagaacaacaagagcuggauggaguccgaguuccggguguacagcuccgccaacaacugcacguucgaguacgucagccagcccuuccugauggaccuggagggcaagcaggggaacuucaagaaccuccgcgaguucguguucaagaacaucgacggcuacuucaagaucuacuccaagcacaccccgaucaaccuggugcgggaccugccccagggguucagcgcccucgagccccuggucgaccugcccaucggcaucaacaucacccgcuuccagacccuccuggcccugcaccgguccuaccucacgccgggggacagcagcuccggcuggaccgcgggcgccgccgccuacuacgugggguaccugcagccccgcaccuuccugcucaaguacaacgagaacggcaccaucacggacgcgguggacugcgcccuggacccccugagcgagaccaagugcacccucaaguccuucaccgucgagaaggggaucuaccagacgagcaacuuccgggugcagcccaccgaguccaucgugcgcuucccgaacaucaccaaccugugccccuucggcgaggucuucaacgccacccgguucgccagcguguacgccuggaaccgcaagcggaucuccaacugcgucgcggacuacagcgugcuguacaacuccgccagcuucuccacguucaagugcuacggcgugagccccaccaagcucaacgaccugugcuucaccaacgucuacgccgacuccuucgugauccgcggggacgaggugcggcagaucgcccccggccagaccgggaagaucgccgacuacaacuacaagcugccggacgacuucacgggcugcgucaucgcguggaacagcaacaaccucgacuccaaggucgggggcaacuacaacuaccuguaccgccuguuccgcaagagcaaccucaagcccuucgagcgggacaucuccaccgagaucuaccaggccggcagcacccccugcaacgggguggagggcuucaacugcuacuucccccugcaguccuacggguuccagccgaccaacggcgugggguaccagcccuaccggguggugguccugagcuucgagcuccugcacgcccccgccacggugugcggccccaagaaguccaccaaccuggugaagaacaagugcgucaacuucaacuucaacggccucaccgggaccggcgugcugaccgagagcaacaagaaguuccugccguuccagcaguucgggcgcgacaucgccgacacgaccgacgcggugcgcgacccccagacccuggagauccucgacaucacccccugcagcuucggcggggucuccgugaucacgccgggcaccaacaccagcaaccagguggccguccuguaccagggcgugaacugcaccgaggugcccgucgccauccacgccgaccagcugacgcccaccuggcggguguacuccaccgggagcaacguguuccagacccgcgccggcugccucaucggggcggagcacgucaacaacuccuacgagugcgacauccccaucggcgccggcaucugcgccagcuaccagacgcagaccaacuccccgcggcgcgcccggagcguggcgucccagagcaucaucgccuacaccaugucccugggggccgagaacagcguggccuacuccaacaacagcaucgccauccccaccaacuucacgaucuccgucaccaccgagauccugcccgugagcaugaccaagacgagcguggacugcaccauguacaucugcggcgacuccaccgagugcagcaaccuccugcugcaguacggguccuucugcacccagcucaaccgcgcgcugacgggcaucgccgucgagcaggacaagaacacccaggagguguucgcccaggugaagcagaucuacaagacgcccccgaucaaggacuucgggggcuucaacuucagccagauccugcccgaccccuccaagcccagcaagcgguccuucaucgaggaccuccuguucaacaaggucacccuggccgacgccggcuucaucaagcaguacggggacugccucggcgacaucgcggcccgcgaccugaucugcgcccagaaguucaacgggcugaccgugcucccgccccugcugaccgacgagaugaucgcccaguacaccagcgcccuccuggcgggcaccaucacguccggguggaccuucggcgccggcgccgcccugcagauccccuucgcgaugcagauggccuaccgguucaacgggaucggcgugacccagaacguccucuacgagaaccagaagcugaucgccaaccaguucaacagcgccaucgggaagauccaggacucccugagcuccaccgccagcgcgcucggcaagcugcaggacguggugaaccagaacgcccaggcccugaacacgcucgucaagcagcuguccagcaacuucggggccaucuccagcgugcugaacgacauccucucccgccuggacccgcccgaggccgaggugcagaucgaccggcugaucaccggccgccuccagagccugcagaccuacgucacccagcagcugauccgggcggccgagauccgcgccagcgccaaccucgccgcgaccaagauguccgagugcgugcugggccagagcaagcggguggacuucugcgggaagggcuaccaccugauguccuucccccagagcgcgccccacggggucguguuccuccacgugacguacguccccgcccaggagaagaacuucaccaccgccccggccaucugccacgacggcaaggcccacuucccccgcgaggggguguucgucuccaacggcacccacugguucgugacgcagcggaacuucuacgagccccagaucaucaccaccgacaacaccuucgugagcggcaacugcgacgucgugaucgggaucgugaacaacacggucuacgacccccugcagccggagcuggacuccuucaaggaggagcucgacaaguacuucaagaaccacaccagccccgacguggaccugggcgacaucuccgggaucaacgccagcguggucaacauccagaaggagaucgaccgccugaacgagguggccaagaaccucaacgagucccugaucgaccugcaggagcucggcaaguacgagcaguacaucaaguggcccugguacaucuggcugggcuucaucgccgggcugaucgcgaucgugauggucaccaucaugcucugcugcaugaccagcugcugcuccugccugaagggcugcugcagcugcggguccugcugcaaguucgacgaggacgacagcgagccggugcugaagggcgugaagcuccacuacacgugaggacuaguuauaagacugacuagcccgaugggccucccaacgggcccuccuccccuccuugcaccgagagaucucaaaggcucuuuucagagccaccaaaaaaaaaaaaaaaaaaaaaaaaaaaaaaaaaaaaaaaaaaaaaaaaaaaaaaaaaaaaaaaaaaaaaaaaaaaaaaaaaaaaaaaaaaaaaaaaaaaaa

SEQ ID NO: 24642 - RNA, 4035 nt, Artificial Sequence
  SARS-CoV-2/Wuhan/WIV05/2019__EPI_ISL_402128 spike protein mRNA gc (1-1273)(K986P_V987P_Y453F_D614G)
aggagaaagcuuaccauguucguguuccugguccuccugccccuggugagcucccagugcgugaaccucaccacccgcacgcagcugccgcccgccuacaccaacagcuucacccggggcgucuacuaccccgacaagguguuccgcuccagcgugcugcacuccacccaggaccucuuccugcccuucuucagcaacgucacgugguuccacgccauccacguguccgggaccaacggcaccaagcgguucgacaacccggugcugcccuucaacgacggggucuacuucgcgagcaccgagaaguccaacaucauccgcggcuggaucuucgggacgacccucgacagcaagacccagucccugcugaucgugaacaacgccaccaacguggucaucaaggugugcgaguuccaguucugcaacgaccccuuccucggcguguacuaccacaagaacaacaagagcuggauggaguccgaguuccgggucuacagcuccgccaacaacugcacguucgaguacgugagccagcccuuccugauggaccuggagggcaagcaggggaacuucaagaaccuccgcgaguucguguucaagaacaucgacggcuacuucaagaucuacuccaagcacaccccgaucaaccugguccgggaccugccccagggguucagcgcccucgagccccugguggaccugcccaucggcaucaacaucacccgcuuccagacccuccuggcccugcaccgguccuaccucacgccgggggacagcagcuccggcuggaccgcgggcgccgccgccuacuacgugggguaccugcagccccgcaccuuccugcucaaguacaacgagaacggcaccaucacggacgcggucgacugcgcccuggacccccugagcgagaccaagugcacccucaaguccuucaccguggagaaggggaucuaccagacgagcaacuuccgggugcagcccaccgaguccaucguccgcuucccgaacaucaccaaccugugccccuucggcgagguguucaacgccacccgguucgccagcgucuacgccuggaaccgcaagcggaucuccaacugcguggcggacuacagcgugcuguacaacuccgccagcuucuccacguucaagugcuacggcgucagccccaccaagcucaacgaccugugcuucaccaacguguacgccgacuccuucgugauccgcggggacgagguccggcagaucgcccccggccagaccgggaagaucgccgacuacaacuacaagcugccggacgacuucacgggcugcgugaucgcguggaacagcaacaaccucgacuccaaggucgggggcaacuacaacuaccuguuccgccuguuccgcaagagcaaccucaagcccuucgagcgggacaucuccaccgagaucuaccaggccggcagcacccccugcaacgggguggagggcuucaacugcuacuucccccugcaguccuacggguuccagccgaccaacggcgugggguaccagcccuaccggguggucgugcugagcuucgagcuccugcacgcccccgccacggugugcggccccaagaaguccaccaaccuggucaagaacaagugcgugaacuucaacuucaacggccucaccgggaccggcgugcugaccgagagcaacaagaaguuccugccguuccagcaguucgggcgcgacaucgccgacacgaccgacgcgguccgcgacccccagacccuggagauccucgacaucacccccugcagcuucggcgggguguccgugaucacgccgggcaccaacaccagcaaccaggucgccgugcuguaccagggcgugaacugcaccgagguccccguggccauccacgccgaccagcugacgcccaccuggcggguguacuccaccgggagcaacgucuuccagacccgcgccggcugccucaucggggcggagcacgugaacaacuccuacgagugcgacauccccaucggcgccggcaucugcgccagcuaccagacgcagaccaacuccccgcggcgcgcccggagcguggcgucccagagcaucaucgccuacaccaugucccugggggccgagaacagcgucgccuacuccaacaacagcaucgccauccccaccaacuucacgaucuccgugaccaccgagauccugcccgugagcaugaccaagacgagcgucgacugcaccauguacaucugcggcgacuccaccgagugcagcaaccuccugcugcaguacggguccuucugcacccagcucaaccgcgcgcugacgggcaucgccguggagcaggacaagaacacccaggagguguucgcccaggucaagcagaucuacaagacgcccccgaucaaggacuucgggggcuucaacuucagccagauccugcccgaccccuccaagcccagcaagcgguccuucaucgaggaccuccuguucaacaaggugacccuggccgacgccggcuucaucaagcaguacggggacugccucggcgacaucgcggcccgcgaccugaucugcgcccagaaguucaacgggcugaccgugcucccgccccugcugaccgacgagaugaucgcccaguacaccagcgcccuccuggcgggcaccaucacguccggguggaccuucggcgccggcgccgcccugcagauccccuucgcgaugcagauggccuaccgguucaacgggaucggcgucacccagaacgugcucuacgagaaccagaagcugaucgccaaccaguucaacagcgccaucgggaagauccaggacucccugagcuccaccgccagcgcgcucggcaagcugcaggacguggucaaccagaacgcccaggcccugaacacgcucgugaagcagcuguccagcaacuucggggccaucuccagcgugcugaacgacauccucucccgccuggacccgcccgaggccgagguccagaucgaccggcugaucaccggccgccuccagagccugcagaccuacgugacccagcagcugauccgggcggccgagauccgcgccagcgccaaccucgccgcgaccaagauguccgagugcgugcugggccagagcaagcgggucgacuucugcgggaagggcuaccaccugauguccuucccccagagcgcgccccacggggugguguuccuccacgucacguacgugcccgcccaggagaagaacuucaccaccgccccggccaucugccacgacggcaaggcccacuucccccgcgagggggucuucguguccaacggcacccacugguucgugacgcagcggaacuucuacgagccccagaucaucaccaccgacaacaccuucgucagcggcaacugcgacguggugaucgggaucgucaacaacacgguguacgacccccugcagccggagcuggacuccuucaaggaggagcucgacaaguacuucaagaaccacaccagccccgacguggaccugggcgacaucuccgggaucaacgccagcgucgugaacauccagaaggagaucgaccgccugaacgagguggccaagaaccucaacgagucccugaucgaccugcaggagcucggcaaguacgagcaguacaucaaguggcccugguacaucuggcugggcuucaucgccgggcugaucgcgaucgucauggugaccaucaugcucugcugcaugaccagcugcugcuccugccugaagggcugcugcagcugcggguccugcugcaaguucgacgaggacgacagcgagccggugcugaagggcgucaagcuccacuacacgugaggacuaguuauaagacugacuagcccgaugggccucccaacgggcccuccuccccuccuugcaccgagagaucucaaaggcucuuuucagagccaccaaaaaaaaaaaaaaaaaaaaaaaaaaaaaaaaaaaaaaaaaaaaaaaaaaaaaaaaaaaaaaaaaaaaaaaaaaaaaaaaaaaaaaaaaaaaaaaaaaaaa

SEQ ID NO: 24643 - RNA, 4035 nt, Artificial Sequence
  SARS-CoV-2/Wuhan/WIV05/2019__EPI_ISL_402128 spike protein mRNA gc (1-1273)(K986P_V987P_D614G_I692V)
aggagaaagcuuaccauguucguguuccugguccuccugccccuggugagcucccagugcgugaaccucaccacccgcacgcagcugccgcccgccuacaccaacagcuucacccggggcgucuacuaccccgacaagguguuccgcuccagcgugcugcacuccacccaggaccucuuccugcccuucuucagcaacgucacgugguuccacgccauccacguguccgggaccaacggcaccaagcgguucgacaacccggugcugcccuucaacgacggggucuacuucgcgagcaccgagaaguccaacaucauccgcggcuggaucuucgggacgacccucgacagcaagacccagucccugcugaucgugaacaacgccaccaacguggucaucaaggugugcgaguuccaguucugcaacgaccccuuccucggcguguacuaccacaagaacaacaagagcuggauggaguccgaguuccgggucuacagcuccgccaacaacugcacguucgaguacgugagccagcccuuccugauggaccuggagggcaagcaggggaacuucaagaaccuccgcgaguucguguucaagaacaucgacggcuacuucaagaucuacuccaagcacaccccgaucaaccugguccgggaccugccccagggguucagcgcccucgagccccugguggaccugcccaucggcaucaacaucacccgcuuccagacccuccuggcccugcaccgguccuaccucacgccgggggacagcagcuccggcuggaccgcgggcgccgccgccuacuacgugggguaccugcagccccgcaccuuccugcucaaguacaacgagaacggcaccaucacggacgcggucgacugcgcccuggacccccugagcgagaccaagugcacccucaaguccuucaccguggagaaggggaucuaccagacgagcaacuuccgggugcagcccaccgaguccaucguccgcuucccgaacaucaccaaccugugccccuucggcgagguguucaacgccacccgguucgccagcgucuacgccuggaaccgcaagcggaucuccaacugcguggcggacuacagcgugcuguacaacuccgccagcuucuccacguucaagugcuacggcgucagccccaccaagcucaacgaccugugcuucaccaacguguacgccgacuccuucgugauccgcggggacgagguccggcagaucgcccccggccagaccgggaagaucgccgacuacaacuacaagcugccggacgacuucacgggcugcgugaucgcguggaacagcaacaaccucgacuccaaggucgggggcaacuacaacuaccuguaccgccuguuccgcaagagcaaccucaagcccuucgagcgggacaucuccaccgagaucuaccaggccggcagcacccccugcaacgggguggagggcuucaacugcuacuucccccugcaguccuacggguuccagccgaccaacggcgugggguaccagcccuaccggguggucgugcugagcuucgagcuccugcacgcccccgccacggugugcggccccaagaaguccaccaaccuggucaagaacaagugcgugaacuucaacuucaacggccucaccgggaccggcgugcugaccgagagcaacaagaaguuccugccguuccagcaguucgggcgcgacaucgccgacacgaccgacgcgguccgcgacccccagacccuggagauccucgacaucacccccugcagcuucggcgggguguccgugaucacgccgggcaccaacaccagcaaccaggucgccgugcuguaccagggcgugaacugcaccgagguccccguggccauccacgccgaccagcugacgcccaccuggcggguguacuccaccgggagcaacgucuuccagacccgcgccggcugccucaucggggcggagcacgugaacaacuccuacgagugcgacauccccaucggcgccggcaucugcgccagcuaccagacgcagaccaacuccccgcggcgcgcccggagcguggcgucccagagcgucaucgccuacaccaugucccugggggccgagaacagcguggccuacuccaacaacagcaucgccauccccaccaacuucacgaucuccgugaccaccgagauccugcccgucagcaugaccaagacgagcguggacugcaccauguacaucugcggcgacuccaccgagugcagcaaccuccugcugcaguacggguccuucugcacccagcucaaccgcgcgcugacgggcaucgccguggagcaggacaagaacacccaggaggucuucgcccaggugaagcagaucuacaagacgcccccgaucaaggacuucgggggcuucaacuucagccagauccugcccgaccccuccaagcccagcaagcgguccuucaucgaggaccuccuguucaacaaggugacccuggccgacgccggcuucaucaagcaguacggggacugccucggcgacaucgcggcccgcgaccugaucugcgcccagaaguucaacgggcugaccguccucccgccccugcugaccgacgagaugaucgcccaguacaccagcgcccuccuggcgggcaccaucacguccggguggaccuucggcgccggcgccgcccugcagauccccuucgcgaugcagauggccuaccgguucaacgggaucggcgugacccagaacgugcucuacgagaaccagaagcugaucgccaaccaguucaacagcgccaucgggaagauccaggacucccugagcuccaccgccagcgcgcucggcaagcugcaggacgucgugaaccagaacgcccaggcccugaacacgcucgugaagcagcuguccagcaacuucggggccaucuccagcguccugaacgacauccucucccgccuggacccgcccgaggccgaggugcagaucgaccggcugaucaccggccgccuccagagccugcagaccuacgugacccagcagcugauccgggcggccgagauccgcgccagcgccaaccucgccgcgaccaagauguccgagugcguccugggccagagcaagcggguggacuucugcgggaagggcuaccaccugauguccuucccccagagcgcgccccacgggguggucuuccuccacgugacguacguccccgcccaggagaagaacuucaccaccgccccggccaucugccacgacggcaaggcccacuucccccgcgaggggguguucguguccaacggcacccacugguucgucacgcagcggaacuucuacgagccccagaucaucaccaccgacaacaccuucgugagcggcaacugcgacguggucaucgggaucgugaacaacacgguguacgacccccugcagccggagcuggacuccuucaaggaggagcucgacaaguacuucaagaaccacaccagccccgacgucgaccugggcgacaucuccgggaucaacgccagcguggugaacauccagaaggagaucgaccgccugaacgaggucgccaagaaccucaacgagucccugaucgaccugcaggagcucggcaaguacgagcaguacaucaaguggcccugguacaucuggcugggcuucaucgccgggcugaucgcgaucgugauggugaccaucaugcucugcugcaugaccagcugcugcuccugccugaagggcugcugcagcugcggguccugcugcaaguucgacgaggacgacagcgagccgguccugaagggcgugaagcuccacuacacgugaggacuaguuauaagacugacuagcccgaugggccucccaacgggcccuccuccccuccuugcaccgagagaucucaaaggcucuuuucagagccaccaaaaaaaaaaaaaaaaaaaaaaaaaaaaaaaaaaaaaaaaaaaaaaaaaaaaaaaaaaaaaaaaaaaaaaaaaaaaaaaaaaaaaaaaaaaaaaaaaaaaa

SEQ ID NO: 24644 - RNA, 4035 nt, Artificial Sequence
  SARS-CoV-2/Wuhan/WIV05/2019__EPI_ISL_402128 spike protein mRNA gc (1-1273)(K986P_V987P_D614G_M1229I)
aggagaaagcuuaccauguucguguuccugguccuccugccccuggugagcucccagugcgugaaccucaccacccgcacgcagcugccgcccgccuacaccaacagcuucacccggggcgucuacuaccccgacaagguguuccgcuccagcgugcugcacuccacccaggaccucuuccugcccuucuucagcaacgucacgugguuccacgccauccacguguccgggaccaacggcaccaagcgguucgacaacccggugcugcccuucaacgacggggucuacuucgcgagcaccgagaaguccaacaucauccgcggcuggaucuucgggacgacccucgacagcaagacccagucccugcugaucgugaacaacgccaccaacguggucaucaaggugugcgaguuccaguucugcaacgaccccuuccucggcguguacuaccacaagaacaacaagagcuggauggaguccgaguuccgggucuacagcuccgccaacaacugcacguucgaguacgugagccagcccuuccugauggaccuggagggcaagcaggggaacuucaagaaccuccgcgaguucguguucaagaacaucgacggcuacuucaagaucuacuccaagcacaccccgaucaaccugguccgggaccugccccagggguucagcgcccucgagccccugguggaccugcccaucggcaucaacaucacccgcuuccagacccuccuggcccugcaccgguccuaccucacgccgggggacagcagcuccggcuggaccgcgggcgccgccgccuacuacgugggguaccugcagccccgcaccuuccugcucaaguacaacgagaacggcaccaucacggacgcggucgacugcgcccuggacccccugagcgagaccaagugcacccucaaguccuucaccguggagaaggggaucuaccagacgagcaacuuccgggugcagcccaccgaguccaucguccgcuucccgaacaucaccaaccugugccccuucggcgagguguucaacgccacccgguucgccagcgucuacgccuggaaccgcaagcggaucuccaacugcguggcggacuacagcgugcuguacaacuccgccagcuucuccacguucaagugcuacggcgucagccccaccaagcucaacgaccugugcuucaccaacguguacgccgacuccuucgugauccgcggggacgagguccggcagaucgcccccggccagaccgggaagaucgccgacuacaacuacaagcugccggacgacuucacgggcugcgugaucgcguggaacagcaacaaccucgacuccaaggucgggggcaacuacaacuaccuguaccgccuguuccgcaagagcaaccucaagcccuucgagcgggacaucuccaccgagaucuaccaggccggcagcacccccugcaacgggguggagggcuucaacugcuacuucccccugcaguccuacggguuccagccgaccaacggcgugggguaccagcccuaccggguggucgugcugagcuucgagcuccugcacgcccccgccacggugugcggccccaagaaguccaccaaccuggucaagaacaagugcgugaacuucaacuucaacggccucaccgggaccggcgugcugaccgagagcaacaagaaguuccugccguuccagcaguucgggcgcgacaucgccgacacgaccgacgcgguccgcgacccccagacccuggagauccucgacaucacccccugcagcuucggcgggguguccgugaucacgccgggcaccaacaccagcaaccaggucgccgugcuguaccagggcgugaacugcaccgagguccccguggccauccacgccgaccagcugacgcccaccuggcggguguacuccaccgggagcaacgucuuccagacccgcgccggcugccucaucggggcggagcacgugaacaacuccuacgagugcgacauccccaucggcgccggcaucugcgccagcuaccagacgcagaccaacuccccgcggcgcgcccggagcguggcgucccagagcaucaucgccuacaccaugucccugggggccgagaacagcgucgccuacuccaacaacagcaucgccauccccaccaacuucacgaucuccgugaccaccgagauccugcccgugagcaugaccaagacgagcgucgacugcaccauguacaucugcggcgacuccaccgagugcagcaaccuccugcugcaguacggguccuucugcacccagcucaaccgcgcgcugacgggcaucgccguggagcaggacaagaacacccaggagguguucgcccaggucaagcagaucuacaagacgcccccgaucaaggacuucgggggcuucaacuucagccagauccugcccgaccccuccaagcccagcaagcgguccuucaucgaggaccuccuguucaacaaggugacccuggccgacgccggcuucaucaagcaguacggggacugccucggcgacaucgcggcccgcgaccugaucugcgcccagaaguucaacgggcugaccgugcucccgccccugcugaccgacgagaugaucgcccaguacaccagcgcccuccuggcgggcaccaucacguccggguggaccuucggcgccggcgccgcccugcagauccccuucgcgaugcagauggccuaccgguucaacgggaucggcgucacccagaacgugcucuacgagaaccagaagcugaucgccaaccaguucaacagcgccaucgggaagauccaggacucccugagcuccaccgccagcgcgcucggcaagcugcaggacguggucaaccagaacgcccaggcccugaacacgcucgugaagcagcuguccagcaacuucggggccaucuccagcgugcugaacgacauccucucccgccuggacccgcccgaggccgagguccagaucgaccggcugaucaccggccgccuccagagccugcagaccuacgugacccagcagcugauccgggcggccgagauccgcgccagcgccaaccucgccgcgaccaagauguccgagugcgugcugggccagagcaagcgggucgacuucugcgggaagggcuaccaccugauguccuucccccagagcgcgccccacggggugguguuccuccacgucacguacgugcccgcccaggagaagaacuucaccaccgccccggccaucugccacgacggcaaggcccacuucccccgcgagggggucuucguguccaacggcacccacugguucgugacgcagcggaacuucuacgagccccagaucaucaccaccgacaacaccuucgucagcggcaacugcgacguggugaucgggaucgucaacaacacgguguacgacccccugcagccggagcuggacuccuucaaggaggagcucgacaaguacuucaagaaccacaccagccccgacguggaccugggcgacaucuccgggaucaacgccagcgucgugaacauccagaaggagaucgaccgccugaacgagguggccaagaaccucaacgagucccugaucgaccugcaggagcucggcaaguacgagcaguacaucaaguggcccugguacaucuggcugggcuucaucgccgggcugaucgcgaucgucaucgugaccaucaugcucugcugcaugaccagcugcugcuccugccugaagggcugcugcagcugcggguccugcugcaaguucgacgaggacgacagcgagccggugcugaagggcgucaagcuccacuacacgugaggacuaguuauaagacugacuagcccgaugggccucccaacgggcccuccuccccuccuugcaccgagagaucucaaaggcucuuuucagagccaccaaaaaaaaaaaaaaaaaaaaaaaaaaaaaaaaaaaaaaaaaaaaaaaaaaaaaaaaaaaaaaaaaaaaaaaaaaaaaaaaaaaaaaaaaaaaaaaaaaaaa

SEQ ID NO: 24645 - RNA, 4029 nt, Artificial Sequence
  SARS-CoV-2/Wuhan/WIV05/2019__EPI_ISL_402128 spike protein mRNA gc (1-1273)(K986P_V987P_H69del_V70del_A222V_Y453F_S477N_D614G_I692V)
aggagaaagcuuaccauguucguguuccugguccuccugccccuggugagcucccagugcgugaaccucaccacccgcacgcagcugccgcccgccuacaccaacagcuucacccggggcgucuacuaccccgacaagguguuccgcuccagcgugcugcacuccacccaggaccucuuccugcccuucuucagcaacgucacgugguuccacgccaucuccgggaccaacggcaccaagcgguucgacaacccggugcugcccuucaacgacgggguguacuucgcgagcaccgagaaguccaacaucauccgcggcuggaucuucgggacgacccucgacagcaagacccagucccugcugaucgucaacaacgccaccaacguggugaucaaggucugcgaguuccaguucugcaacgaccccuuccucggcguguacuaccacaagaacaacaagagcuggauggaguccgaguuccggguguacagcuccgccaacaacugcacguucgaguacgucagccagcccuuccugauggaccuggagggcaagcaggggaacuucaagaaccuccgcgaguucguguucaagaacaucgacggcuacuucaagaucuacuccaagcacaccccgaucaaccuggugcgggaccugccccagggguucagcguccucgagccccugguggaccugcccaucggcaucaacaucacccgcuuccagacccuccuggcccugcaccgguccuaccucacgccgggggacagcagcuccggcuggaccgccggcgcggccgccuacuacgugggguaccugcagccccgcaccuuccugcucaaguacaacgagaacggcaccaucacggacgccgucgacugcgcgcuggacccccugagcgagaccaagugcacccucaaguccuucaccguggagaaggggaucuaccagacgagcaacuuccgggugcagcccaccgaguccaucguccgcuucccgaacaucaccaaccugugccccuucggcgagguguucaacgccacccgguucgccagcgucuacgccuggaaccgcaagcggaucuccaacugcguggccgacuacagcgugcuguacaacuccgcgagcuucuccacguucaagugcuacggcgucagccccaccaagcucaacgaccugugcuucaccaacguguacgccgacuccuucgugauccgcggggacgagguccggcagaucgcccccggccagaccgggaagaucgccgacuacaacuacaagcugccggacgacuucacgggcugcgugaucgccuggaacagcaacaaccucgacuccaaggucgggggcaacuacaacuaccuguuccgccuguuccgcaagagcaaccucaagcccuucgagcgggacaucuccaccgagaucuaccaggcgggcaacacccccugcaacgggguggagggcuucaacugcuacuucccccugcagagcuacggguuccagccgaccaacggcgugggguaccagcccuaccggguggucgugcuguccuucgagcuccugcacgcccccgccacggugugcggccccaagaaguccaccaaccuggucaagaacaagugcgugaacuucaacuucaacggccucaccgggaccggcgugcugaccgagagcaacaagaaguuccugccguuccagcaguucgggcgcgacaucgccgacacgaccgacgccguccgcgacccccagacccuggagauccucgacaucacccccugcagcuucggcggggugagcgugaucacgccgggcaccaacaccuccaaccaggucgcggugcuguaccagggcgugaacugcaccgagguccccguggccauccacgccgaccagcugacgcccaccuggcggguguacagcaccggguccaacgucuuccagacccgcgccggcugccucaucggggccgagcacgugaacaacagcuacgagugcgacauccccaucggcgcgggcaucugcgccuccuaccagacgcagaccaacagcccgcggcgcgcccgguccguggccagccaguccgucaucgcguacaccaugagccugggggccgagaacuccguggccuacagcaacaacuccaucgccauccccaccaacuucacgaucagcgugaccaccgagauccugcccgucuccaugaccaagacgagcguggacugcaccauguacaucugcggcgacagcaccgagugcuccaaccuccugcugcaguacgggagcuucugcacccagcucaaccgcgcccugacgggcaucgcgguggagcaggacaagaacacccaggaggucuucgcccaggugaagcagaucuacaagacgcccccgaucaaggacuucgggggcuucaacuucucccagauccugcccgaccccagcaagcccuccaagcggagcuucaucgaggaccuccuguucaacaaggugacccuggccgacgccggcuucaucaagcaguacggggacugccucggcgacaucgccgcgcgcgaccugaucugcgcccagaaguucaacgggcugaccguccucccgccccugcugaccgacgagaugaucgcccaguacaccuccgcccuccuggccggcaccaucacgagcggguggaccuucggcgcgggcgccgcccugcagauccccuucgccaugcagauggcguaccgguucaacgggaucggcgugacccagaacgugcucuacgagaaccagaagcugaucgccaaccaguucaacuccgccaucgggaagauccaggacagccuguccagcaccgccuccgcccucggcaagcugcaggacgucgugaaccagaacgcgcaggcccugaacacgcucgugaagcagcugagcuccaacuucggggccaucagcuccguccugaacgacauccucagccgccuggacccgcccgaggccgaggugcagaucgaccggcugaucaccggccgccuccagucccugcagaccuacgugacccagcagcugauccgggccgcggagauccgcgccagcgccaaccucgccgccaccaagaugagcgagugcguccugggccaguccaagcggguggacuucugcgggaagggcuaccaccugaugagcuucccccaguccgcgccccacgggguggucuuccuccacgugacguacguccccgcccaggagaagaacuucaccaccgccccggccaucugccacgacggcaaggcgcacuucccccgcgaggggguguucgugagcaacggcacccacugguucgucacgcagcggaacuucuacgagccccagaucaucaccaccgacaacaccuucguguccggcaacugcgacguggucaucgggaucgugaacaacacgguguacgacccccugcagccggagcuggacagcuucaaggaggagcucgacaaguacuucaagaaccacaccucccccgacgucgaccugggcgacaucagcgggaucaacgccuccguggugaacauccagaaggagaucgaccgccugaacgaggucgccaagaaccucaacgagagccugaucgaccugcaggagcucggcaaguacgagcaguacaucaaguggcccugguacaucuggcugggcuucaucgccgggcugaucgccaucgugauggugaccaucaugcucugcugcaugaccuccugcugcagcugccugaagggcugcugcuccugcgggagcugcugcaaguucgacgaggacgacuccgagccgguccugaagggcgugaagcuccacuacacgugaggacuaguuauaagacugacuagcccgaugggccucccaacgggcccuccuccccuccuugcaccgagagaucucaaaggcucuuuucagagccaccaaaaaaaaaaaaaaaaaaaaaaaaaaaaaaaaaaaaaaaaaaaaaaaaaaaaaaaaaaaaaaaaaaaaaaaaaaaaaaaaaaaaaaaaaaaaaaaaaaaaa

SEQ ID NO: 24646 - RNA, 4029 nt, Artificial Sequence
  SARS-CoV-2/Wuhan/WIV05/2019__EPI_ISL_402128 spike protein mRNA gc (1-1273)(K986P_V987P_H69del_V70del_Y453F_D614G_I692V_M1229I)
aggagaaagcuuaccauguucguguuccugguccuccugccccuggugagcucccagugcgugaaccucaccacccgcacgcagcugccgcccgccuacaccaacagcuucacccggggcgucuacuaccccgacaagguguuccgcuccagcgugcugcacuccacccaggaccucuuccugcccuucuucagcaacgucacgugguuccacgccaucuccgggaccaacggcaccaagcgguucgacaacccggugcugcccuucaacgacgggguguacuucgcgagcaccgagaaguccaacaucauccgcggcuggaucuucgggacgacccucgacagcaagacccagucccugcugaucgucaacaacgccaccaacguggugaucaaggucugcgaguuccaguucugcaacgaccccuuccucggcguguacuaccacaagaacaacaagagcuggauggaguccgaguuccggguguacagcuccgccaacaacugcacguucgaguacgucagccagcccuuccugauggaccuggagggcaagcaggggaacuucaagaaccuccgcgaguucguguucaagaacaucgacggcuacuucaagaucuacuccaagcacaccccgaucaaccuggugcgggaccugccccagggguucagcgcccucgagccccuggucgaccugcccaucggcaucaacaucacccgcuuccagacccuccuggcccugcaccgguccuaccucacgccgggggacagcagcuccggcuggaccgcgggcgccgccgccuacuacgugggguaccugcagccccgcaccuuccugcucaaguacaacgagaacggcaccaucacggacgcgguggacugcgcccuggacccccugagcgagaccaagugcacccucaaguccuucaccgucgagaaggggaucuaccagacgagcaacuuccgggugcagcccaccgaguccaucgugcgcuucccgaacaucaccaaccugugccccuucggcgaggucuucaacgccacccgguucgccagcguguacgccuggaaccgcaagcggaucuccaacugcgucgcggacuacagcgugcuguacaacuccgccagcuucuccacguucaagugcuacggcgugagccccaccaagcucaacgaccugugcuucaccaacgucuacgccgacuccuucgugauccgcggggacgaggugcggcagaucgcccccggccagaccgggaagaucgccgacuacaacuacaagcugccggacgacuucacgggcugcgucaucgcguggaacagcaacaaccucgacuccaaggucgggggcaacuacaacuaccuguuccgccuguuccgcaagagcaaccucaagcccuucgagcgggacaucuccaccgagaucuaccaggccggcagcacccccugcaacgggguggagggcuucaacugcuacuucccccugcaguccuacggguuccagccgaccaacggcgugggguaccagcccuaccggguggugguccugagcuucgagcuccugcacgcccccgccacggugugcggccccaagaaguccaccaaccuggugaagaacaagugcgucaacuucaacuucaacggccucaccgggaccggcgugcugaccgagagcaacaagaaguuccugccguuccagcaguucgggcgcgacaucgccgacacgaccgacgcggugcgcgacccccagacccuggagauccucgacaucacccccugcagcuucggcggggucuccgugaucacgccgggcaccaacaccagcaaccagguggccguccuguaccagggcgugaacugcaccgaggugcccgucgccauccacgccgaccagcugacgcccaccuggcggguguacuccaccgggagcaacguguuccagacccgcgccggcugccucaucggggcggagcacgucaacaacuccuacgagugcgacauccccaucggcgccggcaucugcgccagcuaccagacgcagaccaacuccccgcggcgcgcccggagcguggcgucccagagcgugaucgccuacaccaugucccugggggccgagaacagcgucgccuacuccaacaacagcaucgccauccccaccaacuucacgaucuccgugaccaccgagauccugcccgugagcaugaccaagacgagcgucgacugcaccauguacaucugcggcgacuccaccgagugcagcaaccuccugcugcaguacggguccuucugcacccagcucaaccgcgcgcugacgggcaucgccguggagcaggacaagaacacccaggagguguucgcccaggucaagcagaucuacaagacgcccccgaucaaggacuucgggggcuucaacuucagccagauccugcccgaccccuccaagcccagcaagcgguccuucaucgaggaccuccuguucaacaaggugacccuggccgacgccggcuucaucaagcaguacggggacugccucggcgacaucgcggcccgcgaccugaucugcgcccagaaguucaacgggcugaccgugcucccgccccugcugaccgacgagaugaucgcccaguacaccagcgcccuccuggcgggcaccaucacguccggguggaccuucggcgccggcgccgcccugcagauccccuucgcgaugcagauggccuaccgguucaacgggaucggcgucacccagaacgugcucuacgagaaccagaagcugaucgccaaccaguucaacagcgccaucgggaagauccaggacucccugagcuccaccgccagcgcgcucggcaagcugcaggacguggucaaccagaacgcccaggcccugaacacgcucgugaagcagcuguccagcaacuucggggccaucuccagcgugcugaacgacauccucucccgccuggacccgcccgaggccgagguccagaucgaccggcugaucaccggccgccuccagagccugcagaccuacgugacccagcagcugauccgggcggccgagauccgcgccagcgccaaccucgccgcgaccaagauguccgagugcgugcugggccagagcaagcgggucgacuucugcgggaagggcuaccaccugauguccuucccccagagcgcgccccacggggugguguuccuccacgucacguacgugcccgcccaggagaagaacuucaccaccgccccggccaucugccacgacggcaaggcccacuucccccgcgagggggucuucguguccaacggcacccacugguucgugacgcagcggaacuucuacgagccccagaucaucaccaccgacaacaccuucgucagcggcaacugcgacguggugaucgggaucgucaacaacacgguguacgacccccugcagccggagcuggacuccuucaaggaggagcucgacaaguacuucaagaaccacaccagccccgacguggaccugggcgacaucuccgggaucaacgccagcgucgugaacauccagaaggagaucgaccgccugaacgagguggccaagaaccucaacgagucccugaucgaccugcaggagcucggcaaguacgagcaguacaucaaguggcccugguacaucuggcugggcuucaucgccgggcugaucgcgaucgucaucgugaccaucaugcucugcugcaugaccagcugcugcuccugccugaagggcugcugcagcugcggguccugcugcaaguucgacgaggacgacagcgagccggugcugaagggcgucaagcuccacuacacgugaggacuaguuauaagacugacuagcccgaugggccucccaacgggcccuccuccccuccuugcaccgagagaucucaaaggcucuuuucagagccaccaaaaaaaaaaaaaaaaaaaaaaaaaaaaaaaaaaaaaaaaaaaaaaaaaaaaaaaaaaaaaaaaaaaaaaaaaaaaaaaaaaaaaaaaaaaaaaaaaaaaa

SEQ ID NO: 24647 - RNA, 4026 nt, Artificial Sequence
  SARS-CoV-2/Wuhan/WIV05/2019__EPI_ISL_402128 spike protein mRNA gc (1-1273)(K986P_V987P_K986P_V987P_H69del_V70del_Y144del_N501Y_A570 D_D614G_P681H_T716I_S982A_D1118H)
aggagaaagcuuaccauguucguguuccugguccuccugccccuggugagcucccagugcgugaaccucaccacccgcacgcagcugccgcccgccuacaccaacagcuucacccggggcgucuacuaccccgacaagguguuccgcuccagcgugcugcacuccacccaggaccucuuccugcccuucuucagcaacgucacgugguuccacgccaucuccgggaccaacggcaccaagcgguucgacaacccggugcugcccuucaacgacgggguguacuucgcgagcaccgagaaguccaacaucauccgcggcuggaucuucgggacgacccucgacagcaagacccagucccugcugaucgucaacaacgccaccaacguggugaucaaggucugcgaguuccaguucugcaacgaccccuuccucggcguguaccacaagaacaacaagagcuggauggaguccgaguuccggguguacagcuccgccaacaacugcacguucgaguacgucagccagcccuuccugauggaccuggagggcaagcaggggaacuucaagaaccuccgcgaguucguguucaagaacaucgacggcuacuucaagaucuacuccaagcacaccccgaucaaccuggugcgggaccugccccagggguucagcgcccucgagccccuggucgaccugcccaucggcaucaacaucacccgcuuccagacccuccuggcccugcaccgguccuaccucacgccgggggacagcagcuccggcuggaccgcgggcgccgccgccuacuacgugggguaccugcagccccgcaccuuccugcucaaguacaacgagaacggcaccaucacggacgcgguggacugcgcccuggacccccugagcgagaccaagugcacccucaaguccuucaccgucgagaaggggaucuaccagacgagcaacuuccgggugcagcccaccgaguccaucgugcgcuucccgaacaucaccaaccugugccccuucggcgaggucuucaacgccacccgguucgccagcguguacgccuggaaccgcaagcggaucuccaacugcgucgcggacuacagcgugcuguacaacuccgccagcuucuccacguucaagugcuacggcgugagccccaccaagcucaacgaccugugcuucaccaacgucuacgccgacuccuucgugauccgcggggacgaggugcggcagaucgcccccggccagaccgggaagaucgccgacuacaacuacaagcugccggacgacuucacgggcugcgucaucgcguggaacagcaacaaccucgacuccaaggucgggggcaacuacaacuaccuguaccgccuguuccgcaagagcaaccucaagcccuucgagcgggacaucuccaccgagaucuaccaggccggcagcacccccugcaacgggguggagggcuucaacugcuacuucccccugcaguccuacggguuccagccgaccuacggcgugggguaccagcccuaccggguggugguccugagcuucgagcuccugcacgcccccgccacggugugcggccccaagaaguccaccaaccuggugaagaacaagugcgucaacuucaacuucaacggccucaccgggaccggcgugcugaccgagagcaacaagaaguuccugccguuccagcaguucgggcgcgacaucgacgacacgaccgacgccgugcgcgacccccagacccuggagauccucgacaucacccccugcagcuucggcggggucuccgugaucacgccgggcaccaacaccagcaaccagguggcgguccuguaccagggcgugaacugcaccgaggugcccgucgccauccacgccgaccagcugacgcccaccuggcggguguacuccaccgggagcaacguguuccagacccgcgccggcugccucaucggggccgagcacgucaacaacuccuacgagugcgacauccccaucggcgcgggcaucugcgccagcuaccagacgcagaccaacucccaccggcgcgcccggagcguggccucccagagcaucaucgcguacaccaugucccugggggccgagaacagcguggccuacuccaacaacagcaucgccaucccgaucaacuucaccaucuccgucacgaccgagauccugcccgugagcaugaccaagaccagcguggacugcacgauguacaucugcggcgacuccaccgagugcagcaaccuccugcugcaguacggguccuucugcacccagcucaaccgcgcccugaccggcaucgcggucgagcaggacaagaacacgcaggagguguucgcccaggugaagcagaucuacaagaccccgcccaucaaggacuucgggggcuucaacuucagccagauccugcccgaccccuccaagcccagcaagcgguccuucaucgaggaccuccuguucaacaaggucacccuggccgacgccggcuucaucaagcaguacggggacugccucggcgacaucgccgcgcgcgaccugaucugcgcccagaaguucaacgggcugaccgugcugcccccgcuccugacggacgagaugaucgcccaguacaccagcgcccuccuggccggcaccaucaccuccggguggacguucggcgcgggcgccgcccugcagauccccuucgccaugcagauggcguaccgguucaacgggaucggcgugacccagaacguccucuacgagaaccagaagcugaucgccaaccaguucaacagcgccaucgggaagauccaggacucccugagcuccaccgccagcgcccucggcaagcugcaggacguggugaaccagaacgcgcaggcccugaacacccucgucaagcagcuguccagcaacuucggggccaucuccagcgugcugaacgacauccucgcccgccuggacccgcccgaggccgaggugcagaucgaccggcugaucacgggccgccuccagucccugcagaccuacgucacccagcagcugauccgggcggccgagauccgcgccagcgccaaccucgccgcgaccaagaugagcgagugcgugcugggccaguccaagcggguggacuucugcgggaagggcuaccaccugaugagcuucccccaguccgcgccccacggggucguguuccuccacgugaccuacguccccgcccaggagaagaacuucacgaccgcccccgccaucugccacgacggcaaggcccacuucccgcgcgaggggguguucgucagcaacggcacccacugguucgugacccagcggaacuucuacgagccccagaucaucacgacccacaacaccuucguguccggcaacugcgacgucgugaucgggaucgugaacaacaccgucuacgacccccugcagcccgagcuggacagcuucaaggaggagcucgacaaguacuucaagaaccacacguccccggacguggaccugggcgacaucagcgggaucaacgccuccguggucaacauccagaaggagaucgaccgccugaacgagguggccaagaaccucaacgagagccugaucgaccugcaggagcucggcaaguacgagcaguacaucaaguggcccugguacaucuggcugggcuucaucgccgggcugaucgcgaucgugauggucaccaucaugcucugcugcaugaccuccugcugcagcugccugaagggcugcugcuccugcgggagcugcugcaaguucgacgaggacgacuccgagcccgugcugaagggcgugaagcuccacuacaccugaggacuaguuauaagacugacuagcccgaugggccucccaacgggcccuccuccccuccuugcaccgagagaucucaaaggcucuuuucagagccaccaaaaaaaaaaaaaaaaaaaaaaaaaaaaaaaaaaaaaaaaaaaaaaaaaaaaaaaaaaaaaaaaaaaaaaaaaaaaaaaaaaaaaaaaaaaaaaaaaaaaa

SEQ ID NO: 24648 - RNA, 4035 nt, Artificial Sequence
  SARS-CoV-2/Wuhan/WIV05/2019__EPI_ISL_402128 spike protein mRNA gc (1-1273)(K986P_V987P_K986P_V987P_K417N_E484K_N501Y_D614G)
aggagaaagcuuaccauguucguguuccugguccuccugccccuggugagcucccagugcgugaaccucaccacccgcacgcagcugccgcccgccuacaccaacagcuucacccggggcgucuacuaccccgacaagguguuccgcuccagcgugcugcacuccacccaggaccucuuccugcccuucuucagcaacgucacgugguuccacgccauccacguguccgggaccaacggcaccaagcgguucgacaacccggugcugcccuucaacgacggggucuacuucgcgagcaccgagaaguccaacaucauccgcggcuggaucuucgggacgacccucgacagcaagacccagucccugcugaucgugaacaacgccaccaacguggucaucaaggugugcgaguuccaguucugcaacgaccccuuccucggcguguacuaccacaagaacaacaagagcuggauggaguccgaguuccgggucuacagcuccgccaacaacugcacguucgaguacgugagccagcccuuccugauggaccuggagggcaagcaggggaacuucaagaaccuccgcgaguucguguucaagaacaucgacggcuacuucaagaucuacuccaagcacaccccgaucaaccugguccgggaccugccccagggguucagcgcccucgagccccugguggaccugcccaucggcaucaacaucacccgcuuccagacccuccuggcccugcaccgguccuaccucacgccgggggacagcagcuccggcuggaccgcgggcgccgccgccuacuacgugggguaccugcagccccgcaccuuccugcucaaguacaacgagaacggcaccaucacggacgcggucgacugcgcccuggacccccugagcgagaccaagugcacccucaaguccuucaccguggagaaggggaucuaccagacgagcaacuuccgggugcagcccaccgaguccaucguccgcuucccgaacaucaccaaccugugccccuucggcgagguguucaacgccacccgguucgccagcgucuacgccuggaaccgcaagcggaucuccaacugcguggcggacuacagcgugcuguacaacuccgccagcuucuccacguucaagugcuacggcgucagccccaccaagcucaacgaccugugcuucaccaacguguacgccgacuccuucgugauccgcggggacgagguccggcagaucgcccccggccagaccgggaacaucgccgacuacaacuacaagcugccggacgacuucacgggcugcgugaucgcguggaacagcaacaaccucgacuccaaggucgggggcaacuacaacuaccuguaccgccuguuccgcaagagcaaccucaagcccuucgagcgggacaucuccaccgagaucuaccaggccggcagcacccccugcaacggggugaagggcuucaacugcuacuucccccugcaguccuacggguuccagccgaccuacggcgugggguaccagcccuaccggguggucgugcugagcuucgagcuccugcacgcccccgccacggugugcggccccaagaaguccaccaaccuggucaagaacaagugcgugaacuucaacuucaacggccucaccgggaccggcgugcugaccgagagcaacaagaaguuccugccguuccagcaguucgggcgcgacaucgccgacacgaccgacgcgguccgcgacccccagacccuggagauccucgacaucacccccugcagcuucggcgggguguccgugaucacgccgggcaccaacaccagcaaccaggucgccgugcuguaccagggcgugaacugcaccgagguccccguggccauccacgccgaccagcugacgcccaccuggcggguguacuccaccgggagcaacgucuuccagacccgcgccggcugccucaucggggcggagcacgugaacaacuccuacgagugcgacauccccaucggcgccggcaucugcgccagcuaccagacgcagaccaacuccccgcggcgcgcccggagcguggcgucccagagcaucaucgccuacaccaugucccugggggccgagaacagcgucgccuacuccaacaacagcaucgccauccccaccaacuucacgaucuccgugaccaccgagauccugcccgugagcaugaccaagacgagcgucgacugcaccauguacaucugcggcgacuccaccgagugcagcaaccuccugcugcaguacggguccuucugcacccagcucaaccgcgcgcugacgggcaucgccguggagcaggacaagaacacccaggagguguucgcccaggucaagcagaucuacaagacgcccccgaucaaggacuucgggggcuucaacuucagccagauccugcccgaccccuccaagcccagcaagcgguccuucaucgaggaccuccuguucaacaaggugacccuggccgacgccggcuucaucaagcaguacggggacugccucggcgacaucgcggcccgcgaccugaucugcgcccagaaguucaacgggcugaccgugcucccgccccugcugaccgacgagaugaucgcccaguacaccagcgcccuccuggcgggcaccaucacguccggguggaccuucggcgccggcgccgcccugcagauccccuucgcgaugcagauggccuaccgguucaacgggaucggcgucacccagaacgugcucuacgagaaccagaagcugaucgccaaccaguucaacagcgccaucgggaagauccaggacucccugagcuccaccgccagcgcgcucggcaagcugcaggacguggucaaccagaacgcccaggcccugaacacgcucgugaagcagcuguccagcaacuucggggccaucuccagcgugcugaacgacauccucucccgccuggacccgcccgaggccgagguccagaucgaccggcugaucaccggccgccuccagagccugcagaccuacgugacccagcagcugauccgggcggccgagauccgcgccagcgccaaccucgccgcgaccaagauguccgagugcgugcugggccagagcaagcgggucgacuucugcgggaagggcuaccaccugauguccuucccccagagcgcgccccacggggugguguuccuccacgucacguacgugcccgcccaggagaagaacuucaccaccgccccggccaucugccacgacggcaaggcccacuucccccgcgagggggucuucguguccaacggcacccacugguucgugacgcagcggaacuucuacgagccccagaucaucaccaccgacaacaccuucgucagcggcaacugcgacguggugaucgggaucgucaacaacacgguguacgacccccugcagccggagcuggacuccuucaaggaggagcucgacaaguacuucaagaaccacaccagccccgacguggaccugggcgacaucuccgggaucaacgccagcgucgugaacauccagaaggagaucgaccgccugaacgagguggccaagaaccucaacgagucccugaucgaccugcaggagcucggcaaguacgagcaguacaucaaguggcccugguacaucuggcugggcuucaucgccgggcugaucgcgaucgucauggugaccaucaugcucugcugcaugaccagcugcugcuccugccugaagggcugcugcagcugcggguccugcugcaaguucgacgaggacgacagcgagccggugcugaagggcgucaagcuccacuacacgugaggacuaguuauaagacugacuagcccgaugggccucccaacgggcccuccuccccuccuugcaccgagagaucucaaaggcucuuuucagagccaccaaaaaaaaaaaaaaaaaaaaaaaaaaaaaaaaaaaaaaaaaaaaaaaaaaaaaaaaaaaaaaaaaaaaaaaaaaaaaaaaaaaaaaaaaaaaaaaaaaaaa

SEQ ID NO: 24649 - RNA, 4026 nt, Artificial Sequence
  SARS-CoV-2/Wuhan/WIV05/2019__EPI_ISL_402128 spike protein mRNA gc (1-1273)(K986P_V987P_K986P_V987P_L18F_D80A_D215G_L242del_A243del_ L244del_R246I_K417N_E484K_N501Y_D614G_A701V)
aggagaaagcuuaccauguucguguuccugguccuccugccccuggugagcucccagugcgugaacuucaccacccgcacgcagcucccgcccgccuacaccaacagcuucacccggggcgucuacuaccccgacaagguguuccgcuccagcgugcugcacuccacccaggaccuguuccuccccuucuucagcaacgucacgugguuccacgccauccacguguccgggaccaacggcaccaagcgguucgcgaacccggugcugcccuucaacgacggggucuacuucgccagcaccgagaaguccaacaucauccgcggcuggaucuucgggacgacccuggacagcaagacccagucccuccugaucgugaacaacgccaccaacguggucaucaaggugugcgaguuccaguucugcaacgaccccuuccugggcguguacuaccacaagaacaacaagagcuggauggaguccgaguuccgggucuacagcuccgccaacaacugcacguucgaguacgugagccagcccuuccucauggaccuggagggcaagcaggggaacuucaagaaccugcgcgaguucguguucaagaacaucgacggcuacuucaagaucuacuccaagcacaccccgaucaaccucguccgggggcugccccagggcuucagcgcccuggagccccucguggaccugcccaucgggaucaacaucacccgcuuccagacccugcacaucuccuaccucacgccgggcgacagcagcuccggcuggaccgcgggggccgccgccuacuacgugggcuaccugcagccccggaccuuccugcucaaguacaacgagaacgggaccaucacggacgcggucgacugcgcccuggacccccugagcgagaccaagugcacccucaaguccuucaccguggagaagggcaucuaccagacgagcaacuuccgcgugcagcccaccgaguccaucguccgguucccgaacaucaccaaccugugccccuucggcgagguguucaacgccacccgcuucgccagcgucuacgccuggaaccggaagcgcaucuccaacugcguggcggacuacagcgugcuguacaacuccgccagcuucuccacguucaagugcuacggggucagccccaccaagcucaacgaccugugcuucaccaacguguacgccgacuccuucgugauccggggcgacgagguccgccagaucgcccccgggcagaccggcaacaucgccgacuacaacuacaagcugccggacgacuucacggggugcgugaucgcguggaacagcaacaaccucgacuccaaggugggcggcaacuacaacuaccuguaccggcuguuccgcaagagcaaccucaagcccuucgagcgggacaucuccaccgagaucuaccaggccgggagcacccccugcaacggcgucaagggguucaacugcuacuucccccugcaguccuacggcuuccagccgaccuacggggugggcuaccagcccuaccgcguggucgugcugagcuucgagcuccugcacgcccccgccacggugugcggccccaagaaguccaccaaccuggucaagaacaagugcgugaacuucaacuucaacgggcucaccggcaccggggugcugaccgagagcaacaagaaguuccugccguuccagcaguucggccgggacaucgccgacacgaccgacgcgguccgcgacccccagacccucgagauccuggacaucacccccugcagcuucgggggcguguccgugaucacgccgggcaccaacaccagcaaccaggucgccgugcuguaccagggggugaacugcaccgagguccccguggccauccacgccgaccagcugacgcccaccuggcgcguguacuccaccggcagcaacgucuuccagacccgggccgggugccucaucggcgcggagcacgugaacaacuccuacgagugcgacauccccaucggcgccgggaucugcgccagcuaccagacgcagaccaacuccccgcgccgggcccgcagcguggcgucccagagcaucaucgccuacaccaugucccugggcgucgagaacagcguggccuacuccaacaacagcaucgccauccccaccaacuucacgaucuccgugaccaccgagauccugcccgucagcaugaccaagacgagcguggacugcaccauguacaucugcggggacuccaccgagugcagcaaccuccugcugcaguacggcuccuucugcacccagcucaaccgggcccugacggggaucgcgguggagcaggacaagaacacccaggaggucuucgcccaggugaagcagaucuacaagacgcccccgaucaaggacuucggcggcuucaacuucagccagauccugcccgaccccuccaagcccagcaagcgcuccuucaucgaggaccuccuguucaacaaggugacccuggccgacgccggguucaucaagcaguacggcgacugccucggggacaucgccgcgcgggaccugaucugcgcccagaaguucaacggccugaccguccucccgccccugcugaccgacgagaugaucgcccaguacaccagcgcccuccuggccgggaccaucacguccggcuggaccuucggcgcgggggccgcccugcagauccccuucgccaugcagauggcguaccgcuucaacggcaucggggugacccagaacgugcucuacgagaaccagaagcugaucgccaaccaguucaacagcgccaucggcaagauccaggacucccugagcuccaccgccagcgcccucgggaagcugcaggacgucgugaaccagaacgcgcaggcccugaacacgcucgugaagcagcuguccagcaacuucggcgccaucuccagcguccugaacgacauccucucccggcuggacccgcccgaggccgaggugcagaucgaccgccugaucaccggccggcuccagagccugcagaccuacgugacccagcagcugauccgcgccgcggagauccgggccagcgccaaccucgccgccaccaagauguccgagugcguccuggggcagagcaagcgcguggacuucugcggcaagggguaccaccugauguccuucccccagagcgcgccccacggcguggucuuccuccacgugacguacguccccgcccaggagaagaacuucaccaccgccccggccaucugccacgacgggaaggcgcacuucccccgggagggcguguucguguccaacggcacccacugguucgucacgcagcgcaacuucuacgagccccagaucaucaccaccgacaacaccuucgugagcgggaacugcgacguggucaucggcaucgugaacaacacgguguacgacccccugcagccggagcuggacuccuucaaggaggagcucgacaaguacuucaagaaccacaccagccccgacgucgaccugggggacaucuccggcaucaacgccagcguggugaacauccagaaggagaucgaccggcugaacgaggucgccaagaaccucaacgagucccugaucgaccugcaggagcucggcaaguacgagcaguacaucaaguggcccugguacaucuggcugggguucaucgccggccugaucgccaucgugauggugaccaucaugcucugcugcaugaccagcugcugcuccugccugaaggggugcugcagcugcggcuccugcugcaaguucgacgaggacgacagcgagccgguccugaagggggugaagcuccacuacacgugaggacuaguuauaagacugacuagcccgaugggccucccaacgggcccuccuccccuccuugcaccgagagaucucaaaggcucuuuucagagccaccaaaaaaaaaaaaaaaaaaaaaaaaaaaaaaaaaaaaaaaaaaaaaaaaaaaaaaaaaaaaaaaaaaaaaaaaaaaaaaaaaaaaaaaaaaaaaaaaaaaaa

SEQ ID NO: 24650 - RNA, 4035 nt, Artificial Sequence
  SARS-CoV-2/Wuhan/WIV05/2019__EPI_ISL_402128 spike protein mRNA gc (1-1273)(K986P_V987P_K986P_V987P_E484K_D614G)
aggagaaagcuuaccauguucguguuccugguccuccugccccuggugagcucccagugcgugaaccucaccacccgcacgcagcugccgcccgccuacaccaacagcuucacccggggcgucuacuaccccgacaagguguuccgcuccagcgugcugcacuccacccaggaccucuuccugcccuucuucagcaacgucacgugguuccacgccauccacguguccgggaccaacggcaccaagcgguucgacaacccggugcugcccuucaacgacggggucuacuucgcgagcaccgagaaguccaacaucauccgcggcuggaucuucgggacgacccucgacagcaagacccagucccugcugaucgugaacaacgccaccaacguggucaucaaggugugcgaguuccaguucugcaacgaccccuuccucggcguguacuaccacaagaacaacaagagcuggauggaguccgaguuccgggucuacagcuccgccaacaacugcacguucgaguacgugagccagcccuuccugauggaccuggagggcaagcaggggaacuucaagaaccuccgcgaguucguguucaagaacaucgacggcuacuucaagaucuacuccaagcacaccccgaucaaccugguccgggaccugccccagggguucagcgcccucgagccccugguggaccugcccaucggcaucaacaucacccgcuuccagacccuccuggcccugcaccgguccuaccucacgccgggggacagcagcuccggcuggaccgcgggcgccgccgccuacuacgugggguaccugcagccccgcaccuuccugcucaaguacaacgagaacggcaccaucacggacgcggucgacugcgcccuggacccccugagcgagaccaagugcacccucaaguccuucaccguggagaaggggaucuaccagacgagcaacuuccgggugcagcccaccgaguccaucguccgcuucccgaacaucaccaaccugugccccuucggcgagguguucaacgccacccgguucgccagcgucuacgccuggaaccgcaagcggaucuccaacugcguggcggacuacagcgugcuguacaacuccgccagcuucuccacguucaagugcuacggcgucagccccaccaagcucaacgaccugugcuucaccaacguguacgccgacuccuucgugauccgcggggacgagguccggcagaucgcccccggccagaccgggaagaucgccgacuacaacuacaagcugccggacgacuucacgggcugcgugaucgcguggaacagcaacaaccucgacuccaaggucgggggcaacuacaacuaccuguaccgccuguuccgcaagagcaaccucaagcccuucgagcgggacaucuccaccgagaucuaccaggccggcagcacccccugcaacggggugaagggcuucaacugcuacuucccccugcaguccuacggguuccagccgaccaacggcgugggguaccagcccuaccggguggucgugcugagcuucgagcuccugcacgcccccgccacggugugcggccccaagaaguccaccaaccuggucaagaacaagugcgugaacuucaacuucaacggccucaccgggaccggcgugcugaccgagagcaacaagaaguuccugccguuccagcaguucgggcgcgacaucgccgacacgaccgacgcgguccgcgacccccagacccuggagauccucgacaucacccccugcagcuucggcgggguguccgugaucacgccgggcaccaacaccagcaaccaggucgccgugcuguaccagggcgugaacugcaccgagguccccguggccauccacgccgaccagcugacgcccaccuggcggguguacuccaccgggagcaacgucuuccagacccgcgccggcugccucaucggggcggagcacgugaacaacuccuacgagugcgacauccccaucggcgccggcaucugcgccagcuaccagacgcagaccaacuccccgcggcgcgcccggagcguggcgucccagagcaucaucgccuacaccaugucccugggggccgagaacagcgucgccuacuccaacaacagcaucgccauccccaccaacuucacgaucuccgugaccaccgagauccugcccgugagcaugaccaagacgagcgucgacugcaccauguacaucugcggcgacuccaccgagugcagcaaccuccugcugcaguacggguccuucugcacccagcucaaccgcgcgcugacgggcaucgccguggagcaggacaagaacacccaggagguguucgcccaggucaagcagaucuacaagacgcccccgaucaaggacuucgggggcuucaacuucagccagauccugcccgaccccuccaagcccagcaagcgguccuucaucgaggaccuccuguucaacaaggugacccuggccgacgccggcuucaucaagcaguacggggacugccucggcgacaucgcggcccgcgaccugaucugcgcccagaaguucaacgggcugaccgugcucccgccccugcugaccgacgagaugaucgcccaguacaccagcgcccuccuggcgggcaccaucacguccggguggaccuucggcgccggcgccgcccugcagauccccuucgcgaugcagauggccuaccgguucaacgggaucggcgucacccagaacgugcucuacgagaaccagaagcugaucgccaaccaguucaacagcgccaucgggaagauccaggacucccugagcuccaccgccagcgcgcucggcaagcugcaggacguggucaaccagaacgcccaggcccugaacacgcucgugaagcagcuguccagcaacuucggggccaucuccagcgugcugaacgacauccucucccgccuggacccgcccgaggccgagguccagaucgaccggcugaucaccggccgccuccagagccugcagaccuacgugacccagcagcugauccgggcggccgagauccgcgccagcgccaaccucgccgcgaccaagauguccgagugcgugcugggccagagcaagcgggucgacuucugcgggaagggcuaccaccugauguccuucccccagagcgcgccccacggggugguguuccuccacgucacguacgugcccgcccaggagaagaacuucaccaccgccccggccaucugccacgacggcaaggcccacuucccccgcgagggggucuucguguccaacggcacccacugguucgugacgcagcggaacuucuacgagccccagaucaucaccaccgacaacaccuucgucagcggcaacugcgacguggugaucgggaucgucaacaacacgguguacgacccccugcagccggagcuggacuccuucaaggaggagcucgacaaguacuucaagaaccacaccagccccgacguggaccugggcgacaucuccgggaucaacgccagcgucgugaacauccagaaggagaucgaccgccugaacgagguggccaagaaccucaacgagucccugaucgaccugcaggagcucggcaaguacgagcaguacaucaaguggcccugguacaucuggcugggcuucaucgccgggcugaucgcgaucgucauggugaccaucaugcucugcugcaugaccagcugcugcuccugccugaagggcugcugcagcugcggguccugcugcaaguucgacgaggacgacagcgagccggugcugaagggcgucaagcuccacuacacgugaggacuaguuauaagacugacuagcccgaugggccucccaacgggcccuccuccccuccuugcaccgagagaucucaaaggcucuuuucagagccaccaaaaaaaaaaaaaaaaaaaaaaaaaaaaaaaaaaaaaaaaaaaaaaaaaaaaaaaaaaaaaaaaaaaaaaaaaaaaaaaaaaaaaaaaaaaaaaaaaaaaa

SEQ ID NO: 24651 - RNA, 4035 nt, Artificial Sequence
  SARS-CoV-2/Wuhan/WIV05/2019__EPI_ISL_402128 spike protein mRNA gc (1-1273)(K986P_V987P_K986P_V987P_L18F_T20N_P26S_D138Y_R190S_K417T _E484K_N501Y_D614G_H655Y_T1027I)
aggagaaagcuuaccauguucguguuccugguccuccugccccuggugagcucccagugcgugaacuucaccaaccgcacccagcucccgagcgccuacacgaacuccuucacccggggcgucuacuaccccgacaagguguuccgcagcuccgugcugcacagcacccaggaccuguuccuccccuucuucuccaacgucaccugguuccacgccauccacgugagcgggacgaacggcaccaagcgguucgacaaccccgugcugccguucaacgacggggucuacuucgcguccaccgagaaguccaacaucauccgcggcuggaucuucgggaccacgcuggacuccaagacccagagccuccugaucgugaacaacgccaccaacguggucaucaaggugugcgaguuccaguucugcaacuaccccuuccugggcguguacuaccacaagaacaacaaguccuggauggagagcgaguuccgggucuacuccagcgccaacaacugcaccuucgaguacgugucccagcccuuccucauggaccuggagggcaagcaggggaacuucaagaaccugagcgaguucguguucaagaacaucgacggcuacuucaagaucuacuccaagcacacgcccaucaaccucguccgcgaccugccgcagggguucagcgcccuggagccccucguggaccugcccaucggcaucaacaucacccgguuccagacccugcucgcccugcaccgcagcuaccugacccccggggacuccagcuccggcuggacggcgggcgccgccgccuacuacgugggguaccuccagccgcggaccuuccugcugaaguacaacgagaacggcaccaucaccgacgcggucgacugcgcccucgacccccugagcgagacgaagugcacccugaaguccuucaccguggagaaggggaucuaccagaccagcaacuuccgcgugcagcccacggaguccaucguccgguuccccaacaucaccaaccucugcccguucggcgagguguucaacgccacccgcuucgccagcgucuacgccuggaaccggaagcgcaucuccaacugcguggcggacuacagcgugcuguacaacuccgccagcuucuccaccuucaagugcuacggcgucagccccacgaagcugaacgaccucugcuucaccaacguguacgccgacuccuucgugauccgcggggacgagguccggcagaucgcccccggccagaccgggaccaucgccgacuacaacuacaagcugcccgacgacuucacgggcugcgugaucgcguggaacagcaacaaccuggacuccaaggucgggggcaacuacaacuaccucuaccggcuguuccgcaagagcaaccugaagccguucgagcgggacaucuccaccgagaucuaccaggccggcagcacccccugcaacggggugaagggcuucaacugcuacuucccccuccagagcuacggguuccagcccaccuacggcgugggguaccagccguaccgcguggucgugcuguccuucgagcugcuccacgcccccgccacggugugcggccccaagaaguccaccaaccuggucaagaacaagugcgugaacuucaacuucaacggccugaccgggaccggcgugcucaccgagagcaacaagaaguuccugcccuuccagcaguucgggcgggacaucgccgacacgaccgacgcgguccgcgacccgcagacccuggagauccuggacaucacccccugcagcuucggcgggguguccgugaucacgcccggcaccaacaccagcaaccaggucgccgugcucuaccagggcgugaacugcaccgaggucccgguggccauccacgccgaccagcugacgcccaccuggcgcguguacuccaccgggagcaacgucuuccagacccgggccggcugccugaucggggcggaguacgugaacaacuccuacgagugcgacauccccaucggcgccggcaucugcgccagcuaccagacgcagaccaacagcccccgccgggcccgcagcguggcgucccagagcaucaucgccuacaccaugucccucggggccgagaacagcgucgccuacuccaacaacagcaucgccaucccgaccaacuucacgaucagcgugaccaccgagauccugcccguguccaugaccaagacgagcgucgacugcaccauguacaucugcggcgacuccaccgagugcagcaaccugcuccugcaguacggguccuucugcacccagcugaaccgggcgcucacgggcaucgccguggagcaggacaagaacacccaggagguguucgcccaggucaagcagaucuacaagaccccgcccaucaaggacuucgggggcuucaacuucagccagauccugcccgaccccuccaagcccagcaagcgcuccuucaucgaggaccuccuguucaacaaggugacccuggccgacgccggcuucaucaagcaguacggggacugccugggcgacaucgcggcccgggaccucaucugcgcccagaaguucaacgggcugacggugcugcccccgcuccugaccgacgagaugaucgcccaguacaccagcgcccugcucgcgggcaccaucacguccggguggaccuucggcgccggcgccgcccugcagauccccuucgcgaugcagauggccuaccgcuucaacgggaucggcgucacccagaacgugcuguacgagaaccagaagcucaucgccaaccaguucaacagcgccaucgggaagauccaggacucccugagcuccaccgccagcgcgcugggcaagcuccaggacguggucaaccagaacgcccaggcccugaacacgcuggugaagcagcucuccagcaacuucggggccaucuccagcgugcugaacgacauccugagccggcucgacccgcccgaggccgagguccagaucgaccgccugaucaccggccggcugcagucccuccagaccuacgugacccagcagcugauccgcgcggccgagauccgggccagcgccaaccuggccgcgaucaagauguccgagugcgugcucggccagagcaagcgcgucgacuucugcgggaagggcuaccaccugauguccuucccccagagcgcgccccacggggugguguuccugcacgucaccuacgugcccgcccaggagaagaacuucacgaccgcccccgccaucugccacgacggcaaggcccacuucccgcgggagggggucuucguguccaacggcacccacugguucgugacccagcgcaacuucuacgagccccagaucaucacgaccgacaacaccuucgucagcggcaacugcgacguggugaucgggaucgucaacaacaccguguacgacccccuccagcccgagcuggacuccuucaaggaggagcuggacaaguacuucaagaaccacacgagcccggacguggaccucggcgacaucuccgggaucaacgccagcgucgugaacauccagaaggagaucgaccggcugaacgagguggccaagaaccugaacgagucccucaucgaccugcaggagcugggcaaguacgagcaguacaucaaguggcccugguacaucuggcucggcuucaucgccgggcugaucgcgaucgucauggugaccaucaugcugugcugcaugaccagcugcugcuccugccucaagggcugcugcagcugcggguccugcugcaaguucgacgaggacgacagcgagcccgugcugaagggcgucaagcugcacuacaccugaggacuaguuauaagacugacuagcccgaugggccucccaacgggcccuccuccccuccuugcaccgagagaucucaaaggcucuuuucagagccaccaaaaaaaaaaaaaaaaaaaaaaaaaaaaaaaaaaaaaaaaaaaaaaaaaaaaaaaaaaaaaaaaaaaaaaaaaaaaaaaaaaaaaaaaaaaaaaaaaaaaa

SEQ ID NO: 24652 - RNA, 4035 nt, Artificial Sequence
  SARS-CoV-2/Wuhan/WIV05/2019__EPI_ISL_402128 spike protein mRNA gc (1-1273)(K986P_V987P_K986P_V987P_S13I_W152C_L452R_D614G)
aggagaaagcuuaccauguucguguuccugguccuccugccccuggugagcauccagugcgugaaccucaccacccgcacgcagcugccgcccgccuacaccaacuccuucacccggggcgucuacuaccccgacaagguguuccgcagcuccgugcugcacagcacccaggaccucuuccugcccuucuucuccaacgucacgugguuccacgccauccacgugagcgggaccaacggcaccaagcgguucgacaacccggugcugcccuucaacgacggggucuacuucgcguccaccgagaaguccaacaucauccgcggcuggaucuucgggacgacccucgacagcaagacccagagccugcugaucgugaacaacgccaccaacguggucaucaaggugugcgaguuccaguucugcaacgaccccuuccucggcguguacuaccacaagaacaacaaguccugcauggagagcgaguuccgggucuacuccagcgccaacaacugcacguucgaguacgugucccagcccuuccugauggaccuggagggcaagcaggggaacuucaagaaccuccgcgaguucguguucaagaacaucgacggcuacuucaagaucuacagcaagcacaccccgaucaaccugguccgggaccugccccagggguucuccgcccucgagccccugguggaccugcccaucggcaucaacaucacccgcuuccagacccuccuggcccugcaccggagcuaccucacgccgggggacuccagcagcggcuggaccgcgggcgccgccgccuacuacgugggguaccugcagccccgcaccuuccugcucaaguacaacgagaacggcaccaucacggacgcggucgacugcgcccuggacccccuguccgagaccaagugcacccucaagagcuucaccguggagaaggggaucuaccagacguccaacuuccgggugcagcccaccgagagcaucguccgcuucccgaacaucaccaaccugugccccuucggcgagguguucaacgccacccgguucgccuccgucuacgccuggaaccgcaagcggaucagcaacugcguggcggacuacuccgugcuguacaacagcgccuccuucagcacguucaagugcuacggcgucucccccaccaagcucaacgaccugugcuucaccaacguguacgccgacagcuucgugauccgcggggacgagguccggcagaucgcccccggccagaccgggaagaucgccgacuacaacuacaagcugccggacgacuucacgggcugcgugaucgcguggaacuccaacaaccucgacagcaaggucgggggcaacuacaacuaccgcuaccggcuguuccgcaaguccaaccugaagcccuucgagcgggacaucagcaccgagaucuaccaggccggcuccacccccugcaacgggguggagggcuucaacugcuacuucccccuccagagcuacggguuccagccgaccaacggcgugggguaccagcccuaccgcguggucgugcuguccuucgagcugcuccacgcccccgccacggugugcggccccaagaaguccaccaaccuggucaagaacaagugcgugaacuucaacuucaacggccugaccgggaccggcgugcucaccgagagcaacaagaaguuccugccguuccagcaguucgggcgcgacaucgccgacacgaccgacgcgguccgggacccccagacccuggagauccuggacaucacccccugcagcuucggcggggugagcgugaucacgccgggcaccaacaccuccaaccaggucgccgugcucuaccagggcgugaacugcaccgagguccccguggccauccacgccgaccagcugacgcccaccuggcgcguguacagcaccggguccaacgucuuccagacccgggccggcugccugaucggggcggagcacgugaacaacagcuacgagugcgacauccccaucggcgccggcaucugcgccuccuaccagacgcagaccaacagcccgcgccgggcccgcuccguggcgagccaguccaucaucgccuacaccaugagccucggggccgagaacuccgucgccuacagcaacaacuccaucgccauccccaccaacuucacgaucagcgugaccaccgagauccugcccguguccaugaccaagacgagcgucgacugcaccauguacaucugcggcgacagcaccgagugcuccaaccugcuccugcaguacgggagcuucugcacccagcugaaccgggcgcucacgggcaucgccguggagcaggacaagaacacccaggagguguucgcccaggucaagcagaucuacaagacgcccccgaucaaggacuucgggggcuucaacuucucccagauccugcccgaccccagcaagcccuccaagcgcagcuucaucgaggaccuccuguucaacaaggugacccuggccgacgccggcuucaucaagcaguacggggacugccugggcgacaucgcggcccgggaccucaucugcgcccagaaguucaacgggcugaccgugcugccgccccuccugaccgacgagaugaucgcccaguacaccuccgcccugcucgcgggcaccaucacgagcggguggaccuucggcgccggcgccgcccugcagauccccuucgcgaugcagauggccuaccgcuucaacgggaucggcgucacccagaacgugcuguacgagaaccagaagcucaucgccaaccaguucaacuccgccaucgggaagauccaggacagccuguccagcaccgccuccgcgcugggcaagcuccaggacguggucaaccagaacgcccaggcccugaacacgcuggugaagcagcucagcuccaacuucggggccaucagcuccgugcugaacgacauccugagccggcucgacccgcccgaggccgagguccagaucgaccgccugaucaccggccggcugcagucccuccagaccuacgugacccagcagcugauccgcgcggccgagauccgggccagcgccaaccuggccgcgaccaagaugagcgagugcgugcucggccaguccaagcgcgucgacuucugcgggaagggcuaccaccugaugagcuucccccaguccgcgccccacggggugguguuccugcacgucacguacgugcccgcccaggagaagaacuucaccaccgccccggccaucugccacgacggcaaggcccacuucccccgggagggggucuucgugagcaacggcacccacugguucgugacgcagcgcaacuucuacgagccccagaucaucaccaccgacaacaccuucgucuccggcaacugcgacguggugaucgggaucgucaacaacacgguguacgacccccuccagccggagcuggacagcuucaaggaggagcuggacaaguacuucaagaaccacaccucccccgacguggaccucggcgacaucagcgggaucaacgccuccgucgugaacauccagaaggagaucgaccggcugaacgagguggccaagaaccugaacgagagccucaucgaccugcaggagcugggcaaguacgagcaguacaucaaguggcccugguacaucuggcucggcuucaucgccgggcugaucgcgaucgucauggugaccaucaugcugugcugcaugaccuccugcugcagcugccucaagggcugcugcuccugcgggagcugcugcaaguucgacgaggacgacuccgagccggugcugaagggcgucaagcugcacuacacgugaggacuaguuauaagacugacuagcccgaugggccucccaacgggcccuccuccccuccuugcaccgagagaucucaaaggcucuuuucagagccaccaaaaaaaaaaaaaaaaaaaaaaaaaaaaaaaaaaaaaaaaaaaaaaaaaaaaaaaaaaaaaaaaaaaaaaaaaaaaaaaaaaaaaaaaaaaaaaaaaaaaa

SEQ ID NO: 24653 - RNA, 4035 nt, Artificial Sequence
  SARS-CoV-2/Wuhan/WIV05/2019__EPI_ISL_402128 spike protein mRNA gc (1-1273)(K986P_V987P)
aggagaaagcuuaccauguucguguuccuggugcugcugccccuggugagcagccagugcgugaaccugaccacccggacccagcugccaccagccuacaccaacagcuucacccggggcgucuacuaccccgacaagguguuccggagcagcguccugcacagcacccaggaccuguuccugcccuucuucagcaacgugaccugguuccacgccauccacgugagcggcaccaacggcaccaagcgguucgacaaccccgugcugcccuucaacgacggcguguacuucgccagcaccgagaagagcaacaucauccggggcuggaucuucggcaccacccuggacagcaagacccagagccugcugaucgugaauaacgccaccaacguggugaucaaggugugcgaguuccaguucugcaacgaccccuuccugggcguguacuaccacaagaacaacaagagcuggauggagagcgaguuccggguguacagcagcgccaacaacugcaccuucgaguacgugagccagcccuuccugauggaccuggagggcaagcagggcaacuucaagaaccugcgggaguucguguucaagaacaucgacggcuacuucaagaucuacagcaagcacaccccaaucaaccuggugcgggaucugccccagggcuucucagcccuggagccccugguggaccugcccaucggcaucaacaucacccgguuccagacccugcuggcccugcaccggagcuaccugaccccaggcgacagcagcagcggguggacagcaggcgcggcugcuuacuacgugggcuaccugcagccccggaccuuccugcugaaguacaacgagaacggcaccaucaccgacgccguggacugcgcccuggacccucugagcgagaccaagugcacccugaagagcuucaccguggagaagggcaucuaccagaccagcaacuuccgggugcagcccaccgagagcaucgugcgguuccccaacaucaccaaccugugccccuucggcgagguguucaacgccacccgguucgccagcguguacgccuggaaccggaagcggaucagcaacugcguggccgacuacagcgugcuguacaacagcgccagcuucagcaccuucaagugcuacggcgugagccccaccaagcugaacgaccugugcuucaccaacguguacgccgacagcuucgugauccguggcgacgaggugcggcagaucgcacccggccagacaggcaagaucgccgacuacaacuacaagcugcccgacgacuucaccggcugcgugaucgccuggaacagcaacaaccucgacagcaaggugggcggcaacuacaacuaccuguaccggcuguuccggaagagcaaccugaagcccuucgagcgggacaucagcaccgagaucuaccaagccggcuccaccccuugcaacggcguggagggcuucaacugcuacuucccucugcagagcuacggcuuccagcccaccaacggcgugggcuaccagcccuaccgggugguggugcugagcuucgagcugcugcacgccccagccaccguguguggccccaagaagagcaccaaccuggugaagaacaagugcgugaacuucaacuucaacggccuuaccggcaccggcgugcugaccgagagcaacaagaaauuccugcccuuucagcaguucggccgggacaucgccgacaccaccgacgcugugcgggauccccagacccuggagauccuggacaucaccccuugcagcuucggcggcgugagcgugaucaccccaggcaccaacaccagcaaccagguggccgugcuguaccaggacgugaacugcaccgaggugcccguggccauccacgccgaccagcugacacccaccuggcgggucuacagcaccggcagcaacguguuccagacccgggccgguugccugaucggcgccgagcacgugaacaacagcuacgagugcgacauccccaucggcgccggcaucugugccagcuaccagacccagaccaauucaccccggagggcaaggagcguggccagccagagcaucaucgccuacaccaugagccugggcgccgagaacagcguggccuacagcaacaacagcaucgccauccccaccaacuucaccaucagcgugaccaccgagauucugcccgugagcaugaccaagaccagcguggacugcaccauguacaucugcggcgacagcaccgagugcagcaaccugcugcugcaguacggcagcuucugcacccagcugaaccgggcccugaccggcaucgccguggagcaggacaagaacacccaggagguguucgcccaggugaagcagaucuacaagaccccucccaucaaggacuucggcggcuucaacuucagccagauccugcccgaccccagcaagcccagcaagcggagcuucaucgaggaccugcuguucaacaaggugacccuagccgacgccggcuucaucaagcaguacggcgacugccucggcgacauagccgcccgggaccugaucugcgcccagaaguucaacggccugaccgugcugccuccccugcugaccgacgagaugaucgcccaguacaccagcgcccuguuagccggaaccaucaccagcggcuggacuuucggcgcuggagccgcucugcagauccccuucgccaugcagauggccuaccgguucaacggcaucggcgugacccagaacgugcuguacgagaaccagaagcugaucgccaaccaguucaacagcgccaucggcaagauccaggacagccugagcagcaccgcuagcgcccugggcaagcugcaggacguggugaaccagaacgcccaggcccugaacacccuggugaagcagcugagcagcaacuucggcgccaucagcagcgugcugaacgacauccugagccggcuggacccucccgaggccgaggugcagaucgaccggcugaucacuggccggcugcagagccugcagaccuacgugacccagcagcugauccgggccgccgagauucgggccagcgccaaccuggccgccaccaagaugagcgagugcgugcugggccagagcaagcggguggacuucugcggcaagggcuaccaccugaugagcuuuccccagagcgcaccccacggagugguguuccugcacgugaccuacgugcccgcccaggagaagaacuucaccaccgccccagccaucugccacgacggcaaggcccacuuuccccgggagggcguguucgugagcaacggcacccacugguucgugacccagcggaacuucuacgagccccagaucaucaccaccgacaacaccuucgugagcggcaacugcgacguggugaucggcaucgugaacaacaccguguacgauccccugcagcccgagcuggacagcuucaaggaggagcuggacaaguacuucaagaaucacaccagccccgacguggaccugggcgacaucagcggcaucaacgccagcguggugaacauccagaaggagaucgaucggcugaacgagguggccaagaaccugaacgagagccugaucgaccugcaggagcugggcaaguacgagcaguacaucaaguggcccugguacaucuggcugggcuucaucgccggccugaucgccaucgugauggugaccaucaugcugugcugcaugaccagcugcugcagcugccugaagggcuguugcagcugcggcagcugcugcaaguucgacgaggacgacagcgagcccgugcugaagggcgugaagcugcacuacaccugaggacuaguuauaagacugacuagcccgaugggccucccaacgggcccuccuccccuccuugcaccgagagaucucaaaggcucuuuucagagccaccaaaaaaaaaaaaaaaaaaaaaaaaaaaaaaaaaaaaaaaaaaaaaaaaaaaaaaaaaaaaaaaaaaaaaaaaaaaaaaaaaaaaaaaaaaaaaaaaaaaaa

SEQ ID NO: 24654 - RNA, 4035 nt, Artificial Sequence
  SARS-CoV-2/Wuhan/WIV05/2019__EPI_ISL_402128 spike protein mRNA gc (1-1273)(K986P_V987P_ D614G)
aggagaaagcuuaccauguucguguuccuggugcugcugccccuggugagcagccagugcgugaaccugaccacccggacccagcugccaccagccuacaccaacagcuucacccggggcgucuacuaccccgacaagguguuccggagcagcguccugcacagcacccaggaccuguuccugcccuucuucagcaacgugaccugguuccacgccauccacgugagcggcaccaacggcaccaagcgguucgacaaccccgugcugcccuucaacgacggcguguacuucgccagcaccgagaagagcaacaucauccggggcuggaucuucggcaccacccuggacagcaagacccagagccugcugaucgugaauaacgccaccaacguggugaucaaggugugcgaguuccaguucugcaacgaccccuuccugggcguguacuaccacaagaacaacaagagcuggauggagagcgaguuccggguguacagcagcgccaacaacugcaccuucgaguacgugagccagcccuuccugauggaccuggagggcaagcagggcaacuucaagaaccugcgggaguucguguucaagaacaucgacggcuacuucaagaucuacagcaagcacaccccaaucaaccuggugcgggaucugccccagggcuucucagcccuggagccccugguggaccugcccaucggcaucaacaucacccgguuccagacccugcuggcccugcaccggagcuaccugaccccaggcgacagcagcagcggguggacagcaggcgcggcugcuuacuacgugggcuaccugcagccccggaccuuccugcugaaguacaacgagaacggcaccaucaccgacgccguggacugcgcccuggacccucugagcgagaccaagugcacccugaagagcuucaccguggagaagggcaucuaccagaccagcaacuuccgggugcagcccaccgagagcaucgugcgguuccccaacaucaccaaccugugccccuucggcgagguguucaacgccacccgguucgccagcguguacgccuggaaccggaagcggaucagcaacugcguggccgacuacagcgugcuguacaacagcgccagcuucagcaccuucaagugcuacggcgugagccccaccaagcugaacgaccugugcuucaccaacguguacgccgacagcuucgugauccguggcgacgaggugcggcagaucgcacccggccagacaggcaagaucgccgacuacaacuacaagcugcccgacgacuucaccggcugcgugaucgccuggaacagcaacaaccucgacagcaaggugggcggcaacuacaacuaccuguaccggcuguuccggaagagcaaccugaagcccuucgagcgggacaucagcaccgagaucuaccaagccggcuccaccccuugcaacggcguggagggcuucaacugcuacuucccucugcagagcuacggcuuccagcccaccaacggcgugggcuaccagcccuaccgggugguggugcugagcuucgagcugcugcacgccccagccaccguguguggccccaagaagagcaccaaccuggugaagaacaagugcgugaacuucaacuucaacggccuuaccggcaccggcgugcugaccgagagcaacaagaaauuccugcccuuucagcaguucggccgggacaucgccgacaccaccgacgcugugcgggauccccagacccuggagauccuggacaucaccccuugcagcuucggcggcgugagcgugaucaccccaggcaccaacaccagcaaccagguggccgugcuguaccagggcgugaacugcaccgaggugcccguggccauccacgccgaccagcugacacccaccuggcgggucuacagcaccggcagcaacguguuccagacccgggccgguugccugaucggcgccgagcacgugaacaacagcuacgagugcgacauccccaucggcgccggcaucugugccagcuaccagacccagaccaauucaccccggagggcaaggagcguggccagccagagcaucaucgccuacaccaugagccugggcgccgagaacagcguggccuacagcaacaacagcaucgccauccccaccaacuucaccaucagcgugaccaccgagauucugcccgugagcaugaccaagaccagcguggacugcaccauguacaucugcggcgacagcaccgagugcagcaaccugcugcugcaguacggcagcuucugcacccagcugaaccgggcccugaccggcaucgccguggagcaggacaagaacacccaggagguguucgcccaggugaagcagaucuacaagaccccucccaucaaggacuucggcggcuucaacuucagccagauccugcccgaccccagcaagcccagcaagcggagcuucaucgaggaccugcuguucaacaaggugacccuagccgacgccggcuucaucaagcaguacggcgacugccucggcgacauagccgcccgggaccugaucugcgcccagaaguucaacggccugaccgugcugccuccccugcugaccgacgagaugaucgcccaguacaccagcgcccuguuagccggaaccaucaccagcggcuggacuuucggcgcuggagccgcucugcagauccccuucgccaugcagauggccuaccgguucaacggcaucggcgugacccagaacgugcuguacgagaaccagaagcugaucgccaaccaguucaacagcgccaucggcaagauccaggacagccugagcagcaccgcuagcgcccugggcaagcugcaggacguggugaaccagaacgcccaggcccugaacacccuggugaagcagcugagcagcaacuucggcgccaucagcagcgugcugaacgacauccugagccggcuggacccucccgaggccgaggugcagaucgaccggcugaucacuggccggcugcagagccugcagaccuacgugacccagcagcugauccgggccgccgagauucgggccagcgccaaccuggccgccaccaagaugagcgagugcgugcugggccagagcaagcggguggacuucugcggcaagggcuaccaccugaugagcuuuccccagagcgcaccccacggagugguguuccugcacgugaccuacgugcccgcccaggagaagaacuucaccaccgccccagccaucugccacgacggcaaggcccacuuuccccgggagggcguguucgugagcaacggcacccacugguucgugacccagcggaacuucuacgagccccagaucaucaccaccgacaacaccuucgugagcggcaacugcgacguggugaucggcaucgugaacaacaccguguacgauccccugcagcccgagcuggacagcuucaaggaggagcuggacaaguacuucaagaaucacaccagccccgacguggaccugggcgacaucagcggcaucaacgccagcguggugaacauccagaaggagaucgaucggcugaacgagguggccaagaaccugaacgagagccugaucgaccugcaggagcugggcaaguacgagcaguacaucaaguggcccugguacaucuggcugggcuucaucgccggccugaucgccaucgugauggugaccaucaugcugugcugcaugaccagcugcugcagcugccugaagggcuguugcagcugcggcagcugcugcaaguucgacgaggacgacagcgagcccgugcugaagggcgugaagcugcacuacaccugaggacuaguuauaagacugacuagcccgaugggccucccaacgggcccuccuccccuccuugcaccgagagaucucaaaggcucuuuucagagccaccaaaaaaaaaaaaaaaaaaaaaaaaaaaaaaaaaaaaaaaaaaaaaaaaaaaaaaaaaaaaaaaaaaaaaaaaaaaaaaaaaaaaaaaaaaaaaaaaaaaaa

SEQ ID NO: 24655 - RNA, 4035 nt, Artificial Sequence
  SARS-CoV-2/Wuhan/WIV05/2019__EPI_ISL_402128 spike protein mRNA gc (1-1273)(K986P_V987P_A222V_D614G)
aggagaaagcuuaccauguucguguuccuggugcugcugccccuggugagcagccagugcgugaaccugaccacccggacccagcugccaccagccuacaccaacagcuucacccggggcgucuacuaccccgacaagguguuccggagcagcguccugcacagcacccaggaccuguuccugcccuucuucagcaacgugaccugguuccacgccauccacgugagcggcaccaacggcaccaagcgguucgacaaccccgugcugcccuucaacgacggcguguacuucgccagcaccgagaagagcaacaucauccggggcuggaucuucggcaccacccuggacagcaagacccagagccugcugaucgugaauaacgccaccaacguggugaucaaggugugcgaguuccaguucugcaacgaccccuuccugggcguguacuaccacaagaacaacaagagcuggauggagagcgaguuccggguguacagcagcgccaacaacugcaccuucgaguacgugagccagcccuuccugauggaccuggagggcaagcagggcaacuucaagaaccugcgggaguucguguucaagaacaucgacggcuacuucaagaucuacagcaagcacaccccaaucaaccuggugcgggaucugccccagggcuucucagugcuggagccccugguggaccugcccaucggcaucaacaucacccgguuccagacccugcuggcccugcaccggagcuaccugaccccaggcgacagcagcagcggguggacagcaggcgcggcugcuuacuacgugggcuaccugcagccccggaccuuccugcugaaguacaacgagaacggcaccaucaccgacgccguggacugcgcccuggacccucugagcgagaccaagugcacccugaagagcuucaccguggagaagggcaucuaccagaccagcaacuuccgggugcagcccaccgagagcaucgugcgguuccccaacaucaccaaccugugccccuucggcgagguguucaacgccacccgguucgccagcguguacgccuggaaccggaagcggaucagcaacugcguggccgacuacagcgugcuguacaacagcgccagcuucagcaccuucaagugcuacggcgugagccccaccaagcugaacgaccugugcuucaccaacguguacgccgacagcuucgugauccguggcgacgaggugcggcagaucgcacccggccagacaggcaagaucgccgacuacaacuacaagcugcccgacgacuucaccggcugcgugaucgccuggaacagcaacaaccucgacagcaaggugggcggcaacuacaacuaccuguaccggcuguuccggaagagcaaccugaagcccuucgagcgggacaucagcaccgagaucuaccaagccggcuccaccccuugcaacggcguggagggcuucaacugcuacuucccucugcagagcuacggcuuccagcccaccaacggcgugggcuaccagcccuaccgggugguggugcugagcuucgagcugcugcacgccccagccaccguguguggccccaagaagagcaccaaccuggugaagaacaagugcgugaacuucaacuucaacggccuuaccggcaccggcgugcugaccgagagcaacaagaaauuccugcccuuucagcaguucggccgggacaucgccgacaccaccgacgcugugcgggauccccagacccuggagauccuggacaucaccccuugcagcuucggcggcgugagcgugaucaccccaggcaccaacaccagcaaccagguggccgugcuguaccagggcgugaacugcaccgaggugcccguggccauccacgccgaccagcugacacccaccuggcgggucuacagcaccggcagcaacguguuccagacccgggccgguugccugaucggcgccgagcacgugaacaacagcuacgagugcgacauccccaucggcgccggcaucugugccagcuaccagacccagaccaauucaccccggagggcaaggagcguggccagccagagcaucaucgccuacaccaugagccugggcgccgagaacagcguggccuacagcaacaacagcaucgccauccccaccaacuucaccaucagcgugaccaccgagauucugcccgugagcaugaccaagaccagcguggacugcaccauguacaucugcggcgacagcaccgagugcagcaaccugcugcugcaguacggcagcuucugcacccagcugaaccgggcccugaccggcaucgccguggagcaggacaagaacacccaggagguguucgcccaggugaagcagaucuacaagaccccucccaucaaggacuucggcggcuucaacuucagccagauccugcccgaccccagcaagcccagcaagcggagcuucaucgaggaccugcuguucaacaaggugacccuagccgacgccggcuucaucaagcaguacggcgacugccucggcgacauagccgcccgggaccugaucugcgcccagaaguucaacggccugaccgugcugccuccccugcugaccgacgagaugaucgcccaguacaccagcgcccuguuagccggaaccaucaccagcggcuggacuuucggcgcuggagccgcucugcagauccccuucgccaugcagauggccuaccgguucaacggcaucggcgugacccagaacgugcuguacgagaaccagaagcugaucgccaaccaguucaacagcgccaucggcaagauccaggacagccugagcagcaccgcuagcgcccugggcaagcugcaggacguggugaaccagaacgcccaggcccugaacacccuggugaagcagcugagcagcaacuucggcgccaucagcagcgugcugaacgacauccugagccggcuggacccucccgaggccgaggugcagaucgaccggcugaucacuggccggcugcagagccugcagaccuacgugacccagcagcugauccgggccgccgagauucgggccagcgccaaccuggccgccaccaagaugagcgagugcgugcugggccagagcaagcggguggacuucugcggcaagggcuaccaccugaugagcuuuccccagagcgcaccccacggagugguguuccugcacgugaccuacgugcccgcccaggagaagaacuucaccaccgccccagccaucugccacgacggcaaggcccacuuuccccgggagggcguguucgugagcaacggcacccacugguucgugacccagcggaacuucuacgagccccagaucaucaccaccgacaacaccuucgugagcggcaacugcgacguggugaucggcaucgugaacaacaccguguacgauccccugcagcccgagcuggacagcuucaaggaggagcuggacaaguacuucaagaaucacaccagccccgacguggaccugggcgacaucagcggcaucaacgccagcguggugaacauccagaaggagaucgaucggcugaacgagguggccaagaaccugaacgagagccugaucgaccugcaggagcugggcaaguacgagcaguacaucaaguggcccugguacaucuggcugggcuucaucgccggccugaucgccaucgugauggugaccaucaugcugugcugcaugaccagcugcugcagcugccugaagggcuguugcagcugcggcagcugcugcaaguucgacgaggacgacagcgagcccgugcugaagggcgugaagcugcacuacaccugaggacuaguuauaagacugacuagcccgaugggccucccaacgggcccuccuccccuccuugcaccgagagaucucaaaggcucuuuucagagccaccaaaaaaaaaaaaaaaaaaaaaaaaaaaaaaaaaaaaaaaaaaaaaaaaaaaaaaaaaaaaaaaaaaaaaaaaaaaaaaaaaaaaaaaaaaaaaaaaaaaaa

SEQ ID NO: 24656 - RNA, 4035 nt, Artificial Sequence
  SARS-CoV-2/Wuhan/WIV05/2019__EPI_ISL_402128 spike protein mRNA gc (1-1273)(K986P_V987P_N439K_D614G)
aggagaaagcuuaccauguucguguuccuggugcugcugccccuggugagcagccagugcgugaaccugaccacccggacccagcugccaccagccuacaccaacagcuucacccggggcgucuacuaccccgacaagguguuccggagcagcguccugcacagcacccaggaccuguuccugcccuucuucagcaacgugaccugguuccacgccauccacgugagcggcaccaacggcaccaagcgguucgacaaccccgugcugcccuucaacgacggcguguacuucgccagcaccgagaagagcaacaucauccggggcuggaucuucggcaccacccuggacagcaagacccagagccugcugaucgugaauaacgccaccaacguggugaucaaggugugcgaguuccaguucugcaacgaccccuuccugggcguguacuaccacaagaacaacaagagcuggauggagagcgaguuccggguguacagcagcgccaacaacugcaccuucgaguacgugagccagcccuuccugauggaccuggagggcaagcagggcaacuucaagaaccugcgggaguucguguucaagaacaucgacggcuacuucaagaucuacagcaagcacaccccaaucaaccuggugcgggaucugccccagggcuucucagcccuggagccccugguggaccugcccaucggcaucaacaucacccgguuccagacccugcuggcccugcaccggagcuaccugaccccaggcgacagcagcagcggguggacagcaggcgcggcugcuuacuacgugggcuaccugcagccccggaccuuccugcugaaguacaacgagaacggcaccaucaccgacgccguggacugcgcccuggacccucugagcgagaccaagugcacccugaagagcuucaccguggagaagggcaucuaccagaccagcaacuuccgggugcagcccaccgagagcaucgugcgguuccccaacaucaccaaccugugccccuucggcgagguguucaacgccacccgguucgccagcguguacgccuggaaccggaagcggaucagcaacugcguggccgacuacagcgugcuguacaacagcgccagcuucagcaccuucaagugcuacggcgugagccccaccaagcugaacgaccugugcuucaccaacguguacgccgacagcuucgugauccguggcgacgaggugcggcagaucgcacccggccagacaggcaagaucgccgacuacaacuacaagcugcccgacgacuucaccggcugcgugaucgccuggaacagcaagaaccucgacagcaaggugggcggcaacuacaacuaccuguaccggcuguuccggaagagcaaccugaagcccuucgagcgggacaucagcaccgagaucuaccaagccggcuccaccccuugcaacggcguggagggcuucaacugcuacuucccucugcagagcuacggcuuccagcccaccaacggcgugggcuaccagcccuaccgggugguggugcugagcuucgagcugcugcacgccccagccaccguguguggccccaagaagagcaccaaccuggugaagaacaagugcgugaacuucaacuucaacggccuuaccggcaccggcgugcugaccgagagcaacaagaaauuccugcccuuucagcaguucggccgggacaucgccgacaccaccgacgcugugcgggauccccagacccuggagauccuggacaucaccccuugcagcuucggcggcgugagcgugaucaccccaggcaccaacaccagcaaccagguggccgugcuguaccagggcgugaacugcaccgaggugcccguggccauccacgccgaccagcugacacccaccuggcgggucuacagcaccggcagcaacguguuccagacccgggccgguugccugaucggcgccgagcacgugaacaacagcuacgagugcgacauccccaucggcgccggcaucugugccagcuaccagacccagaccaauucaccccggagggcaaggagcguggccagccagagcaucaucgccuacaccaugagccugggcgccgagaacagcguggccuacagcaacaacagcaucgccauccccaccaacuucaccaucagcgugaccaccgagauucugcccgugagcaugaccaagaccagcguggacugcaccauguacaucugcggcgacagcaccgagugcagcaaccugcugcugcaguacggcagcuucugcacccagcugaaccgggcccugaccggcaucgccguggagcaggacaagaacacccaggagguguucgcccaggugaagcagaucuacaagaccccucccaucaaggacuucggcggcuucaacuucagccagauccugcccgaccccagcaagcccagcaagcggagcuucaucgaggaccugcuguucaacaaggugacccuagccgacgccggcuucaucaagcaguacggcgacugccucggcgacauagccgcccgggaccugaucugcgcccagaaguucaacggccugaccgugcugccuccccugcugaccgacgagaugaucgcccaguacaccagcgcccuguuagccggaaccaucaccagcggcuggacuuucggcgcuggagccgcucugcagauccccuucgccaugcagauggccuaccgguucaacggcaucggcgugacccagaacgugcuguacgagaaccagaagcugaucgccaaccaguucaacagcgccaucggcaagauccaggacagccugagcagcaccgcuagcgcccugggcaagcugcaggacguggugaaccagaacgcccaggcccugaacacccuggugaagcagcugagcagcaacuucggcgccaucagcagcgugcugaacgacauccugagccggcuggacccucccgaggccgaggugcagaucgaccggcugaucacuggccggcugcagagccugcagaccuacgugacccagcagcugauccgggccgccgagauucgggccagcgccaaccuggccgccaccaagaugagcgagugcgugcugggccagagcaagcggguggacuucugcggcaagggcuaccaccugaugagcuuuccccagagcgcaccccacggagugguguuccugcacgugaccuacgugcccgcccaggagaagaacuucaccaccgccccagccaucugccacgacggcaaggcccacuuuccccgggagggcguguucgugagcaacggcacccacugguucgugacccagcggaacuucuacgagccccagaucaucaccaccgacaacaccuucgugagcggcaacugcgacguggugaucggcaucgugaacaacaccguguacgauccccugcagcccgagcuggacagcuucaaggaggagcuggacaaguacuucaagaaucacaccagccccgacguggaccugggcgacaucagcggcaucaacgccagcguggugaacauccagaaggagaucgaucggcugaacgagguggccaagaaccugaacgagagccugaucgaccugcaggagcugggcaaguacgagcaguacaucaaguggcccugguacaucuggcugggcuucaucgccggccugaucgccaucgugauggugaccaucaugcugugcugcaugaccagcugcugcagcugccugaagggcuguugcagcugcggcagcugcugcaaguucgacgaggacgacagcgagcccgugcugaagggcgugaagcugcacuacaccugaggacuaguuauaagacugacuagcccgaugggccucccaacgggcccuccuccccuccuugcaccgagagaucucaaaggcucuuuucagagccaccaaaaaaaaaaaaaaaaaaaaaaaaaaaaaaaaaaaaaaaaaaaaaaaaaaaaaaaaaaaaaaaaaaaaaaaaaaaaaaaaaaaaaaaaaaaaaaaaaaaaa

SEQ ID NO: 24657 - RNA, 4035 nt, Artificial Sequence
  SARS-CoV-2/Wuhan/WIV05/2019__EPI_ISL_402128 spike protein mRNA gc (1-1273)(K986P_V987P_S477N_D614G)
aggagaaagcuuaccauguucguguuccuggugcugcugccccuggugagcagccagugcgugaaccugaccacccggacccagcugccaccagccuacaccaacagcuucacccggggcgucuacuaccccgacaagguguuccggagcagcguccugcacagcacccaggaccuguuccugcccuucuucagcaacgugaccugguuccacgccauccacgugagcggcaccaacggcaccaagcgguucgacaaccccgugcugcccuucaacgacggcguguacuucgccagcaccgagaagagcaacaucauccggggcuggaucuucggcaccacccuggacagcaagacccagagccugcugaucgugaauaacgccaccaacguggugaucaaggugugcgaguuccaguucugcaacgaccccuuccugggcguguacuaccacaagaacaacaagagcuggauggagagcgaguuccggguguacagcagcgccaacaacugcaccuucgaguacgugagccagcccuuccugauggaccuggagggcaagcagggcaacuucaagaaccugcgggaguucguguucaagaacaucgacggcuacuucaagaucuacagcaagcacaccccaaucaaccuggugcgggaucugccccagggcuucucagcccuggagccccugguggaccugcccaucggcaucaacaucacccgguuccagacccugcuggcccugcaccggagcuaccugaccccaggcgacagcagcagcggguggacagcaggcgcggcugcuuacuacgugggcuaccugcagccccggaccuuccugcugaaguacaacgagaacggcaccaucaccgacgccguggacugcgcccuggacccucugagcgagaccaagugcacccugaagagcuucaccguggagaagggcaucuaccagaccagcaacuuccgggugcagcccaccgagagcaucgugcgguuccccaacaucaccaaccugugccccuucggcgagguguucaacgccacccgguucgccagcguguacgccuggaaccggaagcggaucagcaacugcguggccgacuacagcgugcuguacaacagcgccagcuucagcaccuucaagugcuacggcgugagccccaccaagcugaacgaccugugcuucaccaacguguacgccgacagcuucgugauccguggcgacgaggugcggcagaucgcacccggccagacaggcaagaucgccgacuacaacuacaagcugcccgacgacuucaccggcugcgugaucgccuggaacagcaacaaccucgacagcaaggugggcggcaacuacaacuaccuguaccggcuguuccggaagagcaaccugaagcccuucgagcgggacaucagcaccgagaucuaccaagccggcaacaccccuugcaacggcguggagggcuucaacugcuacuucccucugcagagcuacggcuuccagcccaccaacggcgugggcuaccagcccuaccgggugguggugcugagcuucgagcugcugcacgccccagccaccguguguggccccaagaagagcaccaaccuggugaagaacaagugcgugaacuucaacuucaacggccuuaccggcaccggcgugcugaccgagagcaacaagaaauuccugcccuuucagcaguucggccgggacaucgccgacaccaccgacgcugugcgggauccccagacccuggagauccuggacaucaccccuugcagcuucggcggcgugagcgugaucaccccaggcaccaacaccagcaaccagguggccgugcuguaccagggcgugaacugcaccgaggugcccguggccauccacgccgaccagcugacacccaccuggcgggucuacagcaccggcagcaacguguuccagacccgggccgguugccugaucggcgccgagcacgugaacaacagcuacgagugcgacauccccaucggcgccggcaucugugccagcuaccagacccagaccaauucaccccggagggcaaggagcguggccagccagagcaucaucgccuacaccaugagccugggcgccgagaacagcguggccuacagcaacaacagcaucgccauccccaccaacuucaccaucagcgugaccaccgagauucugcccgugagcaugaccaagaccagcguggacugcaccauguacaucugcggcgacagcaccgagugcagcaaccugcugcugcaguacggcagcuucugcacccagcugaaccgggcccugaccggcaucgccguggagcaggacaagaacacccaggagguguucgcccaggugaagcagaucuacaagaccccucccaucaaggacuucggcggcuucaacuucagccagauccugcccgaccccagcaagcccagcaagcggagcuucaucgaggaccugcuguucaacaaggugacccuagccgacgccggcuucaucaagcaguacggcgacugccucggcgacauagccgcccgggaccugaucugcgcccagaaguucaacggccugaccgugcugccuccccugcugaccgacgagaugaucgcccaguacaccagcgcccuguuagccggaaccaucaccagcggcuggacuuucggcgcuggagccgcucugcagauccccuucgccaugcagauggccuaccgguucaacggcaucggcgugacccagaacgugcuguacgagaaccagaagcugaucgccaaccaguucaacagcgccaucggcaagauccaggacagccugagcagcaccgcuagcgcccugggcaagcugcaggacguggugaaccagaacgcccaggcccugaacacccuggugaagcagcugagcagcaacuucggcgccaucagcagcgugcugaacgacauccugagccggcuggacccucccgaggccgaggugcagaucgaccggcugaucacuggccggcugcagagccugcagaccuacgugacccagcagcugauccgggccgccgagauucgggccagcgccaaccuggccgccaccaagaugagcgagugcgugcugggccagagcaagcggguggacuucugcggcaagggcuaccaccugaugagcuuuccccagagcgcaccccacggagugguguuccugcacgugaccuacgugcccgcccaggagaagaacuucaccaccgccccagccaucugccacgacggcaaggcccacuuuccccgggagggcguguucgugagcaacggcacccacugguucgugacccagcggaacuucuacgagccccagaucaucaccaccgacaacaccuucgugagcggcaacugcgacguggugaucggcaucgugaacaacaccguguacgauccccugcagcccgagcuggacagcuucaaggaggagcuggacaaguacuucaagaaucacaccagccccgacguggaccugggcgacaucagcggcaucaacgccagcguggugaacauccagaaggagaucgaucggcugaacgagguggccaagaaccugaacgagagccugaucgaccugcaggagcugggcaaguacgagcaguacaucaaguggcccugguacaucuggcugggcuucaucgccggccugaucgccaucgugauggugaccaucaugcugugcugcaugaccagcugcugcagcugccugaagggcuguugcagcugcggcagcugcugcaaguucgacgaggacgacagcgagcccgugcugaagggcgugaagcugcacuacaccugaggacuaguuauaagacugacuagcccgaugggccucccaacgggcccuccuccccuccuugcaccgagagaucucaaaggcucuuuucagagccaccaaaaaaaaaaaaaaaaaaaaaaaaaaaaaaaaaaaaaaaaaaaaaaaaaaaaaaaaaaaaaaaaaaaaaaaaaaaaaaaaaaaaaaaaaaaaaaaaaaaaa

SEQ ID NO: 24658 - RNA, 4035 nt, Artificial Sequence
  SARS-CoV-2/Wuhan/WIV05/2019__EPI_ISL_402128 spike protein mRNA gc (1-1273)(K986P_V987P_N501Y_D614G)
aggagaaagcuuaccauguucguguuccuggugcugcugccccuggugagcagccagugcgugaaccugaccacccggacccagcugccaccagccuacaccaacagcuucacccggggcgucuacuaccccgacaagguguuccggagcagcguccugcacagcacccaggaccuguuccugcccuucuucagcaacgugaccugguuccacgccauccacgugagcggcaccaacggcaccaagcgguucgacaaccccgugcugcccuucaacgacggcguguacuucgccagcaccgagaagagcaacaucauccggggcuggaucuucggcaccacccuggacagcaagacccagagccugcugaucgugaauaacgccaccaacguggugaucaaggugugcgaguuccaguucugcaacgaccccuuccugggcguguacuaccacaagaacaacaagagcuggauggagagcgaguuccggguguacagcagcgccaacaacugcaccuucgaguacgugagccagcccuuccugauggaccuggagggcaagcagggcaacuucaagaaccugcgggaguucguguucaagaacaucgacggcuacuucaagaucuacagcaagcacaccccaaucaaccuggugcgggaucugccccagggcuucucagcccuggagccccugguggaccugcccaucggcaucaacaucacccgguuccagacccugcuggcccugcaccggagcuaccugaccccaggcgacagcagcagcggguggacagcaggcgcggcugcuuacuacgugggcuaccugcagccccggaccuuccugcugaaguacaacgagaacggcaccaucaccgacgccguggacugcgcccuggacccucugagcgagaccaagugcacccugaagagcuucaccguggagaagggcaucuaccagaccagcaacuuccgggugcagcccaccgagagcaucgugcgguuccccaacaucaccaaccugugccccuucggcgagguguucaacgccacccgguucgccagcguguacgccuggaaccggaagcggaucagcaacugcguggccgacuacagcgugcuguacaacagcgccagcuucagcaccuucaagugcuacggcgugagccccaccaagcugaacgaccugugcuucaccaacguguacgccgacagcuucgugauccguggcgacgaggugcggcagaucgcacccggccagacaggcaagaucgccgacuacaacuacaagcugcccgacgacuucaccggcugcgugaucgccuggaacagcaacaaccucgacagcaaggugggcggcaacuacaacuaccuguaccggcuguuccggaagagcaaccugaagcccuucgagcgggacaucagcaccgagaucuaccaagccggcuccaccccuugcaacggcguggagggcuucaacugcuacuucccucugcagagcuacggcuuccagcccaccuacggcgugggcuaccagcccuaccgggugguggugcugagcuucgagcugcugcacgccccagccaccguguguggccccaagaagagcaccaaccuggugaagaacaagugcgugaacuucaacuucaacggccuuaccggcaccggcgugcugaccgagagcaacaagaaauuccugcccuuucagcaguucggccgggacaucgccgacaccaccgacgcugugcgggauccccagacccuggagauccuggacaucaccccuugcagcuucggcggcgugagcgugaucaccccaggcaccaacaccagcaaccagguggccgugcuguaccagggcgugaacugcaccgaggugcccguggccauccacgccgaccagcugacacccaccuggcgggucuacagcaccggcagcaacguguuccagacccgggccgguugccugaucggcgccgagcacgugaacaacagcuacgagugcgacauccccaucggcgccggcaucugugccagcuaccagacccagaccaauucaccccggagggcaaggagcguggccagccagagcaucaucgccuacaccaugagccugggcgccgagaacagcguggccuacagcaacaacagcaucgccauccccaccaacuucaccaucagcgugaccaccgagauucugcccgugagcaugaccaagaccagcguggacugcaccauguacaucugcggcgacagcaccgagugcagcaaccugcugcugcaguacggcagcuucugcacccagcugaaccgggcccugaccggcaucgccguggagcaggacaagaacacccaggagguguucgcccaggugaagcagaucuacaagaccccucccaucaaggacuucggcggcuucaacuucagccagauccugcccgaccccagcaagcccagcaagcggagcuucaucgaggaccugcuguucaacaaggugacccuagccgacgccggcuucaucaagcaguacggcgacugccucggcgacauagccgcccgggaccugaucugcgcccagaaguucaacggccugaccgugcugccuccccugcugaccgacgagaugaucgcccaguacaccagcgcccuguuagccggaaccaucaccagcggcuggacuuucggcgcuggagccgcucugcagauccccuucgccaugcagauggccuaccgguucaacggcaucggcgugacccagaacgugcuguacgagaaccagaagcugaucgccaaccaguucaacagcgccaucggcaagauccaggacagccugagcagcaccgcuagcgcccugggcaagcugcaggacguggugaaccagaacgcccaggcccugaacacccuggugaagcagcugagcagcaacuucggcgccaucagcagcgugcugaacgacauccugagccggcuggacccucccgaggccgaggugcagaucgaccggcugaucacuggccggcugcagagccugcagaccuacgugacccagcagcugauccgggccgccgagauucgggccagcgccaaccuggccgccaccaagaugagcgagugcgugcugggccagagcaagcggguggacuucugcggcaagggcuaccaccugaugagcuuuccccagagcgcaccccacggagugguguuccugcacgugaccuacgugcccgcccaggagaagaacuucaccaccgccccagccaucugccacgacggcaaggcccacuuuccccgggagggcguguucgugagcaacggcacccacugguucgugacccagcggaacuucuacgagccccagaucaucaccaccgacaacaccuucgugagcggcaacugcgacguggugaucggcaucgugaacaacaccguguacgauccccugcagcccgagcuggacagcuucaaggaggagcuggacaaguacuucaagaaucacaccagccccgacguggaccugggcgacaucagcggcaucaacgccagcguggugaacauccagaaggagaucgaucggcugaacgagguggccaagaaccugaacgagagccugaucgaccugcaggagcugggcaaguacgagcaguacaucaaguggcccugguacaucuggcugggcuucaucgccggccugaucgccaucgugauggugaccaucaugcugugcugcaugaccagcugcugcagcugccugaagggcuguugcagcugcggcagcugcugcaaguucgacgaggacgacagcgagcccgugcugaagggcgugaagcugcacuacaccugaggacuaguuauaagacugacuagcccgaugggccucccaacgggcccuccuccccuccuugcaccgagagaucucaaaggcucuuuucagagccaccaaaaaaaaaaaaaaaaaaaaaaaaaaaaaaaaaaaaaaaaaaaaaaaaaaaaaaaaaaaaaaaaaaaaaaaaaaaaaaaaaaaaaaaaaaaaaaaaaaaaa

SEQ ID NO: 24659 - RNA, 4029 nt, Artificial Sequence
  SARS-CoV-2/Wuhan/WIV05/2019__EPI_ISL_402128 spike protein mRNA gc (1-1273)(K986P_V987P_H69del_V70del_D614G)
aggagaaagcuuaccauguucguguuccuggugcugcugccccuggugagcagccagugcgugaaccugaccacccggacccagcugccaccagccuacaccaacagcuucacccggggcgucuacuaccccgacaagguguuccggagcagcguccugcacagcacccaggaccuguuccugcccuucuucagcaacgugaccugguuccacgccaucagcggcaccaacggcaccaagcgguucgacaaccccgugcugcccuucaacgacggcguguacuucgccagcaccgagaagagcaacaucauccggggcuggaucuucggcaccacccuggacagcaagacccagagccugcugaucgugaauaacgccaccaacguggugaucaaggugugcgaguuccaguucugcaacgaccccuuccugggcguguacuaccacaagaacaacaagagcuggauggagagcgaguuccggguguacagcagcgccaacaacugcaccuucgaguacgugagccagcccuuccugauggaccuggagggcaagcagggcaacuucaagaaccugcgggaguucguguucaagaacaucgacggcuacuucaagaucuacagcaagcacaccccaaucaaccuggugcgggaucugccccagggcuucucagcccuggagccccugguggaccugcccaucggcaucaacaucacccgguuccagacccugcuggcccugcaccggagcuaccugaccccaggcgacagcagcagcggguggacagcaggcgcggcugcuuacuacgugggcuaccugcagccccggaccuuccugcugaaguacaacgagaacggcaccaucaccgacgccguggacugcgcccuggacccucugagcgagaccaagugcacccugaagagcuucaccguggagaagggcaucuaccagaccagcaacuuccgggugcagcccaccgagagcaucgugcgguuccccaacaucaccaaccugugccccuucggcgagguguucaacgccacccgguucgccagcguguacgccuggaaccggaagcggaucagcaacugcguggccgacuacagcgugcuguacaacagcgccagcuucagcaccuucaagugcuacggcgugagccccaccaagcugaacgaccugugcuucaccaacguguacgccgacagcuucgugauccguggcgacgaggugcggcagaucgcacccggccagacaggcaagaucgccgacuacaacuacaagcugcccgacgacuucaccggcugcgugaucgccuggaacagcaacaaccucgacagcaaggugggcggcaacuacaacuaccuguaccggcuguuccggaagagcaaccugaagcccuucgagcgggacaucagcaccgagaucuaccaagccggcuccaccccuugcaacggcguggagggcuucaacugcuacuucccucugcagagcuacggcuuccagcccaccaacggcgugggcuaccagcccuaccgggugguggugcugagcuucgagcugcugcacgccccagccaccguguguggccccaagaagagcaccaaccuggugaagaacaagugcgugaacuucaacuucaacggccuuaccggcaccggcgugcugaccgagagcaacaagaaauuccugcccuuucagcaguucggccgggacaucgccgacaccaccgacgcugugcgggauccccagacccuggagauccuggacaucaccccuugcagcuucggcggcgugagcgugaucaccccaggcaccaacaccagcaaccagguggccgugcuguaccagggcgugaacugcaccgaggugcccguggccauccacgccgaccagcugacacccaccuggcgggucuacagcaccggcagcaacguguuccagacccgggccgguugccugaucggcgccgagcacgugaacaacagcuacgagugcgacauccccaucggcgccggcaucugugccagcuaccagacccagaccaauucaccccggagggcaaggagcguggccagccagagcaucaucgccuacaccaugagccugggcgccgagaacagcguggccuacagcaacaacagcaucgccauccccaccaacuucaccaucagcgugaccaccgagauucugcccgugagcaugaccaagaccagcguggacugcaccauguacaucugcggcgacagcaccgagugcagcaaccugcugcugcaguacggcagcuucugcacccagcugaaccgggcccugaccggcaucgccguggagcaggacaagaacacccaggagguguucgcccaggugaagcagaucuacaagaccccucccaucaaggacuucggcggcuucaacuucagccagauccugcccgaccccagcaagcccagcaagcggagcuucaucgaggaccugcuguucaacaaggugacccuagccgacgccggcuucaucaagcaguacggcgacugccucggcgacauagccgcccgggaccugaucugcgcccagaaguucaacggccugaccgugcugccuccccugcugaccgacgagaugaucgcccaguacaccagcgcccuguuagccggaaccaucaccagcggcuggacuuucggcgcuggagccgcucugcagauccccuucgccaugcagauggccuaccgguucaacggcaucggcgugacccagaacgugcuguacgagaaccagaagcugaucgccaaccaguucaacagcgccaucggcaagauccaggacagccugagcagcaccgcuagcgcccugggcaagcugcaggacguggugaaccagaacgcccaggcccugaacacccuggugaagcagcugagcagcaacuucggcgccaucagcagcgugcugaacgacauccugagccggcuggacccucccgaggccgaggugcagaucgaccggcugaucacuggccggcugcagagccugcagaccuacgugacccagcagcugauccgggccgccgagauucgggccagcgccaaccuggccgccaccaagaugagcgagugcgugcugggccagagcaagcggguggacuucugcggcaagggcuaccaccugaugagcuuuccccagagcgcaccccacggagugguguuccugcacgugaccuacgugcccgcccaggagaagaacuucaccaccgccccagccaucugccacgacggcaaggcccacuuuccccgggagggcguguucgugagcaacggcacccacugguucgugacccagcggaacuucuacgagccccagaucaucaccaccgacaacaccuucgugagcggcaacugcgacguggugaucggcaucgugaacaacaccguguacgauccccugcagcccgagcuggacagcuucaaggaggagcuggacaaguacuucaagaaucacaccagccccgacguggaccugggcgacaucagcggcaucaacgccagcguggugaacauccagaaggagaucgaucggcugaacgagguggccaagaaccugaacgagagccugaucgaccugcaggagcugggcaaguacgagcaguacaucaaguggcccugguacaucuggcugggcuucaucgccggccugaucgccaucgugauggugaccaucaugcugugcugcaugaccagcugcugcagcugccugaagggcuguugcagcugcggcagcugcugcaaguucgacgaggacgacagcgagcccgugcugaagggcgugaagcugcacuacaccugaggacuaguuauaagacugacuagcccgaugggccucccaacgggcccuccuccccuccuugcaccgagagaucucaaaggcucuuuucagagccaccaaaaaaaaaaaaaaaaaaaaaaaaaaaaaaaaaaaaaaaaaaaaaaaaaaaaaaaaaaaaaaaaaaaaaaaaaaaaaaaaaaaaaaaaaaaaaaaaaaaaa

SEQ ID NO: 24660 - RNA, 4035 nt, Artificial Sequence
  SARS-CoV-2/Wuhan/WIV05/2019__EPI_ISL_402128 spike protein mRNA gc (1-1273)(K986P_V987P_Y453F_D614G)
aggagaaagcuuaccauguucguguuccuggugcugcugccccuggugagcagccagugcgugaaccugaccacccggacccagcugccaccagccuacaccaacagcuucacccggggcgucuacuaccccgacaagguguuccggagcagcguccugcacagcacccaggaccuguuccugcccuucuucagcaacgugaccugguuccacgccauccacgugagcggcaccaacggcaccaagcgguucgacaaccccgugcugcccuucaacgacggcguguacuucgccagcaccgagaagagcaacaucauccggggcuggaucuucggcaccacccuggacagcaagacccagagccugcugaucgugaauaacgccaccaacguggugaucaaggugugcgaguuccaguucugcaacgaccccuuccugggcguguacuaccacaagaacaacaagagcuggauggagagcgaguuccggguguacagcagcgccaacaacugcaccuucgaguacgugagccagcccuuccugauggaccuggagggcaagcagggcaacuucaagaaccugcgggaguucguguucaagaacaucgacggcuacuucaagaucuacagcaagcacaccccaaucaaccuggugcgggaucugccccagggcuucucagcccuggagccccugguggaccugcccaucggcaucaacaucacccgguuccagacccugcuggcccugcaccggagcuaccugaccccaggcgacagcagcagcggguggacagcaggcgcggcugcuuacuacgugggcuaccugcagccccggaccuuccugcugaaguacaacgagaacggcaccaucaccgacgccguggacugcgcccuggacccucugagcgagaccaagugcacccugaagagcuucaccguggagaagggcaucuaccagaccagcaacuuccgggugcagcccaccgagagcaucgugcgguuccccaacaucaccaaccugugccccuucggcgagguguucaacgccacccgguucgccagcguguacgccuggaaccggaagcggaucagcaacugcguggccgacuacagcgugcuguacaacagcgccagcuucagcaccuucaagugcuacggcgugagccccaccaagcugaacgaccugugcuucaccaacguguacgccgacagcuucgugauccguggcgacgaggugcggcagaucgcacccggccagacaggcaagaucgccgacuacaacuacaagcugcccgacgacuucaccggcugcgugaucgccuggaacagcaacaaccucgacagcaaggugggcggcaacuacaacuaccuguuccggcuguuccggaagagcaaccugaagcccuucgagcgggacaucagcaccgagaucuaccaagccggcuccaccccuugcaacggcguggagggcuucaacugcuacuucccucugcagagcuacggcuuccagcccaccaacggcgugggcuaccagcccuaccgggugguggugcugagcuucgagcugcugcacgccccagccaccguguguggccccaagaagagcaccaaccuggugaagaacaagugcgugaacuucaacuucaacggccuuaccggcaccggcgugcugaccgagagcaacaagaaauuccugcccuuucagcaguucggccgggacaucgccgacaccaccgacgcugugcgggauccccagacccuggagauccuggacaucaccccuugcagcuucggcggcgugagcgugaucaccccaggcaccaacaccagcaaccagguggccgugcuguaccagggcgugaacugcaccgaggugcccguggccauccacgccgaccagcugacacccaccuggcgggucuacagcaccggcagcaacguguuccagacccgggccgguugccugaucggcgccgagcacgugaacaacagcuacgagugcgacauccccaucggcgccggcaucugugccagcuaccagacccagaccaauucaccccggagggcaaggagcguggccagccagagcaucaucgccuacaccaugagccugggcgccgagaacagcguggccuacagcaacaacagcaucgccauccccaccaacuucaccaucagcgugaccaccgagauucugcccgugagcaugaccaagaccagcguggacugcaccauguacaucugcggcgacagcaccgagugcagcaaccugcugcugcaguacggcagcuucugcacccagcugaaccgggcccugaccggcaucgccguggagcaggacaagaacacccaggagguguucgcccaggugaagcagaucuacaagaccccucccaucaaggacuucggcggcuucaacuucagccagauccugcccgaccccagcaagcccagcaagcggagcuucaucgaggaccugcuguucaacaaggugacccuagccgacgccggcuucaucaagcaguacggcgacugccucggcgacauagccgcccgggaccugaucugcgcccagaaguucaacggccugaccgugcugccuccccugcugaccgacgagaugaucgcccaguacaccagcgcccuguuagccggaaccaucaccagcggcuggacuuucggcgcuggagccgcucugcagauccccuucgccaugcagauggccuaccgguucaacggcaucggcgugacccagaacgugcuguacgagaaccagaagcugaucgccaaccaguucaacagcgccaucggcaagauccaggacagccugagcagcaccgcuagcgcccugggcaagcugcaggacguggugaaccagaacgcccaggcccugaacacccuggugaagcagcugagcagcaacuucggcgccaucagcagcgugcugaacgacauccugagccggcuggacccucccgaggccgaggugcagaucgaccggcugaucacuggccggcugcagagccugcagaccuacgugacccagcagcugauccgggccgccgagauucgggccagcgccaaccuggccgccaccaagaugagcgagugcgugcugggccagagcaagcggguggacuucugcggcaagggcuaccaccugaugagcuuuccccagagcgcaccccacggagugguguuccugcacgugaccuacgugcccgcccaggagaagaacuucaccaccgccccagccaucugccacgacggcaaggcccacuuuccccgggagggcguguucgugagcaacggcacccacugguucgugacccagcggaacuucuacgagccccagaucaucaccaccgacaacaccuucgugagcggcaacugcgacguggugaucggcaucgugaacaacaccguguacgauccccugcagcccgagcuggacagcuucaaggaggagcuggacaaguacuucaagaaucacaccagccccgacguggaccugggcgacaucagcggcaucaacgccagcguggugaacauccagaaggagaucgaucggcugaacgagguggccaagaaccugaacgagagccugaucgaccugcaggagcugggcaaguacgagcaguacaucaaguggcccugguacaucuggcugggcuucaucgccggccugaucgccaucgugauggugaccaucaugcugugcugcaugaccagcugcugcagcugccugaagggcuguugcagcugcggcagcugcugcaaguucgacgaggacgacagcgagcccgugcugaagggcgugaagcugcacuacaccugaggacuaguuauaagacugacuagcccgaugggccucccaacgggcccuccuccccuccuugcaccgagagaucucaaaggcucuuuucagagccaccaaaaaaaaaaaaaaaaaaaaaaaaaaaaaaaaaaaaaaaaaaaaaaaaaaaaaaaaaaaaaaaaaaaaaaaaaaaaaaaaaaaaaaaaaaaaaaaaaaaaa

SEQ ID NO: 24661 - RNA, 4035 nt, Artificial Sequence
  SARS-CoV-2/Wuhan/WIV05/2019__EPI_ISL_402128 spike protein mRNA gc (1-1273)(K986P_V987P_D614G_I692V)
aggagaaagcuuaccauguucguguuccuggugcugcugccccuggugagcagccagugcgugaaccugaccacccggacccagcugccaccagccuacaccaacagcuucacccggggcgucuacuaccccgacaagguguuccggagcagcguccugcacagcacccaggaccuguuccugcccuucuucagcaacgugaccugguuccacgccauccacgugagcggcaccaacggcaccaagcgguucgacaaccccgugcugcccuucaacgacggcguguacuucgccagcaccgagaagagcaacaucauccggggcuggaucuucggcaccacccuggacagcaagacccagagccugcugaucgugaauaacgccaccaacguggugaucaaggugugcgaguuccaguucugcaacgaccccuuccugggcguguacuaccacaagaacaacaagagcuggauggagagcgaguuccggguguacagcagcgccaacaacugcaccuucgaguacgugagccagcccuuccugauggaccuggagggcaagcagggcaacuucaagaaccugcgggaguucguguucaagaacaucgacggcuacuucaagaucuacagcaagcacaccccaaucaaccuggugcgggaucugccccagggcuucucagcccuggagccccugguggaccugcccaucggcaucaacaucacccgguuccagacccugcuggcccugcaccggagcuaccugaccccaggcgacagcagcagcggguggacagcaggcgcggcugcuuacuacgugggcuaccugcagccccggaccuuccugcugaaguacaacgagaacggcaccaucaccgacgccguggacugcgcccuggacccucugagcgagaccaagugcacccugaagagcuucaccguggagaagggcaucuaccagaccagcaacuuccgggugcagcccaccgagagcaucgugcgguuccccaacaucaccaaccugugccccuucggcgagguguucaacgccacccgguucgccagcguguacgccuggaaccggaagcggaucagcaacugcguggccgacuacagcgugcuguacaacagcgccagcuucagcaccuucaagugcuacggcgugagccccaccaagcugaacgaccugugcuucaccaacguguacgccgacagcuucgugauccguggcgacgaggugcggcagaucgcacccggccagacaggcaagaucgccgacuacaacuacaagcugcccgacgacuucaccggcugcgugaucgccuggaacagcaacaaccucgacagcaaggugggcggcaacuacaacuaccuguaccggcuguuccggaagagcaaccugaagcccuucgagcgggacaucagcaccgagaucuaccaagccggcuccaccccuugcaacggcguggagggcuucaacugcuacuucccucugcagagcuacggcuuccagcccaccaacggcgugggcuaccagcccuaccgggugguggugcugagcuucgagcugcugcacgccccagccaccguguguggccccaagaagagcaccaaccuggugaagaacaagugcgugaacuucaacuucaacggccuuaccggcaccggcgugcugaccgagagcaacaagaaauuccugcccuuucagcaguucggccgggacaucgccgacaccaccgacgcugugcgggauccccagacccuggagauccuggacaucaccccuugcagcuucggcggcgugagcgugaucaccccaggcaccaacaccagcaaccagguggccgugcuguaccagggcgugaacugcaccgaggugcccguggccauccacgccgaccagcugacacccaccuggcgggucuacagcaccggcagcaacguguuccagacccgggccgguugccugaucggcgccgagcacgugaacaacagcuacgagugcgacauccccaucggcgccggcaucugugccagcuaccagacccagaccaauucaccccggagggcaaggagcguggccagccagagcgugaucgccuacaccaugagccugggcgccgagaacagcguggccuacagcaacaacagcaucgccauccccaccaacuucaccaucagcgugaccaccgagauucugcccgugagcaugaccaagaccagcguggacugcaccauguacaucugcggcgacagcaccgagugcagcaaccugcugcugcaguacggcagcuucugcacccagcugaaccgggcccugaccggcaucgccguggagcaggacaagaacacccaggagguguucgcccaggugaagcagaucuacaagaccccucccaucaaggacuucggcggcuucaacuucagccagauccugcccgaccccagcaagcccagcaagcggagcuucaucgaggaccugcuguucaacaaggugacccuagccgacgccggcuucaucaagcaguacggcgacugccucggcgacauagccgcccgggaccugaucugcgcccagaaguucaacggccugaccgugcugccuccccugcugaccgacgagaugaucgcccaguacaccagcgcccuguuagccggaaccaucaccagcggcuggacuuucggcgcuggagccgcucugcagauccccuucgccaugcagauggccuaccgguucaacggcaucggcgugacccagaacgugcuguacgagaaccagaagcugaucgccaaccaguucaacagcgccaucggcaagauccaggacagccugagcagcaccgcuagcgcccugggcaagcugcaggacguggugaaccagaacgcccaggcccugaacacccuggugaagcagcugagcagcaacuucggcgccaucagcagcgugcugaacgacauccugagccggcuggacccucccgaggccgaggugcagaucgaccggcugaucacuggccggcugcagagccugcagaccuacgugacccagcagcugauccgggccgccgagauucgggccagcgccaaccuggccgccaccaagaugagcgagugcgugcugggccagagcaagcggguggacuucugcggcaagggcuaccaccugaugagcuuuccccagagcgcaccccacggagugguguuccugcacgugaccuacgugcccgcccaggagaagaacuucaccaccgccccagccaucugccacgacggcaaggcccacuuuccccgggagggcguguucgugagcaacggcacccacugguucgugacccagcggaacuucuacgagccccagaucaucaccaccgacaacaccuucgugagcggcaacugcgacguggugaucggcaucgugaacaacaccguguacgauccccugcagcccgagcuggacagcuucaaggaggagcuggacaaguacuucaagaaucacaccagccccgacguggaccugggcgacaucagcggcaucaacgccagcguggugaacauccagaaggagaucgaucggcugaacgagguggccaagaaccugaacgagagccugaucgaccugcaggagcugggcaaguacgagcaguacaucaaguggcccugguacaucuggcugggcuucaucgccggccugaucgccaucgugauggugaccaucaugcugugcugcaugaccagcugcugcagcugccugaagggcuguugcagcugcggcagcugcugcaaguucgacgaggacgacagcgagcccgugcugaagggcgugaagcugcacuacaccugaggacuaguuauaagacugacuagcccgaugggccucccaacgggcccuccuccccuccuugcaccgagagaucucaaaggcucuuuucagagccaccaaaaaaaaaaaaaaaaaaaaaaaaaaaaaaaaaaaaaaaaaaaaaaaaaaaaaaaaaaaaaaaaaaaaaaaaaaaaaaaaaaaaaaaaaaaaaaaaaaaaa

SEQ ID NO: 24662 - RNA, 4035 nt, Artificial Sequence
  SARS-CoV-2/Wuhan/WIV05/2019__EPI_ISL_402128 spike protein mRNA gc (1-1273)(K986P_V987P_D614G_M1229I)
aggagaaagcuuaccauguucguguuccuggugcugcugccccuggugagcagccagugcgugaaccugaccacccggacccagcugccaccagccuacaccaacagcuucacccggggcgucuacuaccccgacaagguguuccggagcagcguccugcacagcacccaggaccuguuccugcccuucuucagcaacgugaccugguuccacgccauccacgugagcggcaccaacggcaccaagcgguucgacaaccccgugcugcccuucaacgacggcguguacuucgccagcaccgagaagagcaacaucauccggggcuggaucuucggcaccacccuggacagcaagacccagagccugcugaucgugaauaacgccaccaacguggugaucaaggugugcgaguuccaguucugcaacgaccccuuccugggcguguacuaccacaagaacaacaagagcuggauggagagcgaguuccggguguacagcagcgccaacaacugcaccuucgaguacgugagccagcccuuccugauggaccuggagggcaagcagggcaacuucaagaaccugcgggaguucguguucaagaacaucgacggcuacuucaagaucuacagcaagcacaccccaaucaaccuggugcgggaucugccccagggcuucucagcccuggagccccugguggaccugcccaucggcaucaacaucacccgguuccagacccugcuggcccugcaccggagcuaccugaccccaggcgacagcagcagcggguggacagcaggcgcggcugcuuacuacgugggcuaccugcagccccggaccuuccugcugaaguacaacgagaacggcaccaucaccgacgccguggacugcgcccuggacccucugagcgagaccaagugcacccugaagagcuucaccguggagaagggcaucuaccagaccagcaacuuccgggugcagcccaccgagagcaucgugcgguuccccaacaucaccaaccugugccccuucggcgagguguucaacgccacccgguucgccagcguguacgccuggaaccggaagcggaucagcaacugcguggccgacuacagcgugcuguacaacagcgccagcuucagcaccuucaagugcuacggcgugagccccaccaagcugaacgaccugugcuucaccaacguguacgccgacagcuucgugauccguggcgacgaggugcggcagaucgcacccggccagacaggcaagaucgccgacuacaacuacaagcugcccgacgacuucaccggcugcgugaucgccuggaacagcaacaaccucgacagcaaggugggcggcaacuacaacuaccuguaccggcuguuccggaagagcaaccugaagcccuucgagcgggacaucagcaccgagaucuaccaagccggcuccaccccuugcaacggcguggagggcuucaacugcuacuucccucugcagagcuacggcuuccagcccaccaacggcgugggcuaccagcccuaccgggugguggugcugagcuucgagcugcugcacgccccagccaccguguguggccccaagaagagcaccaaccuggugaagaacaagugcgugaacuucaacuucaacggccuuaccggcaccggcgugcugaccgagagcaacaagaaauuccugcccuuucagcaguucggccgggacaucgccgacaccaccgacgcugugcgggauccccagacccuggagauccuggacaucaccccuugcagcuucggcggcgugagcgugaucaccccaggcaccaacaccagcaaccagguggccgugcuguaccagggcgugaacugcaccgaggugcccguggccauccacgccgaccagcugacacccaccuggcgggucuacagcaccggcagcaacguguuccagacccgggccgguugccugaucggcgccgagcacgugaacaacagcuacgagugcgacauccccaucggcgccggcaucugugccagcuaccagacccagaccaauucaccccggagggcaaggagcguggccagccagagcaucaucgccuacaccaugagccugggcgccgagaacagcguggccuacagcaacaacagcaucgccauccccaccaacuucaccaucagcgugaccaccgagauucugcccgugagcaugaccaagaccagcguggacugcaccauguacaucugcggcgacagcaccgagugcagcaaccugcugcugcaguacggcagcuucugcacccagcugaaccgggcccugaccggcaucgccguggagcaggacaagaacacccaggagguguucgcccaggugaagcagaucuacaagaccccucccaucaaggacuucggcggcuucaacuucagccagauccugcccgaccccagcaagcccagcaagcggagcuucaucgaggaccugcuguucaacaaggugacccuagccgacgccggcuucaucaagcaguacggcgacugccucggcgacauagccgcccgggaccugaucugcgcccagaaguucaacggccugaccgugcugccuccccugcugaccgacgagaugaucgcccaguacaccagcgcccuguuagccggaaccaucaccagcggcuggacuuucggcgcuggagccgcucugcagauccccuucgccaugcagauggccuaccgguucaacggcaucggcgugacccagaacgugcuguacgagaaccagaagcugaucgccaaccaguucaacagcgccaucggcaagauccaggacagccugagcagcaccgcuagcgcccugggcaagcugcaggacguggugaaccagaacgcccaggcccugaacacccuggugaagcagcugagcagcaacuucggcgccaucagcagcgugcugaacgacauccugagccggcuggacccucccgaggccgaggugcagaucgaccggcugaucacuggccggcugcagagccugcagaccuacgugacccagcagcugauccgggccgccgagauucgggccagcgccaaccuggccgccaccaagaugagcgagugcgugcugggccagagcaagcggguggacuucugcggcaagggcuaccaccugaugagcuuuccccagagcgcaccccacggagugguguuccugcacgugaccuacgugcccgcccaggagaagaacuucaccaccgccccagccaucugccacgacggcaaggcccacuuuccccgggagggcguguucgugagcaacggcacccacugguucgugacccagcggaacuucuacgagccccagaucaucaccaccgacaacaccuucgugagcggcaacugcgacguggugaucggcaucgugaacaacaccguguacgauccccugcagcccgagcuggacagcuucaaggaggagcuggacaaguacuucaagaaucacaccagccccgacguggaccugggcgacaucagcggcaucaacgccagcguggugaacauccagaaggagaucgaucggcugaacgagguggccaagaaccugaacgagagccugaucgaccugcaggagcugggcaaguacgagcaguacaucaaguggcccugguacaucuggcugggcuucaucgccggccugaucgccaucgugaucgugaccaucaugcugugcugcaugaccagcugcugcagcugccugaagggcuguugcagcugcggcagcugcugcaaguucgacgaggacgacagcgagcccgugcugaagggcgugaagcugcacuacaccugaggacuaguuauaagacugacuagcccgaugggccucccaacgggcccuccuccccuccuugcaccgagagaucucaaaggcucuuuucagagccaccaaaaaaaaaaaaaaaaaaaaaaaaaaaaaaaaaaaaaaaaaaaaaaaaaaaaaaaaaaaaaaaaaaaaaaaaaaaaaaaaaaaaaaaaaaaaaaaaaaaaa

SEQ ID NO: 24663 - RNA, 4029 nt, Artificial Sequence
  SARS-CoV-2/Wuhan/WIV05/2019__EPI_ISL_402128 spike protein mRNA gc (1-1273)(K986P_V987P_H69del_V70del_A222V_Y453F_S477N_D614G_I692V)
aggagaaagcuuaccauguucguguuccuggugcugcugccccuggugagcagccagugcgugaaccugaccacccggacccagcugccaccagccuacaccaacagcuucacccggggcgucuacuaccccgacaagguguuccggagcagcguccugcacagcacccaggaccuguuccugcccuucuucagcaacgugaccugguuccacgccaucagcggcaccaacggcaccaagcgguucgacaaccccgugcugcccuucaacgacggcguguacuucgccagcaccgagaagagcaacaucauccggggcuggaucuucggcaccacccuggacagcaagacccagagccugcugaucgugaauaacgccaccaacguggugaucaaggugugcgaguuccaguucugcaacgaccccuuccugggcguguacuaccacaagaacaacaagagcuggauggagagcgaguuccggguguacagcagcgccaacaacugcaccuucgaguacgugagccagcccuuccugauggaccuggagggcaagcagggcaacuucaagaaccugcgggaguucguguucaagaacaucgacggcuacuucaagaucuacagcaagcacaccccaaucaaccuggugcgggaucugccccagggcuucucagugcuggagccccugguggaccugcccaucggcaucaacaucacccgguuccagacccugcuggcccugcaccggagcuaccugaccccaggcgacagcagcagcggguggacagcaggcgcggcugcuuacuacgugggcuaccugcagccccggaccuuccugcugaaguacaacgagaacggcaccaucaccgacgccguggacugcgcccuggacccucugagcgagaccaagugcacccugaagagcuucaccguggagaagggcaucuaccagaccagcaacuuccgggugcagcccaccgagagcaucgugcgguuccccaacaucaccaaccugugccccuucggcgagguguucaacgccacccgguucgccagcguguacgccuggaaccggaagcggaucagcaacugcguggccgacuacagcgugcuguacaacagcgccagcuucagcaccuucaagugcuacggcgugagccccaccaagcugaacgaccugugcuucaccaacguguacgccgacagcuucgugauccguggcgacgaggugcggcagaucgcacccggccagacaggcaagaucgccgacuacaacuacaagcugcccgacgacuucaccggcugcgugaucgccuggaacagcaacaaccucgacagcaaggugggcggcaacuacaacuaccuguuccggcuguuccggaagagcaaccugaagcccuucgagcgggacaucagcaccgagaucuaccaagccggcaacaccccuugcaacggcguggagggcuucaacugcuacuucccucugcagagcuacggcuuccagcccaccaacggcgugggcuaccagcccuaccgggugguggugcugagcuucgagcugcugcacgccccagccaccguguguggccccaagaagagcaccaaccuggugaagaacaagugcgugaacuucaacuucaacggccuuaccggcaccggcgugcugaccgagagcaacaagaaauuccugcccuuucagcaguucggccgggacaucgccgacaccaccgacgcugugcgggauccccagacccuggagauccuggacaucaccccuugcagcuucggcggcgugagcgugaucaccccaggcaccaacaccagcaaccagguggccgugcuguaccagggcgugaacugcaccgaggugcccguggccauccacgccgaccagcugacacccaccuggcgggucuacagcaccggcagcaacguguuccagacccgggccgguugccugaucggcgccgagcacgugaacaacagcuacgagugcgacauccccaucggcgccggcaucugugccagcuaccagacccagaccaauucaccccggagggcaaggagcguggccagccagagcgugaucgccuacaccaugagccugggcgccgagaacagcguggccuacagcaacaacagcaucgccauccccaccaacuucaccaucagcgugaccaccgagauucugcccgugagcaugaccaagaccagcguggacugcaccauguacaucugcggcgacagcaccgagugcagcaaccugcugcugcaguacggcagcuucugcacccagcugaaccgggcccugaccggcaucgccguggagcaggacaagaacacccaggagguguucgcccaggugaagcagaucuacaagaccccucccaucaaggacuucggcggcuucaacuucagccagauccugcccgaccccagcaagcccagcaagcggagcuucaucgaggaccugcuguucaacaaggugacccuagccgacgccggcuucaucaagcaguacggcgacugccucggcgacauagccgcccgggaccugaucugcgcccagaaguucaacggccugaccgugcugccuccccugcugaccgacgagaugaucgcccaguacaccagcgcccuguuagccggaaccaucaccagcggcuggacuuucggcgcuggagccgcucugcagauccccuucgccaugcagauggccuaccgguucaacggcaucggcgugacccagaacgugcuguacgagaaccagaagcugaucgccaaccaguucaacagcgccaucggcaagauccaggacagccugagcagcaccgcuagcgcccugggcaagcugcaggacguggugaaccagaacgcccaggcccugaacacccuggugaagcagcugagcagcaacuucggcgccaucagcagcgugcugaacgacauccugagccggcuggacccucccgaggccgaggugcagaucgaccggcugaucacuggccggcugcagagccugcagaccuacgugacccagcagcugauccgggccgccgagauucgggccagcgccaaccuggccgccaccaagaugagcgagugcgugcugggccagagcaagcggguggacuucugcggcaagggcuaccaccugaugagcuuuccccagagcgcaccccacggagugguguuccugcacgugaccuacgugcccgcccaggagaagaacuucaccaccgccccagccaucugccacgacggcaaggcccacuuuccccgggagggcguguucgugagcaacggcacccacugguucgugacccagcggaacuucuacgagccccagaucaucaccaccgacaacaccuucgugagcggcaacugcgacguggugaucggcaucgugaacaacaccguguacgauccccugcagcccgagcuggacagcuucaaggaggagcuggacaaguacuucaagaaucacaccagccccgacguggaccugggcgacaucagcggcaucaacgccagcguggugaacauccagaaggagaucgaucggcugaacgagguggccaagaaccugaacgagagccugaucgaccugcaggagcugggcaaguacgagcaguacaucaaguggcccugguacaucuggcugggcuucaucgccggccugaucgccaucgugauggugaccaucaugcugugcugcaugaccagcugcugcagcugccugaagggcuguugcagcugcggcagcugcugcaaguucgacgaggacgacagcgagcccgugcugaagggcgugaagcugcacuacaccugaggacuaguuauaagacugacuagcccgaugggccucccaacgggcccuccuccccuccuugcaccgagagaucucaaaggcucuuuucagagccaccaaaaaaaaaaaaaaaaaaaaaaaaaaaaaaaaaaaaaaaaaaaaaaaaaaaaaaaaaaaaaaaaaaaaaaaaaaaaaaaaaaaaaaaaaaaaaaaaaaaaa

SEQ ID NO: 24664 - RNA, 4029 nt, Artificial Sequence
  SARS-CoV-2/Wuhan/WIV05/2019__EPI_ISL_402128 spike protein mRNA gc (1-1273)(K986P_V987P_H69del_V70del_Y453F_D614G_I692V_M1229I)
aggagaaagcuuaccauguucguguuccuggugcugcugccccuggugagcagccagugcgugaaccugaccacccggacccagcugccaccagccuacaccaacagcuucacccggggcgucuacuaccccgacaagguguuccggagcagcguccugcacagcacccaggaccuguuccugcccuucuucagcaacgugaccugguuccacgccaucagcggcaccaacggcaccaagcgguucgacaaccccgugcugcccuucaacgacggcguguacuucgccagcaccgagaagagcaacaucauccggggcuggaucuucggcaccacccuggacagcaagacccagagccugcugaucgugaauaacgccaccaacguggugaucaaggugugcgaguuccaguucugcaacgaccccuuccugggcguguacuaccacaagaacaacaagagcuggauggagagcgaguuccggguguacagcagcgccaacaacugcaccuucgaguacgugagccagcccuuccugauggaccuggagggcaagcagggcaacuucaagaaccugcgggaguucguguucaagaacaucgacggcuacuucaagaucuacagcaagcacaccccaaucaaccuggugcgggaucugccccagggcuucucagcccuggagccccugguggaccugcccaucggcaucaacaucacccgguuccagacccugcuggcccugcaccggagcuaccugaccccaggcgacagcagcagcggguggacagcaggcgcggcugcuuacuacgugggcuaccugcagccccggaccuuccugcugaaguacaacgagaacggcaccaucaccgacgccguggacugcgcccuggacccucugagcgagaccaagugcacccugaagagcuucaccguggagaagggcaucuaccagaccagcaacuuccgggugcagcccaccgagagcaucgugcgguuccccaacaucaccaaccugugccccuucggcgagguguucaacgccacccgguucgccagcguguacgccuggaaccggaagcggaucagcaacugcguggccgacuacagcgugcuguacaacagcgccagcuucagcaccuucaagugcuacggcgugagccccaccaagcugaacgaccugugcuucaccaacguguacgccgacagcuucgugauccguggcgacgaggugcggcagaucgcacccggccagacaggcaagaucgccgacuacaacuacaagcugcccgacgacuucaccggcugcgugaucgccuggaacagcaacaaccucgacagcaaggugggcggcaacuacaacuaccuguuccggcuguuccggaagagcaaccugaagcccuucgagcgggacaucagcaccgagaucuaccaagccggcuccaccccuugcaacggcguggagggcuucaacugcuacuucccucugcagagcuacggcuuccagcccaccaacggcgugggcuaccagcccuaccgggugguggugcugagcuucgagcugcugcacgccccagccaccguguguggccccaagaagagcaccaaccuggugaagaacaagugcgugaacuucaacuucaacggccuuaccggcaccggcgugcugaccgagagcaacaagaaauuccugcccuuucagcaguucggccgggacaucgccgacaccaccgacgcugugcgggauccccagacccuggagauccuggacaucaccccuugcagcuucggcggcgugagcgugaucaccccaggcaccaacaccagcaaccagguggccgugcuguaccagggcgugaacugcaccgaggugcccguggccauccacgccgaccagcugacacccaccuggcgggucuacagcaccggcagcaacguguuccagacccgggccgguugccugaucggcgccgagcacgugaacaacagcuacgagugcgacauccccaucggcgccggcaucugugccagcuaccagacccagaccaauucaccccggagggcaaggagcguggccagccagagcgugaucgccuacaccaugagccugggcgccgagaacagcguggccuacagcaacaacagcaucgccauccccaccaacuucaccaucagcgugaccaccgagauucugcccgugagcaugaccaagaccagcguggacugcaccauguacaucugcggcgacagcaccgagugcagcaaccugcugcugcaguacggcagcuucugcacccagcugaaccgggcccugaccggcaucgccguggagcaggacaagaacacccaggagguguucgcccaggugaagcagaucuacaagaccccucccaucaaggacuucggcggcuucaacuucagccagauccugcccgaccccagcaagcccagcaagcggagcuucaucgaggaccugcuguucaacaaggugacccuagccgacgccggcuucaucaagcaguacggcgacugccucggcgacauagccgcccgggaccugaucugcgcccagaaguucaacggccugaccgugcugccuccccugcugaccgacgagaugaucgcccaguacaccagcgcccuguuagccggaaccaucaccagcggcuggacuuucggcgcuggagccgcucugcagauccccuucgccaugcagauggccuaccgguucaacggcaucggcgugacccagaacgugcuguacgagaaccagaagcugaucgccaaccaguucaacagcgccaucggcaagauccaggacagccugagcagcaccgcuagcgcccugggcaagcugcaggacguggugaaccagaacgcccaggcccugaacacccuggugaagcagcugagcagcaacuucggcgccaucagcagcgugcugaacgacauccugagccggcuggacccucccgaggccgaggugcagaucgaccggcugaucacuggccggcugcagagccugcagaccuacgugacccagcagcugauccgggccgccgagauucgggccagcgccaaccuggccgccaccaagaugagcgagugcgugcugggccagagcaagcggguggacuucugcggcaagggcuaccaccugaugagcuuuccccagagcgcaccccacggagugguguuccugcacgugaccuacgugcccgcccaggagaagaacuucaccaccgccccagccaucugccacgacggcaaggcccacuuuccccgggagggcguguucgugagcaacggcacccacugguucgugacccagcggaacuucuacgagccccagaucaucaccaccgacaacaccuucgugagcggcaacugcgacguggugaucggcaucgugaacaacaccguguacgauccccugcagcccgagcuggacagcuucaaggaggagcuggacaaguacuucaagaaucacaccagccccgacguggaccugggcgacaucagcggcaucaacgccagcguggugaacauccagaaggagaucgaucggcugaacgagguggccaagaaccugaacgagagccugaucgaccugcaggagcugggcaaguacgagcaguacaucaaguggcccugguacaucuggcugggcuucaucgccggccugaucgccaucgugaucgugaccaucaugcugugcugcaugaccagcugcugcagcugccugaagggcuguugcagcugcggcagcugcugcaaguucgacgaggacgacagcgagcccgugcugaagggcgugaagcugcacuacaccugaggacuaguuauaagacugacuagcccgaugggccucccaacgggcccuccuccccuccuugcaccgagagaucucaaaggcucuuuucagagccaccaaaaaaaaaaaaaaaaaaaaaaaaaaaaaaaaaaaaaaaaaaaaaaaaaaaaaaaaaaaaaaaaaaaaaaaaaaaaaaaaaaaaaaaaaaaaaaaaaaaaa

SEQ ID NO: 24665 - RNA, 4026 nt, Artificial Sequence
  SARS-CoV-2/Wuhan/WIV05/2019__EPI_ISL_402128 spike protein mRNA gc (1-1273)(K986P_V987P_K986P_V987P_H69del_V70del_Y144del_N501Y_A570 D_D614G_P681H_T716I_S982A_D1118H)
aggagaaagcuuaccauguucguguuccuggugcugcugccccuggugagcagccagugcgugaaccugaccacccggacccagcugccaccagccuacaccaacagcuucacccggggcgucuacuaccccgacaagguguuccggagcagcguccugcacagcacccaggaccuguuccugcccuucuucagcaacgugaccugguuccacgccaucagcggcaccaacggcaccaagcgguucgacaaccccgugcugcccuucaacgacggcguguacuucgccagcaccgagaagagcaacaucauccggggcuggaucuucggcaccacccuggacagcaagacccagagccugcugaucgugaauaacgccaccaacguggugaucaaggugugcgaguuccaguucugcaacgaccccuuccugggcguguaccacaagaacaacaagagcuggauggagagcgaguuccggguguacagcagcgccaacaacugcaccuucgaguacgugagccagcccuuccugauggaccuggagggcaagcagggcaacuucaagaaccugcgggaguucguguucaagaacaucgacggcuacuucaagaucuacagcaagcacaccccaaucaaccuggugcgggaucugccccagggcuucucagcccuggagccccugguggaccugcccaucggcaucaacaucacccgguuccagacccugcuggcccugcaccggagcuaccugaccccaggcgacagcagcagcggguggacagcaggcgcggcugcuuacuacgugggcuaccugcagccccggaccuuccugcugaaguacaacgagaacggcaccaucaccgacgccguggacugcgcccuggacccucugagcgagaccaagugcacccugaagagcuucaccguggagaagggcaucuaccagaccagcaacuuccgggugcagcccaccgagagcaucgugcgguuccccaacaucaccaaccugugccccuucggcgagguguucaacgccacccgguucgccagcguguacgccuggaaccggaagcggaucagcaacugcguggccgacuacagcgugcuguacaacagcgccagcuucagcaccuucaagugcuacggcgugagccccaccaagcugaacgaccugugcuucaccaacguguacgccgacagcuucgugauccguggcgacgaggugcggcagaucgcacccggccagacaggcaagaucgccgacuacaacuacaagcugcccgacgacuucaccggcugcgugaucgccuggaacagcaacaaccucgacagcaaggugggcggcaacuacaacuaccuguaccggcuguuccggaagagcaaccugaagcccuucgagcgggacaucagcaccgagaucuaccaagccggcuccaccccuugcaacggcguggagggcuucaacugcuacuucccucugcagagcuacggcuuccagcccaccuacggcgugggcuaccagcccuaccgggugguggugcugagcuucgagcugcugcacgccccagccaccguguguggccccaagaagagcaccaaccuggugaagaacaagugcgugaacuucaacuucaacggccuuaccggcaccggcgugcugaccgagagcaacaagaaauuccugcccuuucagcaguucggccgggacaucgacgacaccaccgacgcugugcgggauccccagacccuggagauccuggacaucaccccuugcagcuucggcggcgugagcgugaucaccccaggcaccaacaccagcaaccagguggccgugcuguaccagggcgugaacugcaccgaggugcccguggccauccacgccgaccagcugacacccaccuggcgggucuacagcaccggcagcaacguguuccagacccgggccgguugccugaucggcgccgagcacgugaacaacagcuacgagugcgacauccccaucggcgccggcaucugugccagcuaccagacccagaccaauucacaccggagggcaaggagcguggccagccagagcaucaucgccuacaccaugagccugggcgccgagaacagcguggccuacagcaacaacagcaucgccauccccaucaacuucaccaucagcgugaccaccgagauucugcccgugagcaugaccaagaccagcguggacugcaccauguacaucugcggcgacagcaccgagugcagcaaccugcugcugcaguacggcagcuucugcacccagcugaaccgggcccugaccggcaucgccguggagcaggacaagaacacccaggagguguucgcccaggugaagcagaucuacaagaccccucccaucaaggacuucggcggcuucaacuucagccagauccugcccgaccccagcaagcccagcaagcggagcuucaucgaggaccugcuguucaacaaggugacccuagccgacgccggcuucaucaagcaguacggcgacugccucggcgacauagccgcccgggaccugaucugcgcccagaaguucaacggccugaccgugcugccuccccugcugaccgacgagaugaucgcccaguacaccagcgcccuguuagccggaaccaucaccagcggcuggacuuucggcgcuggagccgcucugcagauccccuucgccaugcagauggccuaccgguucaacggcaucggcgugacccagaacgugcuguacgagaaccagaagcugaucgccaaccaguucaacagcgccaucggcaagauccaggacagccugagcagcaccgcuagcgcccugggcaagcugcaggacguggugaaccagaacgcccaggcccugaacacccuggugaagcagcugagcagcaacuucggcgccaucagcagcgugcugaacgacauccuggcccggcuggacccucccgaggccgaggugcagaucgaccggcugaucacuggccggcugcagagccugcagaccuacgugacccagcagcugauccgggccgccgagauucgggccagcgccaaccuggccgccaccaagaugagcgagugcgugcugggccagagcaagcggguggacuucugcggcaagggcuaccaccugaugagcuuuccccagagcgcaccccacggagugguguuccugcacgugaccuacgugcccgcccaggagaagaacuucaccaccgccccagccaucugccacgacggcaaggcccacuuuccccgggagggcguguucgugagcaacggcacccacugguucgugacccagcggaacuucuacgagccccagaucaucaccacccacaacaccuucgugagcggcaacugcgacguggugaucggcaucgugaacaacaccguguacgauccccugcagcccgagcuggacagcuucaaggaggagcuggacaaguacuucaagaaucacaccagccccgacguggaccugggcgacaucagcggcaucaacgccagcguggugaacauccagaaggagaucgaucggcugaacgagguggccaagaaccugaacgagagccugaucgaccugcaggagcugggcaaguacgagcaguacaucaaguggcccugguacaucuggcugggcuucaucgccggccugaucgccaucgugauggugaccaucaugcugugcugcaugaccagcugcugcagcugccugaagggcuguugcagcugcggcagcugcugcaaguucgacgaggacgacagcgagcccgugcugaagggcgugaagcugcacuacaccugaggacuaguuauaagacugacuagcccgaugggccucccaacgggcccuccuccccuccuugcaccgagagaucucaaaggcucuuuucagagccaccaaaaaaaaaaaaaaaaaaaaaaaaaaaaaaaaaaaaaaaaaaaaaaaaaaaaaaaaaaaaaaaaaaaaaaaaaaaaaaaaaaaaaaaaaaaaaaaaaaaaa

SEQ ID NO: 24666 - RNA, 4035 nt, Artificial Sequence
  SARS-CoV-2/Wuhan/WIV05/2019__EPI_ISL_402128 spike protein mRNA gc (1-1273)(K986P_V987P_K986P_V987P_K417N_E484K_N501Y_D614G)
aggagaaagcuuaccauguucguguuccuggugcugcugccccuggugagcagccagugcgugaaccugaccacccggacccagcugccaccagccuacaccaacagcuucacccggggcgucuacuaccccgacaagguguuccggagcagcguccugcacagcacccaggaccuguuccugcccuucuucagcaacgugaccugguuccacgccauccacgugagcggcaccaacggcaccaagcgguucgacaaccccgugcugcccuucaacgacggcguguacuucgccagcaccgagaagagcaacaucauccggggcuggaucuucggcaccacccuggacagcaagacccagagccugcugaucgugaauaacgccaccaacguggugaucaaggugugcgaguuccaguucugcaacgaccccuuccugggcguguacuaccacaagaacaacaagagcuggauggagagcgaguuccggguguacagcagcgccaacaacugcaccuucgaguacgugagccagcccuuccugauggaccuggagggcaagcagggcaacuucaagaaccugcgggaguucguguucaagaacaucgacggcuacuucaagaucuacagcaagcacaccccaaucaaccuggugcgggaucugccccagggcuucucagcccuggagccccugguggaccugcccaucggcaucaacaucacccgguuccagacccugcuggcccugcaccggagcuaccugaccccaggcgacagcagcagcggguggacagcaggcgcggcugcuuacuacgugggcuaccugcagccccggaccuuccugcugaaguacaacgagaacggcaccaucaccgacgccguggacugcgcccuggacccucugagcgagaccaagugcacccugaagagcuucaccguggagaagggcaucuaccagaccagcaacuuccgggugcagcccaccgagagcaucgugcgguuccccaacaucaccaaccugugccccuucggcgagguguucaacgccacccgguucgccagcguguacgccuggaaccggaagcggaucagcaacugcguggccgacuacagcgugcuguacaacagcgccagcuucagcaccuucaagugcuacggcgugagccccaccaagcugaacgaccugugcuucaccaacguguacgccgacagcuucgugauccguggcgacgaggugcggcagaucgcacccggccagacaggcaacaucgccgacuacaacuacaagcugcccgacgacuucaccggcugcgugaucgccuggaacagcaacaaccucgacagcaaggugggcggcaacuacaacuaccuguaccggcuguuccggaagagcaaccugaagcccuucgagcgggacaucagcaccgagaucuaccaagccggcuccaccccuugcaacggcgugaagggcuucaacugcuacuucccucugcagagcuacggcuuccagcccaccuacggcgugggcuaccagcccuaccgggugguggugcugagcuucgagcugcugcacgccccagccaccguguguggccccaagaagagcaccaaccuggugaagaacaagugcgugaacuucaacuucaacggccuuaccggcaccggcgugcugaccgagagcaacaagaaauuccugcccuuucagcaguucggccgggacaucgccgacaccaccgacgcugugcgggauccccagacccuggagauccuggacaucaccccuugcagcuucggcggcgugagcgugaucaccccaggcaccaacaccagcaaccagguggccgugcuguaccagggcgugaacugcaccgaggugcccguggccauccacgccgaccagcugacacccaccuggcgggucuacagcaccggcagcaacguguuccagacccgggccgguugccugaucggcgccgagcacgugaacaacagcuacgagugcgacauccccaucggcgccggcaucugugccagcuaccagacccagaccaauucaccccggagggcaaggagcguggccagccagagcaucaucgccuacaccaugagccugggcgccgagaacagcguggccuacagcaacaacagcaucgccauccccaccaacuucaccaucagcgugaccaccgagauucugcccgugagcaugaccaagaccagcguggacugcaccauguacaucugcggcgacagcaccgagugcagcaaccugcugcugcaguacggcagcuucugcacccagcugaaccgggcccugaccggcaucgccguggagcaggacaagaacacccaggagguguucgcccaggugaagcagaucuacaagaccccucccaucaaggacuucggcggcuucaacuucagccagauccugcccgaccccagcaagcccagcaagcggagcuucaucgaggaccugcuguucaacaaggugacccuagccgacgccggcuucaucaagcaguacggcgacugccucggcgacauagccgcccgggaccugaucugcgcccagaaguucaacggccugaccgugcugccuccccugcugaccgacgagaugaucgcccaguacaccagcgcccuguuagccggaaccaucaccagcggcuggacuuucggcgcuggagccgcucugcagauccccuucgccaugcagauggccuaccgguucaacggcaucggcgugacccagaacgugcuguacgagaaccagaagcugaucgccaaccaguucaacagcgccaucggcaagauccaggacagccugagcagcaccgcuagcgcccugggcaagcugcaggacguggugaaccagaacgcccaggcccugaacacccuggugaagcagcugagcagcaacuucggcgccaucagcagcgugcugaacgacauccugagccggcuggacccucccgaggccgaggugcagaucgaccggcugaucacuggccggcugcagagccugcagaccuacgugacccagcagcugauccgggccgccgagauucgggccagcgccaaccuggccgccaccaagaugagcgagugcgugcugggccagagcaagcggguggacuucugcggcaagggcuaccaccugaugagcuuuccccagagcgcaccccacggagugguguuccugcacgugaccuacgugcccgcccaggagaagaacuucaccaccgccccagccaucugccacgacggcaaggcccacuuuccccgggagggcguguucgugagcaacggcacccacugguucgugacccagcggaacuucuacgagccccagaucaucaccaccgacaacaccuucgugagcggcaacugcgacguggugaucggcaucgugaacaacaccguguacgauccccugcagcccgagcuggacagcuucaaggaggagcuggacaaguacuucaagaaucacaccagccccgacguggaccugggcgacaucagcggcaucaacgccagcguggugaacauccagaaggagaucgaucggcugaacgagguggccaagaaccugaacgagagccugaucgaccugcaggagcugggcaaguacgagcaguacaucaaguggcccugguacaucuggcugggcuucaucgccggccugaucgccaucgugauggugaccaucaugcugugcugcaugaccagcugcugcagcugccugaagggcuguugcagcugcggcagcugcugcaaguucgacgaggacgacagcgagcccgugcugaagggcgugaagcugcacuacaccugaggacuaguuauaagacugacuagcccgaugggccucccaacgggcccuccuccccuccuugcaccgagagaucucaaaggcucuuuucagagccaccaaaaaaaaaaaaaaaaaaaaaaaaaaaaaaaaaaaaaaaaaaaaaaaaaaaaaaaaaaaaaaaaaaaaaaaaaaaaaaaaaaaaaaaaaaaaaaaaaaaaa

SEQ ID NO: 24667 - RNA, 4026 nt, Artificial Sequence
  SARS-CoV-2/Wuhan/WIV05/2019__EPI_ISL_402128 spike protein mRNA gc (1-1273)(K986P_V987P_K986P_V987P_L18F_D80A_D215G_L242del_A243del_ L244del_R246I_K417N_E484K_N501Y_D614G_A701V)
aggagaaagcuuaccauguucguguuccuggugcugcugccccuggugagcagccagugcgugaacuucaccacccggacccagcugccaccagccuacaccaacagcuucacccggggcgucuacuaccccgacaagguguuccggagcagcguccugcacagcacccaggaccuguuccugcccuucuucagcaacgugaccugguuccacgccauccacgugagcggcaccaacggcaccaagcgguucgccaaccccgugcugcccuucaacgacggcguguacuucgccagcaccgagaagagcaacaucauccggggcuggaucuucggcaccacccuggacagcaagacccagagccugcugaucgugaauaacgccaccaacguggugaucaaggugugcgaguuccaguucugcaacgaccccuuccugggcguguacuaccacaagaacaacaagagcuggauggagagcgaguuccggguguacagcagcgccaacaacugcaccuucgaguacgugagccagcccuuccugauggaccuggagggcaagcagggcaacuucaagaaccugcgggaguucguguucaagaacaucgacggcuacuucaagaucuacagcaagcacaccccaaucaaccuggugcggggccugccccagggcuucucagcccuggagccccugguggaccugcccaucggcaucaacaucacccgguuccagacccugcacaucagcuaccugaccccaggcgacagcagcagcggguggacagcaggcgcggcugcuuacuacgugggcuaccugcagccccggaccuuccugcugaaguacaacgagaacggcaccaucaccgacgccguggacugcgcccuggacccucugagcgagaccaagugcacccugaagagcuucaccguggagaagggcaucuaccagaccagcaacuuccgggugcagcccaccgagagcaucgugcgguuccccaacaucaccaaccugugccccuucggcgagguguucaacgccacccgguucgccagcguguacgccuggaaccggaagcggaucagcaacugcguggccgacuacagcgugcuguacaacagcgccagcuucagcaccuucaagugcuacggcgugagccccaccaagcugaacgaccugugcuucaccaacguguacgccgacagcuucgugauccguggcgacgaggugcggcagaucgcacccggccagacaggcaacaucgccgacuacaacuacaagcugcccgacgacuucaccggcugcgugaucgccuggaacagcaacaaccucgacagcaaggugggcggcaacuacaacuaccuguaccggcuguuccggaagagcaaccugaagcccuucgagcgggacaucagcaccgagaucuaccaagccggcuccaccccuugcaacggcgugaagggcuucaacugcuacuucccucugcagagcuacggcuuccagcccaccuacggcgugggcuaccagcccuaccgggugguggugcugagcuucgagcugcugcacgccccagccaccguguguggccccaagaagagcaccaaccuggugaagaacaagugcgugaacuucaacuucaacggccuuaccggcaccggcgugcugaccgagagcaacaagaaauuccugcccuuucagcaguucggccgggacaucgccgacaccaccgacgcugugcgggauccccagacccuggagauccuggacaucaccccuugcagcuucggcggcgugagcgugaucaccccaggcaccaacaccagcaaccagguggccgugcuguaccagggcgugaacugcaccgaggugcccguggccauccacgccgaccagcugacacccaccuggcgggucuacagcaccggcagcaacguguuccagacccgggccgguugccugaucggcgccgagcacgugaacaacagcuacgagugcgacauccccaucggcgccggcaucugugccagcuaccagacccagaccaauucaccccggagggcaaggagcguggccagccagagcaucaucgccuacaccaugagccugggcguggagaacagcguggccuacagcaacaacagcaucgccauccccaccaacuucaccaucagcgugaccaccgagauucugcccgugagcaugaccaagaccagcguggacugcaccauguacaucugcggcgacagcaccgagugcagcaaccugcugcugcaguacggcagcuucugcacccagcugaaccgggcccugaccggcaucgccguggagcaggacaagaacacccaggagguguucgcccaggugaagcagaucuacaagaccccucccaucaaggacuucggcggcuucaacuucagccagauccugcccgaccccagcaagcccagcaagcggagcuucaucgaggaccugcuguucaacaaggugacccuagccgacgccggcuucaucaagcaguacggcgacugccucggcgacauagccgcccgggaccugaucugcgcccagaaguucaacggccugaccgugcugccuccccugcugaccgacgagaugaucgcccaguacaccagcgcccuguuagccggaaccaucaccagcggcuggacuuucggcgcuggagccgcucugcagauccccuucgccaugcagauggccuaccgguucaacggcaucggcgugacccagaacgugcuguacgagaaccagaagcugaucgccaaccaguucaacagcgccaucggcaagauccaggacagccugagcagcaccgcuagcgcccugggcaagcugcaggacguggugaaccagaacgcccaggcccugaacacccuggugaagcagcugagcagcaacuucggcgccaucagcagcgugcugaacgacauccugagccggcuggacccucccgaggccgaggugcagaucgaccggcugaucacuggccggcugcagagccugcagaccuacgugacccagcagcugauccgggccgccgagauucgggccagcgccaaccuggccgccaccaagaugagcgagugcgugcugggccagagcaagcggguggacuucugcggcaagggcuaccaccugaugagcuuuccccagagcgcaccccacggagugguguuccugcacgugaccuacgugcccgcccaggagaagaacuucaccaccgccccagccaucugccacgacggcaaggcccacuuuccccgggagggcguguucgugagcaacggcacccacugguucgugacccagcggaacuucuacgagccccagaucaucaccaccgacaacaccuucgugagcggcaacugcgacguggugaucggcaucgugaacaacaccguguacgauccccugcagcccgagcuggacagcuucaaggaggagcuggacaaguacuucaagaaucacaccagccccgacguggaccugggcgacaucagcggcaucaacgccagcguggugaacauccagaaggagaucgaucggcugaacgagguggccaagaaccugaacgagagccugaucgaccugcaggagcugggcaaguacgagcaguacaucaaguggcccugguacaucuggcugggcuucaucgccggccugaucgccaucgugauggugaccaucaugcugugcugcaugaccagcugcugcagcugccugaagggcuguugcagcugcggcagcugcugcaaguucgacgaggacgacagcgagcccgugcugaagggcgugaagcugcacuacaccugaggacuaguuauaagacugacuagcccgaugggccucccaacgggcccuccuccccuccuugcaccgagagaucucaaaggcucuuuucagagccaccaaaaaaaaaaaaaaaaaaaaaaaaaaaaaaaaaaaaaaaaaaaaaaaaaaaaaaaaaaaaaaaaaaaaaaaaaaaaaaaaaaaaaaaaaaaaaaaaaaaaa

SEQ ID NO: 24668 - RNA, 4035 nt, Artificial Sequence
  SARS-CoV-2/Wuhan/WIV05/2019__EPI_ISL_402128 spike protein mRNA gc (1-1273)(K986P_V987P_K986P_V987P_E484K_D614G)
aggagaaagcuuaccauguucguguuccuggugcugcugccccuggugagcagccagugcgugaaccugaccacccggacccagcugccaccagccuacaccaacagcuucacccggggcgucuacuaccccgacaagguguuccggagcagcguccugcacagcacccaggaccuguuccugcccuucuucagcaacgugaccugguuccacgccauccacgugagcggcaccaacggcaccaagcgguucgacaaccccgugcugcccuucaacgacggcguguacuucgccagcaccgagaagagcaacaucauccggggcuggaucuucggcaccacccuggacagcaagacccagagccugcugaucgugaauaacgccaccaacguggugaucaaggugugcgaguuccaguucugcaacgaccccuuccugggcguguacuaccacaagaacaacaagagcuggauggagagcgaguuccggguguacagcagcgccaacaacugcaccuucgaguacgugagccagcccuuccugauggaccuggagggcaagcagggcaacuucaagaaccugcgggaguucguguucaagaacaucgacggcuacuucaagaucuacagcaagcacaccccaaucaaccuggugcgggaucugccccagggcuucucagcccuggagccccugguggaccugcccaucggcaucaacaucacccgguuccagacccugcuggcccugcaccggagcuaccugaccccaggcgacagcagcagcggguggacagcaggcgcggcugcuuacuacgugggcuaccugcagccccggaccuuccugcugaaguacaacgagaacggcaccaucaccgacgccguggacugcgcccuggacccucugagcgagaccaagugcacccugaagagcuucaccguggagaagggcaucuaccagaccagcaacuuccgggugcagcccaccgagagcaucgugcgguuccccaacaucaccaaccugugccccuucggcgagguguucaacgccacccgguucgccagcguguacgccuggaaccggaagcggaucagcaacugcguggccgacuacagcgugcuguacaacagcgccagcuucagcaccuucaagugcuacggcgugagccccaccaagcugaacgaccugugcuucaccaacguguacgccgacagcuucgugauccguggcgacgaggugcggcagaucgcacccggccagacaggcaagaucgccgacuacaacuacaagcugcccgacgacuucaccggcugcgugaucgccuggaacagcaacaaccucgacagcaaggugggcggcaacuacaacuaccuguaccggcuguuccggaagagcaaccugaagcccuucgagcgggacaucagcaccgagaucuaccaagccggcuccaccccuugcaacggcgugaagggcuucaacugcuacuucccucugcagagcuacggcuuccagcccaccaacggcgugggcuaccagcccuaccgggugguggugcugagcuucgagcugcugcacgccccagccaccguguguggccccaagaagagcaccaaccuggugaagaacaagugcgugaacuucaacuucaacggccuuaccggcaccggcgugcugaccgagagcaacaagaaauuccugcccuuucagcaguucggccgggacaucgccgacaccaccgacgcugugcgggauccccagacccuggagauccuggacaucaccccuugcagcuucggcggcgugagcgugaucaccccaggcaccaacaccagcaaccagguggccgugcuguaccagggcgugaacugcaccgaggugcccguggccauccacgccgaccagcugacacccaccuggcgggucuacagcaccggcagcaacguguuccagacccgggccgguugccugaucggcgccgagcacgugaacaacagcuacgagugcgacauccccaucggcgccggcaucugugccagcuaccagacccagaccaauucaccccggagggcaaggagcguggccagccagagcaucaucgccuacaccaugagccugggcgccgagaacagcguggccuacagcaacaacagcaucgccauccccaccaacuucaccaucagcgugaccaccgagauucugcccgugagcaugaccaagaccagcguggacugcaccauguacaucugcggcgacagcaccgagugcagcaaccugcugcugcaguacggcagcuucugcacccagcugaaccgggcccugaccggcaucgccguggagcaggacaagaacacccaggagguguucgcccaggugaagcagaucuacaagaccccucccaucaaggacuucggcggcuucaacuucagccagauccugcccgaccccagcaagcccagcaagcggagcuucaucgaggaccugcuguucaacaaggugacccuagccgacgccggcuucaucaagcaguacggcgacugccucggcgacauagccgcccgggaccugaucugcgcccagaaguucaacggccugaccgugcugccuccccugcugaccgacgagaugaucgcccaguacaccagcgcccuguuagccggaaccaucaccagcggcuggacuuucggcgcuggagccgcucugcagauccccuucgccaugcagauggccuaccgguucaacggcaucggcgugacccagaacgugcuguacgagaaccagaagcugaucgccaaccaguucaacagcgccaucggcaagauccaggacagccugagcagcaccgcuagcgcccugggcaagcugcaggacguggugaaccagaacgcccaggcccugaacacccuggugaagcagcugagcagcaacuucggcgccaucagcagcgugcugaacgacauccugagccggcuggacccucccgaggccgaggugcagaucgaccggcugaucacuggccggcugcagagccugcagaccuacgugacccagcagcugauccgggccgccgagauucgggccagcgccaaccuggccgccaccaagaugagcgagugcgugcugggccagagcaagcggguggacuucugcggcaagggcuaccaccugaugagcuuuccccagagcgcaccccacggagugguguuccugcacgugaccuacgugcccgcccaggagaagaacuucaccaccgccccagccaucugccacgacggcaaggcccacuuuccccgggagggcguguucgugagcaacggcacccacugguucgugacccagcggaacuucuacgagccccagaucaucaccaccgacaacaccuucgugagcggcaacugcgacguggugaucggcaucgugaacaacaccguguacgauccccugcagcccgagcuggacagcuucaaggaggagcuggacaaguacuucaagaaucacaccagccccgacguggaccugggcgacaucagcggcaucaacgccagcguggugaacauccagaaggagaucgaucggcugaacgagguggccaagaaccugaacgagagccugaucgaccugcaggagcugggcaaguacgagcaguacaucaaguggcccugguacaucuggcugggcuucaucgccggccugaucgccaucgugauggugaccaucaugcugugcugcaugaccagcugcugcagcugccugaagggcuguugcagcugcggcagcugcugcaaguucgacgaggacgacagcgagcccgugcugaagggcgugaagcugcacuacaccugaggacuaguuauaagacugacuagcccgaugggccucccaacgggcccuccuccccuccuugcaccgagagaucucaaaggcucuuuucagagccaccaaaaaaaaaaaaaaaaaaaaaaaaaaaaaaaaaaaaaaaaaaaaaaaaaaaaaaaaaaaaaaaaaaaaaaaaaaaaaaaaaaaaaaaaaaaaaaaaaaaaa

SEQ ID NO: 24669 - RNA, 4035 nt, Artificial Sequence
  SARS-CoV-2/Wuhan/WIV05/2019__EPI_ISL_402128 spike protein mRNA gc (1-1273)(K986P_V987P_K986P_V987P_L18F_T20N_P26S_D138Y_R190S_K417T _E484K_N501Y_D614G_H655Y_T1027I)
aggagaaagcuuaccauguucguguuccuggugcugcugccccuggugagcagccagugcgugaacuucaccaaccggacccagcugccaagcgccuacaccaacagcuucacccggggcgucuacuaccccgacaagguguuccggagcagcguccugcacagcacccaggaccuguuccugcccuucuucagcaacgugaccugguuccacgccauccacgugagcggcaccaacggcaccaagcgguucgacaaccccgugcugcccuucaacgacggcguguacuucgccagcaccgagaagagcaacaucauccggggcuggaucuucggcaccacccuggacagcaagacccagagccugcugaucgugaauaacgccaccaacguggugaucaaggugugcgaguuccaguucugcaacuaccccuuccugggcguguacuaccacaagaacaacaagagcuggauggagagcgaguuccggguguacagcagcgccaacaacugcaccuucgaguacgugagccagcccuuccugauggaccuggagggcaagcagggcaacuucaagaaccugagcgaguucguguucaagaacaucgacggcuacuucaagaucuacagcaagcacaccccaaucaaccuggugcgggaucugccccagggcuucucagcccuggagccccugguggaccugcccaucggcaucaacaucacccgguuccagacccugcuggcccugcaccggagcuaccugaccccaggcgacagcagcagcggguggacagcaggcgcggcugcuuacuacgugggcuaccugcagccccggaccuuccugcugaaguacaacgagaacggcaccaucaccgacgccguggacugcgcccuggacccucugagcgagaccaagugcacccugaagagcuucaccguggagaagggcaucuaccagaccagcaacuuccgggugcagcccaccgagagcaucgugcgguuccccaacaucaccaaccugugccccuucggcgagguguucaacgccacccgguucgccagcguguacgccuggaaccggaagcggaucagcaacugcguggccgacuacagcgugcuguacaacagcgccagcuucagcaccuucaagugcuacggcgugagccccaccaagcugaacgaccugugcuucaccaacguguacgccgacagcuucgugauccguggcgacgaggugcggcagaucgcacccggccagacaggcaccaucgccgacuacaacuacaagcugcccgacgacuucaccggcugcgugaucgccuggaacagcaacaaccucgacagcaaggugggcggcaacuacaacuaccuguaccggcuguuccggaagagcaaccugaagcccuucgagcgggacaucagcaccgagaucuaccaagccggcuccaccccuugcaacggcgugaagggcuucaacugcuacuucccucugcagagcuacggcuuccagcccaccuacggcgugggcuaccagcccuaccgggugguggugcugagcuucgagcugcugcacgccccagccaccguguguggccccaagaagagcaccaaccuggugaagaacaagugcgugaacuucaacuucaacggccuuaccggcaccggcgugcugaccgagagcaacaagaaauuccugcccuuucagcaguucggccgggacaucgccgacaccaccgacgcugugcgggauccccagacccuggagauccuggacaucaccccuugcagcuucggcggcgugagcgugaucaccccaggcaccaacaccagcaaccagguggccgugcuguaccagggcgugaacugcaccgaggugcccguggccauccacgccgaccagcugacacccaccuggcgggucuacagcaccggcagcaacguguuccagacccgggccgguugccugaucggcgccgaguacgugaacaacagcuacgagugcgacauccccaucggcgccggcaucugugccagcuaccagacccagaccaauucaccccggagggcaaggagcguggccagccagagcaucaucgccuacaccaugagccugggcgccgagaacagcguggccuacagcaacaacagcaucgccauccccaccaacuucaccaucagcgugaccaccgagauucugcccgugagcaugaccaagaccagcguggacugcaccauguacaucugcggcgacagcaccgagugcagcaaccugcugcugcaguacggcagcuucugcacccagcugaaccgggcccugaccggcaucgccguggagcaggacaagaacacccaggagguguucgcccaggugaagcagaucuacaagaccccucccaucaaggacuucggcggcuucaacuucagccagauccugcccgaccccagcaagcccagcaagcggagcuucaucgaggaccugcuguucaacaaggugacccuagccgacgccggcuucaucaagcaguacggcgacugccucggcgacauagccgcccgggaccugaucugcgcccagaaguucaacggccugaccgugcugccuccccugcugaccgacgagaugaucgcccaguacaccagcgcccuguuagccggaaccaucaccagcggcuggacuuucggcgcuggagccgcucugcagauccccuucgccaugcagauggccuaccgguucaacggcaucggcgugacccagaacgugcuguacgagaaccagaagcugaucgccaaccaguucaacagcgccaucggcaagauccaggacagccugagcagcaccgcuagcgcccugggcaagcugcaggacguggugaaccagaacgcccaggcccugaacacccuggugaagcagcugagcagcaacuucggcgccaucagcagcgugcugaacgacauccugagccggcuggacccucccgaggccgaggugcagaucgaccggcugaucacuggccggcugcagagccugcagaccuacgugacccagcagcugauccgggccgccgagauucgggccagcgccaaccuggccgccaucaagaugagcgagugcgugcugggccagagcaagcggguggacuucugcggcaagggcuaccaccugaugagcuuuccccagagcgcaccccacggagugguguuccugcacgugaccuacgugcccgcccaggagaagaacuucaccaccgccccagccaucugccacgacggcaaggcccacuuuccccgggagggcguguucgugagcaacggcacccacugguucgugacccagcggaacuucuacgagccccagaucaucaccaccgacaacaccuucgugagcggcaacugcgacguggugaucggcaucgugaacaacaccguguacgauccccugcagcccgagcuggacagcuucaaggaggagcuggacaaguacuucaagaaucacaccagccccgacguggaccugggcgacaucagcggcaucaacgccagcguggugaacauccagaaggagaucgaucggcugaacgagguggccaagaaccugaacgagagccugaucgaccugcaggagcugggcaaguacgagcaguacaucaaguggcccugguacaucuggcugggcuucaucgccggccugaucgccaucgugauggugaccaucaugcugugcugcaugaccagcugcugcagcugccugaagggcuguugcagcugcggcagcugcugcaaguucgacgaggacgacagcgagcccgugcugaagggcgugaagcugcacuacaccugaggacuaguuauaagacugacuagcccgaugggccucccaacgggcccuccuccccuccuugcaccgagagaucucaaaggcucuuuucagagccaccaaaaaaaaaaaaaaaaaaaaaaaaaaaaaaaaaaaaaaaaaaaaaaaaaaaaaaaaaaaaaaaaaaaaaaaaaaaaaaaaaaaaaaaaaaaaaaaaaaaaa

SEQ ID NO: 24670 - RNA, 4035 nt, Artificial Sequence
  SARS-CoV-2/Wuhan/WIV05/2019__EPI_ISL_402128 spike protein mRNA gc (1-1273)(K986P_V987P_K986P_V987P_S13I_W152C_L452R_D614G)
aggagaaagcuuaccauguucguguuccuggugcugcugccccuggugagcauccagugcgugaaccugaccacccggacccagcugccaccagccuacaccaacagcuucacccggggcgucuacuaccccgacaagguguuccggagcagcguccugcacagcacccaggaccuguuccugcccuucuucagcaacgugaccugguuccacgccauccacgugagcggcaccaacggcaccaagcgguucgacaaccccgugcugcccuucaacgacggcguguacuucgccagcaccgagaagagcaacaucauccggggcuggaucuucggcaccacccuggacagcaagacccagagccugcugaucgugaauaacgccaccaacguggugaucaaggugugcgaguuccaguucugcaacgaccccuuccugggcguguacuaccacaagaacaacaagagcugcauggagagcgaguuccggguguacagcagcgccaacaacugcaccuucgaguacgugagccagcccuuccugauggaccuggagggcaagcagggcaacuucaagaaccugcgggaguucguguucaagaacaucgacggcuacuucaagaucuacagcaagcacaccccaaucaaccuggugcgggaucugccccagggcuucucagcccuggagccccugguggaccugcccaucggcaucaacaucacccgguuccagacccugcuggcccugcaccggagcuaccugaccccaggcgacagcagcagcggguggacagcaggcgcggcugcuuacuacgugggcuaccugcagccccggaccuuccugcugaaguacaacgagaacggcaccaucaccgacgccguggacugcgcccuggacccucugagcgagaccaagugcacccugaagagcuucaccguggagaagggcaucuaccagaccagcaacuuccgggugcagcccaccgagagcaucgugcgguuccccaacaucaccaaccugugccccuucggcgagguguucaacgccacccgguucgccagcguguacgccuggaaccggaagcggaucagcaacugcguggccgacuacagcgugcuguacaacagcgccagcuucagcaccuucaagugcuacggcgugagccccaccaagcugaacgaccugugcuucaccaacguguacgccgacagcuucgugauccguggcgacgaggugcggcagaucgcacccggccagacaggcaagaucgccgacuacaacuacaagcugcccgacgacuucaccggcugcgugaucgccuggaacagcaacaaccucgacagcaaggugggcggcaacuacaacuaccgcuaccggcuguuccggaagagcaaccugaagcccuucgagcgggacaucagcaccgagaucuaccaagccggcuccaccccuugcaacggcguggagggcuucaacugcuacuucccucugcagagcuacggcuuccagcccaccaacggcgugggcuaccagcccuaccgggugguggugcugagcuucgagcugcugcacgccccagccaccguguguggccccaagaagagcaccaaccuggugaagaacaagugcgugaacuucaacuucaacggccuuaccggcaccggcgugcugaccgagagcaacaagaaauuccugcccuuucagcaguucggccgggacaucgccgacaccaccgacgcugugcgggauccccagacccuggagauccuggacaucaccccuugcagcuucggcggcgugagcgugaucaccccaggcaccaacaccagcaaccagguggccgugcuguaccagggcgugaacugcaccgaggugcccguggccauccacgccgaccagcugacacccaccuggcgggucuacagcaccggcagcaacguguuccagacccgggccgguugccugaucggcgccgagcacgugaacaacagcuacgagugcgacauccccaucggcgccggcaucugugccagcuaccagacccagaccaauucaccccggagggcaaggagcguggccagccagagcaucaucgccuacaccaugagccugggcgccgagaacagcguggccuacagcaacaacagcaucgccauccccaccaacuucaccaucagcgugaccaccgagauucugcccgugagcaugaccaagaccagcguggacugcaccauguacaucugcggcgacagcaccgagugcagcaaccugcugcugcaguacggcagcuucugcacccagcugaaccgggcccugaccggcaucgccguggagcaggacaagaacacccaggagguguucgcccaggugaagcagaucuacaagaccccucccaucaaggacuucggcggcuucaacuucagccagauccugcccgaccccagcaagcccagcaagcggagcuucaucgaggaccugcuguucaacaaggugacccuagccgacgccggcuucaucaagcaguacggcgacugccucggcgacauagccgcccgggaccugaucugcgcccagaaguucaacggccugaccgugcugccuccccugcugaccgacgagaugaucgcccaguacaccagcgcccuguuagccggaaccaucaccagcggcuggacuuucggcgcuggagccgcucugcagauccccuucgccaugcagauggccuaccgguucaacggcaucggcgugacccagaacgugcuguacgagaaccagaagcugaucgccaaccaguucaacagcgccaucggcaagauccaggacagccugagcagcaccgcuagcgcccugggcaagcugcaggacguggugaaccagaacgcccaggcccugaacacccuggugaagcagcugagcagcaacuucggcgccaucagcagcgugcugaacgacauccugagccggcuggacccucccgaggccgaggugcagaucgaccggcugaucacuggccggcugcagagccugcagaccuacgugacccagcagcugauccgggccgccgagauucgggccagcgccaaccuggccgccaccaagaugagcgagugcgugcugggccagagcaagcggguggacuucugcggcaagggcuaccaccugaugagcuuuccccagagcgcaccccacggagugguguuccugcacgugaccuacgugcccgcccaggagaagaacuucaccaccgccccagccaucugccacgacggcaaggcccacuuuccccgggagggcguguucgugagcaacggcacccacugguucgugacccagcggaacuucuacgagccccagaucaucaccaccgacaacaccuucgugagcggcaacugcgacguggugaucggcaucgugaacaacaccguguacgauccccugcagcccgagcuggacagcuucaaggaggagcuggacaaguacuucaagaaucacaccagccccgacguggaccugggcgacaucagcggcaucaacgccagcguggugaacauccagaaggagaucgaucggcugaacgagguggccaagaaccugaacgagagccugaucgaccugcaggagcugggcaaguacgagcaguacaucaaguggcccugguacaucuggcugggcuucaucgccggccugaucgccaucgugauggugaccaucaugcugugcugcaugaccagcugcugcagcugccugaagggcuguugcagcugcggcagcugcugcaaguucgacgaggacgacagcgagcccgugcugaagggcgugaagcugcacuacaccugaggacuaguuauaagacugacuagcccgaugggccucccaacgggcccuccuccccuccuugcaccgagagaucucaaaggcucuuuucagagccaccaaaaaaaaaaaaaaaaaaaaaaaaaaaaaaaaaaaaaaaaaaaaaaaaaaaaaaaaaaaaaaaaaaaaaaaaaaaaaaaaaaaaaaaaaaaaaaaaaaaaa

SEQ ID NO: 24671 - RNA, 4035 nt, Artificial Sequence
  SARS-CoV-2/Wuhan/WIV05/2019__EPI_ISL_402128 spike protein mRNA gc (1-1273)(K986P_V987P)
aggagaaagcuuaccauguucguguuccuggugcugcugccccuggugagcagccagugcgugaaccugaccacccggacccagcugcccccugccuacaccaacagcuucacccggggcguguacuaccccgacaagguguuccggagcagcgugcugcacagcacccaggaccuguuccugcccuucuucagcaacgugaccugguuccacgccauccacgugagcggcaccaacggcaccaagcgguucgacaacccagugcugcccuucaacgacggcguguacuucgccagcaccgagaagucaaacaucauccggggcuggaucuucggcaccacccuggacagcaagacacagagccugcugaucgugaacaacgccaccaacguggugaucaaggugugcgaguuucaguucugcaacgaccccuuccugggcguguacuaccacaagaacaacaagagcuggauggagagcgaguuccgggucuacagcagcgcuaacaauugcaccuucgaguacgugagccagcccuuccugauggaccucgagggcaagcagggcaacuucaagaaccugcgggaguucguguucaagaacaucgauggcuacuucaagaucuacagcaagcacacccccaucaaccuggugcgggaccugccccagggauucagcgcccuggagccucugguggaccugcccaucggcaucaacaucaccagguuccagacccugcuggcccugcaccggagcuaccugacccccggcgacagcagcagcggcuggaccgccggcgccgccgcauacuacgugggcuaccugcagccacggaccuuccugcugaaguacaacgagaacggcaccaucaccgacgccguggacugcgcccuggacccccugagcgagaccaagugcacccuaaagagcuucaccguggagaagggcaucuaccagaccagcaacuuccgggugcagcccacugagagcaucgugcgguuccccaacauuaccaaccugugucccuucggcgagguguucaacgccacccgguucgccagcguguacgccuggaaccggaagcggaucagcaacugcguggccgacuacagcgugcuguacaacagcgccagcuucagcaccuucaagugcuacggcgugagcccuaccaagcugaacgaccugugcuucaccaacguguacgcugacagcuucgugauccggggcgacgaggugcggcagaucgcccccggccagaccggcaagaucgccgacuacaacuacaagcugcccgacgacuucaccggcugcgugaucgccuggaacagcaacaaccuggacagcaaggugggcggcaacuacaacuaccuguaccggcuguuccguaagagcaaccugaagccauucgagcgggacaucagcaccgagaucuaccaggccggcagcacccccugcaacgguguggagggcuuuaacugcuacuucccccugcagagcuacggcuuccagcccaccaacggcgugggcuaccagcccuaccgggugguggugcugagcuucgagcugcugcacgcccccgccaccgugugcggcccuaaaaagagcaccaaccuggugaagaacaagugcgugaacuucaauuucaacggccugaccggcaccggcgugcugaccgagagcaacaagaaguuccugcccuuccagcaguucggccgggauaucgccgacaccaccgacgcagugcgggacccccagacccuggagauccuggacaucaccccaugcagcuucggcggcgugagcgucaucacccccggcacaaacaccagcaaccagguggccgugcuguaccaggacgugaacugcaccgaggugcccguggccauccacgccgaccagcugacccccaccuggcggguguacagcaccggaagcaacguguuccagacccgggccggcugccugaucggcgccgagcacgugaacaacuccuacgagugcgacauccccaucggcgcuggcaucugcgccagcuaccagacccagaccaacagcccccggcgggcccggagcguggccagccagagcaucaucgccuacaccaugagcuuaggcgccgagaacagcguggccuacagcaacaacagcaucgcgaucccuaccaacuucaccaucagcgugaccaccgagauacugcccgugagcaugaccaagaccagcguggacuguaccauguacaucugcggcgacagcaccgagugcagcaaccugcugcugcaguacggcagcuucugcacccagcugaaccgggcccugaccggcaucgccguggagcaggacaagaacacccaagagguguucgcccaggugaagcagaucuacaagacucccccaaucaaggacuucggcggcuucaacuucagccagauccugcccgaccccagcaagcccagcaagcggagcuucaucgaggaccugcuguucaacaaggugacccuggccgacgccggcuucaucaagcaguacggcgauugccugggcgacaucgccgcucgggaccugaucugcgcccagaaguucaacgggcugaccgugcugcccccucugcugaccgacgagaugaucgcccaguacaccagcgcccugcuugccggcaccaucaccagcggcuggaccuucggcgccggcgcagcccugcagauccccuucgccaugcagauggccuaccgguucaacggcaucggcgugacccagaacgugcuguacgagaaccagaagcugaucgccaaccaguucaacagcgccaucggcaagauccaggacagccugagcagcaccgccagcgcccugggcaagcugcaggacguggugaaccagaacgcucaggcccugaacacccuggugaagcagcugagcagcaacuucggcgccaucagcucagugcugaaugacauccugagcaggcuggaucccccagaggccgaggugcagaucgaccggcugaucaccggccggcugcagagccugcagaccuacgugacccagcagcugauccgggccgccgagauccgggccagcgccaaccuggcagccaccaagaugagcgagugcgugcugggccagagcaagcggguggacuuuugcggcaagggcuaccaccugaugagcuucccccagagcgcuccccacggcgugguguuccuccacgugacauacguccccgcccaggagaagaacuucaccaccgcccccgccauuugccacgacggcaaggcccacuucccccgggagggcguguucgugagcaacggaacccacugguucgugacccagcggaacuucuacgagccucagaucaucaccaccgacaacaccuucgugagcggcaacugcgacguggugaucggcaucgugaacaacaccguguacgacccccugcagcccgagcuggacagcuucaaggaggagcuggacaaguacuucaagaaccacaccagcccagacguggaccugggcgacaucagcggcaucaacgccagcguggugaacauccagaaggagaucgaccggcugaacgagguggccaagaaccugaacgagagccugaucgaccugcaggagcugggcaaguacgagcaguacaucaaguggcccugguacaucuggcugggcuucaucgccggccugaucgccaucgugauggugaccaucaugcugugcugcaugaccagcugcuguagcugccugaagggcugcugcagcugcggcagcugcugcaaguucgacgaggacgacagcgagcccgugcugaagggcgugaagcugcacuacaccugaggacuaguuauaagacugacuagcccgaugggccucccaacgggcccuccuccccuccuugcaccgagagaucucaaaggcucuuuucagagccaccaaaaaaaaaaaaaaaaaaaaaaaaaaaaaaaaaaaaaaaaaaaaaaaaaaaaaaaaaaaaaaaaaaaaaaaaaaaaaaaaaaaaaaaaaaaaaaaaaaaaa

SEQ ID NO: 24672 - RNA, 4035 nt, Artificial Sequence
  SARS-CoV-2/Wuhan/WIV05/2019__EPI_ISL_402128 spike protein mRNA gc (1-1273)(K986P_V987P_ D614G)
aggagaaagcuuaccauguucguguuccuggugcugcugccccuggugagcagccagugcgugaaccugaccacccggacccagcugcccccugccuacaccaacagcuucacccggggcguguacuaccccgacaagguguuccggagcagcgugcugcacagcacccaggaccuguuccugcccuucuucagcaacgugaccugguuccacgccauccacgugagcggcaccaacggcaccaagcgguucgacaacccagugcugcccuucaacgacggcguguacuucgccagcaccgagaagucaaacaucauccggggcuggaucuucggcaccacccuggacagcaagacacagagccugcugaucgugaacaacgccaccaacguggugaucaaggugugcgaguuucaguucugcaacgaccccuuccugggcguguacuaccacaagaacaacaagagcuggauggagagcgaguuccgggucuacagcagcgcuaacaauugcaccuucgaguacgugagccagcccuuccugauggaccucgagggcaagcagggcaacuucaagaaccugcgggaguucguguucaagaacaucgauggcuacuucaagaucuacagcaagcacacccccaucaaccuggugcgggaccugccccagggauucagcgcccuggagccucugguggaccugcccaucggcaucaacaucaccagguuccagacccugcuggcccugcaccggagcuaccugacccccggcgacagcagcagcggcuggaccgccggcgccgccgcauacuacgugggcuaccugcagccacggaccuuccugcugaaguacaacgagaacggcaccaucaccgacgccguggacugcgcccuggacccccugagcgagaccaagugcacccuaaagagcuucaccguggagaagggcaucuaccagaccagcaacuuccgggugcagcccacugagagcaucgugcgguuccccaacauuaccaaccugugucccuucggcgagguguucaacgccacccgguucgccagcguguacgccuggaaccggaagcggaucagcaacugcguggccgacuacagcgugcuguacaacagcgccagcuucagcaccuucaagugcuacggcgugagcccuaccaagcugaacgaccugugcuucaccaacguguacgcugacagcuucgugauccggggcgacgaggugcggcagaucgcccccggccagaccggcaagaucgccgacuacaacuacaagcugcccgacgacuucaccggcugcgugaucgccuggaacagcaacaaccuggacagcaaggugggcggcaacuacaacuaccuguaccggcuguuccguaagagcaaccugaagccauucgagcgggacaucagcaccgagaucuaccaggccggcagcacccccugcaacgguguggagggcuuuaacugcuacuucccccugcagagcuacggcuuccagcccaccaacggcgugggcuaccagcccuaccgggugguggugcugagcuucgagcugcugcacgcccccgccaccgugugcggcccuaaaaagagcaccaaccuggugaagaacaagugcgugaacuucaauuucaacggccugaccggcaccggcgugcugaccgagagcaacaagaaguuccugcccuuccagcaguucggccgggauaucgccgacaccaccgacgcagugcgggacccccagacccuggagauccuggacaucaccccaugcagcuucggcggcgugagcgucaucacccccggcacaaacaccagcaaccagguggccgugcuguaccagggagugaacugcaccgaggugcccguggccauccacgccgaccagcugacccccaccuggcggguguacagcaccggcagcaacguguuccagacccgggccggcugccugaucggcgccgagcacgugaacaacuccuacgagugcgacauccccaucggcgcuggcaucugcgccagcuaccagacccagaccaacagcccccggcgggcccggagcguggccagccagagcaucaucgccuacaccaugagcuuaggcgccgagaacagcguggccuacagcaacaacagcaucgcgaucccuaccaacuucaccaucagcgugaccaccgagauacugcccgugagcaugaccaagaccagcguggacuguaccauguacaucugcggcgacagcaccgagugcagcaaccugcugcugcaguacggcagcuucugcacccagcugaaccgggcccugaccggcaucgccguggagcaggacaagaacacccaagagguguucgcccaggugaagcagaucuacaagacucccccaaucaaggacuucggcggcuucaacuucagccagauccugcccgaccccagcaagcccagcaagcggagcuucaucgaggaccugcuguucaacaaggugacccuggccgacgccggcuucaucaagcaguacggcgacugccugggggauaucgccgcucgggaccugaucugcgcccagaaguucaacggccugaccgugcugcccccucugcugaccgacgagaugaucgcccaguacaccagcgcccugcuugccggcaccaucaccagcggcuggaccuucggcgccggcgcagcccugcagauccccuucgccaugcagauggccuaccgguucaacggcaucggcgugacccagaacgugcuguacgagaaccagaagcugaucgccaaccaguucaacagcgccaucggcaagauccaggacagccugagcagcaccgccagcgcccugggcaagcugcaggacguggugaaccagaacgcucaggcccugaacacccuggugaagcagcugagcagcaacuucggcgccaucagcucagugcugaaugacauccugagcaggcuggaucccccagaggccgaggugcagaucgaccggcugaucaccggccggcugcagagccugcagaccuacgugacccagcagcugauccgggccgccgagauccgggccagcgccaaccuggcagccaccaagaugagcgagugcgugcugggccagagcaagcggguggacuuuugcggcaagggcuaccaccugaugagcuucccccagagcgcuccccacggcgugguguuccuccacgugacauacguccccgcccaggagaagaacuucaccaccgcccccgccauuugccacgacggcaaggcccacuucccccgggagggaguguucgugagcaacggcacccacugguucgugacccagcggaacuucuacgagccucagaucaucaccaccgacaacaccuucgugagcggcaacugcgacguggugaucggcaucgugaacaacaccguguacgacccccugcagcccgagcuggacagcuucaaggaggagcuggacaaguacuucaagaaccacaccagcccagacguggaccugggcgacaucagcggcaucaacgccagcguggugaacauccagaaggagaucgaccggcugaacgagguggccaagaaccugaacgagagccugaucgaccugcaggagcugggcaaguacgagcaguacaucaaguggcccugguacaucuggcugggcuucaucgccggccugaucgccaucgugauggugaccaucaugcugugcugcaugaccagcugcuguagcugccugaagggcugcugcagcugcggcagcugcugcaaguucgacgaggacgacagcgagcccgugcugaagggcgugaagcugcacuacaccugaggacuaguuauaagacugacuagcccgaugggccucccaacgggcccuccuccccuccuugcaccgagagaucucaaaggcucuuuucagagccaccaaaaaaaaaaaaaaaaaaaaaaaaaaaaaaaaaaaaaaaaaaaaaaaaaaaaaaaaaaaaaaaaaaaaaaaaaaaaaaaaaaaaaaaaaaaaaaaaaaaaa

SEQ ID NO: 24673 - RNA, 4035 nt, Artificial Sequence
  SARS-CoV-2/Wuhan/WIV05/2019__EPI_ISL_402128 spike protein mRNA gc (1-1273)(K986P_V987P_A222V_D614G)
aggagaaagcuuaccauguucguguuccuggugcugcugccccuggugagcagccagugcgugaaccugaccacccggacccagcugcccccugccuacaccaacagcuucacccggggcguguacuaccccgacaagguguuccggagcagcgugcugcacagcacccaggaccuguuccugcccuucuucagcaacgugaccugguuccacgccauccacgugagcggcaccaacggcaccaagcgguucgacaacccagugcugcccuucaacgacggcguguacuucgccagcaccgagaagucaaacaucauccggggcuggaucuucggcaccacccuggacagcaagacacagagccugcugaucgugaacaacgccaccaacguggugaucaaggugugcgaguuucaguucugcaacgaccccuuccugggcguguacuaccacaagaacaacaagagcuggauggagagcgaguuccgggucuacagcagcgcuaacaauugcaccuucgaguacgugagccagcccuuccugauggaccucgagggcaagcagggcaacuucaagaaccugcgggaguucguguucaagaacaucgauggcuacuucaagaucuacagcaagcacacccccaucaaccuggugcgggaccugccccagggauucagcgugcuggagccucugguggaccugcccaucggcaucaacaucaccagguuccagacccugcuggcccugcaccggagcuaccugacccccggcgacagcagcagcggcuggaccgccggcgccgccgccuacuacgugggcuaccugcagccacggaccuuccugcugaaguacaacgagaacggcaccaucaccgacgcaguggacugcgcccuggacccccugagcgagaccaagugcacccuaaagagcuucaccguggagaagggcaucuaccagaccagcaacuuccgggugcagcccacugagagcaucgugcgguuccccaacauuaccaaccugugucccuucggcgagguguucaacgccacccgguucgccagcguguacgccuggaaccggaagcggaucagcaacugcguggccgacuacagcgugcuguacaacagcgccagcuucagcaccuucaagugcuacggcgugagcccuaccaagcugaacgaccugugcuucaccaacguguacgccgacagcuucgugauccggggcgacgaggugcggcagaucgcucccggccagaccggcaagaucgccgacuacaacuacaagcugcccgacgacuucaccggcugcgugaucgccuggaacagcaacaaccuggacagcaaggugggcggcaacuacaacuaccuguaccggcuguuccguaagagcaaccugaagccauucgagcgggacaucagcaccgagaucuaccaggccggcagcacccccugcaacgguguggagggcuuuaacugcuacuucccccugcagagcuacggcuuccagcccaccaacggcgugggcuaccagcccuaccgggugguggugcugagcuucgagcugcugcacgcccccgccaccgugugcggcccuaaaaagagcaccaaccuggugaagaacaagugcgugaacuucaauuucaacggccugaccggcaccggcgugcugaccgagagcaacaagaaguuccugcccuuccagcaguucggccgggauaucgccgacaccaccgacgccgugcgggacccccagacccuggagauccuggacaucaccccaugcagcuucggcggcgucagcgugaucacccccggcacaaacaccagcaaccagguggcagugcuguaccagggagugaacugcaccgaggugcccguggccauccacgccgaccagcugacccccaccuggcggguguacagcaccggcagcaacguguuccagacccgggccggcugccugaucggcgccgagcacgugaacaacuccuacgagugcgacauccccaucggcgccggcaucugcgcuagcuaccagacccagaccaacagcccccggcgggcccggagcguggccagccagagcaucaucgccuacaccaugagcuuaggcgccgagaacagcguggccuacagcaacaacagcaucgccaucccuaccaacuucaccaucagcgugaccaccgagauacugcccgugagcaugaccaagaccagcguggacuguaccauguacaucugcggcgacagcaccgagugcagcaaccugcugcugcaguacggcagcuucugcacccagcugaaccgggcgcugaccggcaucgccguggagcaggacaagaacacccaagagguguucgcccaggugaagcagaucuacaagacucccccaaucaaggacuucggcggcuucaacuucagccagauccugcccgaccccagcaagcccagcaagcggagcuucaucgaggaccugcuguucaacaaggugacccuggccgacgccggcuucaucaagcaguacggcgacugccugggggauaucgccgcccgggaccugaucugcgcucagaaguucaacggccugaccgugcugcccccucugcugaccgacgagaugaucgcccaguacaccagcgcccugcuugccggcaccaucaccagcggcuggaccuucggcgccggcgccgcacugcagauccccuucgccaugcagauggccuaccgguucaacggcaucggcgugacccagaacgugcuguacgagaaccagaagcugaucgccaaccaguucaacagcgccaucggcaagauccaggacagccugagcagcaccgccagcgcccugggcaagcugcaggacguggugaaccagaacgcccaggcucugaacacccuggugaagcagcugagcagcaacuucggcgccaucagcucagugcugaaugacauccugagcaggcuggaucccccagaggccgaggugcagaucgaccggcugaucaccggccggcugcagagccugcagaccuacgugacccagcagcugauccgggccgccgagauccgggccagcgccaaccuggccgcaaccaagaugagcgagugcgugcugggccagagcaagcggguggacuuuugcggcaagggcuaccaccugaugagcuucccccagagcgcuccccacggcgugguguuccuccacgucacauacgugcccgcccaggagaagaacuucaccaccgcccccgccauuugccacgacggcaaggcccacuucccccgggagggaguguucgugagcaacggcacccacugguucgugacccagcggaacuucuacgagccucagaucaucaccaccgacaacaccuucgugagcggcaacugcgacguggugaucggcaucgugaacaacaccguguacgacccccugcagcccgagcuggacagcuucaaggaggagcuggacaaguacuucaagaaccacaccagcccagacguggaccugggcgacaucagcggcaucaacgccagcguggugaacauccagaaggagaucgaccggcugaacgagguggccaagaaccugaacgagagccugaucgaccugcaggagcugggcaaguacgagcaguacaucaaguggcccugguacaucuggcugggcuucaucgccggccugaucgccaucgugauggugaccaucaugcugugcugcaugaccagcugcuguagcugccugaagggcugcugcagcugcggcagcugcugcaaguucgacgaggacgacagcgagcccgugcugaagggcgugaagcugcacuacaccugaggacuaguuauaagacugacuagcccgaugggccucccaacgggcccuccuccccuccuugcaccgagagaucucaaaggcucuuuucagagccaccaaaaaaaaaaaaaaaaaaaaaaaaaaaaaaaaaaaaaaaaaaaaaaaaaaaaaaaaaaaaaaaaaaaaaaaaaaaaaaaaaaaaaaaaaaaaaaaaaaaaa

SEQ ID NO: 24674 - RNA, 4035 nt, Artificial Sequence
  SARS-CoV-2/Wuhan/WIV05/2019__EPI_ISL_402128 spike protein mRNA gc (1-1273)(K986P_V987P_N439K_D614G)
aggagaaagcuuaccauguucguguuccuggugcugcugccccuggugagcagccagugcgugaaccugaccacccggacccagcugcccccugccuacaccaacagcuucacccggggcguguacuaccccgacaagguguuccggagcagcgugcugcacagcacccaggaccuguuccugcccuucuucagcaacgugaccugguuccacgccauccacgugagcggcaccaacggcaccaagcgguucgacaacccagugcugcccuucaacgacggcguguacuucgccagcaccgagaagucaaacaucauccggggcuggaucuucggcaccacccuggacagcaagacacagagccugcugaucgugaacaacgccaccaacguggugaucaaggugugcgaguuucaguucugcaacgaccccuuccugggcguguacuaccacaagaacaacaagagcuggauggagagcgaguuccgggucuacagcagcgcuaacaauugcaccuucgaguacgugagccagcccuuccugauggaccucgagggcaagcagggcaacuucaagaaccugcgggaguucguguucaagaacaucgauggcuacuucaagaucuacagcaagcacacccccaucaaccuggugcgggaccugccccagggauucagcgcccuggagccucugguggaccugcccaucggcaucaacaucaccagguuccagacccugcuggcccugcaccggagcuaccugacccccggcgacagcagcagcggcuggaccgccggcgccgccgcauacuacgugggcuaccugcagccacggaccuuccugcugaaguacaacgagaacggcaccaucaccgacgccguggacugcgcccuggacccccugagcgagaccaagugcacccuaaagagcuucaccguggagaagggcaucuaccagaccagcaacuuccgggugcagcccacugagagcaucgugcgguuccccaacauuaccaaccugugucccuucggcgagguguucaacgccacccgguucgccagcguguacgccuggaaccggaagcggaucagcaacugcguggccgacuacagcgugcuguacaacagcgccagcuucagcaccuucaagugcuacggcgugagcccuaccaagcugaacgaccugugcuucaccaacguguacgcugacagcuucgugauccggggcgacgaggugcggcagaucgcccccggccagaccggcaagaucgccgacuacaacuacaagcugcccgacgacuucaccggcugcgugaucgccuggaacagcaagaaccuggacagcaaggugggcggcaacuacaacuaccuguaccggcuguuccguaagagcaaccugaagccauucgagcgggacaucagcaccgagaucuaccaggccggcagcacccccugcaacgguguggagggcuuuaacugcuacuucccccugcagagcuacggcuuccagcccaccaacggcgugggcuaccagcccuaccgggugguggugcugagcuucgagcugcugcacgcccccgccaccgugugcggcccuaaaaagagcaccaaccuggugaagaacaagugcgugaacuucaacuucaauggccugaccggcaccggcgugcugaccgagagcaacaagaaguuccugcccuuccagcaguucggccgggauaucgccgacaccaccgacgcagugcgggacccccagacccuggagauccuggacaucaccccaugcagcuucggcggcgugagcgucaucacccccggcacaaacaccagcaaccagguggccgugcuguaccagggagugaacugcaccgaggugcccguggccauccacgccgaccagcugacccccaccuggcggguguacagcaccggcagcaacguguuccagacccgggccggcugccugaucggcgccgagcacgugaacaacuccuacgagugcgacauccccaucggcgcuggcaucugcgccagcuaccagacccagaccaacagcccccggcgggcccggagcguggccagccagagcaucaucgccuacaccaugagcuuaggcgccgagaacagcguggccuacagcaacaacagcaucgcgaucccuaccaacuucaccaucagcgugaccaccgagauacugcccgugagcaugaccaagaccagcguggacuguaccauguacaucugcggcgacagcaccgagugcagcaaccugcugcugcaguacggcagcuucugcacccagcugaaccgggcccugaccggcaucgccguggagcaggacaagaacacccaagagguguucgcccaggugaagcagaucuacaagacucccccaaucaaggacuucggcggcuucaacuucagccagauccugcccgaccccagcaagcccagcaagcggagcuucaucgaggaccugcuguucaacaaggugacccuggccgacgccggcuucaucaagcaguacggcgacugccugggggauaucgccgcucgggaccugaucugcgcccagaaguucaacggccugaccgugcugcccccucugcugaccgacgagaugaucgcccaguacaccagcgcccugcuugccggcaccaucaccagcggcuggaccuucggcgccggcgcagcccugcagauccccuucgccaugcagauggccuaccgguucaacggcaucggcgugacccagaacgugcuguacgagaaccagaagcugaucgccaaccaguucaacagcgccaucggcaagauccaggacagccugagcagcaccgccagcgcccugggcaagcugcaggacguggugaaccagaacgcucaggcccugaacacccuggugaagcagcugagcagcaacuucggcgccaucagcucagugcugaacgacauccugagcaggcuggaucccccagaggccgaggugcagaucgaccggcugaucaccggccggcugcagagccugcagaccuacgugacccagcagcugauccgggccgccgagauccgggccagcgccaaucuggcagccaccaagaugagcgagugcgugcugggccagagcaagcggguggacuuuugcggcaagggcuaccaccugaugagcuucccccagagcgcuccccacggcgugguguuccuccacgugacauacguccccgcccaggagaagaacuucaccaccgcccccgccauuugccacgacggcaaggcccacuucccccgggagggaguguucgugagcaacggcacccacugguucgugacccagcggaacuucuacgagccucagaucaucaccaccgacaacaccuucgugagcggcaacugcgacguggugaucggcaucgugaacaacaccguguacgacccccugcagcccgagcuggacagcuucaaggaggagcuggacaaguacuucaagaaccacaccagcccagacguggaccugggcgacaucagcggcaucaacgccagcguggugaacauccagaaggagaucgaccggcugaacgagguggccaagaaccugaacgagagccugaucgaccugcaggagcugggcaaguacgagcaguacaucaaguggcccugguacaucuggcugggcuucaucgccggccugaucgccaucgugauggugaccaucaugcugugcugcaugaccagcugcuguagcugccugaagggcugcugcagcugcggcagcugcugcaaguucgacgaggacgacagcgagcccgugcugaagggcgugaagcugcacuacaccugaggacuaguuauaagacugacuagcccgaugggccucccaacgggcccuccuccccuccuugcaccgagagaucucaaaggcucuuuucagagccaccaaaaaaaaaaaaaaaaaaaaaaaaaaaaaaaaaaaaaaaaaaaaaaaaaaaaaaaaaaaaaaaaaaaaaaaaaaaaaaaaaaaaaaaaaaaaaaaaaaaaa

SEQ ID NO: 24675 - RNA, 4035 nt, Artificial Sequence
  SARS-CoV-2/Wuhan/WIV05/2019__EPI_ISL_402128 spike protein mRNA gc (1-1273)(K986P_V987P_S477N_D614G)
aggagaaagcuuaccauguucguguuccuggugcugcugccccuggugagcagccagugcgugaaccugaccacccggacccagcugcccccugccuacaccaacagcuucacccggggcguguacuaccccgacaagguguuccggagcagcgugcugcacagcacccaggaccuguuccugcccuucuucagcaacgugaccugguuccacgccauccacgugagcggcaccaacggcaccaagcgguucgacaacccagugcugcccuucaacgacggcguguacuucgccagcaccgagaagucaaacaucauccggggcuggaucuucggcaccacccuggacagcaagacacagagccugcugaucgugaacaacgccaccaacguggugaucaaggugugcgaguuucaguucugcaacgaccccuuccugggcguguacuaccacaagaacaacaagagcuggauggagagcgaguuccgggucuacagcagcgcuaacaauugcaccuucgaguacgugagccagcccuuccugauggaccucgagggcaagcagggcaacuucaagaaccugcgggaguucguguucaagaacaucgauggcuacuucaagaucuacagcaagcacacccccaucaaccuggugcgggaccugccccagggauucagcgcccuggagccucugguggaccugcccaucggcaucaacaucaccagguuccagacccugcuggcccugcaccggagcuaccugacccccggcgacagcagcagcggcuggaccgccggcgccgccgcauacuacgugggcuaccugcagccacggaccuuccugcugaaguacaacgagaacggcaccaucaccgacgccguggacugcgcccuggacccccugagcgagaccaagugcacccuaaagagcuucaccguggagaagggcaucuaccagaccagcaacuuccgggugcagcccacugagagcaucgugcgguuccccaacauuaccaaccugugucccuucggcgagguguucaacgccacccgguucgccagcguguacgccuggaaccggaagcggaucagcaacugcguggccgacuacagcgugcuguacaacagcgccagcuucagcaccuucaagugcuacggcgugagcccuaccaagcugaacgaccugugcuucaccaacguguacgcugacagcuucgugauccggggcgacgaggugcggcagaucgcccccggccagaccggcaagaucgccgacuacaacuacaagcugcccgacgacuucaccggcugcgugaucgccuggaacagcaacaaccuggacagcaaggugggcggcaacuacaacuaccuguaccggcuguuccguaagagcaaccugaagccauucgagcgggacaucagcaccgagaucuaccaggccggcaacacccccugcaacgguguggagggcuuuaacugcuacuucccccugcagagcuacggcuuccagcccaccaacggcgugggcuaccagcccuaccgggugguggugcugagcuucgagcugcugcacgcccccgccaccgugugcggcccuaaaaagagcaccaaccuggugaagaacaagugcgugaauuucaacuucaacggccugaccggcaccggcgugcugaccgagagcaacaagaaguuccugcccuuccagcaguucggccgggauaucgccgacaccaccgacgcagugcgggacccccagacccuggagauccuggacaucaccccaugcagcuucggcggcgugagcgucaucacccccggcacaaacaccagcaaccagguggccgugcuguaccagggagugaacugcaccgaggugcccguggccauccacgccgaccagcugacccccaccuggcggguguacagcaccggcagcaacguguuccagacccgggccggcugccugaucggcgccgagcacgugaacaacagcuacgagugcgacauccccaucggcgcuggcaucugcgccuccuaccagacccagaccaacagcccccggcgggcccggagcguggccagccagagcaucaucgccuacaccaugagcuuaggcgccgagaacagcguggccuacagcaacaacagcaucgcgaucccuaccaacuucaccaucagcgugaccaccgagauacugcccgugagcaugaccaagaccagcguggacuguaccauguacaucugcggcgacagcaccgagugcagcaaccugcugcugcaguacggcagcuucugcacccagcugaaccgggcccugaccggcaucgccguggagcaggacaagaacacccaagagguguucgcccaggugaagcagaucuacaagacucccccaaucaaggacuucggcggcuucaacuucagccagauccugcccgaccccagcaagcccagcaagcggagcuucaucgaggaccugcuguucaacaaggugacccuggccgacgccggcuucaucaagcaguacggcgacugccugggggauaucgccgcucgggaccugaucugcgcccagaaguucaacggccugaccgugcugcccccucugcugaccgacgagaugaucgcccaguacaccagcgcccugcuugccggcaccaucaccagcggcuggaccuucggcgccggcgcagcccugcagauccccuucgccaugcagauggccuaccgguucaacggcaucggcgugacccagaacgugcuguacgagaaccagaagcugaucgccaaccaguucaacagcgccaucggcaagauccaggacagccugagcagcaccgccagcgcccugggcaagcugcaggacguggugaaccagaacgcucaggcccugaacacccuggugaagcagcugagcagcaauuucggcgccaucagcagcgugcugaacgacauccugucaaggcuggaucccccagaggccgaggugcagaucgaccggcugaucaccggccggcugcagagccugcagaccuacgugacccagcagcugauccgggccgccgagauccgggccagcgccaaccuggcagccaccaagaugagcgagugcgugcugggccagagcaagcggguggacuuuugcggcaagggcuaccaccugaugagcuucccccagagcgcuccccacggcgugguguuccuccacgugacauacguccccgcccaggagaagaacuucaccaccgcccccgccauuugccacgacggcaaggcccacuucccccgggagggaguguucgugagcaacggcacccacugguucgugacccagcggaacuucuacgagccucagaucaucaccaccgacaacaccuucgugagcggcaacugcgacguggugaucggcaucgugaacaacaccguguacgacccccugcagcccgagcuggacagcuucaaggaggagcuggacaaguacuucaagaaccacaccagcccagacguggaccugggcgacaucagcggcaucaacgccagcguggugaacauccagaaggagaucgaccggcugaacgagguggccaagaaccugaacgagagccugaucgaccugcaggagcugggcaaguacgagcaguacaucaaguggcccugguacaucuggcugggcuucaucgccggccugaucgccaucgugauggugaccaucaugcugugcugcaugaccagcugcuguagcugccugaagggcugcugcagcugcggcagcugcugcaaguucgacgaggacgacagcgagcccgugcugaagggcgugaagcugcacuacaccugaggacuaguuauaagacugacuagcccgaugggccucccaacgggcccuccuccccuccuugcaccgagagaucucaaaggcucuuuucagagccaccaaaaaaaaaaaaaaaaaaaaaaaaaaaaaaaaaaaaaaaaaaaaaaaaaaaaaaaaaaaaaaaaaaaaaaaaaaaaaaaaaaaaaaaaaaaaaaaaaaaaa

SEQ ID NO: 24676 - RNA, 4035 nt, Artificial Sequence
  SARS-CoV-2/Wuhan/WIV05/2019__EPI_ISL_402128 spike protein mRNA gc (1-1273)(K986P_V987P_N501Y_D614G)
aggagaaagcuuaccauguucguguuccuggugcugcugccccuggugagcagccagugcgugaaccugaccacccggacccagcugcccccugccuacaccaacagcuucacccggggcguguacuaccccgacaagguguuccggagcagcgugcugcacagcacccaggaccuguuccugcccuucuucagcaacgugaccugguuccacgccauccacgugagcggcaccaacggcaccaagcgguucgacaacccagugcugcccuucaacgacggcguguacuucgccagcaccgagaagucaaacaucauccggggcuggaucuucggcaccacccuggacagcaagacacagagccugcugaucgugaacaacgccaccaacguggugaucaaggugugcgaguuucaguucugcaacgaccccuuccugggcguguacuaccacaagaacaacaagagcuggauggagagcgaguuccgggucuacagcagcgcuaacaauugcaccuucgaguacgugagccagcccuuccugauggaccucgagggcaagcagggcaacuucaagaaccugcgggaguucguguucaagaacaucgauggcuacuucaagaucuacagcaagcacacccccaucaaccuggugcgggaccugccccagggauucagcgcccuggagccucugguggaccugcccaucggcaucaacaucaccagguuccagacccugcuggcccugcaccggagcuaccugacccccggcgacagcagcagcggcuggaccgccggcgccgccgcauacuacgugggcuaccugcagccacggaccuuccugcugaaguacaacgagaacggcaccaucaccgacgccguggacugcgcccuggacccccugagcgagaccaagugcacccuaaagagcuucaccguggagaagggcaucuaccagaccagcaacuuccgggugcagcccacugagagcaucgugcgguuccccaacauuaccaaccugugucccuucggcgagguguucaacgccacccgguucgccagcguguacgccuggaaccggaagcggaucagcaacugcguggccgacuacagcgugcuguacaacagcgccagcuucagcaccuucaagugcuacggcgugagcccuaccaagcugaacgaccugugcuucaccaacguguacgcugacagcuucgugauccggggcgacgaggugcggcagaucgcccccggccagaccggcaagaucgccgacuacaacuacaagcugcccgacgacuucaccggcugcgugaucgccuggaacagcaacaaccuggacagcaaggugggcggcaacuacaacuaccuguaccggcuguuccguaagagcaaccugaagccauucgagcgggacaucagcaccgagaucuaccaggccggcagcacccccugcaacgguguggagggcuuuaacugcuacuucccccugcagagcuacggcuuccagcccaccuacggcgugggcuaccagcccuaccgggugguggugcugagcuucgagcugcugcacgcccccgccaccgugugcggcccuaaaaagagcaccaaccuggugaagaacaagugcgugaacuucaacuucaauggccugaccggcaccggcgugcugaccgagagcaacaagaaguuccugcccuuccagcaguucggccgggauaucgccgacaccaccgacgcagugcgggacccccagacccuggagauccuggacaucaccccaugcagcuucggcggcgugagcgucaucacccccggcacaaacaccagcaaccagguggccgugcuguaccagggagugaacugcaccgaggugcccguggccauccacgccgaccagcugacccccaccuggcggguguacagcaccggcagcaacguguuccagacccgggccggcugccugaucggcgccgagcacgugaacaacuccuacgagugcgacauccccaucggcgcuggcaucugcgccagcuaccagacccagaccaacagcccccggcgggcccggagcguggccagccagagcaucaucgccuacaccaugagcuuaggcgccgagaacagcguggccuacagcaacaacagcaucgcgaucccuaccaacuucaccaucagcgugaccaccgagauacugcccgugagcaugaccaagaccagcguggacuguaccauguacaucugcggcgacagcaccgagugcagcaaccugcugcugcaguacggcagcuucugcacccagcugaaccgggcccugaccggcaucgccguggagcaggacaagaacacccaagagguguucgcccaggugaagcagaucuacaagacucccccaaucaaggacuucggcggcuucaacuucagccagauccugcccgaccccagcaagcccagcaagcggagcuucaucgaggaccugcuguucaacaaggugacccuggccgacgccggcuucaucaagcaguacggcgacugccugggggauaucgccgcucgggaccugaucugcgcccagaaguucaacggccugaccgugcugcccccucugcugaccgacgagaugaucgcccaguacaccagcgcccugcuugccggcaccaucaccagcggcuggaccuucggcgccggcgcagcccugcagauccccuucgccaugcagauggccuaccgguucaacggcaucggcgugacccagaacgugcuguacgagaaccagaagcugaucgccaaccaguucaacagcgccaucggcaagauccaggacagccugagcagcaccgccagcgcccugggcaagcugcaggacguggugaaccagaacgcucaggcccugaacacccuggugaagcagcugagcagcaacuucggcgccaucagcucagugcugaacgacauccugagcaggcuggaucccccagaggccgaggugcagaucgaccggcugaucaccggccggcugcagagccugcagaccuacgugacccagcagcugauccgggccgccgagauccgggccagcgccaaucuggcagccaccaagaugagcgagugcgugcugggccagagcaagcggguggacuuuugcggcaagggcuaccaccugaugagcuucccccagagcgcuccccacggcgugguguuccuccacgugacauacguccccgcccaggagaagaacuucaccaccgcccccgccauuugccacgacggcaaggcccacuucccccgggagggaguguucgugagcaacggcacccacugguucgugacccagcggaacuucuacgagccucagaucaucaccaccgacaacaccuucgugagcggcaacugcgacguggugaucggcaucgugaacaacaccguguacgacccccugcagcccgagcuggacagcuucaaggaggagcuggacaaguacuucaagaaccacaccagcccagacguggaccugggcgacaucagcggcaucaacgccagcguggugaacauccagaaggagaucgaccggcugaacgagguggccaagaaccugaacgagagccugaucgaccugcaggagcugggcaaguacgagcaguacaucaaguggcccugguacaucuggcugggcuucaucgccggccugaucgccaucgugauggugaccaucaugcugugcugcaugaccagcugcuguagcugccugaagggcugcugcagcugcggcagcugcugcaaguucgacgaggacgacagcgagcccgugcugaagggcgugaagcugcacuacaccugaggacuaguuauaagacugacuagcccgaugggccucccaacgggcccuccuccccuccuugcaccgagagaucucaaaggcucuuuucagagccaccaaaaaaaaaaaaaaaaaaaaaaaaaaaaaaaaaaaaaaaaaaaaaaaaaaaaaaaaaaaaaaaaaaaaaaaaaaaaaaaaaaaaaaaaaaaaaaaaaaaaa

SEQ ID NO: 24677 - RNA, 4029 nt, Artificial Sequence
  SARS-CoV-2/Wuhan/WIV05/2019__EPI_ISL_402128 spike protein mRNA gc (1-1273)(K986P_V987P_H69del_V70del_D614G)
aggagaaagcuuaccauguucguguuccuggugcugcugccccuggugagcagccagugcgugaaccugaccacccggacccagcugcccccugccuacaccaacagcuucacccggggcguguacuaccccgacaagguguuccggagcagcgugcugcacagcacccaggaccuguuccugcccuucuucagcaacgugaccugguuccacgccaucagcggcaccaacggcaccaagcgguucgacaacccagugcugcccuucaacgacggcguguacuucgccagcaccgagaagucaaacaucauccggggcuggaucuucggcaccacccuggacagcaagacacagagccugcugaucgugaacaacgccaccaacguggugaucaaggugugcgaguuucaguucugcaacgaccccuuccugggcguguacuaccacaagaacaacaagagcuggauggagagcgaguuccggguguacagcagcgcuaacaauugcaccuucgaguacgucagccagcccuuccugauggaccucgagggcaagcagggcaacuucaagaaccugcgggaguucguguucaagaacaucgauggcuacuucaagaucuacagcaagcacacccccaucaaccuggugcgggaccugccccagggauucagcgcccuggagccucugguggaccugcccaucggcaucaacaucaccagguuccagacccugcuggcccugcaccggagcuaccugacccccggcgacagcagcagcggcuggaccgccggcgccgccgcauacuacgugggcuaccugcagccacggaccuuccugcugaaguacaacgagaacggcaccaucaccgacgccguggacugcgcccuggacccccugagcgagaccaagugcacccuaaagagcuucaccguggagaagggcaucuaccagaccagcaacuuccgggugcagcccacugagagcaucgugcgguuccccaacauuaccaaccugugucccuucggcgagguguucaacgccacccgguucgccagcguguacgccuggaaccggaagcggaucagcaacugcguggccgacuacagcgugcuguacaacagcgccagcuucagcaccuucaagugcuacggcgugagcccuaccaagcugaacgaccugugcuucaccaacguguacgcugacagcuucgugauccggggcgacgaggugcggcagaucgcccccggccagaccggcaagaucgccgacuacaacuacaagcugcccgacgacuucaccggcugcgugaucgccuggaacagcaacaaccuggacagcaaggugggcggcaacuacaacuaccuguaccggcuguuccguaagagcaaccugaagccauucgagcgggacaucagcaccgagaucuaccaggccggcagcacccccugcaacgguguggagggcuuuaacugcuacuucccccugcagagcuacggcuuccagcccaccaacggcgugggcuaccagcccuaccgggugguggugcugagcuucgagcugcugcacgcccccgccaccgugugcggcccuaaaaagagcaccaaccuggugaagaacaagugcgugaacuucaauuucaacggccugaccggcaccggcgugcugaccgagagcaacaagaaguuccugcccuuccagcaguucggccgggauaucgccgacaccaccgacgcagugcgggacccccagacccuggagauccuggacaucaccccaugcagcuucggcggcgugagcgugaucacccccggcacaaacaccagcaaccaggucgccgugcuguaccagggagugaacugcaccgaggugcccguggccauccacgccgaccagcugacccccaccuggcggguguacagcaccggcagcaacguguuccagacccgggccggcugccugaucggcgccgagcacgugaacaacuccuacgagugcgacauccccaucggcgcuggcaucugcgccagcuaccagacccagaccaacagcccccggcgggcccggagcguggccagccagagcaucaucgccuacaccaugagcuuaggcgccgagaacagcguggccuacagcaacaacagcaucgcgaucccuaccaacuucaccaucagcgugaccaccgagauacugcccgugagcaugaccaagaccagcguggacuguaccauguacaucugcggcgacagcaccgagugcagcaaccugcugcugcaguacggcagcuucugcacccagcugaaccgggcccugaccggcaucgccguggagcaggacaagaacacccaagagguguucgcccaggugaagcagaucuacaagacucccccaaucaaggacuucggcggcuucaacuucagccagauccugcccgaccccagcaagcccagcaagcggagcuucaucgaggaccugcuguucaacaaggugacccuggccgacgccggcuucaucaagcaguacggcgacugccugggggauaucgccgcucgggaccugaucugcgcccagaaguucaacggccugaccgugcugcccccucugcugaccgacgagaugaucgcccaguacaccagcgcccugcuugccggcaccaucaccagcggcuggaccuucggcgccggcgcagcccugcagauccccuucgccaugcagauggccuaccgguucaacggcaucggcgugacccagaacgugcuguacgagaaccagaagcugaucgccaaccaguucaacagcgccaucggcaagauccaggacagccugagcagcaccgccagcgcccugggcaagcugcaggacguggugaaccagaacgcucaggcccugaacacccuggugaagcagcugagcagcaacuucggcgccaucagcucagugcugaaugacauccugagcaggcuggaucccccagaggccgaggugcagaucgaccggcugaucaccggccggcugcagagccugcagaccuacgugacccagcagcugauccgggccgccgagauccgggccagcgccaaccuggcagccaccaagaugagcgagugcgugcugggccagagcaagcggguggacuuuugcggcaagggcuaccaccugaugagcuucccccagagcgcuccccacggcgugguguuccuccacgugacauacgugcccgcccaggagaagaacuucaccaccgcccccgccauuugccacgacggcaaggcccacuucccccgggagggagucuucgugagcaacggcacccacugguucgugacccagcggaacuucuacgagccucagaucaucaccaccgacaacaccuucgugagcggcaacugcgacguggugaucggcaucgugaacaacaccguguacgacccccugcagcccgagcuggacagcuucaaggaggagcuggacaaguacuucaagaaccacaccagcccagacguggaccugggcgacaucagcggcaucaacgccagcguggugaacauccagaaggagaucgaccggcugaacgagguggccaagaaccugaacgagagccugaucgaccugcaggagcugggcaaguacgagcaguacaucaaguggcccugguacaucuggcugggcuucaucgccggccugaucgccaucgugauggugaccaucaugcugugcugcaugaccagcugcuguagcugccugaagggcugcugcagcugcggcagcugcugcaaguucgacgaggacgacagcgagcccgugcugaagggcgugaagcugcacuacaccugaggacuaguuauaagacugacuagcccgaugggccucccaacgggcccuccuccccuccuugcaccgagagaucucaaaggcucuuuucagagccaccaaaaaaaaaaaaaaaaaaaaaaaaaaaaaaaaaaaaaaaaaaaaaaaaaaaaaaaaaaaaaaaaaaaaaaaaaaaaaaaaaaaaaaaaaaaaaaaaaaaaa

SEQ ID NO: 24678 - RNA, 4035 nt, Artificial Sequence
  SARS-CoV-2/Wuhan/WIV05/2019__EPI_ISL_402128 spike protein mRNA gc (1-1273)(K986P_V987P_Y453F_D614G)
aggagaaagcuuaccauguucguguuccuggugcugcugccccuggugagcagccagugcgugaaccugaccacccggacccagcugcccccugccuacaccaacagcuucacccggggcguguacuaccccgacaagguguuccggagcagcgugcugcacagcacccaggaccuguuccugcccuucuucagcaacgugaccugguuccacgccauccacgugagcggcaccaacggcaccaagcgguucgacaacccagugcugcccuucaacgacggcguguacuucgccagcaccgagaagucaaacaucauccggggcuggaucuucggcaccacccuggacagcaagacacagagccugcugaucgugaacaacgccaccaacguggugaucaaggugugcgaguuucaguucugcaacgaccccuuccugggcguguacuaccacaagaacaacaagagcuggauggagagcgaguuccgggucuacagcagcgcuaacaauugcaccuucgaguacgugagccagcccuuccugauggaccucgagggcaagcagggcaacuucaagaaccugcgggaguucguguucaagaacaucgauggcuacuucaagaucuacagcaagcacacccccaucaaccuggugcgggaccugccccagggauucagcgcccuggagccucugguggaccugcccaucggcaucaacaucaccagguuccagacccugcuggcccugcaccggagcuaccugacccccggcgacagcagcagcggcuggaccgccggcgccgccgcauacuacgugggcuaccugcagccacggaccuuccugcugaaguacaacgagaacggcaccaucaccgacgccguggacugcgcccuggacccccugagcgagaccaagugcacccuaaagagcuucaccguggagaagggcaucuaccagaccagcaacuuccgggugcagcccacugagagcaucgugcgguuccccaacauuaccaaccugugucccuucggcgagguguucaacgccacccgguucgccagcguguacgccuggaaccggaagcggaucagcaacugcguggccgacuacagcgugcuguacaacagcgccagcuucagcaccuucaagugcuacggcgugagcccuaccaagcugaacgaccugugcuucaccaacguguacgcugacagcuucgugauccggggcgacgaggugcggcagaucgcccccggccagaccggcaagaucgccgacuacaacuacaagcugcccgacgacuucaccggcugcgugaucgccuggaacagcaacaaccuggacagcaaggugggcggcaacuacaacuaccuguuccggcuguuccguaagagcaaccugaagccauuugagcgggacaucagcaccgagaucuaccaggccggcagcacccccugcaacgguguggagggcuucaacugcuacuucccccugcagagcuacggcuuccagcccaccaacggcgugggcuaccagcccuaccgggugguggugcugagcuucgagcugcugcacgcccccgccaccgugugcggcccuaaaaagagcaccaaccuggugaagaacaagugcgugaacuucaauuucaacggccugaccggcaccggcgugcugaccgagagcaacaagaaguuccugcccuuccagcaguucggccgggauaucgccgacaccaccgacgcagugcgggacccccagacccuggagauccuggacaucaccccaugcagcuucggcggcgugagcgucaucacccccggcacaaacaccagcaaccagguggccgugcuguaccagggagugaacugcaccgaggugcccguggccauccacgccgaccagcugacccccaccuggcggguguacagcaccggcagcaacguguuccagacccgggccggcugccugaucggcgccgagcacgugaacaacuccuacgagugcgacauccccaucggcgcuggcaucugcgccagcuaccagacccagaccaacagcccccggcgggcccggagcguggccagccagagcaucaucgccuacaccaugagcuuaggcgccgagaacagcguggccuacagcaacaacagcaucgcgaucccuaccaacuucaccaucagcgugaccaccgagauacugcccgugagcaugaccaagaccagcguggacuguaccauguacaucugcggcgacagcaccgagugcagcaaccugcugcugcaguacggcagcuucugcacccagcugaaccgggcccugaccggcaucgccguggagcaggacaagaacacccaagagguguucgcccaggugaagcagaucuacaagacucccccaaucaaggacuucggcggcuucaacuucagccagauccugcccgaccccagcaagcccagcaagcggagcuucaucgaggaccugcuguucaacaaggugacccuggccgacgccggcuucaucaagcaguacggcgacugccugggggauaucgccgcucgggaccugaucugcgcccagaaguucaacggccugaccgugcugcccccucugcugaccgacgagaugaucgcccaguacaccagcgcccugcuugccggcaccaucaccagcggcuggaccuucggcgccggcgcagcccugcagauccccuucgccaugcagauggccuaccgguucaacggcaucggcgugacccagaacgugcuguacgagaaccagaagcugaucgccaaccaguucaacagcgccaucggcaagauccaggacagccugagcagcaccgccagcgcccugggcaagcugcaggacguggugaaccagaacgcucaggcccugaacacccuggugaagcagcugagcagcaacuuuggcgccaucagcucagugcugaaugacauccugagcaggcuggaucccccagaggccgaggugcagaucgaccggcugaucaccggccggcugcagagccugcagaccuacgugacccagcagcugauccgggccgccgagauccgggccagcgccaaccuggcagccaccaagaugagcgagugcgugcugggccagagcaagcggguggacuucugcggcaagggcuaccaccugaugagcuucccccagagcgcuccccacggcgugguguuccuccacgugacauacguccccgcccaggagaagaacuucaccaccgcccccgccauuugccacgacggcaaggcccacuucccccgggagggaguguucgugagcaacggcacccacugguucgugacccagcggaacuucuacgagccucagaucaucaccaccgacaacaccuucgugagcggcaacugcgacguggugaucggcaucgugaacaacaccguguacgacccccugcagcccgagcuggacagcuucaaggaggagcuggacaaguacuucaagaaccacaccagcccagacguggaccugggcgacaucagcggcaucaacgccagcguggugaacauccagaaggagaucgaccggcugaacgagguggccaagaaccugaacgagagccugaucgaccugcaggagcugggcaaguacgagcaguacaucaaguggcccugguacaucuggcugggcuucaucgccggccugaucgccaucgugauggugaccaucaugcugugcugcaugaccagcugcuguagcugccugaagggcugcugcagcugcggcagcugcugcaaguucgacgaggacgacagcgagcccgugcugaagggcgugaagcugcacuacaccugaggacuaguuauaagacugacuagcccgaugggccucccaacgggcccuccuccccuccuugcaccgagagaucucaaaggcucuuuucagagccaccaaaaaaaaaaaaaaaaaaaaaaaaaaaaaaaaaaaaaaaaaaaaaaaaaaaaaaaaaaaaaaaaaaaaaaaaaaaaaaaaaaaaaaaaaaaaaaaaaaaaa

SEQ ID NO: 24679 - RNA, 4035 nt, Artificial Sequence
  SARS-CoV-2/Wuhan/WIV05/2019__EPI_ISL_402128 spike protein mRNA gc (1-1273)(K986P_V987P_D614G_I692V)
aggagaaagcuuaccauguucguguuccuggugcugcugccccuggugagcagccagugcgugaaccugaccacccggacccagcugcccccugccuacaccaacagcuucacccggggcguguacuaccccgacaagguguuccggagcagcgugcugcacagcacccaggaccuguuccugcccuucuucagcaacgugaccugguuccacgccauccacgugagcggcaccaacggcaccaagcgguucgacaacccagugcugcccuucaacgacggcguguacuucgccagcaccgagaagucaaacaucauccggggcuggaucuucggcaccacccuggacagcaagacacagagccugcugaucgugaacaacgccaccaacguggugaucaaggugugcgaguuucaguucugcaacgaccccuuccugggcguguacuaccacaagaacaacaagagcuggauggagagcgaguuccgggucuacagcagcgcuaacaauugcaccuucgaguacgugagccagcccuuccugauggaccucgagggcaagcagggcaacuucaagaaccugcgggaguucguguucaagaacaucgauggcuacuucaagaucuacagcaagcacacccccaucaaccuggugcgggaccugccccagggauucagcgcccuggagccucugguggaccugcccaucggcaucaacaucaccagguuccagacccugcuggcccugcaccggagcuaccugacccccggcgacagcagcagcggcuggaccgccggcgccgccgcauacuacgugggcuaccugcagccacggaccuuccugcugaaguacaacgagaacggcaccaucaccgacgccguggacugcgcccuggacccccugagcgagaccaagugcacccuaaagagcuucaccguggagaagggcaucuaccagaccagcaacuuccgggugcagcccacugagagcaucgugcgguuccccaacauuaccaaccugugucccuucggcgagguguucaacgccacccgguucgccagcguguacgccuggaaccggaagcggaucagcaacugcguggccgacuacagcgugcuguacaacagcgccagcuucagcaccuucaagugcuacggcgugagcccuaccaagcugaacgaccugugcuucaccaacguguacgcugacagcuucgugauccggggcgacgaggugcggcagaucgcccccggccagaccggcaagaucgccgacuacaacuacaagcugcccgacgacuucaccggcugcgugaucgccuggaacagcaacaaccuggacagcaaggugggcggcaacuacaacuaccuguaccggcuguuccguaagagcaaccugaagccauucgagcgggacaucagcaccgagaucuaccaggccggcagcacccccugcaacgguguggagggcuuuaacugcuacuucccccugcagagcuacggcuuccagcccaccaacggcgugggcuaccagcccuaccgggugguggugcugagcuucgagcugcugcacgcccccgccaccgugugcggcccuaaaaagagcaccaaccuggugaagaacaagugcgugaacuucaauuucaacggccugaccggcaccggcgugcugaccgagagcaacaagaaguuccugcccuuccagcaguucggccgggauaucgccgacaccaccgacgcagugcgggacccccagacccuggagauccuggacaucaccccaugcagcuucggcggcgugagcgucaucacccccggcacaaacaccagcaaccagguggccgugcuguaccagggagugaacugcaccgaggugcccguggccauccacgccgaccagcugacccccaccuggcggguguacagcaccggcagcaacguguuccagacccgggccggcugccugaucggcgccgagcacgugaacaacuccuacgagugcgacauccccaucggcgcuggcaucugcgccagcuaccagacccagaccaacagcccccggcgggcccggagcguggccagccagagcgugaucgccuacaccaugagcuuaggcgccgagaacagcguggccuacagcaacaacagcaucgcgaucccuaccaacuucaccaucagcgugaccaccgagauccugcccgugagcaugaccaagaccagcguggacuguaccauguacauaugcggcgacagcaccgagugcagcaaccugcugcugcaguacggcagcuucugcacccagcugaaccgggcccugaccggcaucgccguggagcaggacaagaacacccaagagguguucgcccaggugaagcagaucuacaagacucccccaaucaaggacuucggcggcuucaacuucagccagauccugcccgaccccagcaagcccagcaagcggagcuucaucgaggaccugcuguucaacaaggugacccuggccgacgccggcuucaucaagcaguacggcgacugccugggggauaucgccgcucgggaccugaucugcgcccagaaguucaacggccugaccgugcugcccccucugcugaccgacgagaugaucgcccaguacaccagcgcccugcuugccggcaccaucaccagcggcuggaccuucggcgccggcgcagcccugcagauccccuucgccaugcagauggccuaccgguucaacggcaucggcgugacccagaacgugcuguacgagaaccagaagcugaucgccaaccaguucaacagcgccaucggcaagauccaggacagccugagcagcaccgccagcgcccugggcaagcugcaggacguggugaaccagaacgcucaggcccugaacacccuggugaagcagcugagcagcaacuucggcgccaucagcucagugcugaaugacauccugagcaggcuggaucccccagaggccgaggugcagaucgaccggcugaucaccggccggcugcagagccugcagaccuacgugacccagcagcugauccgggccgccgagauccgggccagcgccaaccuggcagccaccaagaugagcgagugcgugcugggccagagcaagcggguggacuuuugcggcaagggcuaccaccugaugagcuucccccagagcgcuccccacggcgugguguuccuccacgucacauacgugcccgcccaggagaagaacuucaccaccgcccccgccaucugccacgacggcaaggcccacuucccccgggagggaguguucgugagcaacggcacccacugguucgugacccagcggaacuucuacgagccucagauuaucaccaccgacaacaccuucgugagcggcaacugcgacguggugaucggcaucgugaacaacaccguguacgacccccugcagcccgagcuggacagcuucaaggaggagcuggacaaguacuucaagaaccacaccagcccagacguggaccugggcgacaucagcggcaucaacgccagcguggugaacauccagaaggagaucgaccggcugaacgagguggccaagaaccugaacgagagccugaucgaccugcaggagcugggcaaguacgagcaguacaucaaguggcccugguacaucuggcugggcuucaucgccggccugaucgccaucgugauggugaccaucaugcugugcugcaugaccagcugcuguagcugccugaagggcugcugcagcugcggcagcugcugcaaguucgacgaggacgacagcgagcccgugcugaagggcgugaagcugcacuacaccugaggacuaguuauaagacugacuagcccgaugggccucccaacgggcccuccuccccuccuugcaccgagagaucucaaaggcucuuuucagagccaccaaaaaaaaaaaaaaaaaaaaaaaaaaaaaaaaaaaaaaaaaaaaaaaaaaaaaaaaaaaaaaaaaaaaaaaaaaaaaaaaaaaaaaaaaaaaaaaaaaaaa

SEQ ID NO: 24680 - RNA, 4035 nt, Artificial Sequence
  SARS-CoV-2/Wuhan/WIV05/2019__EPI_ISL_402128 spike protein mRNA gc (1-1273)(K986P_V987P_D614G_M1229I)
aggagaaagcuuaccauguucguguuccuggugcugcugccccuggugagcagccagugcgugaaccugaccacccggacccagcugcccccugccuacaccaacagcuucacccggggcguguacuaccccgacaagguguuccggagcagcgugcugcacagcacccaggaccuguuccugcccuucuucagcaacgugaccugguuccacgccauccacgugagcggcaccaacggcaccaagcgguucgacaacccagugcugcccuucaacgacggcguguacuucgccagcaccgagaagucaaacaucauccggggcuggaucuucggcaccacccuggacagcaagacacagagccugcugaucgugaacaacgccaccaacguggugaucaaggugugcgaguuucaguucugcaacgaccccuuccugggcguguacuaccacaagaacaacaagagcuggauggagagcgaguuccgggucuacagcagcgcuaacaauugcaccuucgaguacgugagccagcccuuccugauggaccucgagggcaagcagggcaacuucaagaaccugcgggaguucguguucaagaacaucgauggcuacuucaagaucuacagcaagcacacccccaucaaccuggugcgggaccugccccagggauucagcgcccuggagccucugguggaccugcccaucggcaucaacaucaccagguuccagacccugcuggcccugcaccggagcuaccugacccccggcgacagcagcagcggcuggaccgccggcgccgccgcauacuacgugggcuaccugcagccacggaccuuccugcugaaguacaacgagaacggcaccaucaccgacgccguggacugcgcccuggacccccugagcgagaccaagugcacccuaaagagcuucaccguggagaagggcaucuaccagaccagcaacuuccgggugcagcccacugagagcaucgugcgguuccccaacauuaccaaccugugucccuucggcgagguguucaacgccacccgguucgccagcguguacgccuggaaccggaagcggaucagcaacugcguggccgacuacagcgugcuguacaacagcgccagcuucagcaccuucaagugcuacggcgugagcccuaccaagcugaacgaccugugcuucaccaacguguacgcugacagcuucgugauccggggcgacgaggugcggcagaucgcccccggccagaccggcaagaucgccgacuacaacuacaagcugcccgacgacuucaccggcugcgugaucgccuggaacagcaacaaccuggacagcaaggugggcggcaacuacaacuaccuguaccggcuguuccguaagagcaaccugaagccauucgagcgggacaucagcaccgagaucuaccaggccggcagcacccccugcaacgguguggagggcuuuaacugcuacuucccccugcagagcuacggcuuccagcccaccaacggcgugggcuaccagcccuaccgggugguggugcugagcuucgagcugcugcacgcccccgccaccgugugcggcccuaaaaagagcaccaaccuggugaagaacaagugcgugaacuucaauuucaacggccugaccggcaccggcgugcugaccgagagcaacaagaaguuccugcccuuccagcaguucggccgggauaucgccgacaccaccgacgcagugcgggacccccagacccuggagauccuggacaucaccccaugcagcuucggcggcgugagcgucaucacccccggcacaaacaccagcaaccagguggccgugcuguaccagggagugaacugcaccgaggugcccguggccauccacgccgaccagcugacccccaccuggcggguguacagcaccggcagcaacguguuccagacccgggccggcugccugaucggcgccgagcacgugaacaacuccuacgagugcgacauccccaucggcgcuggcaucugcgccagcuaccagacccagaccaacagcccccggcgggcccggagcguggccagccagagcaucaucgccuacaccaugagcuuaggcgccgagaacagcguggccuacagcaacaacagcaucgcgaucccuaccaacuucaccaucagcgugaccaccgagauacugcccgugagcaugaccaagaccagcguggacuguaccauguacaucugcggcgacagcaccgagugcagcaaccugcugcugcaguacggcagcuucugcacccagcugaaccgggcccugaccggcaucgccguggagcaggacaagaacacccaagagguguucgcccaggugaagcagaucuacaagacucccccaaucaaggacuucggcggcuucaacuucagccagauccugcccgaccccagcaagcccagcaagcggagcuucaucgaggaccugcuguucaacaaggugacccuggccgacgccggcuucaucaagcaguacggcgacugccugggggauaucgccgcucgggaccugaucugcgcccagaaguucaacggccugaccgugcugcccccucugcugaccgacgagaugaucgcccaguacaccagcgcccugcuugccggcaccaucaccagcggcuggaccuucggcgccggcgcagcccugcagauccccuucgccaugcagauggccuaccgguucaacggcaucggcgugacccagaacgugcuguacgagaaccagaagcugaucgccaaccaguucaacagcgccaucggcaagauccaggacagccugagcagcaccgccagcgcccugggcaagcugcaggacguggugaaccagaacgcucaggcccugaacacccuggugaagcagcugagcagcaacuucggcgccaucagcucagugcugaaugacauccugagcaggcuggaucccccagaggccgaggugcagaucgaccggcugaucaccggccggcugcagagccugcagaccuacgugacccagcagcugauccgggccgccgagauccgggccagcgccaaccuggcagccaccaagaugagcgagugcgugcugggccagagcaagcggguggacuuuugcggcaagggcuaccaccugaugagcuucccccagagcgcuccccacggcgugguguuccuccacgugacauacguccccgcccaggagaagaacuucaccaccgcccccgccauuugccacgacggcaaggcccacuucccccgggagggaguguucgugagcaacggcacccacugguucgugacccagcggaacuucuacgagccucagaucaucaccaccgacaacaccuucgugagcggcaacugcgacguggugaucggcaucgugaacaacaccguguacgacccccugcagcccgagcuggacagcuucaaggaggagcuggacaaguacuucaagaaccacaccagcccagacguggaccugggcgacaucagcggcaucaacgccagcguggugaacauccagaaggagaucgaccggcugaacgagguggccaagaaccugaacgagagccugaucgaccugcaggagcugggcaaguacgagcaguacaucaaguggcccugguacaucuggcugggcuucaucgccggccugaucgccaucgugaucgugaccaucaugcugugcugcaugaccagcugcuguagcugccugaagggcugcugcagcugcggcagcugcugcaaguucgacgaggacgacagcgagcccgugcugaagggcgugaagcugcacuacaccugaggacuaguuauaagacugacuagcccgaugggccucccaacgggcccuccuccccuccuugcaccgagagaucucaaaggcucuuuucagagccaccaaaaaaaaaaaaaaaaaaaaaaaaaaaaaaaaaaaaaaaaaaaaaaaaaaaaaaaaaaaaaaaaaaaaaaaaaaaaaaaaaaaaaaaaaaaaaaaaaaaaa

SEQ ID NO: 24681 - RNA, 4029 nt, Artificial Sequence
  SARS-CoV-2/Wuhan/WIV05/2019__EPI_ISL_402128 spike protein mRNA gc (1-1273)(K986P_V987P_H69del_V70del_A222V_Y453F_S477N_D614G_I692V)
aggagaaagcuuaccauguucguguuccuggugcugcugccccuggugagcagccagugcgugaaccugaccacccggacccagcugcccccugccuacaccaacagcuucacccggggcguguacuaccccgacaagguguuccggagcagcgugcugcacagcacccaggaccuguuccugcccuucuucagcaacgugaccugguuccacgccaucagcggcaccaacggcaccaagcgguucgacaacccagugcugcccuucaacgacggcguguacuucgccagcaccgagaagucaaacaucauccggggcuggaucuucggcaccacccuggacagcaagacacagagccugcugaucgugaacaacgccaccaacguggugaucaaggugugcgaguuucaguucugcaacgaccccuuccugggcguguacuaccacaagaacaacaagagcuggauggagagcgaguuccggguguacagcagcgcuaacaauugcaccuucgaguacgucagccagcccuuccugauggaccucgagggcaagcagggcaacuucaagaaccugcgggaguucguguucaagaacaucgauggcuacuucaagaucuacagcaagcacacccccaucaaccuggugcgggaccugccccagggauucagcgugcuggagccucugguggaccugcccaucggcaucaacaucaccagguuccagacccugcuggcccugcaccggagcuaccugacccccggcgacagcagcagcggcuggaccgccggcgccgccgccuacuacgugggcuaccugcagccacggaccuuccugcugaaguacaacgagaacggcaccaucaccgacgcaguggacugcgcccuggacccccugagcgagaccaagugcacccuaaagagcuucaccguggagaagggcaucuaccagaccagcaacuuccgggugcagcccacugagagcaucgugcgguuccccaacauuaccaaccugugucccuucggcgagguguucaacgccacccgguucgccagcguguacgccuggaaccggaagcggaucagcaacugcguggccgacuacagcgugcuguacaacagcgccagcuucagcaccuucaagugcuacggcgugagcccuaccaagcugaacgaccugugcuucaccaacguguacgccgacagcuucgugauccggggcgacgaggugcggcagaucgcucccggccagaccggcaagaucgccgacuacaacuacaagcugcccgacgacuucaccggcugcgugaucgccuggaacagcaacaaccuggacagcaaggugggcggcaacuacaacuaccuguuccggcuguuccguaagagcaaccugaagccauuugagcgggacaucagcaccgagaucuaccaggccggcaacacccccugcaacgguguggagggcuucaacugcuacuucccccugcagagcuacggcuuccagcccaccaacggcgugggcuaccagcccuaccgggugguggugcugagcuucgagcugcugcacgcccccgccaccgugugcggcccuaaaaagagcaccaaccuggugaagaacaagugcgugaauuucaacuucaacggccugaccggcaccggcgugcugaccgagagcaacaagaaguuccugcccuuccagcaguucggccgggauaucgccgacaccaccgacgccgugcgggacccccagacccuggagauccuggacaucaccccaugcagcuucggcggcgugagcgucaucacccccggcacaaacaccagcaaccagguggcagugcuguaccagggagugaacugcaccgaggugcccguggccauccacgccgaccagcugacccccaccuggcggguguacagcaccggcagcaacguguuccagacccgggccggcugccugaucggcgccgagcacgugaacaacagcuacgagugcgacauccccaucggcgccggcaucugcgcuuccuaccagacccagaccaacagcccccggcgggcccggagcguggccagccagagcgugaucgccuacaccaugagcuuaggcgccgagaacagcguggccuacagcaacaacagcaucgccaucccuaccaacuucaccaucagcgugaccaccgagauccugcccgugagcaugaccaagaccagcguggacuguaccauguacauaugcggcgacagcaccgagugcagcaaccugcugcugcaguacggcagcuucugcacccagcugaaccgggcgcugaccggcaucgccguggagcaggacaagaacacccaagagguguucgcccaggugaagcagaucuacaagacucccccaaucaaggacuucggcggcuucaacuucagccagauccugcccgaccccagcaagcccagcaagcggagcuucaucgaggaccugcuguucaacaaggugacccuggccgacgccggcuucaucaagcaguacggcgacugccugggggauaucgccgcccgggaccugaucugcgcucagaaguucaacggccugaccgugcugcccccucugcugaccgacgagaugaucgcccaguacaccagcgcccugcuugccggcaccaucaccagcggcuggaccuucggcgccggcgccgcacugcagauccccuucgccaugcagauggccuaccgguucaacggcaucggcgugacccagaacgugcuguacgagaaccagaagcugaucgccaaccaguucaacagcgccaucggcaagauccaggacagccugagcagcaccgccagcgcccugggcaagcugcaggacguggugaaccagaacgcccaggcucugaacacccuggugaagcagcugagcagcaauuuuggcgccaucagcagcgugcugaacgacauccugucaaggcuggaucccccagaggccgaggugcagaucgaccggcugaucaccggccggcugcagagccugcagaccuacgugacccagcagcugauccgggccgccgagauccgggccagcgccaaccuggccgcaaccaagaugagcgagugcgugcugggccagagcaagcggguggacuucugcggcaagggcuaccaccugaugagcuucccccagagcgcuccccacggcgugguguuccuccacgucacauacgugcccgcccaggagaagaacuucaccaccgcccccgccaucugccacgacggcaaggcccacuucccccgggagggaguguucgugagcaacggcacccacugguucgugacccagcggaacuucuacgagccucagauuaucaccaccgacaacaccuucgugagcggcaacugcgacguggugaucggcaucgugaacaacaccguguacgacccccugcagcccgagcuggacagcuucaaggaggagcuggacaaguacuucaagaaccacaccagcccagacguggaccugggcgacaucagcggcaucaacgccagcguggugaacauccagaaggagaucgaccggcugaacgagguggccaagaaccugaacgagagccugaucgaccugcaggagcugggcaaguacgagcaguacaucaaguggcccugguacaucuggcugggcuucaucgccggccugaucgccaucgugauggugaccaucaugcugugcugcaugaccagcugcuguagcugccugaagggcugcugcagcugcggcagcugcugcaaguucgacgaggacgacagcgagcccgugcugaagggcgugaagcugcacuacaccugaggacuaguuauaagacugacuagcccgaugggccucccaacgggcccuccuccccuccuugcaccgagagaucucaaaggcucuuuucagagccaccaaaaaaaaaaaaaaaaaaaaaaaaaaaaaaaaaaaaaaaaaaaaaaaaaaaaaaaaaaaaaaaaaaaaaaaaaaaaaaaaaaaaaaaaaaaaaaaaaaaaa

SEQ ID NO: 24682 - RNA, 4029 nt, Artificial Sequence
  SARS-CoV-2/Wuhan/WIV05/2019__EPI_ISL_402128 spike protein mRNA gc (1-1273)(K986P_V987P_H69del_V70del_Y453F_D614G_I692V_M1229I)
aggagaaagcuuaccauguucguguuccuggugcugcugccccuggugagcagccagugcgugaaccugaccacccggacccagcugcccccugccuacaccaacagcuucacccggggcguguacuaccccgacaagguguuccggagcagcgugcugcacagcacccaggaccuguuccugcccuucuucagcaacgugaccugguuccacgccaucagcggcaccaacggcaccaagcgguucgacaacccagugcugcccuucaacgacggcguguacuucgccagcaccgagaagucaaacaucauccggggcuggaucuucggcaccacccuggacagcaagacacagagccugcugaucgugaacaacgccaccaacguggugaucaaggugugcgaguuucaguucugcaacgaccccuuccugggcguguacuaccacaagaacaacaagagcuggauggagagcgaguuccggguguacagcagcgcuaacaauugcaccuucgaguacgucagccagcccuuccugauggaccucgagggcaagcagggcaacuucaagaaccugcgggaguucguguucaagaacaucgauggcuacuucaagaucuacagcaagcacacccccaucaaccuggugcgggaccugccccagggauucagcgcccuggagccucugguggaccugcccaucggcaucaacaucaccagguuccagacccugcuggcccugcaccggagcuaccugacccccggcgacagcagcagcggcuggaccgccggcgccgccgcauacuacgugggcuaccugcagccacggaccuuccugcugaaguacaacgagaacggcaccaucaccgacgccguggacugcgcccuggacccccugagcgagaccaagugcacccuaaagagcuucaccguggagaagggcaucuaccagaccagcaacuuccgggugcagcccacugagagcaucgugcgguuccccaacauuaccaaccugugucccuucggcgagguguucaacgccacccgguucgccagcguguacgccuggaaccggaagcggaucagcaacugcguggccgacuacagcgugcuguacaacagcgccagcuucagcaccuucaagugcuacggcgugagcccuaccaagcugaacgaccugugcuucaccaacguguacgcugacagcuucgugauccggggcgacgaggugcggcagaucgcccccggccagaccggcaagaucgccgacuacaacuacaagcugcccgacgacuucaccggcugcgugaucgccuggaacagcaacaaccuggacagcaaggugggcggcaacuacaacuaccuguuccggcuguuccguaagagcaaccugaagccauuugagcgggacaucagcaccgagaucuaccaggccggcagcacccccugcaacgguguggagggcuucaacugcuacuucccccugcagagcuacggcuuccagcccaccaacggcgugggcuaccagcccuaccgggugguggugcugagcuucgagcugcugcacgcccccgccaccgugugcggcccuaaaaagagcaccaaccuggugaagaacaagugcgugaacuucaauuucaacggccugaccggcaccggcgugcugaccgagagcaacaagaaguuccugcccuuccagcaguucggccgggauaucgccgacaccaccgacgcagugcgggacccccagacccuggagauccuggacaucaccccaugcagcuucggcggcgugagcgugaucacccccggcacaaacaccagcaaccaggucgccgugcuguaccagggagugaacugcaccgaggugcccguggccauccacgccgaccagcugacccccaccuggcggguguacagcaccggcagcaacguguuccagacccgggccggcugccugaucggcgccgagcacgugaacaacuccuacgagugcgacauccccaucggcgcuggcaucugcgccagcuaccagacccagaccaacagcccccggcgggcccggagcguggccagccagagcgugaucgccuacaccaugagcuuaggcgccgagaacagcguggccuacagcaacaacagcaucgcgaucccuaccaacuucaccaucagcgugaccaccgagauccugcccgugagcaugaccaagaccagcguggacuguaccauguacauaugcggcgacagcaccgagugcagcaaccugcugcugcaguacggcagcuucugcacccagcugaaccgggcccugaccggcaucgccguggagcaggacaagaacacccaagagguguucgcccaggugaagcagaucuacaagacucccccaaucaaggacuucggcggcuucaacuucagccagauccugcccgaccccagcaagcccagcaagcggagcuucaucgaggaccugcuguucaacaaggugacccuggccgacgccggcuucaucaagcaguacggcgacugccugggggauaucgccgcucgggaccugaucugcgcccagaaguucaacggccugaccgugcugcccccucugcugaccgacgagaugaucgcccaguacaccagcgcccugcuugccggcaccaucaccagcggcuggaccuucggcgccggcgcagcccugcagauccccuucgccaugcagauggccuaccgguucaacggcaucggcgugacccagaacgugcuguacgagaaccagaagcugaucgccaaccaguucaacagcgccaucggcaagauccaggacagccugagcagcaccgccagcgcccugggcaagcugcaggacguggugaaccagaacgcucaggcccugaacacccuggugaagcagcugagcagcaacuuuggcgccaucagcucagugcugaaugacauccugagcaggcuggaucccccagaggccgaggugcagaucgaccggcugaucaccggccggcugcagagccugcagaccuacgugacccagcagcugauccgggccgccgagauccgggccagcgccaaccuggcagccaccaagaugagcgagugcgugcugggccagagcaagcggguggacuucugcggcaagggcuaccaccugaugagcuucccccagagcgcuccccacggcgugguguuccuccacgugacauacguccccgcccaggagaagaacuucaccaccgcccccgccaucugccacgacggcaaggcccacuucccccgggagggaguguucgugagcaacggcacccacugguucgugacccagcggaacuucuacgagccucagauuaucaccaccgacaacaccuucgugagcggcaacugcgacguggugaucggcaucgugaacaacaccguguacgacccccugcagcccgagcuggacagcuucaaggaggagcuggacaaguacuucaagaaccacaccagcccagacguggaccugggcgacaucagcggcaucaacgccagcguggugaacauccagaaggagaucgaccggcugaacgagguggccaagaaccugaacgagagccugaucgaccugcaggagcugggcaaguacgagcaguacaucaaguggcccugguacaucuggcugggcuucaucgccggccugaucgccaucgugaucgugaccaucaugcugugcugcaugaccagcugcuguagcugccugaagggcugcugcagcugcggcagcugcugcaaguucgacgaggacgacagcgagcccgugcugaagggcgugaagcugcacuacaccugaggacuaguuauaagacugacuagcccgaugggccucccaacgggcccuccuccccuccuugcaccgagagaucucaaaggcucuuuucagagccaccaaaaaaaaaaaaaaaaaaaaaaaaaaaaaaaaaaaaaaaaaaaaaaaaaaaaaaaaaaaaaaaaaaaaaaaaaaaaaaaaaaaaaaaaaaaaaaaaaaaaa

SEQ ID NO: 24683 - RNA, 4026 nt, Artificial Sequence
  SARS-CoV-2/Wuhan/WIV05/2019__EPI_ISL_402128 spike protein mRNA gc (1-1273)(K986P_V987P_K986P_V987P_H69del_V70del_Y144del_N501Y_A570 D_D614G_P681H_T716I_S982A_D1118H)
aggagaaagcuuaccauguucguguuccuggugcugcugccccuggugagcagccagugcgugaaccugaccacccggacccagcugcccccugccuacaccaacagcuucacccggggcguguacuaccccgacaagguguuccggagcagcgugcugcacagcacccaggaccuguuccugcccuucuucagcaacgugaccugguuccacgccaucagcggcaccaacggcaccaagcgguucgacaacccagugcugcccuucaacgacggcguguacuucgccagcaccgagaagucaaacaucauccggggcuggaucuucggcaccacccuggacagcaagacacagagccugcugaucgugaacaacgccaccaacguggugaucaaggugugcgaguuucaguucugcaacgaccccuuccugggcguguaccacaagaacaacaagagcuggauggagagcgaguuccggguguacagcagcgcuaacaauugcaccuucgaguacgucagccagcccuuccugauggaccucgagggcaagcagggcaacuucaagaaccugcgggaguucguguucaagaacaucgauggcuacuucaagaucuacagcaagcacacccccaucaaccuggugcgggaccugccccagggauucagcgcccuggagccucugguggaccugcccaucggcaucaacaucaccagguuccagacccugcuggcccugcaccggagcuaccugacccccggcgacagcagcagcggcuggaccgccggcgccgccgcauacuacgugggcuaccugcagccacggaccuuccugcugaaguacaacgagaacggcaccaucaccgacgccguggacugcgcccuggacccccugagcgagaccaagugcacccuaaagagcuucaccguggagaagggcaucuaccagaccagcaacuuccgggugcagcccacugagagcaucgugcgguuccccaacauuaccaaccugugucccuucggcgagguguucaacgccacccgguucgccagcguguacgccuggaaccggaagcggaucagcaacugcguggccgacuacagcgugcuguacaacagcgccagcuucagcaccuucaagugcuacggcgugagcccuaccaagcugaacgaccugugcuucaccaacguguacgcugacagcuucgugauccggggcgacgaggugcggcagaucgcccccggccagaccggcaagaucgccgacuacaacuacaagcugcccgacgacuucaccggcugcgugaucgccuggaacagcaacaaccuggacagcaaggugggcggcaacuacaacuaccuguaccggcuguuccguaagagcaaccugaagccauucgagcgggacaucagcaccgagaucuaccaggccggcagcacccccugcaacgguguggagggcuuuaacugcuacuucccccugcagagcuacggcuuccagcccaccuacggcgugggcuaccagcccuaccgggugguggugcugagcuucgagcugcugcacgcccccgccaccgugugcggcccuaaaaagagcaccaaccuggugaagaacaagugcgugaacuucaacuucaauggccugaccggcaccggcgugcugaccgagagcaacaagaaguuccugcccuuccagcaguucggccgggauaucgacgacaccaccgacgccgugcgggacccccagacccuggagauccuggacaucaccccaugcagcuucggcggcgugagcgugaucacccccggcacaaacaccagcaaccaggucgcagugcuguaccagggagugaacugcaccgaggugcccguggccauccacgccgaccagcugacccccaccuggcggguguacagcaccggcagcaacguguuccagacccgggccggcugccugaucggcgccgagcacgugaacaacuccuacgagugcgacauccccaucggcgccggcaucugcgcuagcuaccagacccagaccaacagccaccggcgggcccggagcguggccagccagagcaucaucgccuacaccaugagcuuaggcgccgagaacagcguggccuacagcaacaacagcaucgccauccccaucaacuucaccauaagcgugaccaccgagauccugccugugagcaugaccaagaccagcguggacuguaccauguacaucugcggcgacagcaccgagugcagcaaccugcugcugcaguacggcagcuucugcacccagcugaaccgggcgcugaccggcaucgccguggagcaggacaagaacacccaagagguguucgcccaggugaagcagaucuacaagaccccacccaucaaggacuucggcggcuucaacuucagccagauccugcccgaccccagcaagcccagcaagcggagcuucaucgaggaccugcuguucaacaaggugacucuggccgacgccggcuucaucaagcaguacggcgauugccugggggacaucgccgcccgggaccugaucugcgcucagaaguucaacggccugaccgugcugccuccccugcugaccgacgagaugaucgcccaguacaccagcgcccugcuugccggcaccaucaccagcggcuggaccuucggcgccggcgccgcacugcagauccccuucgccaugcagauggccuaccgguucaacggcaucggcgugacccagaacgugcuguacgagaaccagaagcugaucgccaaccaguucaacagcgccaucggcaagauccaggacagccugagcagcaccgccagcgcccugggcaagcugcaggacguggugaaccagaacgcccaggcucugaacacccuggugaagcagcugagcagcaacuucggcgccaucagcucagugcugaacgacauccuggccaggcuggacccacccgaggccgaggugcagaucgaccggcugaucaccggccggcugcagagccugcagaccuacgugacccagcagcugauccgggccgccgagauucgggccagcgccaaucuggcagccaccaagaugagcgagugcgugcugggccagagcaagcggguggacuuuugcggcaagggcuaccaccugaugagcuucccccagagcgcuccccacggcgugguguuccuccacgugaccuacgugcccgcccaggagaagaacuucacaaccgcccccgccaucugccacgacggcaaggcccacuucccccgggagggagucuucgugagcaacggcacccacugguucgugacccagcggaacuucuacgagccccagaucaucaccacccacaacaccuucgugagcggcaacugcgacguggugaucggcaucgugaacaacaccguguacgacccucugcagcccgagcuggacagcuucaaggaggagcuggacaaguacuucaagaaccacaccagccccgacguggaucugggcgacaucagcggcaucaacgccagcguggugaacauccagaaggagaucgaccggcugaacgagguggccaagaaccugaacgagagccugaucgaccugcaggagcugggcaaguacgagcaguacaucaaguggccaugguacaucuggcugggcuucaucgccggccugaucgccaucgugauggugaccaucaugcugugcugcaugaccagcugcuguagcugccugaagggcugcugcagcugcggcagcugcugcaaguucgacgaggacgacagcgagcccgugcugaagggcgugaagcugcacuacaccugaggacuaguuauaagacugacuagcccgaugggccucccaacgggcccuccuccccuccuugcaccgagagaucucaaaggcucuuuucagagccaccaaaaaaaaaaaaaaaaaaaaaaaaaaaaaaaaaaaaaaaaaaaaaaaaaaaaaaaaaaaaaaaaaaaaaaaaaaaaaaaaaaaaaaaaaaaaaaaaaaaaa

SEQ ID NO: 24684 - RNA, 4035 nt, Artificial Sequence
  SARS-CoV-2/Wuhan/WIV05/2019__EPI_ISL_402128 spike protein mRNA gc (1-1273)(K986P_V987P_K986P_V987P_K417N_E484K_N501Y_D614G)
aggagaaagcuuaccauguucguguuccuggugcugcugccccuggugagcagccagugcgugaaccugaccacccggacccagcugcccccugccuacaccaacagcuucacccggggcguguacuaccccgacaagguguuccggagcagcgugcugcacagcacccaggaccuguuccugcccuucuucagcaacgugaccugguuccacgccauccacgugagcggcaccaacggcaccaagcgguucgacaacccagugcugcccuucaacgacggcguguacuucgccagcaccgagaagucaaacaucauccggggcuggaucuucggcaccacccuggacagcaagacacagagccugcugaucgugaacaacgccaccaacguggugaucaaggugugcgaguuucaguucugcaacgaccccuuccugggcguguacuaccacaagaacaacaagagcuggauggagagcgaguuccgggucuacagcagcgcuaacaauugcaccuucgaguacgugagccagcccuuccugauggaccucgagggcaagcagggcaacuucaagaaccugcgggaguucguguucaagaacaucgauggcuacuucaagaucuacagcaagcacacccccaucaaccuggugcgggaccugccccagggauucagcgcccuggagccucugguggaccugcccaucggcaucaacaucaccagguuccagacccugcuggcccugcaccggagcuaccugacccccggcgacagcagcagcggcuggaccgccggcgccgccgcauacuacgugggcuaccugcagccacggaccuuccugcugaaguacaacgagaacggcaccaucaccgacgccguggacugcgcccuggacccccugagcgagaccaagugcacccuaaagagcuucaccguggagaagggcaucuaccagaccagcaacuuccgggugcagcccacugagagcaucgugcgguuccccaacauuaccaaccugugucccuucggcgagguguucaacgccacccgguucgccagcguguacgccuggaaccggaagcggaucagcaacugcguggccgacuacagcgugcuguacaacagcgccagcuucagcaccuucaagugcuacggcgugagcccuaccaagcugaacgaccugugcuucaccaacguguacgcugacagcuucgugauccggggcgacgaggugcggcagaucgcccccggccagaccggcaacaucgccgacuacaacuacaagcugcccgacgacuucaccggcugcgugaucgccuggaacagcaacaaccuggacagcaaggugggcggcaacuacaacuaccuguaccggcuguuccguaagagcaaccugaagccauucgagcgggacaucagcaccgagaucuaccaggccggcagcacccccugcaacggugugaagggcuuuaacugcuacuucccccugcagagcuacggcuuccagcccaccuacggcgugggcuaccagcccuaccgggugguggugcugagcuucgagcugcugcacgcccccgccaccgugugcggcccuaaaaagagcaccaaccuggugaagaacaagugcgugaacuucaauuucaacggccugaccggcaccggcgugcugaccgagagcaacaagaaguuccugcccuuccagcaguucggccgggauaucgccgacaccaccgacgcagugcgggacccccagacccuggagauccuggacaucaccccaugcagcuucggcggcgugagcgucaucacccccggcacaaacaccagcaaccagguggccgugcuguaccagggagugaacugcaccgaggugcccguggccauccacgccgaccagcugacccccaccuggcggguguacagcaccggcagcaacguguuccagacccgggccggcugccugaucggcgccgagcacgugaacaacuccuacgagugcgacauccccaucggcgcuggcaucugcgccagcuaccagacccagaccaacagcccccggcgggcccggagcguggccagccagagcaucaucgccuacaccaugagcuuaggcgccgagaacagcguggccuacagcaacaacagcaucgcgaucccuaccaacuucaccaucagcgugaccaccgagauacugcccgugagcaugaccaagaccagcguggacuguaccauguacaucugcggcgacagcaccgagugcagcaaccugcugcugcaguacggcagcuucugcacccagcugaaccgggcccugaccggcaucgccguggagcaggacaagaacacccaagagguguucgcccaggugaagcagaucuacaagacucccccaaucaaggacuucggcggcuucaacuucagccagauccugcccgaccccagcaagcccagcaagcggagcuucaucgaggaccugcuguucaacaaggugacccuggccgacgccggcuucaucaagcaguacggcgacugccugggggauaucgccgcucgggaccugaucugcgcccagaaguucaacggccugaccgugcugcccccucugcugaccgacgagaugaucgcccaguacaccagcgcccugcuugccggcaccaucaccagcggcuggaccuucggcgccggcgcagcccugcagauccccuucgccaugcagauggccuaccgguucaacggcaucggcgugacccagaacgugcuguacgagaaccagaagcugaucgccaaccaguucaacagcgccaucggcaagauccaggacagccugagcagcaccgccagcgcccugggcaagcugcaggacguggugaaccagaacgcucaggcccugaacacccuggugaagcagcugagcagcaacuucggcgccaucagcucagugcugaaugacauccugagcaggcuggaucccccagaggccgaggugcagaucgaccggcugaucaccggccggcugcagagccugcagaccuacgugacccagcagcugauccgggccgccgagauccgggccagcgccaaccuggcagccaccaagaugagcgagugcgugcugggccagagcaagcggguggacuuuugcggcaagggcuaccaccugaugagcuucccccagagcgcuccccacggcgugguguuccuccacgugacauacguccccgcccaggagaagaacuucaccaccgcccccgccauuugccacgacggcaaggcccacuucccccgggagggaguguucgugagcaacggcacccacugguucgugacccagcggaacuucuacgagccucagaucaucaccaccgacaacaccuucgugagcggcaacugcgacguggugaucggcaucgugaacaacaccguguacgacccccugcagcccgagcuggacagcuucaaggaggagcuggacaaguacuucaagaaccacaccagcccagacguggaccugggcgacaucagcggcaucaacgccagcguggugaacauccagaaggagaucgaccggcugaacgagguggccaagaaccugaacgagagccugaucgaccugcaggagcugggcaaguacgagcaguacaucaaguggcccugguacaucuggcugggcuucaucgccggccugaucgccaucgugauggugaccaucaugcugugcugcaugaccagcugcuguagcugccugaagggcugcugcagcugcggcagcugcugcaaguucgacgaggacgacagcgagcccgugcugaagggcgugaagcugcacuacaccugaggacuaguuauaagacugacuagcccgaugggccucccaacgggcccuccuccccuccuugcaccgagagaucucaaaggcucuuuucagagccaccaaaaaaaaaaaaaaaaaaaaaaaaaaaaaaaaaaaaaaaaaaaaaaaaaaaaaaaaaaaaaaaaaaaaaaaaaaaaaaaaaaaaaaaaaaaaaaaaaaaaa

SEQ ID NO: 24685 - RNA, 4026 nt, Artificial Sequence
  SARS-CoV-2/Wuhan/WIV05/2019__EPI_ISL_402128 spike protein mRNA gc (1-1273)(K986P_V987P_K986P_V987P_L18F_D80A_D215G_L242del_A243del_ L244del_R246I_K417N_E484K_N501Y_D614G_A701V)
aggagaaagcuuaccauguucguguuccuggugcugcugccccuggugagcagccagugcgugaacuucaccacccggacccagcugcccccugccuacaccaacagcuucacccggggcguguacuaccccgacaagguguuccggagcagcgugcugcacagcacccaggaccuguuccugcccuucuucagcaacgugaccugguuccacgccauccacgugagcggcaccaacggcaccaagcgguucgccaacccagugcugcccuucaacgacggcguguacuucgccagcaccgagaagucaaacaucauccggggcuggaucuuuggcaccacccuggacagcaagacacagagccugcugaucgugaacaacgcuaccaacguggugaucaaggugugcgaguuccaguucugcaacgaccccuuccugggcguguacuaccacaagaacaacaagagcuggauggagagcgaguuccgggucuacagcagcgccaacaauugcaccuucgaguacgugagccagcccuuccugauggaccuggagggcaagcagggcaacuucaagaaccuccgggaguucguguucaagaacaucgacggcuacuucaagaucuacagcaagcacacccccaucaaccuggugcggggacugccccagggcuucagcgcccuggagccucugguggaucugcccaucggcaucaacaucaccagguuccagacccugcacaucagcuaccugacccccggcgacagcagcagcggcuggaccgccggcgccgccgcauacuacgugggcuaccugcagccacggaccuuccugcugaaguacaacgagaacggcaccaucaccgacgccguggacugcgcccuggacccccugagcgagaccaagugcacccuuaagagcuucaccguggagaagggcaucuaccagaccagcaacuuccgggugcagcccacugagagcauugugcgguuccccaacaucaccaaccugugucccuucggcgagguguucaacgccacccgguucgccagcguguacgccuggaaccggaagcggaucagcaacugcguggccgacuacagcgugcuguacaacagcgccagcuucagcaccuucaagugcuacggcgugagcccuaccaagcugaacgaccugugcuucaccaacguguacgcugacagcuucgugauccggggcgacgaggugcggcagaucgcccccggccagaccggcaacaucgccgacuacaacuacaagcugcccgacgacuucaccggcugcgugaucgccuggaacagcaacaaccuggacagcaaggugggcggcaacuacaacuaccuguaccggcuauuccguaagagcaaccugaagccauuugagcgggacaucagcaccgagaucuaccaggccgguagcacccccugcaacggcgugaagggcuucaacugcuacuucccccugcagagcuacggcuuccagcccaccuacggcgugggcuaccagcccuaccgggugguggugcugagcuucgagcugcugcacgcccccgccaccgugugcggcccuaaaaagagcaccaaccuggugaagaacaagugcgugaacuucaauuucaacggccugaccggcaccggcgugcugaccgagagcaacaagaaguuccugcccuuccagcaguucggccgggacaucgccgacaccaccgaugcagugcgggacccccagacccuggagauccuggacaucaccccaugcagcuucggcggcgugagcgucaucacccccggaacaaacaccagcaaccagguggccgugcuguaccagggcgugaacugcaccgaggugcccguggccauccacgccgaccagcugacccccaccuggcggguguacagcaccggcagcaacguguuccagacccgggccggcugccugaucggcgccgagcacgugaacaacuccuacgagugcgacauccccaucggcgcuggcaucugcgccagcuaccagacccagaccaacagcccccggcgggcccggagcguggccagccagagcaucaucgccuacaccaugagccugggcguggagaacagcguggccuacagcaacaacagcaucgccaucccuaccaacuucaccauaagcgugaccaccgagauccugcccgugagcaugaccaagaccagcguggacuguaccauguacaucugcggcgacagcaccgagugcagcaaccuguuacugcaguacggcagcuucugcacccagcugaaccgggcgcugaccggcaucgccguggagcaggacaagaacacccaagagguguucgcccaggugaagcagaucuacaagacucccccaaucaaggacuucggcggcuucaacuucagccagauccugcccgaccccagcaagcccagcaagcggagcuucaucgaggaccugcuguucaacaaggugacccuggccgacgccggcuucaucaagcaguacggggacugccugggcgacaucgccgcccgggaccugaucugcgcucagaaguucaacggccugaccgugcugcccccucugcugaccgaugagaugaucgcccaguacaccagcgcccugcuggccggcaccaucaccagcggcuggaccuucggcgccggcgccgcacugcagauccccuucgccaugcagauggccuaccgguucaacggcaucggcgugacccagaacgugcuguacgagaaccagaagcugaucgccaaccaguucaacagcgccaucggcaagauccaggacagccugagcagcaccgccagcgcccugggcaagcugcaggacguggugaaccagaacgcccaggcucugaacacccuggugaagcagcugagcagcaacuuuggcgccaucagcucagugcugaaugacauccugagccggcuggaucccccagaggccgaggugcagaucgacaggcugaucaccggccggcugcagagccugcagaccuacgugacccagcagcugauccgggccgccgagauucgggccagcgccaaccuggccgcaaccaagaugagcgagugcgugcugggccagagcaagcggguggacuucugcggcaagggcuaccaccugaugagcuucccccagagcgcuccccacggcgugguguuccugcacgucacauacgugcccgcccaggagaagaacuucaccaccgcccccgccaucugccacgacggaaaggcccacuucccccgggagggcguguucgugagcaacggcacccacugguucgugacccagcggaacuucuacgagccucagaucaucaccaccgacaacaccuucgugagcggcaacugcgacguggugaucggcaucgugaacaacaccguguacgacccccugcagcccgagcuggacagcuucaaggaggagcucgacaaguacuucaagaaccacaccagcccagacguggaccugggcgacaucagcggcaucaacgccagcguggugaacauccagaaggagaucgaccggcugaacgagguggccaagaaccugaacgagagccugaucgaccugcaggagcugggcaaguacgagcaguacaucaaguggcccugguacaucuggcugggcuucaucgccggccugaucgccaucgugauggugaccaucaugcugugcugcaugaccagcugcuguagcugccugaagggcugcugcagcugcggcagcugcugcaaguucgacgaggacgacagcgagcccgugcugaagggcgugaagcugcacuacaccugaggacuaguuauaagacugacuagcccgaugggccucccaacgggcccuccuccccuccuugcaccgagagaucucaaaggcucuuuucagagccaccaaaaaaaaaaaaaaaaaaaaaaaaaaaaaaaaaaaaaaaaaaaaaaaaaaaaaaaaaaaaaaaaaaaaaaaaaaaaaaaaaaaaaaaaaaaaaaaaaaaaa

SEQ ID NO: 24686 - RNA, 4035 nt, Artificial Sequence
  SARS-CoV-2/Wuhan/WIV05/2019__EPI_ISL_402128 spike protein mRNA gc (1-1273)(K986P_V987P_K986P_V987P_E484K_D614G)
aggagaaagcuuaccauguucguguuccuggugcugcugccccuggugagcagccagugcgugaaccugaccacccggacccagcugcccccugccuacaccaacagcuucacccggggcguguacuaccccgacaagguguuccggagcagcgugcugcacagcacccaggaccuguuccugcccuucuucagcaacgugaccugguuccacgccauccacgugagcggcaccaacggcaccaagcgguucgacaacccagugcugcccuucaacgacggcguguacuucgccagcaccgagaagucaaacaucauccggggcuggaucuucggcaccacccuggacagcaagacacagagccugcugaucgugaacaacgccaccaacguggugaucaaggugugcgaguuucaguucugcaacgaccccuuccugggcguguacuaccacaagaacaacaagagcuggauggagagcgaguuccgggucuacagcagcgcuaacaauugcaccuucgaguacgugagccagcccuuccugauggaccucgagggcaagcagggcaacuucaagaaccugcgggaguucguguucaagaacaucgauggcuacuucaagaucuacagcaagcacacccccaucaaccuggugcgggaccugccccagggauucagcgcccuggagccucugguggaccugcccaucggcaucaacaucaccagguuccagacccugcuggcccugcaccggagcuaccugacccccggcgacagcagcagcggcuggaccgccggcgccgccgcauacuacgugggcuaccugcagccacggaccuuccugcugaaguacaacgagaacggcaccaucaccgacgccguggacugcgcccuggacccccugagcgagaccaagugcacccuaaagagcuucaccguggagaagggcaucuaccagaccagcaacuuccgggugcagcccacugagagcaucgugcgguuccccaacauuaccaaccugugucccuucggcgagguguucaacgccacccgguucgccagcguguacgccuggaaccggaagcggaucagcaacugcguggccgacuacagcgugcuguacaacagcgccagcuucagcaccuucaagugcuacggcgugagcccuaccaagcugaacgaccugugcuucaccaacguguacgcugacagcuucgugauccggggcgacgaggugcggcagaucgcccccggccagaccggcaagaucgccgacuacaacuacaagcugcccgacgacuucaccggcugcgugaucgccuggaacagcaacaaccuggacagcaaggugggcggcaacuacaacuaccuguaccggcuguuccguaagagcaaccugaagccauucgagcgggacaucagcaccgagaucuaccaggccggcagcacccccugcaacggugugaagggcuuuaacugcuacuucccccugcagagcuacggcuuccagcccaccaacggcgugggcuaccagcccuaccgggugguggugcugagcuucgagcugcugcacgcccccgccaccgugugcggcccuaaaaagagcaccaaccuggugaagaacaagugcgugaacuucaauuucaacggccugaccggcaccggcgugcugaccgagagcaacaagaaguuccugcccuuccagcaguucggccgggauaucgccgacaccaccgacgcagugcgggacccccagacccuggagauccuggacaucaccccaugcagcuucggcggcgugagcgucaucacccccggcacaaacaccagcaaccagguggccgugcuguaccagggagugaacugcaccgaggugcccguggccauccacgccgaccagcugacccccaccuggcggguguacagcaccggcagcaacguguuccagacccgggccggcugccugaucggcgccgagcacgugaacaacuccuacgagugcgacauccccaucggcgcuggcaucugcgccagcuaccagacccagaccaacagcccccggcgggcccggagcguggccagccagagcaucaucgccuacaccaugagcuuaggcgccgagaacagcguggccuacagcaacaacagcaucgcgaucccuaccaacuucaccaucagcgugaccaccgagauacugcccgugagcaugaccaagaccagcguggacuguaccauguacaucugcggcgacagcaccgagugcagcaaccugcugcugcaguacggcagcuucugcacccagcugaaccgggcccugaccggcaucgccguggagcaggacaagaacacccaagagguguucgcccaggugaagcagaucuacaagacucccccaaucaaggacuucggcggcuucaacuucagccagauccugcccgaccccagcaagcccagcaagcggagcuucaucgaggaccugcuguucaacaaggugacccuggccgacgccggcuucaucaagcaguacggcgacugccugggggauaucgccgcucgggaccugaucugcgcccagaaguucaacggccugaccgugcugcccccucugcugaccgacgagaugaucgcccaguacaccagcgcccugcuugccggcaccaucaccagcggcuggaccuucggcgccggcgcagcccugcagauccccuucgccaugcagauggccuaccgguucaacggcaucggcgugacccagaacgugcuguacgagaaccagaagcugaucgccaaccaguucaacagcgccaucggcaagauccaggacagccugagcagcaccgccagcgcccugggcaagcugcaggacguggugaaccagaacgcucaggcccugaacacccuggugaagcagcugagcagcaacuucggcgccaucagcucagugcugaaugacauccugagcaggcuggaucccccagaggccgaggugcagaucgaccggcugaucaccggccggcugcagagccugcagaccuacgugacccagcagcugauccgggccgccgagauccgggccagcgccaaccuggcagccaccaagaugagcgagugcgugcugggccagagcaagcggguggacuuuugcggcaagggcuaccaccugaugagcuucccccagagcgcuccccacggcgugguguuccuccacgugacauacguccccgcccaggagaagaacuucaccaccgcccccgccauuugccacgacggcaaggcccacuucccccgggagggaguguucgugagcaacggcacccacugguucgugacccagcggaacuucuacgagccucagaucaucaccaccgacaacaccuucgugagcggcaacugcgacguggugaucggcaucgugaacaacaccguguacgacccccugcagcccgagcuggacagcuucaaggaggagcuggacaaguacuucaagaaccacaccagcccagacguggaccugggcgacaucagcggcaucaacgccagcguggugaacauccagaaggagaucgaccggcugaacgagguggccaagaaccugaacgagagccugaucgaccugcaggagcugggcaaguacgagcaguacaucaaguggcccugguacaucuggcugggcuucaucgccggccugaucgccaucgugauggugaccaucaugcugugcugcaugaccagcugcuguagcugccugaagggcugcugcagcugcggcagcugcugcaaguucgacgaggacgacagcgagcccgugcugaagggcgugaagcugcacuacaccugaggacuaguuauaagacugacuagcccgaugggccucccaacgggcccuccuccccuccuugcaccgagagaucucaaaggcucuuuucagagccaccaaaaaaaaaaaaaaaaaaaaaaaaaaaaaaaaaaaaaaaaaaaaaaaaaaaaaaaaaaaaaaaaaaaaaaaaaaaaaaaaaaaaaaaaaaaaaaaaaaaaa

SEQ ID NO: 24687 - RNA, 4035 nt, Artificial Sequence
  SARS-CoV-2/Wuhan/WIV05/2019__EPI_ISL_402128 spike protein mRNA gc (1-1273)(K986P_V987P_K986P_V987P_L18F_T20N_P26S_D138Y_R190S_K417T _E484K_N501Y_D614G_H655Y_T1027I)
aggagaaagcuuaccauguucguguuccuggugcugcugccccuggugagcagccagugcgugaacuucaccaaccggacccagcugcccagcgccuacaccaacagcuucacccggggcguguacuacccugacaagguguuccggagcagcgugcugcacagcacccaggaccuguuccugcccuucuucagcaacgugaccugguuccacgccauccacgugagcggcaccaacggcaccaagcgguucgacaaccccgugcugccauucaacgacggcguguacuucgccagcaccgagaagucaaacaucauccggggcuggaucuuuggcaccacccuggacagcaagacccagagccugcugaucgugaacaacgccacaaacguggugaucaaggugugcgaguuccaguucugcaacuaccccuuccugggcguguacuaccacaagaacaacaagagcuggauggagagcgaguuccgggucuacagcagcgcuaauaacugcaccuucgaguacgugagccagcccuuccugauggaccuggagggcaagcagggcaacuucaagaaccucagcgaguucguguucaagaacaucgacggcuacuucaagaucuacagcaagcacacccccaucaaccuggugcgggaucugccccagggauucagcgcccuggagccccugguggaccugccuaucggcaucaacaucacccgguuccagacccugcuggcccugcacaggagcuaccugacccccggcgacagcagcagcggcuggaccgccggcgccgccgcauacuacgugggcuaccugcagccccggaccuuccugcugaaguacaacgagaacggcaccaucaccgacgccguggacugcgcccuggacccacugagcgagaccaagugcacccuaaagagcuucaccguggagaagggcaucuaccagaccagcaacuuccgggugcagcccaccgagagcaucgugcgguuccccaacauuacuaaccugugucccuucggcgagguguucaacgccacccgguucgccagcguguacgccuggaaccggaagcggaucagcaacugcguggccgacuacagcgugcuguacaacagcgccagcuucagcaccuucaagugcuacggcgugagccccaccaagcugaacgaccugugcuucaccaacguguacgcugacagcuucgugauccggggcgacgaggugcggcagaucgccccuggccagaccggcaccaucgccgacuacaacuacaagcugcccgacgacuucaccggcugcgugaucgccuggaacagcaacaaccuggacagcaaggugggcggcaacuacaacuaccuguaccggcuguuccguaagagcaaccugaagcccuuugagcgggacaucagcaccgagaucuaccaggccggcagcaccccaugcaacggugugaagggcuucaacugcuacuucccccugcagagcuacggcuuccagcccaccuacggcgugggcuaccagcccuaccgggugguggugcugagcuucgagcugcugcacgcccccgccaccgugugcggccccaaaaagagcaccaaccuggugaagaacaagugcgugaacuucaauuucaacggccugaccggcaccggcgugcugaccgagagcaacaagaaguuccugccuuuccagcaguucggccgggacaucgccgauaccaccgacgcagugcgggacccccagacccuggagauccuggacaucacccccugcagcuucggcggcgugagcgucaucaccccaggcacaaacaccagcaaccagguggccgugcuguaccagggagugaacugcaccgaggugcccguggccauccacgccgaccagcugacccccaccuggcggguguacuccaccggcagcaacguguuccagacccgggccggcugccugaucggcgccgaguacgugaacaacagcuacgagugcgacauccccaucggcgcuggcaucugcgccagcuaccagacccagaccaacagcccccggcgggcccggagcguggccagccagagcaucaucgccuacaccaugagccugggcgccgagaacagcguggccuacagcaacaacagcaucgcgauccccaccaacuucaccaucagcgugaccaccgagauauuaccugugagcaugaccaagaccagcguggacuguaccauguacaucugcggcgacagcaccgagugcagcaaccugcugcugcaguacggcagcuucugcacccagcugaaccgggcccugaccggcaucgccguggagcaggacaagaacacccaagagguguucgcccaggugaagcagaucuacaagacuccacccaucaaggacuucggcggcuucaacuucagccagauccugcccgaccccagcaagcccagcaagcggagcuucaucgaggaccugcuguucaacaaggugacccuggccgacgccggcuucaucaagcaguacggcgacugccugggggacaucgccgcucgggaucugaucugcgcccagaaguucaacggccugaccgugcugccuccccugcugaccgacgagaugaucgcccaguacaccagcgcccugcuggccggcaccaucaccagcggcuggaccuucggcgccggcgcagcccuucagauccccuucgccaugcagauggccuaccgguucaacggcaucggcgugacccagaacgugcuguacgagaaccagaagcugaucgccaaccaguucaacagcgccaucggcaagauccaggacagccugagcagcaccgccagcgcccugggcaagcugcaggacguggugaaccagaacgcucaggcccugaacacccuggugaagcagcugagcucaaacuuuggcgccaucagcagcgugcugaaugacauccugagccggcuggacccacccgaggccgaggugcagaucgacaggcugaucaccggccggcugcagagccugcagaccuacgugacccagcagcugauccgggccgccgagauccgggccagcgccaaccuggcagccauuaagaugagcgagugcgugcugggccagagcaagcggguggacuucugcggcaagggcuaccaccugaugagcuucccccagagcgcuccccacggcgugguguuccugcacgugaccuacguccccgcccaggagaagaacuucacaaccgcccccgccaucugccacgacggcaaggcccacuucccccgggagggaguguucgugagcaacggcacccacugguucgugacccagcggaacuucuacgagccccagaucaucaccaccgacaacaccuucgugagcggcaacugcgacguggugaucggcaucgugaacaacaccguguacgacccucuccagcccgagcuggacagcuucaaggaggagcuggacaaguacuucaagaaccacaccagccccgacguggaccugggcgauaucagcggcaucaacgccagcguggugaacauccagaaggagaucgaccggcugaacgagguggccaagaaccugaacgagagccugaucgaccugcaggagcugggcaaguacgagcaguacaucaaguggccaugguacaucuggcugggcuucaucgccggccugaucgccaucgugauggugaccaucaugcugugcugcaugaccagcugcuguagcugccugaagggcugcugcagcugcggcagcugcugcaaguucgacgaggacgacagcgagcccgugcugaagggcgugaagcugcacuacaccugaggacuaguuauaagacugacuagcccgaugggccucccaacgggcccuccuccccuccuugcaccgagagaucucaaaggcucuuuucagagccaccaaaaaaaaaaaaaaaaaaaaaaaaaaaaaaaaaaaaaaaaaaaaaaaaaaaaaaaaaaaaaaaaaaaaaaaaaaaaaaaaaaaaaaaaaaaaaaaaaaaaa

SEQ ID NO: 24688 - RNA, 4035 nt, Artificial Sequence
  SARS-CoV-2/Wuhan/WIV05/2019__EPI_ISL_402128 spike protein mRNA gc (1-1273)(K986P_V987P_K986P_V987P_S13I_W152C_L452R_D614G)
aggagaaagcuuaccauguucguguuccuggugcugcugccccuggugagcauccagugcgugaaccugaccacccggacccagcugcccccugccuacaccaacagcuucacccggggcguguacuaccccgacaagguguuccggagcagcgugcugcacagcacccaggaccuguuccugcccuucuucagcaacgugaccugguuccacgccauccacgugagcggcaccaacggcaccaagcgguucgacaacccagugcugcccuucaacgacggcguguacuucgccagcaccgagaagucaaacaucauccggggcuggaucuucggcaccacccuggacagcaagacacagagccugcugaucgugaacaacgccaccaacguggugaucaaggugugcgaguuucaguucugcaacgaccccuuccugggcguguacuaccacaagaacaacaagagcugcauggagagcgaguuccgggucuacagcagcgcuaacaauugcaccuucgaguacgugagccagcccuuccugauggaccucgagggcaagcagggcaacuucaagaaccugcgggaguucguguucaagaacaucgauggcuacuucaagaucuacagcaagcacacccccaucaaccuggugcgggaccugccccagggauucagcgcccuggagccucugguggaccugcccaucggcaucaacaucaccagguuccagacccugcuggcccugcaccggagcuaccugacccccggcgacagcagcagcggcuggaccgccggcgccgccgcauacuacgugggcuaccugcagccacggaccuuccugcugaaguacaacgagaacggcaccaucaccgacgccguggacugcgcccuggacccccugagcgagaccaaguguacccuaaagagcuucaccguggagaagggcaucuaccagaccagcaacuuccgggugcagcccacugagagcauugugcgguuccccaacaucaccaaccugugccccuucggcgagguguucaacgccacccgguucgccagcguguacgccuggaaccggaagcggaucagcaacugcguggccgacuacagcgugcuguacaacagcgccagcuucagcaccuucaagugcuacggcgugagcccuaccaagcugaacgaccugugcuucaccaacguguacgcugacagcuucgugauccggggcgacgaggugcggcagaucgcccccggccagaccggcaagaucgccgacuacaacuacaagcugcccgacgacuucaccggcugcgugaucgccuggaacagcaacaaccuggacagcaaggugggcggcaacuacaacuaccgguaccggcuguuccguaagagcaaccugaagccauucgagcgggacaucagcaccgagaucuaccaggccggcagcacccccugcaacgguguggagggcuuuaacugcuacuucccccugcagagcuacggcuuccagcccaccaacggcgugggcuaccagcccuaccgggugguggugcugagcuucgagcugcugcacgcccccgccaccgugugcggcccuaaaaagagcaccaaccuggugaagaacaagugcgugaacuucaauuucaacggccugaccggcaccggcgugcugaccgagagcaacaagaaguuccugcccuuccagcaguucggccgggauaucgccgacaccaccgacgcagugcgggacccccagacccuggagauccuggacaucaccccaugcagcuucggcggcgugagcgucaucacccccggcacaaacaccagcaaccagguggccgugcuguaccagggagugaacugcaccgaggugcccguggccauccacgccgaccagcugacccccaccuggcggguguacagcaccggcagcaacguguuccagacccgggccggcugccugaucggcgccgagcacgugaacaacagcuacgagugcgacauccccaucggcgcuggcaucugugccuccuaccagacccagaccaacagcccccggcgggcccggagcguggccagccagagcaucaucgccuacaccaugagccugggcgccgagaacagcguggccuacagcaacaacagcaucgcgaucccuaccaacuucaccauaagcgugaccaccgagaucuuacccgugagcaugaccaagaccagcguggacugcaccauguacaucugcggcgacagcaccgagugcagcaaccugcugcugcaguacggcagcuucugcacccagcugaaccgggcccugaccggcaucgccguggagcaggacaagaacacccaagagguguucgcccaggugaagcagaucuacaagacucccccaaucaaggacuucggcggcuucaacuucagccagauccugcccgaccccagcaagcccagcaagcggagcuucaucgaggaccugcuguucaacaaggugacccuggccgacgccggcuucaucaagcaguacggcgacugccugggggauaucgccgcucgggaccugaucugcgcccagaaguucaacggccugaccgugcugcccccucugcugaccgacgagaugaucgcccaguacaccagcgcccugcuggccggcaccaucaccagcggcuggaccuucggcgccggcgcagcccuucagauccccuucgccaugcagauggccuacagguucaacggcaucggcgugacccagaacgugcuguacgagaaccagaagcugaucgccaaccaguucaacagcgccaucggcaagauccaggacagccugagcagcaccgccagcgcccugggcaagcugcaggacguggugaaccagaacgcucaggcccugaacacccuggugaagcagcugagcagcaacuucggcgccaucagcagcgugcugaaugacauccugucacggcuggaucccccagaggccgaggugcagaucgaccggcugaucaccggccggcugcagagccugcagaccuacgugacccagcagcugauccgggccgccgagauucgggccagcgccaaccuggcagccaccaagaugagcgagugcgugcugggccagagcaagcggguggacuuuugcggcaagggcuaccaccugaugagcuucccccagagcgcuccccacggcgugguguuccugcacgugacauacguccccgcccaggagaagaacuucaccaccgcccccgccaucugccacgacggcaaggcccacuucccccgggagggaguguucgugagcaacggcacccacugguucgugacccagcggaacuucuacgagccucagaucaucaccaccgacaacaccuucgugagcggcaacugcgacguggugaucggcaucgugaacaacaccguguacgacccccuccagcccgagcuggacagcuucaaggaggagcuggacaaguacuucaagaaccacaccagcccagacguggaccugggcgacaucagcggcaucaacgccagcguggugaacauccagaaggagaucgaccggcugaacgagguggccaagaaccugaacgagagccugaucgaccugcaggagcugggcaaguacgagcaguacaucaaguggcccugguacaucuggcugggcuucaucgccggccugaucgccaucgugauggugaccaucaugcugugcugcaugaccagcuguugcagcugccugaagggcugcugcagcugcggcagcugcugcaaguucgacgaggacgacagcgagcccgugcugaagggcgugaagcugcacuacaccugaggacuaguuauaagacugacuagcccgaugggccucccaacgggcccuccuccccuccuugcaccgagagaucucaaaggcucuuuucagagccaccaaaaaaaaaaaaaaaaaaaaaaaaaaaaaaaaaaaaaaaaaaaaaaaaaaaaaaaaaaaaaaaaaaaaaaaaaaaaaaaaaaaaaaaaaaaaaaaaaaaaa

SEQ ID NO: 24689 - RNA, 4035 nt, Artificial Sequence
  SARS-CoV-2/Wuhan/WIV05/2019__EPI_ISL_402128 spike protein mRNA gc mod (1-1273)(K986P_V987P)
aggagaaagcuuaccauguucguguuucuggugcugcugccccugguguccagccagugugugaaccugaccaccagaacacagcugccuccagccuacaccaacagcuucaccagaggcguguacuaccccgacaagguguucagauccagcgugcugcacucuacccaggaccuguuccugccuuucuucagcaacgugaccugguuccacgccauccacguguccggcaccaauggcaccaagagauucgacaaccccgugcugcccuucaacgacgggguguacuuugccagcaccgagaaguccaacaucaucagaggcuggaucuucggcaccacacuggacagcaagacccagagccugcugaucgugaacaacgccaccaacguggucaucaaagugugcgaguuccaguucugcaacgaccccuuccugggcgucuacuaccacaagaacaacaagagcuggauggaaagcgaguuccggguguacagcagcgccaacaacugcaccuucgaguacgugucccagccuuuccugauggaccuggaaggcaagcagggcaacuucaagaaccugcgcgaguucguguucaagaacaucgacggcuacuucaaaaucuacagcaagcacaccccuaucaaccucgugcgggaucugccucagggcuucucugcucuggaaccccugguggaucugcccaucggcaucaacaucacccgguuucagacacugcuggcccugcacagaagcuaccugacaccuggcgauagcagcagcggauggacagcuggugccgccgcuuacuaugugggcuaccugcagccuagaaccuuccugcugaaguacaacgagaacggcaccaucaccgacgccguggauugugcucuggauccucugagcgagacaaagugcacccugaaguccuucaccguggaaaagggcaucuaccagaccagcaacuuccgggugcagcccaccgaauccaucgugcgguuccccaauaucaccaaucugugccccuucggcgagguguucaaugccaccagauucgccucuguguacgccuggaaccggaagcggaucagcaauugcguggccgacuacuccgugcuguacaacuccgccagcuucagcaccuucaagugcuacggcguguccccuaccaagcugaacgaccugugcuucacaaacguguacgccgacagcuucgugauccggggagaugaagugcggcagauugccccuggacagacaggcaagaucgccgacuacaacuacaagcugcccgacgacuucaccggcugugugauugccuggaacagcaacaaccuggacuccaaagucggcggcaacuacaauuaccuguaccggcuguuccggaaguccaaucugaagcccuucgagcgggacaucagcaccgaaaucuaucaggccggcagcaccccuugcaacggcguggaaggcuucaacugcuacuucccacugcaguccuacggcuuucagcccacaaauggcgugggcuaucagcccuacagagugguggugcugagcuucgaacugcugcaugcuccugccacagugugcggcccuaagaaaagcaccaaucucgugaagaacaaaugcgugaacuucaacuucaacggccugaccggcaccggcgugcugacagagagcaacaagaaguuccugccauuccagcaguuuggccgggauaucgccgauaccacagacgccguuagagauccccagacacuggaaauccuggacaucaccccaugcagcuucggcggagugucugugaucaccccuggcaccaacaccagcaaucagguggcagugcuguaccaggacgugaacuguaccgaagugcccguggccauucacgccgaucagcugacaccuacauggcggguguacuccaccggcagcaauguguuucagaccagagccggcugucugaucggagccgagcacgugaacaauagcuacgagugcgacauccccaucggcgcuggcaucugugccagcuaccagacacagacaaacagccccagacgggcuagaagcguggccagccagagcaucauugccuacacaaugucucugggcgccgagaacagcguggccuacuccaacaacucuaucgcuauccccaccaacuucaccaucagcgugaccaccgagauccugccuguguccaugaccaagaccagcguggacugcaccauguacaucugcggcgauuccaccgagugcuccaaccugcugcugcaguacggcagcuucugcacccagcugaauagagcccugacagggaucgccguggaacaggacaagaacacccaagagguguucgcccaagugaagcaaaucuacaagaccccuccuaucaaggacuucggcggcuucaauuucagccagauucugcccgauccuagcaagcccagcaagcggagcuucaucgaggaccugcuguucaacaaagugacacuggccgacgccggcuucaucaagcaguauggcgauugucugggcgacauugccgccagggaucugauuugcgcccagaaguuuaacggacugacagugcugccuccucugcugaccgaugagaugaucgcccaguacacaucugcccugcuggccggcacaaucacaagcggcuggacauuuggagcuggcgccgcucugcagauccccuuugcuaugcagauggccuaccgguucaacggcaucggagugacccagaaugugcuguacgagaaccagaagcugaucgccaaccaguucaacagcgccaucggcaagauccaggacagccugagcagcacagcaagcgcccugggaaagcugcaggacguggucaaccagaaugcccaggcacugaacacccuggucaagcagcuguccuccaacuucggcgccaucagcucugugcugaacgauauccugagcagacuggacccuccugaggccgaggugcagaucgacagacugaucacaggcagacugcagagccuccagacauacgugacccagcagcugaucagagccgccgagauuagagccucugccaaucuggccgccaccaagaugucugagugugugcugggccagagcaagagaguggacuuuugcggcaagggcuaccaccugaugagcuucccucagucugccccucacggcgugguguuucugcacgugacauaugugcccgcucaagagaagaauuucaccaccgcuccagccaucugccacgacggcaaagcccacuuuccuagagaaggcguguucguguccaacggcacccauugguucgugacacagcggaacuucuacgagccccagaucaucaccaccgacaacaccuucgugucuggcaacugcgacguugugaucggcauugugaacaauaccguguacgacccucugcagcccgagcuggacagcuucaaagaggaacuggacaaguacuuuaagaaccacacaagccccgacguggaccugggcgauaucagcggaaucaaugccagcgucgugaacauccagaaagagaucgaccggcugaacgagguggccaagaaucugaacgagagccugaucgaccugcaagaacuggggaaguacgagcaguacaucaaguggcccugguacaucuggcugggcuuuaucgccggacugauugccaucgugauggucacaaucaugcuguguugcaugaccagcugcuguagcugccugaagggcuguuguagcuguggcagcugcugcaaguucgacgaggacgauucugagcccgugcugaagggcgugaaacugcacuacaccugaggacuaguuauaagacugacuagcccgaugggccucccaacgggcccuccuccccuccuugcaccgagagaucucaaaggcucuuuucagagccaccaaaaaaaaaaaaaaaaaaaaaaaaaaaaaaaaaaaaaaaaaaaaaaaaaaaaaaaaaaaaaaaaaaaaaaaaaaaaaaaaaaaaaaaaaaaaaaaaaaaaa

SEQ ID NO: 24690 - RNA, 4035 nt, Artificial Sequence
  SARS-CoV-2/Wuhan/WIV05/2019__EPI_ISL_402128 spike protein mRNA gc mod (1-1273)(K986P_V987P_ D614G)
aggagaaagcuuaccauguucguguuucuggugcugcugccccugguguccagccagugugugaaccugaccaccagaacacagcugccuccagccuacaccaacagcuucaccagaggcguguacuaccccgacaagguguucagauccagcgugcugcacucuacccaggaccuguuccugccuuucuucagcaacgugaccugguuccacgccauccacguguccggcaccaauggcaccaagagauucgacaaccccgugcugcccuucaacgacgggguguacuuugccagcaccgagaaguccaacaucaucagaggcuggaucuucggcaccacacuggacagcaagacccagagccugcugaucgugaacaacgccaccaacguggucaucaaagugugcgaguuccaguucugcaacgaccccuuccugggcgucuacuaccacaagaacaacaagagcuggauggaaagcgaguuccggguguacagcagcgccaacaacugcaccuucgaguacgugucccagccuuuccugauggaccuggaaggcaagcagggcaacuucaagaaccugcgcgaguucguguucaagaacaucgacggcuacuucaaaaucuacagcaagcacaccccuaucaaccucgugcgggaucugccucagggcuucucugcucuggaaccccugguggaucugcccaucggcaucaacaucacccgguuucagacacugcuggcccugcacagaagcuaccugacaccuggcgauagcagcagcggauggacagcuggugccgccgcuuacuaugugggcuaccugcagccuagaaccuuccugcugaaguacaacgagaacggcaccaucaccgacgccguggauugugcucuggauccucugagcgagacaaagugcacccugaaguccuucaccguggaaaagggcaucuaccagaccagcaacuuccgggugcagcccaccgaauccaucgugcgguuccccaauaucaccaaucugugccccuucggcgagguguucaaugccaccagauucgccucuguguacgccuggaaccggaagcggaucagcaauugcguggccgacuacuccgugcuguacaacuccgccagcuucagcaccuucaagugcuacggcguguccccuaccaagcugaacgaccugugcuucacaaacguguacgccgacagcuucgugauccggggagaugaagugcggcagauugccccuggacagacaggcaagaucgccgacuacaacuacaagcugcccgacgacuucaccggcugugugauugccuggaacagcaacaaccuggacuccaaagucggcggcaacuacaauuaccuguaccggcuguuccggaaguccaaucugaagcccuucgagcgggacaucagcaccgaaaucuaucaggccggcagcaccccuugcaacggcguggaaggcuucaacugcuacuucccacugcaguccuacggcuuucagcccacaaauggcgugggcuaucagcccuacagagugguggugcugagcuucgaacugcugcaugcuccugccacagugugcggcccuaagaaaagcaccaaucucgugaagaacaaaugcgugaacuucaacuucaacggccugaccggcaccggcgugcugacagagagcaacaagaaguuccugccauuccagcaguuuggccgggauaucgccgauaccacagacgccguuagagauccccagacacuggaaauccuggacaucaccccaugcagcuucggcggagugucugugaucaccccuggcaccaacaccagcaaucagguggcagugcuguaccagggcgugaacuguaccgaagugcccguggccauucacgccgaucagcugacaccuacauggcggguguacuccaccggcagcaauguguuucagaccagagccggcugucugaucggagccgagcacgugaacaauagcuacgagugcgacauccccaucggcgcuggcaucugugccagcuaccagacacagacaaacagccccagacgggcuagaagcguggccagccagagcaucauugccuacacaaugucucugggcgccgagaacagcguggccuacuccaacaacucuaucgcuauccccaccaacuucaccaucagcgugaccaccgagauccugccuguguccaugaccaagaccagcguggacugcaccauguacaucugcggcgauuccaccgagugcuccaaccugcugcugcaguacggcagcuucugcacccagcugaauagagcccugacagggaucgccguggaacaggacaagaacacccaagagguguucgcccaagugaagcaaaucuacaagaccccuccuaucaaggacuucggcggcuucaauuucagccagauucugcccgauccuagcaagcccagcaagcggagcuucaucgaggaccugcuguucaacaaagugacacuggccgacgccggcuucaucaagcaguauggcgauugucugggcgacauugccgccagggaucugauuugcgcccagaaguuuaacggacugacagugcugccuccucugcugaccgaugagaugaucgcccaguacacaucugcccugcuggccggcacaaucacaagcggcuggacauuuggagcuggcgccgcucugcagauccccuuugcuaugcagauggccuaccgguucaacggcaucggagugacccagaaugugcuguacgagaaccagaagcugaucgccaaccaguucaacagcgccaucggcaagauccaggacagccugagcagcacagcaagcgcccugggaaagcugcaggacguggucaaccagaaugcccaggcacugaacacccuggucaagcagcuguccuccaacuucggcgccaucagcucugugcugaacgauauccugagcagacuggacccuccugaggccgaggugcagaucgacagacugaucacaggcagacugcagagccuccagacauacgugacccagcagcugaucagagccgccgagauuagagccucugccaaucuggccgccaccaagaugucugagugugugcugggccagagcaagagaguggacuuuugcggcaagggcuaccaccugaugagcuucccucagucugccccucacggcgugguguuucugcacgugacauaugugcccgcucaagagaagaauuucaccaccgcuccagccaucugccacgacggcaaagcccacuuuccuagagaaggcguguucguguccaacggcacccauugguucgugacacagcggaacuucuacgagccccagaucaucaccaccgacaacaccuucgugucuggcaacugcgacguugugaucggcauugugaacaauaccguguacgacccucugcagcccgagcuggacagcuucaaagaggaacuggacaaguacuuuaagaaccacacaagccccgacguggaccugggcgauaucagcggaaucaaugccagcgucgugaacauccagaaagagaucgaccggcugaacgagguggccaagaaucugaacgagagccugaucgaccugcaagaacuggggaaguacgagcaguacaucaaguggcccugguacaucuggcugggcuuuaucgccggacugauugccaucgugauggucacaaucaugcuguguugcaugaccagcugcuguagcugccugaagggcuguuguagcuguggcagcugcugcaaguucgacgaggacgauucugagcccgugcugaagggcgugaaacugcacuacaccugaggacuaguuauaagacugacuagcccgaugggccucccaacgggcccuccuccccuccuugcaccgagagaucucaaaggcucuuuucagagccaccaaaaaaaaaaaaaaaaaaaaaaaaaaaaaaaaaaaaaaaaaaaaaaaaaaaaaaaaaaaaaaaaaaaaaaaaaaaaaaaaaaaaaaaaaaaaaaaaaaaaa

SEQ ID NO: 24691 - RNA, 4035 nt, Artificial Sequence
  SARS-CoV-2/Wuhan/WIV05/2019__EPI_ISL_402128 spike protein mRNA gc mod (1-1273)(K986P_V987P_A222V_D614G)
aggagaaagcuuaccauguucguguuucuggugcugcugccccugguguccagccagugugugaaccugaccaccagaacacagcugccuccagccuacaccaacagcuucaccagaggcguguacuaccccgacaagguguucagauccagcgugcugcacucuacccaggaccuguuccugccuuucuucagcaacgugaccugguuccacgccauccacguguccggcaccaauggcaccaagagauucgacaaccccgugcugcccuucaacgacgggguguacuuugccagcaccgagaaguccaacaucaucagaggcuggaucuucggcaccacacuggacagcaagacccagagccugcugaucgugaacaacgccaccaacguggucaucaaagugugcgaguuccaguucugcaacgaccccuuccugggcgucuacuaccacaagaacaacaagagcuggauggaaagcgaguuccggguguacagcagcgccaacaacugcaccuucgaguacgugucccagccuuuccugauggaccuggaaggcaagcagggcaacuucaagaaccugcgcgaguucguguucaagaacaucgacggcuacuucaaaaucuacagcaagcacaccccuaucaaccucgugcgggaucugccucagggcuucucugugcuggaaccccugguggaucugcccaucggcaucaacaucacccgguuucagacacugcuggcccugcacagaagcuaccugacaccuggcgauagcagcagcggauggacagcuggugccgccgcuuacuaugugggcuaccugcagccuagaaccuuccugcugaaguacaacgagaacggcaccaucaccgacgccguggauugugcucuggauccucugagcgagacaaagugcacccugaaguccuucaccguggaaaagggcaucuaccagaccagcaacuuccgggugcagcccaccgaauccaucgugcgguuccccaauaucaccaaucugugccccuucggcgagguguucaaugccaccagauucgccucuguguacgccuggaaccggaagcggaucagcaauugcguggccgacuacuccgugcuguacaacuccgccagcuucagcaccuucaagugcuacggcguguccccuaccaagcugaacgaccugugcuucacaaacguguacgccgacagcuucgugauccggggagaugaagugcggcagauugccccuggacagacaggcaagaucgccgacuacaacuacaagcugcccgacgacuucaccggcugugugauugccuggaacagcaacaaccuggacuccaaagucggcggcaacuacaauuaccuguaccggcuguuccggaaguccaaucugaagcccuucgagcgggacaucagcaccgaaaucuaucaggccggcagcaccccuugcaacggcguggaaggcuucaacugcuacuucccacugcaguccuacggcuuucagcccacaaauggcgugggcuaucagcccuacagagugguggugcugagcuucgaacugcugcaugcuccugccacagugugcggcccuaagaaaagcaccaaucucgugaagaacaaaugcgugaacuucaacuucaacggccugaccggcaccggcgugcugacagagagcaacaagaaguuccugccauuccagcaguuuggccgggauaucgccgauaccacagacgccguuagagauccccagacacuggaaauccuggacaucaccccaugcagcuucggcggagugucugugaucaccccuggcaccaacaccagcaaucagguggcagugcuguaccagggcgugaacuguaccgaagugcccguggccauucacgccgaucagcugacaccuacauggcggguguacuccaccggcagcaauguguuucagaccagagccggcugucugaucggagccgagcacgugaacaauagcuacgagugcgacauccccaucggcgcuggcaucugugccagcuaccagacacagacaaacagccccagacgggcuagaagcguggccagccagagcaucauugccuacacaaugucucugggcgccgagaacagcguggccuacuccaacaacucuaucgcuauccccaccaacuucaccaucagcgugaccaccgagauccugccuguguccaugaccaagaccagcguggacugcaccauguacaucugcggcgauuccaccgagugcuccaaccugcugcugcaguacggcagcuucugcacccagcugaauagagcccugacagggaucgccguggaacaggacaagaacacccaagagguguucgcccaagugaagcaaaucuacaagaccccuccuaucaaggacuucggcggcuucaauuucagccagauucugcccgauccuagcaagcccagcaagcggagcuucaucgaggaccugcuguucaacaaagugacacuggccgacgccggcuucaucaagcaguauggcgauugucugggcgacauugccgccagggaucugauuugcgcccagaaguuuaacggacugacagugcugccuccucugcugaccgaugagaugaucgcccaguacacaucugcccugcuggccggcacaaucacaagcggcuggacauuuggagcuggcgccgcucugcagauccccuuugcuaugcagauggccuaccgguucaacggcaucggagugacccagaaugugcuguacgagaaccagaagcugaucgccaaccaguucaacagcgccaucggcaagauccaggacagccugagcagcacagcaagcgcccugggaaagcugcaggacguggucaaccagaaugcccaggcacugaacacccuggucaagcagcuguccuccaacuucggcgccaucagcucugugcugaacgauauccugagcagacuggacccuccugaggccgaggugcagaucgacagacugaucacaggcagacugcagagccuccagacauacgugacccagcagcugaucagagccgccgagauuagagccucugccaaucuggccgccaccaagaugucugagugugugcugggccagagcaagagaguggacuuuugcggcaagggcuaccaccugaugagcuucccucagucugccccucacggcgugguguuucugcacgugacauaugugcccgcucaagagaagaauuucaccaccgcuccagccaucugccacgacggcaaagcccacuuuccuagagaaggcguguucguguccaacggcacccauugguucgugacacagcggaacuucuacgagccccagaucaucaccaccgacaacaccuucgugucuggcaacugcgacguugugaucggcauugugaacaauaccguguacgacccucugcagcccgagcuggacagcuucaaagaggaacuggacaaguacuuuaagaaccacacaagccccgacguggaccugggcgauaucagcggaaucaaugccagcgucgugaacauccagaaagagaucgaccggcugaacgagguggccaagaaucugaacgagagccugaucgaccugcaagaacuggggaaguacgagcaguacaucaaguggcccugguacaucuggcugggcuuuaucgccggacugauugccaucgugauggucacaaucaugcuguguugcaugaccagcugcuguagcugccugaagggcuguuguagcuguggcagcugcugcaaguucgacgaggacgauucugagcccgugcugaagggcgugaaacugcacuacaccugaggacuaguuauaagacugacuagcccgaugggccucccaacgggcccuccuccccuccuugcaccgagagaucucaaaggcucuuuucagagccaccaaaaaaaaaaaaaaaaaaaaaaaaaaaaaaaaaaaaaaaaaaaaaaaaaaaaaaaaaaaaaaaaaaaaaaaaaaaaaaaaaaaaaaaaaaaaaaaaaaaaa

SEQ ID NO: 24692 - RNA, 4035 nt, Artificial Sequence
  SARS-CoV-2/Wuhan/WIV05/2019__EPI_ISL_402128 spike protein mRNA gc mod (1-1273)(K986P_V987P_N439K_D614G)
aggagaaagcuuaccauguucguguuucuggugcugcugccccugguguccagccagugugugaaccugaccaccagaacacagcugccuccagccuacaccaacagcuucaccagaggcguguacuaccccgacaagguguucagauccagcgugcugcacucuacccaggaccuguuccugccuuucuucagcaacgugaccugguuccacgccauccacguguccggcaccaauggcaccaagagauucgacaaccccgugcugcccuucaacgacgggguguacuuugccagcaccgagaaguccaacaucaucagaggcuggaucuucggcaccacacuggacagcaagacccagagccugcugaucgugaacaacgccaccaacguggucaucaaagugugcgaguuccaguucugcaacgaccccuuccugggcgucuacuaccacaagaacaacaagagcuggauggaaagcgaguuccggguguacagcagcgccaacaacugcaccuucgaguacgugucccagccuuuccugauggaccuggaaggcaagcagggcaacuucaagaaccugcgcgaguucguguucaagaacaucgacggcuacuucaaaaucuacagcaagcacaccccuaucaaccucgugcgggaucugccucagggcuucucugcucuggaaccccugguggaucugcccaucggcaucaacaucacccgguuucagacacugcuggcccugcacagaagcuaccugacaccuggcgauagcagcagcggauggacagcuggugccgccgcuuacuaugugggcuaccugcagccuagaaccuuccugcugaaguacaacgagaacggcaccaucaccgacgccguggauugugcucuggauccucugagcgagacaaagugcacccugaaguccuucaccguggaaaagggcaucuaccagaccagcaacuuccgggugcagcccaccgaauccaucgugcgguuccccaauaucaccaaucugugccccuucggcgagguguucaaugccaccagauucgccucuguguacgccuggaaccggaagcggaucagcaauugcguggccgacuacuccgugcuguacaacuccgccagcuucagcaccuucaagugcuacggcguguccccuaccaagcugaacgaccugugcuucacaaacguguacgccgacagcuucgugauccggggagaugaagugcggcagauugccccuggacagacaggcaagaucgccgacuacaacuacaagcugcccgacgacuucaccggcugugugauugccuggaacagcaagaaccuggacuccaaagucggcggcaacuacaauuaccuguaccggcuguuccggaaguccaaucugaagcccuucgagcgggacaucagcaccgaaaucuaucaggccggcagcaccccuugcaacggcguggaaggcuucaacugcuacuucccacugcaguccuacggcuuucagcccacaaauggcgugggcuaucagcccuacagagugguggugcugagcuucgaacugcugcaugcuccugccacagugugcggcccuaagaaaagcaccaaucucgugaagaacaaaugcgugaacuucaacuucaacggccugaccggcaccggcgugcugacagagagcaacaagaaguuccugccauuccagcaguuuggccgggauaucgccgauaccacagacgccguuagagauccccagacacuggaaauccuggacaucaccccaugcagcuucggcggagugucugugaucaccccuggcaccaacaccagcaaucagguggcagugcuguaccagggcgugaacuguaccgaagugcccguggccauucacgccgaucagcugacaccuacauggcggguguacuccaccggcagcaauguguuucagaccagagccggcugucugaucggagccgagcacgugaacaauagcuacgagugcgacauccccaucggcgcuggcaucugugccagcuaccagacacagacaaacagccccagacgggcuagaagcguggccagccagagcaucauugccuacacaaugucucugggcgccgagaacagcguggccuacuccaacaacucuaucgcuauccccaccaacuucaccaucagcgugaccaccgagauccugccuguguccaugaccaagaccagcguggacugcaccauguacaucugcggcgauuccaccgagugcuccaaccugcugcugcaguacggcagcuucugcacccagcugaauagagcccugacagggaucgccguggaacaggacaagaacacccaagagguguucgcccaagugaagcaaaucuacaagaccccuccuaucaaggacuucggcggcuucaauuucagccagauucugcccgauccuagcaagcccagcaagcggagcuucaucgaggaccugcuguucaacaaagugacacuggccgacgccggcuucaucaagcaguauggcgauugucugggcgacauugccgccagggaucugauuugcgcccagaaguuuaacggacugacagugcugccuccucugcugaccgaugagaugaucgcccaguacacaucugcccugcuggccggcacaaucacaagcggcuggacauuuggagcuggcgccgcucugcagauccccuuugcuaugcagauggccuaccgguucaacggcaucggagugacccagaaugugcuguacgagaaccagaagcugaucgccaaccaguucaacagcgccaucggcaagauccaggacagccugagcagcacagcaagcgcccugggaaagcugcaggacguggucaaccagaaugcccaggcacugaacacccuggucaagcagcuguccuccaacuucggcgccaucagcucugugcugaacgauauccugagcagacuggacccuccugaggccgaggugcagaucgacagacugaucacaggcagacugcagagccuccagacauacgugacccagcagcugaucagagccgccgagauuagagccucugccaaucuggccgccaccaagaugucugagugugugcugggccagagcaagagaguggacuuuugcggcaagggcuaccaccugaugagcuucccucagucugccccucacggcgugguguuucugcacgugacauaugugcccgcucaagagaagaauuucaccaccgcuccagccaucugccacgacggcaaagcccacuuuccuagagaaggcguguucguguccaacggcacccauugguucgugacacagcggaacuucuacgagccccagaucaucaccaccgacaacaccuucgugucuggcaacugcgacguugugaucggcauugugaacaauaccguguacgacccucugcagcccgagcuggacagcuucaaagaggaacuggacaaguacuuuaagaaccacacaagccccgacguggaccugggcgauaucagcggaaucaaugccagcgucgugaacauccagaaagagaucgaccggcugaacgagguggccaagaaucugaacgagagccugaucgaccugcaagaacuggggaaguacgagcaguacaucaaguggcccugguacaucuggcugggcuuuaucgccggacugauugccaucgugauggucacaaucaugcuguguugcaugaccagcugcuguagcugccugaagggcuguuguagcuguggcagcugcugcaaguucgacgaggacgauucugagcccgugcugaagggcgugaaacugcacuacaccugaggacuaguuauaagacugacuagcccgaugggccucccaacgggcccuccuccccuccuugcaccgagagaucucaaaggcucuuuucagagccaccaaaaaaaaaaaaaaaaaaaaaaaaaaaaaaaaaaaaaaaaaaaaaaaaaaaaaaaaaaaaaaaaaaaaaaaaaaaaaaaaaaaaaaaaaaaaaaaaaaaaa

SEQ ID NO: 24693 - RNA, 4035 nt, Artificial Sequence
  SARS-CoV-2/Wuhan/WIV05/2019__EPI_ISL_402128 spike protein mRNA gc mod (1-1273)(K986P_V987P_S477N_D614G)
aggagaaagcuuaccauguucguguuucuggugcugcugccccugguguccagccagugugugaaccugaccaccagaacacagcugccuccagccuacaccaacagcuucaccagaggcguguacuaccccgacaagguguucagauccagcgugcugcacucuacccaggaccuguuccugccuuucuucagcaacgugaccugguuccacgccauccacguguccggcaccaauggcaccaagagauucgacaaccccgugcugcccuucaacgacgggguguacuuugccagcaccgagaaguccaacaucaucagaggcuggaucuucggcaccacacuggacagcaagacccagagccugcugaucgugaacaacgccaccaacguggucaucaaagugugcgaguuccaguucugcaacgaccccuuccugggcgucuacuaccacaagaacaacaagagcuggauggaaagcgaguuccggguguacagcagcgccaacaacugcaccuucgaguacgugucccagccuuuccugauggaccuggaaggcaagcagggcaacuucaagaaccugcgcgaguucguguucaagaacaucgacggcuacuucaaaaucuacagcaagcacaccccuaucaaccucgugcgggaucugccucagggcuucucugcucuggaaccccugguggaucugcccaucggcaucaacaucacccgguuucagacacugcuggcccugcacagaagcuaccugacaccuggcgauagcagcagcggauggacagcuggugccgccgcuuacuaugugggcuaccugcagccuagaaccuuccugcugaaguacaacgagaacggcaccaucaccgacgccguggauugugcucuggauccucugagcgagacaaagugcacccugaaguccuucaccguggaaaagggcaucuaccagaccagcaacuuccgggugcagcccaccgaauccaucgugcgguuccccaauaucaccaaucugugccccuucggcgagguguucaaugccaccagauucgccucuguguacgccuggaaccggaagcggaucagcaauugcguggccgacuacuccgugcuguacaacuccgccagcuucagcaccuucaagugcuacggcguguccccuaccaagcugaacgaccugugcuucacaaacguguacgccgacagcuucgugauccggggagaugaagugcggcagauugccccuggacagacaggcaagaucgccgacuacaacuacaagcugcccgacgacuucaccggcugugugauugccuggaacagcaacaaccuggacuccaaagucggcggcaacuacaauuaccuguaccggcuguuccggaaguccaaucugaagcccuucgagcgggacaucagcaccgaaaucuaucaggccggcaacaccccuugcaacggcguggaaggcuucaacugcuacuucccacugcaguccuacggcuuucagcccacaaauggcgugggcuaucagcccuacagagugguggugcugagcuucgaacugcugcaugcuccugccacagugugcggcccuaagaaaagcaccaaucucgugaagaacaaaugcgugaacuucaacuucaacggccugaccggcaccggcgugcugacagagagcaacaagaaguuccugccauuccagcaguuuggccgggauaucgccgauaccacagacgccguuagagauccccagacacuggaaauccuggacaucaccccaugcagcuucggcggagugucugugaucaccccuggcaccaacaccagcaaucagguggcagugcuguaccagggcgugaacuguaccgaagugcccguggccauucacgccgaucagcugacaccuacauggcggguguacuccaccggcagcaauguguuucagaccagagccggcugucugaucggagccgagcacgugaacaauagcuacgagugcgacauccccaucggcgcuggcaucugugccagcuaccagacacagacaaacagccccagacgggcuagaagcguggccagccagagcaucauugccuacacaaugucucugggcgccgagaacagcguggccuacuccaacaacucuaucgcuauccccaccaacuucaccaucagcgugaccaccgagauccugccuguguccaugaccaagaccagcguggacugcaccauguacaucugcggcgauuccaccgagugcuccaaccugcugcugcaguacggcagcuucugcacccagcugaauagagcccugacagggaucgccguggaacaggacaagaacacccaagagguguucgcccaagugaagcaaaucuacaagaccccuccuaucaaggacuucggcggcuucaauuucagccagauucugcccgauccuagcaagcccagcaagcggagcuucaucgaggaccugcuguucaacaaagugacacuggccgacgccggcuucaucaagcaguauggcgauugucugggcgacauugccgccagggaucugauuugcgcccagaaguuuaacggacugacagugcugccuccucugcugaccgaugagaugaucgcccaguacacaucugcccugcuggccggcacaaucacaagcggcuggacauuuggagcuggcgccgcucugcagauccccuuugcuaugcagauggccuaccgguucaacggcaucggagugacccagaaugugcuguacgagaaccagaagcugaucgccaaccaguucaacagcgccaucggcaagauccaggacagccugagcagcacagcaagcgcccugggaaagcugcaggacguggucaaccagaaugcccaggcacugaacacccuggucaagcagcuguccuccaacuucggcgccaucagcucugugcugaacgauauccugagcagacuggacccuccugaggccgaggugcagaucgacagacugaucacaggcagacugcagagccuccagacauacgugacccagcagcugaucagagccgccgagauuagagccucugccaaucuggccgccaccaagaugucugagugugugcugggccagagcaagagaguggacuuuugcggcaagggcuaccaccugaugagcuucccucagucugccccucacggcgugguguuucugcacgugacauaugugcccgcucaagagaagaauuucaccaccgcuccagccaucugccacgacggcaaagcccacuuuccuagagaaggcguguucguguccaacggcacccauugguucgugacacagcggaacuucuacgagccccagaucaucaccaccgacaacaccuucgugucuggcaacugcgacguugugaucggcauugugaacaauaccguguacgacccucugcagcccgagcuggacagcuucaaagaggaacuggacaaguacuuuaagaaccacacaagccccgacguggaccugggcgauaucagcggaaucaaugccagcgucgugaacauccagaaagagaucgaccggcugaacgagguggccaagaaucugaacgagagccugaucgaccugcaagaacuggggaaguacgagcaguacaucaaguggcccugguacaucuggcugggcuuuaucgccggacugauugccaucgugauggucacaaucaugcuguguugcaugaccagcugcuguagcugccugaagggcuguuguagcuguggcagcugcugcaaguucgacgaggacgauucugagcccgugcugaagggcgugaaacugcacuacaccugaggacuaguuauaagacugacuagcccgaugggccucccaacgggcccuccuccccuccuugcaccgagagaucucaaaggcucuuuucagagccaccaaaaaaaaaaaaaaaaaaaaaaaaaaaaaaaaaaaaaaaaaaaaaaaaaaaaaaaaaaaaaaaaaaaaaaaaaaaaaaaaaaaaaaaaaaaaaaaaaaaaa

SEQ ID NO: 24694 - RNA, 4035 nt, Artificial Sequence
  SARS-CoV-2/Wuhan/WIV05/2019__EPI_ISL_402128 spike protein mRNA gc mod (1-1273)(K986P_V987P_N501Y_D614G)
aggagaaagcuuaccauguucguguuucuggugcugcugccccugguguccagccagugugugaaccugaccaccagaacacagcugccuccagccuacaccaacagcuucaccagaggcguguacuaccccgacaagguguucagauccagcgugcugcacucuacccaggaccuguuccugccuuucuucagcaacgugaccugguuccacgccauccacguguccggcaccaauggcaccaagagauucgacaaccccgugcugcccuucaacgacgggguguacuuugccagcaccgagaaguccaacaucaucagaggcuggaucuucggcaccacacuggacagcaagacccagagccugcugaucgugaacaacgccaccaacguggucaucaaagugugcgaguuccaguucugcaacgaccccuuccugggcgucuacuaccacaagaacaacaagagcuggauggaaagcgaguuccggguguacagcagcgccaacaacugcaccuucgaguacgugucccagccuuuccugauggaccuggaaggcaagcagggcaacuucaagaaccugcgcgaguucguguucaagaacaucgacggcuacuucaaaaucuacagcaagcacaccccuaucaaccucgugcgggaucugccucagggcuucucugcucuggaaccccugguggaucugcccaucggcaucaacaucacccgguuucagacacugcuggcccugcacagaagcuaccugacaccuggcgauagcagcagcggauggacagcuggugccgccgcuuacuaugugggcuaccugcagccuagaaccuuccugcugaaguacaacgagaacggcaccaucaccgacgccguggauugugcucuggauccucugagcgagacaaagugcacccugaaguccuucaccguggaaaagggcaucuaccagaccagcaacuuccgggugcagcccaccgaauccaucgugcgguuccccaauaucaccaaucugugccccuucggcgagguguucaaugccaccagauucgccucuguguacgccuggaaccggaagcggaucagcaauugcguggccgacuacuccgugcuguacaacuccgccagcuucagcaccuucaagugcuacggcguguccccuaccaagcugaacgaccugugcuucacaaacguguacgccgacagcuucgugauccggggagaugaagugcggcagauugccccuggacagacaggcaagaucgccgacuacaacuacaagcugcccgacgacuucaccggcugugugauugccuggaacagcaacaaccuggacuccaaagucggcggcaacuacaauuaccuguaccggcuguuccggaaguccaaucugaagcccuucgagcgggacaucagcaccgaaaucuaucaggccggcagcaccccuugcaacggcguggaaggcuucaacugcuacuucccacugcaguccuacggcuuucagcccacauacggcgugggcuaucagcccuacagagugguggugcugagcuucgaacugcugcaugcuccugccacagugugcggcccuaagaaaagcaccaaucucgugaagaacaaaugcgugaacuucaacuucaacggccugaccggcaccggcgugcugacagagagcaacaagaaguuccugccauuccagcaguuuggccgggauaucgccgauaccacagacgccguuagagauccccagacacuggaaauccuggacaucaccccaugcagcuucggcggagugucugugaucaccccuggcaccaacaccagcaaucagguggcagugcuguaccagggcgugaacuguaccgaagugcccguggccauucacgccgaucagcugacaccuacauggcggguguacuccaccggcagcaauguguuucagaccagagccggcugucugaucggagccgagcacgugaacaauagcuacgagugcgacauccccaucggcgcuggcaucugugccagcuaccagacacagacaaacagccccagacgggcuagaagcguggccagccagagcaucauugccuacacaaugucucugggcgccgagaacagcguggccuacuccaacaacucuaucgcuauccccaccaacuucaccaucagcgugaccaccgagauccugccuguguccaugaccaagaccagcguggacugcaccauguacaucugcggcgauuccaccgagugcuccaaccugcugcugcaguacggcagcuucugcacccagcugaauagagcccugacagggaucgccguggaacaggacaagaacacccaagagguguucgcccaagugaagcaaaucuacaagaccccuccuaucaaggacuucggcggcuucaauuucagccagauucugcccgauccuagcaagcccagcaagcggagcuucaucgaggaccugcuguucaacaaagugacacuggccgacgccggcuucaucaagcaguauggcgauugucugggcgacauugccgccagggaucugauuugcgcccagaaguuuaacggacugacagugcugccuccucugcugaccgaugagaugaucgcccaguacacaucugcccugcuggccggcacaaucacaagcggcuggacauuuggagcuggcgccgcucugcagauccccuuugcuaugcagauggccuaccgguucaacggcaucggagugacccagaaugugcuguacgagaaccagaagcugaucgccaaccaguucaacagcgccaucggcaagauccaggacagccugagcagcacagcaagcgcccugggaaagcugcaggacguggucaaccagaaugcccaggcacugaacacccuggucaagcagcuguccuccaacuucggcgccaucagcucugugcugaacgauauccugagcagacuggacccuccugaggccgaggugcagaucgacagacugaucacaggcagacugcagagccuccagacauacgugacccagcagcugaucagagccgccgagauuagagccucugccaaucuggccgccaccaagaugucugagugugugcugggccagagcaagagaguggacuuuugcggcaagggcuaccaccugaugagcuucccucagucugccccucacggcgugguguuucugcacgugacauaugugcccgcucaagagaagaauuucaccaccgcuccagccaucugccacgacggcaaagcccacuuuccuagagaaggcguguucguguccaacggcacccauugguucgugacacagcggaacuucuacgagccccagaucaucaccaccgacaacaccuucgugucuggcaacugcgacguugugaucggcauugugaacaauaccguguacgacccucugcagcccgagcuggacagcuucaaagaggaacuggacaaguacuuuaagaaccacacaagccccgacguggaccugggcgauaucagcggaaucaaugccagcgucgugaacauccagaaagagaucgaccggcugaacgagguggccaagaaucugaacgagagccugaucgaccugcaagaacuggggaaguacgagcaguacaucaaguggcccugguacaucuggcugggcuuuaucgccggacugauugccaucgugauggucacaaucaugcuguguugcaugaccagcugcuguagcugccugaagggcuguuguagcuguggcagcugcugcaaguucgacgaggacgauucugagcccgugcugaagggcgugaaacugcacuacaccugaggacuaguuauaagacugacuagcccgaugggccucccaacgggcccuccuccccuccuugcaccgagagaucucaaaggcucuuuucagagccaccaaaaaaaaaaaaaaaaaaaaaaaaaaaaaaaaaaaaaaaaaaaaaaaaaaaaaaaaaaaaaaaaaaaaaaaaaaaaaaaaaaaaaaaaaaaaaaaaaaaaa

SEQ ID NO: 24695 - RNA, 4029 nt, Artificial Sequence
  SARS-CoV-2/Wuhan/WIV05/2019__EPI_ISL_402128 spike protein mRNA gc mod (1-1273)(K986P_V987P_H69del_V70del_D614G)
aggagaaagcuuaccauguucguguuucuggugcugcugccccugguguccagccagugugugaaccugaccaccagaacacagcugccuccagccuacaccaacagcuucaccagaggcguguacuaccccgacaagguguucagauccagcgugcugcacucuacccaggaccuguuccugccuuucuucagcaacgugaccugguuccacgccaucuccggcaccaauggcaccaagagauucgacaaccccgugcugcccuucaacgacgggguguacuuugccagcaccgagaaguccaacaucaucagaggcuggaucuucggcaccacacuggacagcaagacccagagccugcugaucgugaacaacgccaccaacguggucaucaaagugugcgaguuccaguucugcaacgaccccuuccugggcgucuacuaccacaagaacaacaagagcuggauggaaagcgaguuccggguguacagcagcgccaacaacugcaccuucgaguacgugucccagccuuuccugauggaccuggaaggcaagcagggcaacuucaagaaccugcgcgaguucguguucaagaacaucgacggcuacuucaaaaucuacagcaagcacaccccuaucaaccucgugcgggaucugccucagggcuucucugcucuggaaccccugguggaucugcccaucggcaucaacaucacccgguuucagacacugcuggcccugcacagaagcuaccugacaccuggcgauagcagcagcggauggacagcuggugccgccgcuuacuaugugggcuaccugcagccuagaaccuuccugcugaaguacaacgagaacggcaccaucaccgacgccguggauugugcucuggauccucugagcgagacaaagugcacccugaaguccuucaccguggaaaagggcaucuaccagaccagcaacuuccgggugcagcccaccgaauccaucgugcgguuccccaauaucaccaaucugugccccuucggcgagguguucaaugccaccagauucgccucuguguacgccuggaaccggaagcggaucagcaauugcguggccgacuacuccgugcuguacaacuccgccagcuucagcaccuucaagugcuacggcguguccccuaccaagcugaacgaccugugcuucacaaacguguacgccgacagcuucgugauccggggagaugaagugcggcagauugccccuggacagacaggcaagaucgccgacuacaacuacaagcugcccgacgacuucaccggcugugugauugccuggaacagcaacaaccuggacuccaaagucggcggcaacuacaauuaccuguaccggcuguuccggaaguccaaucugaagcccuucgagcgggacaucagcaccgaaaucuaucaggccggcagcaccccuugcaacggcguggaaggcuucaacugcuacuucccacugcaguccuacggcuuucagcccacaaauggcgugggcuaucagcccuacagagugguggugcugagcuucgaacugcugcaugcuccugccacagugugcggcccuaagaaaagcaccaaucucgugaagaacaaaugcgugaacuucaacuucaacggccugaccggcaccggcgugcugacagagagcaacaagaaguuccugccauuccagcaguuuggccgggauaucgccgauaccacagacgccguuagagauccccagacacuggaaauccuggacaucaccccaugcagcuucggcggagugucugugaucaccccuggcaccaacaccagcaaucagguggcagugcuguaccagggcgugaacuguaccgaagugcccguggccauucacgccgaucagcugacaccuacauggcggguguacuccaccggcagcaauguguuucagaccagagccggcugucugaucggagccgagcacgugaacaauagcuacgagugcgacauccccaucggcgcuggcaucugugccagcuaccagacacagacaaacagccccagacgggcuagaagcguggccagccagagcaucauugccuacacaaugucucugggcgccgagaacagcguggccuacuccaacaacucuaucgcuauccccaccaacuucaccaucagcgugaccaccgagauccugccuguguccaugaccaagaccagcguggacugcaccauguacaucugcggcgauuccaccgagugcuccaaccugcugcugcaguacggcagcuucugcacccagcugaauagagcccugacagggaucgccguggaacaggacaagaacacccaagagguguucgcccaagugaagcaaaucuacaagaccccuccuaucaaggacuucggcggcuucaauuucagccagauucugcccgauccuagcaagcccagcaagcggagcuucaucgaggaccugcuguucaacaaagugacacuggccgacgccggcuucaucaagcaguauggcgauugucugggcgacauugccgccagggaucugauuugcgcccagaaguuuaacggacugacagugcugccuccucugcugaccgaugagaugaucgcccaguacacaucugcccugcuggccggcacaaucacaagcggcuggacauuuggagcuggcgccgcucugcagauccccuuugcuaugcagauggccuaccgguucaacggcaucggagugacccagaaugugcuguacgagaaccagaagcugaucgccaaccaguucaacagcgccaucggcaagauccaggacagccugagcagcacagcaagcgcccugggaaagcugcaggacguggucaaccagaaugcccaggcacugaacacccuggucaagcagcuguccuccaacuucggcgccaucagcucugugcugaacgauauccugagcagacuggacccuccugaggccgaggugcagaucgacagacugaucacaggcagacugcagagccuccagacauacgugacccagcagcugaucagagccgccgagauuagagccucugccaaucuggccgccaccaagaugucugagugugugcugggccagagcaagagaguggacuuuugcggcaagggcuaccaccugaugagcuucccucagucugccccucacggcgugguguuucugcacgugacauaugugcccgcucaagagaagaauuucaccaccgcuccagccaucugccacgacggcaaagcccacuuuccuagagaaggcguguucguguccaacggcacccauugguucgugacacagcggaacuucuacgagccccagaucaucaccaccgacaacaccuucgugucuggcaacugcgacguugugaucggcauugugaacaauaccguguacgacccucugcagcccgagcuggacagcuucaaagaggaacuggacaaguacuuuaagaaccacacaagccccgacguggaccugggcgauaucagcggaaucaaugccagcgucgugaacauccagaaagagaucgaccggcugaacgagguggccaagaaucugaacgagagccugaucgaccugcaagaacuggggaaguacgagcaguacaucaaguggcccugguacaucuggcugggcuuuaucgccggacugauugccaucgugauggucacaaucaugcuguguugcaugaccagcugcuguagcugccugaagggcuguuguagcuguggcagcugcugcaaguucgacgaggacgauucugagcccgugcugaagggcgugaaacugcacuacaccugaggacuaguuauaagacugacuagcccgaugggccucccaacgggcccuccuccccuccuugcaccgagagaucucaaaggcucuuuucagagccaccaaaaaaaaaaaaaaaaaaaaaaaaaaaaaaaaaaaaaaaaaaaaaaaaaaaaaaaaaaaaaaaaaaaaaaaaaaaaaaaaaaaaaaaaaaaaaaaaaaaaa

SEQ ID NO: 24696 - RNA, 4035 nt, Artificial Sequence
  SARS-CoV-2/Wuhan/WIV05/2019__EPI_ISL_402128 spike protein mRNA gc mod (1-1273)(K986P_V987P_Y453F_D614G)
aggagaaagcuuaccauguucguguuucuggugcugcugccccugguguccagccagugugugaaccugaccaccagaacacagcugccuccagccuacaccaacagcuucaccagaggcguguacuaccccgacaagguguucagauccagcgugcugcacucuacccaggaccuguuccugccuuucuucagcaacgugaccugguuccacgccauccacguguccggcaccaauggcaccaagagauucgacaaccccgugcugcccuucaacgacgggguguacuuugccagcaccgagaaguccaacaucaucagaggcuggaucuucggcaccacacuggacagcaagacccagagccugcugaucgugaacaacgccaccaacguggucaucaaagugugcgaguuccaguucugcaacgaccccuuccugggcgucuacuaccacaagaacaacaagagcuggauggaaagcgaguuccggguguacagcagcgccaacaacugcaccuucgaguacgugucccagccuuuccugauggaccuggaaggcaagcagggcaacuucaagaaccugcgcgaguucguguucaagaacaucgacggcuacuucaaaaucuacagcaagcacaccccuaucaaccucgugcgggaucugccucagggcuucucugcucuggaaccccugguggaucugcccaucggcaucaacaucacccgguuucagacacugcuggcccugcacagaagcuaccugacaccuggcgauagcagcagcggauggacagcuggugccgccgcuuacuaugugggcuaccugcagccuagaaccuuccugcugaaguacaacgagaacggcaccaucaccgacgccguggauugugcucuggauccucugagcgagacaaagugcacccugaaguccuucaccguggaaaagggcaucuaccagaccagcaacuuccgggugcagcccaccgaauccaucgugcgguuccccaauaucaccaaucugugccccuucggcgagguguucaaugccaccagauucgccucuguguacgccuggaaccggaagcggaucagcaauugcguggccgacuacuccgugcuguacaacuccgccagcuucagcaccuucaagugcuacggcguguccccuaccaagcugaacgaccugugcuucacaaacguguacgccgacagcuucgugauccggggagaugaagugcggcagauugccccuggacagacaggcaagaucgccgacuacaacuacaagcugcccgacgacuucaccggcugugugauugccuggaacagcaacaaccuggacuccaaagucggcggcaacuacaauuaccuguuccggcuguuccggaaguccaaucugaagcccuucgagcgggacaucagcaccgaaaucuaucaggccggcagcaccccuugcaacggcguggaaggcuucaacugcuacuucccacugcaguccuacggcuuucagcccacaaauggcgugggcuaucagcccuacagagugguggugcugagcuucgaacugcugcaugcuccugccacagugugcggcccuaagaaaagcaccaaucucgugaagaacaaaugcgugaacuucaacuucaacggccugaccggcaccggcgugcugacagagagcaacaagaaguuccugccauuccagcaguuuggccgggauaucgccgauaccacagacgccguuagagauccccagacacuggaaauccuggacaucaccccaugcagcuucggcggagugucugugaucaccccuggcaccaacaccagcaaucagguggcagugcuguaccagggcgugaacuguaccgaagugcccguggccauucacgccgaucagcugacaccuacauggcggguguacuccaccggcagcaauguguuucagaccagagccggcugucugaucggagccgagcacgugaacaauagcuacgagugcgacauccccaucggcgcuggcaucugugccagcuaccagacacagacaaacagccccagacgggcuagaagcguggccagccagagcaucauugccuacacaaugucucugggcgccgagaacagcguggccuacuccaacaacucuaucgcuauccccaccaacuucaccaucagcgugaccaccgagauccugccuguguccaugaccaagaccagcguggacugcaccauguacaucugcggcgauuccaccgagugcuccaaccugcugcugcaguacggcagcuucugcacccagcugaauagagcccugacagggaucgccguggaacaggacaagaacacccaagagguguucgcccaagugaagcaaaucuacaagaccccuccuaucaaggacuucggcggcuucaauuucagccagauucugcccgauccuagcaagcccagcaagcggagcuucaucgaggaccugcuguucaacaaagugacacuggccgacgccggcuucaucaagcaguauggcgauugucugggcgacauugccgccagggaucugauuugcgcccagaaguuuaacggacugacagugcugccuccucugcugaccgaugagaugaucgcccaguacacaucugcccugcuggccggcacaaucacaagcggcuggacauuuggagcuggcgccgcucugcagauccccuuugcuaugcagauggccuaccgguucaacggcaucggagugacccagaaugugcuguacgagaaccagaagcugaucgccaaccaguucaacagcgccaucggcaagauccaggacagccugagcagcacagcaagcgcccugggaaagcugcaggacguggucaaccagaaugcccaggcacugaacacccuggucaagcagcuguccuccaacuucggcgccaucagcucugugcugaacgauauccugagcagacuggacccuccugaggccgaggugcagaucgacagacugaucacaggcagacugcagagccuccagacauacgugacccagcagcugaucagagccgccgagauuagagccucugccaaucuggccgccaccaagaugucugagugugugcugggccagagcaagagaguggacuuuugcggcaagggcuaccaccugaugagcuucccucagucugccccucacggcgugguguuucugcacgugacauaugugcccgcucaagagaagaauuucaccaccgcuccagccaucugccacgacggcaaagcccacuuuccuagagaaggcguguucguguccaacggcacccauugguucgugacacagcggaacuucuacgagccccagaucaucaccaccgacaacaccuucgugucuggcaacugcgacguugugaucggcauugugaacaauaccguguacgacccucugcagcccgagcuggacagcuucaaagaggaacuggacaaguacuuuaagaaccacacaagccccgacguggaccugggcgauaucagcggaaucaaugccagcgucgugaacauccagaaagagaucgaccggcugaacgagguggccaagaaucugaacgagagccugaucgaccugcaagaacuggggaaguacgagcaguacaucaaguggcccugguacaucuggcugggcuuuaucgccggacugauugccaucgugauggucacaaucaugcuguguugcaugaccagcugcuguagcugccugaagggcuguuguagcuguggcagcugcugcaaguucgacgaggacgauucugagcccgugcugaagggcgugaaacugcacuacaccugaggacuaguuauaagacugacuagcccgaugggccucccaacgggcccuccuccccuccuugcaccgagagaucucaaaggcucuuuucagagccaccaaaaaaaaaaaaaaaaaaaaaaaaaaaaaaaaaaaaaaaaaaaaaaaaaaaaaaaaaaaaaaaaaaaaaaaaaaaaaaaaaaaaaaaaaaaaaaaaaaaaa

SEQ ID NO: 24697 - RNA, 4035 nt, Artificial Sequence
  SARS-CoV-2/Wuhan/WIV05/2019__EPI_ISL_402128 spike protein mRNA gc mod (1-1273)(K986P_V987P_D614G_I692V)
aggagaaagcuuaccauguucguguuucuggugcugcugccccugguguccagccagugugugaaccugaccaccagaacacagcugccuccagccuacaccaacagcuucaccagaggcguguacuaccccgacaagguguucagauccagcgugcugcacucuacccaggaccuguuccugccuuucuucagcaacgugaccugguuccacgccauccacguguccggcaccaauggcaccaagagauucgacaaccccgugcugcccuucaacgacgggguguacuuugccagcaccgagaaguccaacaucaucagaggcuggaucuucggcaccacacuggacagcaagacccagagccugcugaucgugaacaacgccaccaacguggucaucaaagugugcgaguuccaguucugcaacgaccccuuccugggcgucuacuaccacaagaacaacaagagcuggauggaaagcgaguuccggguguacagcagcgccaacaacugcaccuucgaguacgugucccagccuuuccugauggaccuggaaggcaagcagggcaacuucaagaaccugcgcgaguucguguucaagaacaucgacggcuacuucaaaaucuacagcaagcacaccccuaucaaccucgugcgggaucugccucagggcuucucugcucuggaaccccugguggaucugcccaucggcaucaacaucacccgguuucagacacugcuggcccugcacagaagcuaccugacaccuggcgauagcagcagcggauggacagcuggugccgccgcuuacuaugugggcuaccugcagccuagaaccuuccugcugaaguacaacgagaacggcaccaucaccgacgccguggauugugcucuggauccucugagcgagacaaagugcacccugaaguccuucaccguggaaaagggcaucuaccagaccagcaacuuccgggugcagcccaccgaauccaucgugcgguuccccaauaucaccaaucugugccccuucggcgagguguucaaugccaccagauucgccucuguguacgccuggaaccggaagcggaucagcaauugcguggccgacuacuccgugcuguacaacuccgccagcuucagcaccuucaagugcuacggcguguccccuaccaagcugaacgaccugugcuucacaaacguguacgccgacagcuucgugauccggggagaugaagugcggcagauugccccuggacagacaggcaagaucgccgacuacaacuacaagcugcccgacgacuucaccggcugugugauugccuggaacagcaacaaccuggacuccaaagucggcggcaacuacaauuaccuguaccggcuguuccggaaguccaaucugaagcccuucgagcgggacaucagcaccgaaaucuaucaggccggcagcaccccuugcaacggcguggaaggcuucaacugcuacuucccacugcaguccuacggcuuucagcccacaaauggcgugggcuaucagcccuacagagugguggugcugagcuucgaacugcugcaugcuccugccacagugugcggcccuaagaaaagcaccaaucucgugaagaacaaaugcgugaacuucaacuucaacggccugaccggcaccggcgugcugacagagagcaacaagaaguuccugccauuccagcaguuuggccgggauaucgccgauaccacagacgccguuagagauccccagacacuggaaauccuggacaucaccccaugcagcuucggcggagugucugugaucaccccuggcaccaacaccagcaaucagguggcagugcuguaccagggcgugaacuguaccgaagugcccguggccauucacgccgaucagcugacaccuacauggcggguguacuccaccggcagcaauguguuucagaccagagccggcugucugaucggagccgagcacgugaacaauagcuacgagugcgacauccccaucggcgcuggcaucugugccagcuaccagacacagacaaacagccccagacgggcuagaagcguggccagccagagcgugauugccuacacaaugucucugggcgccgagaacagcguggccuacuccaacaacucuaucgcuauccccaccaacuucaccaucagcgugaccaccgagauccugccuguguccaugaccaagaccagcguggacugcaccauguacaucugcggcgauuccaccgagugcuccaaccugcugcugcaguacggcagcuucugcacccagcugaauagagcccugacagggaucgccguggaacaggacaagaacacccaagagguguucgcccaagugaagcaaaucuacaagaccccuccuaucaaggacuucggcggcuucaauuucagccagauucugcccgauccuagcaagcccagcaagcggagcuucaucgaggaccugcuguucaacaaagugacacuggccgacgccggcuucaucaagcaguauggcgauugucugggcgacauugccgccagggaucugauuugcgcccagaaguuuaacggacugacagugcugccuccucugcugaccgaugagaugaucgcccaguacacaucugcccugcuggccggcacaaucacaagcggcuggacauuuggagcuggcgccgcucugcagauccccuuugcuaugcagauggccuaccgguucaacggcaucggagugacccagaaugugcuguacgagaaccagaagcugaucgccaaccaguucaacagcgccaucggcaagauccaggacagccugagcagcacagcaagcgcccugggaaagcugcaggacguggucaaccagaaugcccaggcacugaacacccuggucaagcagcuguccuccaacuucggcgccaucagcucugugcugaacgauauccugagcagacuggacccuccugaggccgaggugcagaucgacagacugaucacaggcagacugcagagccuccagacauacgugacccagcagcugaucagagccgccgagauuagagccucugccaaucuggccgccaccaagaugucugagugugugcugggccagagcaagagaguggacuuuugcggcaagggcuaccaccugaugagcuucccucagucugccccucacggcgugguguuucugcacgugacauaugugcccgcucaagagaagaauuucaccaccgcuccagccaucugccacgacggcaaagcccacuuuccuagagaaggcguguucguguccaacggcacccauugguucgugacacagcggaacuucuacgagccccagaucaucaccaccgacaacaccuucgugucuggcaacugcgacguugugaucggcauugugaacaauaccguguacgacccucugcagcccgagcuggacagcuucaaagaggaacuggacaaguacuuuaagaaccacacaagccccgacguggaccugggcgauaucagcggaaucaaugccagcgucgugaacauccagaaagagaucgaccggcugaacgagguggccaagaaucugaacgagagccugaucgaccugcaagaacuggggaaguacgagcaguacaucaaguggcccugguacaucuggcugggcuuuaucgccggacugauugccaucgugauggucacaaucaugcuguguugcaugaccagcugcuguagcugccugaagggcuguuguagcuguggcagcugcugcaaguucgacgaggacgauucugagcccgugcugaagggcgugaaacugcacuacaccugaggacuaguuauaagacugacuagcccgaugggccucccaacgggcccuccuccccuccuugcaccgagagaucucaaaggcucuuuucagagccaccaaaaaaaaaaaaaaaaaaaaaaaaaaaaaaaaaaaaaaaaaaaaaaaaaaaaaaaaaaaaaaaaaaaaaaaaaaaaaaaaaaaaaaaaaaaaaaaaaaaaa

SEQ ID NO: 24698 - RNA, 4035 nt, Artificial Sequence
  SARS-CoV-2/Wuhan/WIV05/2019__EPI_ISL_402128 spike protein mRNA gc mod (1-1273)(K986P_V987P_D614G_M1229I)
aggagaaagcuuaccauguucguguuucuggugcugcugccccugguguccagccagugugugaaccugaccaccagaacacagcugccuccagccuacaccaacagcuucaccagaggcguguacuaccccgacaagguguucagauccagcgugcugcacucuacccaggaccuguuccugccuuucuucagcaacgugaccugguuccacgccauccacguguccggcaccaauggcaccaagagauucgacaaccccgugcugcccuucaacgacgggguguacuuugccagcaccgagaaguccaacaucaucagaggcuggaucuucggcaccacacuggacagcaagacccagagccugcugaucgugaacaacgccaccaacguggucaucaaagugugcgaguuccaguucugcaacgaccccuuccugggcgucuacuaccacaagaacaacaagagcuggauggaaagcgaguuccggguguacagcagcgccaacaacugcaccuucgaguacgugucccagccuuuccugauggaccuggaaggcaagcagggcaacuucaagaaccugcgcgaguucguguucaagaacaucgacggcuacuucaaaaucuacagcaagcacaccccuaucaaccucgugcgggaucugccucagggcuucucugcucuggaaccccugguggaucugcccaucggcaucaacaucacccgguuucagacacugcuggcccugcacagaagcuaccugacaccuggcgauagcagcagcggauggacagcuggugccgccgcuuacuaugugggcuaccugcagccuagaaccuuccugcugaaguacaacgagaacggcaccaucaccgacgccguggauugugcucuggauccucugagcgagacaaagugcacccugaaguccuucaccguggaaaagggcaucuaccagaccagcaacuuccgggugcagcccaccgaauccaucgugcgguuccccaauaucaccaaucugugccccuucggcgagguguucaaugccaccagauucgccucuguguacgccuggaaccggaagcggaucagcaauugcguggccgacuacuccgugcuguacaacuccgccagcuucagcaccuucaagugcuacggcguguccccuaccaagcugaacgaccugugcuucacaaacguguacgccgacagcuucgugauccggggagaugaagugcggcagauugccccuggacagacaggcaagaucgccgacuacaacuacaagcugcccgacgacuucaccggcugugugauugccuggaacagcaacaaccuggacuccaaagucggcggcaacuacaauuaccuguaccggcuguuccggaaguccaaucugaagcccuucgagcgggacaucagcaccgaaaucuaucaggccggcagcaccccuugcaacggcguggaaggcuucaacugcuacuucccacugcaguccuacggcuuucagcccacaaauggcgugggcuaucagcccuacagagugguggugcugagcuucgaacugcugcaugcuccugccacagugugcggcccuaagaaaagcaccaaucucgugaagaacaaaugcgugaacuucaacuucaacggccugaccggcaccggcgugcugacagagagcaacaagaaguuccugccauuccagcaguuuggccgggauaucgccgauaccacagacgccguuagagauccccagacacuggaaauccuggacaucaccccaugcagcuucggcggagugucugugaucaccccuggcaccaacaccagcaaucagguggcagugcuguaccagggcgugaacuguaccgaagugcccguggccauucacgccgaucagcugacaccuacauggcggguguacuccaccggcagcaauguguuucagaccagagccggcugucugaucggagccgagcacgugaacaauagcuacgagugcgacauccccaucggcgcuggcaucugugccagcuaccagacacagacaaacagccccagacgggcuagaagcguggccagccagagcaucauugccuacacaaugucucugggcgccgagaacagcguggccuacuccaacaacucuaucgcuauccccaccaacuucaccaucagcgugaccaccgagauccugccuguguccaugaccaagaccagcguggacugcaccauguacaucugcggcgauuccaccgagugcuccaaccugcugcugcaguacggcagcuucugcacccagcugaauagagcccugacagggaucgccguggaacaggacaagaacacccaagagguguucgcccaagugaagcaaaucuacaagaccccuccuaucaaggacuucggcggcuucaauuucagccagauucugcccgauccuagcaagcccagcaagcggagcuucaucgaggaccugcuguucaacaaagugacacuggccgacgccggcuucaucaagcaguauggcgauugucugggcgacauugccgccagggaucugauuugcgcccagaaguuuaacggacugacagugcugccuccucugcugaccgaugagaugaucgcccaguacacaucugcccugcuggccggcacaaucacaagcggcuggacauuuggagcuggcgccgcucugcagauccccuuugcuaugcagauggccuaccgguucaacggcaucggagugacccagaaugugcuguacgagaaccagaagcugaucgccaaccaguucaacagcgccaucggcaagauccaggacagccugagcagcacagcaagcgcccugggaaagcugcaggacguggucaaccagaaugcccaggcacugaacacccuggucaagcagcuguccuccaacuucggcgccaucagcucugugcugaacgauauccugagcagacuggacccuccugaggccgaggugcagaucgacagacugaucacaggcagacugcagagccuccagacauacgugacccagcagcugaucagagccgccgagauuagagccucugccaaucuggccgccaccaagaugucugagugugugcugggccagagcaagagaguggacuuuugcggcaagggcuaccaccugaugagcuucccucagucugccccucacggcgugguguuucugcacgugacauaugugcccgcucaagagaagaauuucaccaccgcuccagccaucugccacgacggcaaagcccacuuuccuagagaaggcguguucguguccaacggcacccauugguucgugacacagcggaacuucuacgagccccagaucaucaccaccgacaacaccuucgugucuggcaacugcgacguugugaucggcauugugaacaauaccguguacgacccucugcagcccgagcuggacagcuucaaagaggaacuggacaaguacuuuaagaaccacacaagccccgacguggaccugggcgauaucagcggaaucaaugccagcgucgugaacauccagaaagagaucgaccggcugaacgagguggccaagaaucugaacgagagccugaucgaccugcaagaacuggggaaguacgagcaguacaucaaguggcccugguacaucuggcugggcuuuaucgccggacugauugccaucgugaucgucacaaucaugcuguguugcaugaccagcugcuguagcugccugaagggcuguuguagcuguggcagcugcugcaaguucgacgaggacgauucugagcccgugcugaagggcgugaaacugcacuacaccugaggacuaguuauaagacugacuagcccgaugggccucccaacgggcccuccuccccuccuugcaccgagagaucucaaaggcucuuuucagagccaccaaaaaaaaaaaaaaaaaaaaaaaaaaaaaaaaaaaaaaaaaaaaaaaaaaaaaaaaaaaaaaaaaaaaaaaaaaaaaaaaaaaaaaaaaaaaaaaaaaaaa

SEQ ID NO: 24699 - RNA, 4029 nt, Artificial Sequence
  SARS-CoV-2/Wuhan/WIV05/2019__EPI_ISL_402128 spike protein mRNA gc mod (1-1273)(K986P_V987P_H69del_V70del_A222V_Y453F_S477N_D614G_I692V)
aggagaaagcuuaccauguucguguuucuggugcugcugccccugguguccagccagugugugaaccugaccaccagaacacagcugccuccagccuacaccaacagcuucaccagaggcguguacuaccccgacaagguguucagauccagcgugcugcacucuacccaggaccuguuccugccuuucuucagcaacgugaccugguuccacgccaucuccggcaccaauggcaccaagagauucgacaaccccgugcugcccuucaacgacgggguguacuuugccagcaccgagaaguccaacaucaucagaggcuggaucuucggcaccacacuggacagcaagacccagagccugcugaucgugaacaacgccaccaacguggucaucaaagugugcgaguuccaguucugcaacgaccccuuccugggcgucuacuaccacaagaacaacaagagcuggauggaaagcgaguuccggguguacagcagcgccaacaacugcaccuucgaguacgugucccagccuuuccugauggaccuggaaggcaagcagggcaacuucaagaaccugcgcgaguucguguucaagaacaucgacggcuacuucaaaaucuacagcaagcacaccccuaucaaccucgugcgggaucugccucagggcuucucugugcuggaaccccugguggaucugcccaucggcaucaacaucacccgguuucagacacugcuggcccugcacagaagcuaccugacaccuggcgauagcagcagcggauggacagcuggugccgccgcuuacuaugugggcuaccugcagccuagaaccuuccugcugaaguacaacgagaacggcaccaucaccgacgccguggauugugcucuggauccucugagcgagacaaagugcacccugaaguccuucaccguggaaaagggcaucuaccagaccagcaacuuccgggugcagcccaccgaauccaucgugcgguuccccaauaucaccaaucugugccccuucggcgagguguucaaugccaccagauucgccucuguguacgccuggaaccggaagcggaucagcaauugcguggccgacuacuccgugcuguacaacuccgccagcuucagcaccuucaagugcuacggcguguccccuaccaagcugaacgaccugugcuucacaaacguguacgccgacagcuucgugauccggggagaugaagugcggcagauugccccuggacagacaggcaagaucgccgacuacaacuacaagcugcccgacgacuucaccggcugugugauugccuggaacagcaacaaccuggacuccaaagucggcggcaacuacaauuaccuguuccggcuguuccggaaguccaaucugaagcccuucgagcgggacaucagcaccgaaaucuaucaggccggcaacaccccuugcaacggcguggaaggcuucaacugcuacuucccacugcaguccuacggcuuucagcccacaaauggcgugggcuaucagcccuacagagugguggugcugagcuucgaacugcugcaugcuccugccacagugugcggcccuaagaaaagcaccaaucucgugaagaacaaaugcgugaacuucaacuucaacggccugaccggcaccggcgugcugacagagagcaacaagaaguuccugccauuccagcaguuuggccgggauaucgccgauaccacagacgccguuagagauccccagacacuggaaauccuggacaucaccccaugcagcuucggcggagugucugugaucaccccuggcaccaacaccagcaaucagguggcagugcuguaccagggcgugaacuguaccgaagugcccguggccauucacgccgaucagcugacaccuacauggcggguguacuccaccggcagcaauguguuucagaccagagccggcugucugaucggagccgagcacgugaacaauagcuacgagugcgacauccccaucggcgcuggcaucugugccagcuaccagacacagacaaacagccccagacgggcuagaagcguggccagccagagcgugauugccuacacaaugucucugggcgccgagaacagcguggccuacuccaacaacucuaucgcuauccccaccaacuucaccaucagcgugaccaccgagauccugccuguguccaugaccaagaccagcguggacugcaccauguacaucugcggcgauuccaccgagugcuccaaccugcugcugcaguacggcagcuucugcacccagcugaauagagcccugacagggaucgccguggaacaggacaagaacacccaagagguguucgcccaagugaagcaaaucuacaagaccccuccuaucaaggacuucggcggcuucaauuucagccagauucugcccgauccuagcaagcccagcaagcggagcuucaucgaggaccugcuguucaacaaagugacacuggccgacgccggcuucaucaagcaguauggcgauugucugggcgacauugccgccagggaucugauuugcgcccagaaguuuaacggacugacagugcugccuccucugcugaccgaugagaugaucgcccaguacacaucugcccugcuggccggcacaaucacaagcggcuggacauuuggagcuggcgccgcucugcagauccccuuugcuaugcagauggccuaccgguucaacggcaucggagugacccagaaugugcuguacgagaaccagaagcugaucgccaaccaguucaacagcgccaucggcaagauccaggacagccugagcagcacagcaagcgcccugggaaagcugcaggacguggucaaccagaaugcccaggcacugaacacccuggucaagcagcuguccuccaacuucggcgccaucagcucugugcugaacgauauccugagcagacuggacccuccugaggccgaggugcagaucgacagacugaucacaggcagacugcagagccuccagacauacgugacccagcagcugaucagagccgccgagauuagagccucugccaaucuggccgccaccaagaugucugagugugugcugggccagagcaagagaguggacuuuugcggcaagggcuaccaccugaugagcuucccucagucugccccucacggcgugguguuucugcacgugacauaugugcccgcucaagagaagaauuucaccaccgcuccagccaucugccacgacggcaaagcccacuuuccuagagaaggcguguucguguccaacggcacccauugguucgugacacagcggaacuucuacgagccccagaucaucaccaccgacaacaccuucgugucuggcaacugcgacguugugaucggcauugugaacaauaccguguacgacccucugcagcccgagcuggacagcuucaaagaggaacuggacaaguacuuuaagaaccacacaagccccgacguggaccugggcgauaucagcggaaucaaugccagcgucgugaacauccagaaagagaucgaccggcugaacgagguggccaagaaucugaacgagagccugaucgaccugcaagaacuggggaaguacgagcaguacaucaaguggcccugguacaucuggcugggcuuuaucgccggacugauugccaucgugauggucacaaucaugcuguguugcaugaccagcugcuguagcugccugaagggcuguuguagcuguggcagcugcugcaaguucgacgaggacgauucugagcccgugcugaagggcgugaaacugcacuacaccugaggacuaguuauaagacugacuagcccgaugggccucccaacgggcccuccuccccuccuugcaccgagagaucucaaaggcucuuuucagagccaccaaaaaaaaaaaaaaaaaaaaaaaaaaaaaaaaaaaaaaaaaaaaaaaaaaaaaaaaaaaaaaaaaaaaaaaaaaaaaaaaaaaaaaaaaaaaaaaaaaaaa

SEQ ID NO: 24700 - RNA, 4029 nt, Artificial Sequence
  SARS-CoV-2/Wuhan/WIV05/2019__EPI_ISL_402128 spike protein mRNA gc mod (1-1273)(K986P_V987P_H69del_V70del_Y453F_D614G_I692V_M1229I)
aggagaaagcuuaccauguucguguuucuggugcugcugccccugguguccagccagugugugaaccugaccaccagaacacagcugccuccagccuacaccaacagcuucaccagaggcguguacuaccccgacaagguguucagauccagcgugcugcacucuacccaggaccuguuccugccuuucuucagcaacgugaccugguuccacgccaucuccggcaccaauggcaccaagagauucgacaaccccgugcugcccuucaacgacgggguguacuuugccagcaccgagaaguccaacaucaucagaggcuggaucuucggcaccacacuggacagcaagacccagagccugcugaucgugaacaacgccaccaacguggucaucaaagugugcgaguuccaguucugcaacgaccccuuccugggcgucuacuaccacaagaacaacaagagcuggauggaaagcgaguuccggguguacagcagcgccaacaacugcaccuucgaguacgugucccagccuuuccugauggaccuggaaggcaagcagggcaacuucaagaaccugcgcgaguucguguucaagaacaucgacggcuacuucaaaaucuacagcaagcacaccccuaucaaccucgugcgggaucugccucagggcuucucugcucuggaaccccugguggaucugcccaucggcaucaacaucacccgguuucagacacugcuggcccugcacagaagcuaccugacaccuggcgauagcagcagcggauggacagcuggugccgccgcuuacuaugugggcuaccugcagccuagaaccuuccugcugaaguacaacgagaacggcaccaucaccgacgccguggauugugcucuggauccucugagcgagacaaagugcacccugaaguccuucaccguggaaaagggcaucuaccagaccagcaacuuccgggugcagcccaccgaauccaucgugcgguuccccaauaucaccaaucugugccccuucggcgagguguucaaugccaccagauucgccucuguguacgccuggaaccggaagcggaucagcaauugcguggccgacuacuccgugcuguacaacuccgccagcuucagcaccuucaagugcuacggcguguccccuaccaagcugaacgaccugugcuucacaaacguguacgccgacagcuucgugauccggggagaugaagugcggcagauugccccuggacagacaggcaagaucgccgacuacaacuacaagcugcccgacgacuucaccggcugugugauugccuggaacagcaacaaccuggacuccaaagucggcggcaacuacaauuaccuguuccggcuguuccggaaguccaaucugaagcccuucgagcgggacaucagcaccgaaaucuaucaggccggcagcaccccuugcaacggcguggaaggcuucaacugcuacuucccacugcaguccuacggcuuucagcccacaaauggcgugggcuaucagcccuacagagugguggugcugagcuucgaacugcugcaugcuccugccacagugugcggcccuaagaaaagcaccaaucucgugaagaacaaaugcgugaacuucaacuucaacggccugaccggcaccggcgugcugacagagagcaacaagaaguuccugccauuccagcaguuuggccgggauaucgccgauaccacagacgccguuagagauccccagacacuggaaauccuggacaucaccccaugcagcuucggcggagugucugugaucaccccuggcaccaacaccagcaaucagguggcagugcuguaccagggcgugaacuguaccgaagugcccguggccauucacgccgaucagcugacaccuacauggcggguguacuccaccggcagcaauguguuucagaccagagccggcugucugaucggagccgagcacgugaacaauagcuacgagugcgacauccccaucggcgcuggcaucugugccagcuaccagacacagacaaacagccccagacgggcuagaagcguggccagccagagcgugauugccuacacaaugucucugggcgccgagaacagcguggccuacuccaacaacucuaucgcuauccccaccaacuucaccaucagcgugaccaccgagauccugccuguguccaugaccaagaccagcguggacugcaccauguacaucugcggcgauuccaccgagugcuccaaccugcugcugcaguacggcagcuucugcacccagcugaauagagcccugacagggaucgccguggaacaggacaagaacacccaagagguguucgcccaagugaagcaaaucuacaagaccccuccuaucaaggacuucggcggcuucaauuucagccagauucugcccgauccuagcaagcccagcaagcggagcuucaucgaggaccugcuguucaacaaagugacacuggccgacgccggcuucaucaagcaguauggcgauugucugggcgacauugccgccagggaucugauuugcgcccagaaguuuaacggacugacagugcugccuccucugcugaccgaugagaugaucgcccaguacacaucugcccugcuggccggcacaaucacaagcggcuggacauuuggagcuggcgccgcucugcagauccccuuugcuaugcagauggccuaccgguucaacggcaucggagugacccagaaugugcuguacgagaaccagaagcugaucgccaaccaguucaacagcgccaucggcaagauccaggacagccugagcagcacagcaagcgcccugggaaagcugcaggacguggucaaccagaaugcccaggcacugaacacccuggucaagcagcuguccuccaacuucggcgccaucagcucugugcugaacgauauccugagcagacuggacccuccugaggccgaggugcagaucgacagacugaucacaggcagacugcagagccuccagacauacgugacccagcagcugaucagagccgccgagauuagagccucugccaaucuggccgccaccaagaugucugagugugugcugggccagagcaagagaguggacuuuugcggcaagggcuaccaccugaugagcuucccucagucugccccucacggcgugguguuucugcacgugacauaugugcccgcucaagagaagaauuucaccaccgcuccagccaucugccacgacggcaaagcccacuuuccuagagaaggcguguucguguccaacggcacccauugguucgugacacagcggaacuucuacgagccccagaucaucaccaccgacaacaccuucgugucuggcaacugcgacguugugaucggcauugugaacaauaccguguacgacccucugcagcccgagcuggacagcuucaaagaggaacuggacaaguacuuuaagaaccacacaagccccgacguggaccugggcgauaucagcggaaucaaugccagcgucgugaacauccagaaagagaucgaccggcugaacgagguggccaagaaucugaacgagagccugaucgaccugcaagaacuggggaaguacgagcaguacaucaaguggcccugguacaucuggcugggcuuuaucgccggacugauugccaucgugaucgucacaaucaugcuguguugcaugaccagcugcuguagcugccugaagggcuguuguagcuguggcagcugcugcaaguucgacgaggacgauucugagcccgugcugaagggcgugaaacugcacuacaccugaggacuaguuauaagacugacuagcccgaugggccucccaacgggcccuccuccccuccuugcaccgagagaucucaaaggcucuuuucagagccaccaaaaaaaaaaaaaaaaaaaaaaaaaaaaaaaaaaaaaaaaaaaaaaaaaaaaaaaaaaaaaaaaaaaaaaaaaaaaaaaaaaaaaaaaaaaaaaaaaaaaa

SEQ ID NO: 24701 - RNA, 4026 nt, Artificial Sequence
  SARS-CoV-2/Wuhan/WIV05/2019__EPI_ISL_402128 spike protein mRNA gc mod (1-1273)(K986P_V987P_K986P_V987P_H69del_V70del_Y144del_N501Y_A570 D_D614G_P681H_T716I_S982A_D1118H)
aggagaaagcuuaccauguucguguuucuggugcugcugccccugguguccagccagugugugaaccugaccaccagaacacagcugccuccagccuacaccaacagcuucaccagaggcguguacuaccccgacaagguguucagauccagcgugcugcacucuacccaggaccuguuccugccuuucuucagcaacgugaccugguuccacgccaucuccggcaccaauggcaccaagagauucgacaaccccgugcugcccuucaacgacgggguguacuuugccagcaccgagaaguccaacaucaucagaggcuggaucuucggcaccacacuggacagcaagacccagagccugcugaucgugaacaacgccaccaacguggucaucaaagugugcgaguuccaguucugcaacgaccccuuccugggcgucuaccacaagaacaacaagagcuggauggaaagcgaguuccggguguacagcagcgccaacaacugcaccuucgaguacgugucccagccuuuccugauggaccuggaaggcaagcagggcaacuucaagaaccugcgcgaguucguguucaagaacaucgacggcuacuucaaaaucuacagcaagcacaccccuaucaaccucgugcgggaucugccucagggcuucucugcucuggaaccccugguggaucugcccaucggcaucaacaucacccgguuucagacacugcuggcccugcacagaagcuaccugacaccuggcgauagcagcagcggauggacagcuggugccgccgcuuacuaugugggcuaccugcagccuagaaccuuccugcugaaguacaacgagaacggcaccaucaccgacgccguggauugugcucuggauccucugagcgagacaaagugcacccugaaguccuucaccguggaaaagggcaucuaccagaccagcaacuuccgggugcagcccaccgaauccaucgugcgguuccccaauaucaccaaucugugccccuucggcgagguguucaaugccaccagauucgccucuguguacgccuggaaccggaagcggaucagcaauugcguggccgacuacuccgugcuguacaacuccgccagcuucagcaccuucaagugcuacggcguguccccuaccaagcugaacgaccugugcuucacaaacguguacgccgacagcuucgugauccggggagaugaagugcggcagauugccccuggacagacaggcaagaucgccgacuacaacuacaagcugcccgacgacuucaccggcugugugauugccuggaacagcaacaaccuggacuccaaagucggcggcaacuacaauuaccuguaccggcuguuccggaaguccaaucugaagcccuucgagcgggacaucagcaccgaaaucuaucaggccggcagcaccccuugcaacggcguggaaggcuucaacugcuacuucccacugcaguccuacggcuuucagcccacauacggcgugggcuaucagcccuacagagugguggugcugagcuucgaacugcugcaugcuccugccacagugugcggcccuaagaaaagcaccaaucucgugaagaacaaaugcgugaacuucaacuucaacggccugaccggcaccggcgugcugacagagagcaacaagaaguuccugccauuccagcaguuuggccgggauaucgacgauaccacagacgccguuagagauccccagacacuggaaauccuggacaucaccccaugcagcuucggcggagugucugugaucaccccuggcaccaacaccagcaaucagguggcagugcuguaccagggcgugaacuguaccgaagugcccguggccauucacgccgaucagcugacaccuacauggcggguguacuccaccggcagcaauguguuucagaccagagccggcugucugaucggagccgagcacgugaacaauagcuacgagugcgacauccccaucggcgcuggcaucugugccagcuaccagacacagacaaacagccacagacgggcuagaagcguggccagccagagcaucauugccuacacaaugucucugggcgccgagaacagcguggccuacuccaacaacucuaucgcuauccccaucaacuucaccaucagcgugaccaccgagauccugccuguguccaugaccaagaccagcguggacugcaccauguacaucugcggcgauuccaccgagugcuccaaccugcugcugcaguacggcagcuucugcacccagcugaauagagcccugacagggaucgccguggaacaggacaagaacacccaagagguguucgcccaagugaagcaaaucuacaagaccccuccuaucaaggacuucggcggcuucaauuucagccagauucugcccgauccuagcaagcccagcaagcggagcuucaucgaggaccugcuguucaacaaagugacacuggccgacgccggcuucaucaagcaguauggcgauugucugggcgacauugccgccagggaucugauuugcgcccagaaguuuaacggacugacagugcugccuccucugcugaccgaugagaugaucgcccaguacacaucugcccugcuggccggcacaaucacaagcggcuggacauuuggagcuggcgccgcucugcagauccccuuugcuaugcagauggccuaccgguucaacggcaucggagugacccagaaugugcuguacgagaaccagaagcugaucgccaaccaguucaacagcgccaucggcaagauccaggacagccugagcagcacagcaagcgcccugggaaagcugcaggacguggucaaccagaaugcccaggcacugaacacccuggucaagcagcuguccuccaacuucggcgccaucagcucugugcugaacgauauccuggccagacuggacccuccugaggccgaggugcagaucgacagacugaucacaggcagacugcagagccuccagacauacgugacccagcagcugaucagagccgccgagauuagagccucugccaaucuggccgccaccaagaugucugagugugugcugggccagagcaagagaguggacuuuugcggcaagggcuaccaccugaugagcuucccucagucugccccucacggcgugguguuucugcacgugacauaugugcccgcucaagagaagaauuucaccaccgcuccagccaucugccacgacggcaaagcccacuuuccuagagaaggcguguucguguccaacggcacccauugguucgugacacagcggaacuucuacgagccccagaucaucaccacccacaacaccuucgugucuggcaacugcgacguugugaucggcauugugaacaauaccguguacgacccucugcagcccgagcuggacagcuucaaagaggaacuggacaaguacuuuaagaaccacacaagccccgacguggaccugggcgauaucagcggaaucaaugccagcgucgugaacauccagaaagagaucgaccggcugaacgagguggccaagaaucugaacgagagccugaucgaccugcaagaacuggggaaguacgagcaguacaucaaguggcccugguacaucuggcugggcuuuaucgccggacugauugccaucgugauggucacaaucaugcuguguugcaugaccagcugcuguagcugccugaagggcuguuguagcuguggcagcugcugcaaguucgacgaggacgauucugagcccgugcugaagggcgugaaacugcacuacaccugaggacuaguuauaagacugacuagcccgaugggccucccaacgggcccuccuccccuccuugcaccgagagaucucaaaggcucuuuucagagccaccaaaaaaaaaaaaaaaaaaaaaaaaaaaaaaaaaaaaaaaaaaaaaaaaaaaaaaaaaaaaaaaaaaaaaaaaaaaaaaaaaaaaaaaaaaaaaaaaaaaaa

SEQ ID NO: 24702 - RNA, 4035 nt, Artificial Sequence
  SARS-CoV-2/Wuhan/WIV05/2019__EPI_ISL_402128 spike protein mRNA gc mod (1-1273)(K986P_V987P_K986P_V987P_K417N_E484K_N501Y_D614G)
aggagaaagcuuaccauguucguguuucuggugcugcugccccugguguccagccagugugugaaccugaccaccagaacacagcugccuccagccuacaccaacagcuucaccagaggcguguacuaccccgacaagguguucagauccagcgugcugcacucuacccaggaccuguuccugccuuucuucagcaacgugaccugguuccacgccauccacguguccggcaccaauggcaccaagagauucgacaaccccgugcugcccuucaacgacgggguguacuuugccagcaccgagaaguccaacaucaucagaggcuggaucuucggcaccacacuggacagcaagacccagagccugcugaucgugaacaacgccaccaacguggucaucaaagugugcgaguuccaguucugcaacgaccccuuccugggcgucuacuaccacaagaacaacaagagcuggauggaaagcgaguuccggguguacagcagcgccaacaacugcaccuucgaguacgugucccagccuuuccugauggaccuggaaggcaagcagggcaacuucaagaaccugcgcgaguucguguucaagaacaucgacggcuacuucaaaaucuacagcaagcacaccccuaucaaccucgugcgggaucugccucagggcuucucugcucuggaaccccugguggaucugcccaucggcaucaacaucacccgguuucagacacugcuggcccugcacagaagcuaccugacaccuggcgauagcagcagcggauggacagcuggugccgccgcuuacuaugugggcuaccugcagccuagaaccuuccugcugaaguacaacgagaacggcaccaucaccgacgccguggauugugcucuggauccucugagcgagacaaagugcacccugaaguccuucaccguggaaaagggcaucuaccagaccagcaacuuccgggugcagcccaccgaauccaucgugcgguuccccaauaucaccaaucugugccccuucggcgagguguucaaugccaccagauucgccucuguguacgccuggaaccggaagcggaucagcaauugcguggccgacuacuccgugcuguacaacuccgccagcuucagcaccuucaagugcuacggcguguccccuaccaagcugaacgaccugugcuucacaaacguguacgccgacagcuucgugauccggggagaugaagugcggcagauugccccuggacagacaggcaacaucgccgacuacaacuacaagcugcccgacgacuucaccggcugugugauugccuggaacagcaacaaccuggacuccaaagucggcggcaacuacaauuaccuguaccggcuguuccggaaguccaaucugaagcccuucgagcgggacaucagcaccgaaaucuaucaggccggcagcaccccuugcaacggcgugaagggcuucaacugcuacuucccacugcaguccuacggcuuucagcccacauacggcgugggcuaucagcccuacagagugguggugcugagcuucgaacugcugcaugcuccugccacagugugcggcccuaagaaaagcaccaaucucgugaagaacaaaugcgugaacuucaacuucaacggccugaccggcaccggcgugcugacagagagcaacaagaaguuccugccauuccagcaguuuggccgggauaucgccgauaccacagacgccguuagagauccccagacacuggaaauccuggacaucaccccaugcagcuucggcggagugucugugaucaccccuggcaccaacaccagcaaucagguggcagugcuguaccagggcgugaacuguaccgaagugcccguggccauucacgccgaucagcugacaccuacauggcggguguacuccaccggcagcaauguguuucagaccagagccggcugucugaucggagccgagcacgugaacaauagcuacgagugcgacauccccaucggcgcuggcaucugugccagcuaccagacacagacaaacagccccagacgggcuagaagcguggccagccagagcaucauugccuacacaaugucucugggcgccgagaacagcguggccuacuccaacaacucuaucgcuauccccaccaacuucaccaucagcgugaccaccgagauccugccuguguccaugaccaagaccagcguggacugcaccauguacaucugcggcgauuccaccgagugcuccaaccugcugcugcaguacggcagcuucugcacccagcugaauagagcccugacagggaucgccguggaacaggacaagaacacccaagagguguucgcccaagugaagcaaaucuacaagaccccuccuaucaaggacuucggcggcuucaauuucagccagauucugcccgauccuagcaagcccagcaagcggagcuucaucgaggaccugcuguucaacaaagugacacuggccgacgccggcuucaucaagcaguauggcgauugucugggcgacauugccgccagggaucugauuugcgcccagaaguuuaacggacugacagugcugccuccucugcugaccgaugagaugaucgcccaguacacaucugcccugcuggccggcacaaucacaagcggcuggacauuuggagcuggcgccgcucugcagauccccuuugcuaugcagauggccuaccgguucaacggcaucggagugacccagaaugugcuguacgagaaccagaagcugaucgccaaccaguucaacagcgccaucggcaagauccaggacagccugagcagcacagcaagcgcccugggaaagcugcaggacguggucaaccagaaugcccaggcacugaacacccuggucaagcagcuguccuccaacuucggcgccaucagcucugugcugaacgauauccugagcagacuggacccuccugaggccgaggugcagaucgacagacugaucacaggcagacugcagagccuccagacauacgugacccagcagcugaucagagccgccgagauuagagccucugccaaucuggccgccaccaagaugucugagugugugcugggccagagcaagagaguggacuuuugcggcaagggcuaccaccugaugagcuucccucagucugccccucacggcgugguguuucugcacgugacauaugugcccgcucaagagaagaauuucaccaccgcuccagccaucugccacgacggcaaagcccacuuuccuagagaaggcguguucguguccaacggcacccauugguucgugacacagcggaacuucuacgagccccagaucaucaccaccgacaacaccuucgugucuggcaacugcgacguugugaucggcauugugaacaauaccguguacgacccucugcagcccgagcuggacagcuucaaagaggaacuggacaaguacuuuaagaaccacacaagccccgacguggaccugggcgauaucagcggaaucaaugccagcgucgugaacauccagaaagagaucgaccggcugaacgagguggccaagaaucugaacgagagccugaucgaccugcaagaacuggggaaguacgagcaguacaucaaguggcccugguacaucuggcugggcuuuaucgccggacugauugccaucgugauggucacaaucaugcuguguugcaugaccagcugcuguagcugccugaagggcuguuguagcuguggcagcugcugcaaguucgacgaggacgauucugagcccgugcugaagggcgugaaacugcacuacaccugaggacuaguuauaagacugacuagcccgaugggccucccaacgggcccuccuccccuccuugcaccgagagaucucaaaggcucuuuucagagccaccaaaaaaaaaaaaaaaaaaaaaaaaaaaaaaaaaaaaaaaaaaaaaaaaaaaaaaaaaaaaaaaaaaaaaaaaaaaaaaaaaaaaaaaaaaaaaaaaaaaaa

SEQ ID NO: 24703 - RNA, 4026 nt, Artificial Sequence
  SARS-CoV-2/Wuhan/WIV05/2019__EPI_ISL_402128 spike protein mRNA gc mod (1-1273)(K986P_V987P_K986P_V987P_L18F_D80A_D215G_L242del_A243del_ L244del_R246I_K417N_E484K_N501Y_D614G_A701V)
aggagaaagcuuaccauguucguguuucuggugcugcugccccugguguccagccagugugugaacuucaccaccagaacacagcugccuccagccuacaccaacagcuucaccagaggcguguacuaccccgacaagguguucagauccagcgugcugcacucuacccaggaccuguuccugccuuucuucagcaacgugaccugguuccacgccauccacguguccggcaccaauggcaccaagagauucgccaaccccgugcugcccuucaacgacgggguguacuuugccagcaccgagaaguccaacaucaucagaggcuggaucuucggcaccacacuggacagcaagacccagagccugcugaucgugaacaacgccaccaacguggucaucaaagugugcgaguuccaguucugcaacgaccccuuccugggcgucuacuaccacaagaacaacaagagcuggauggaaagcgaguuccggguguacagcagcgccaacaacugcaccuucgaguacgugucccagccuuuccugauggaccuggaaggcaagcagggcaacuucaagaaccugcgcgaguucguguucaagaacaucgacggcuacuucaaaaucuacagcaagcacaccccuaucaaccucgugcggggccugccucagggcuucucugcucuggaaccccugguggaucugcccaucggcaucaacaucacccgguuucagacacugcacaucagcuaccugacaccuggcgauagcagcagcggauggacagcuggugccgccgcuuacuaugugggcuaccugcagccuagaaccuuccugcugaaguacaacgagaacggcaccaucaccgacgccguggauugugcucuggauccucugagcgagacaaagugcacccugaaguccuucaccguggaaaagggcaucuaccagaccagcaacuuccgggugcagcccaccgaauccaucgugcgguuccccaauaucaccaaucugugccccuucggcgagguguucaaugccaccagauucgccucuguguacgccuggaaccggaagcggaucagcaauugcguggccgacuacuccgugcuguacaacuccgccagcuucagcaccuucaagugcuacggcguguccccuaccaagcugaacgaccugugcuucacaaacguguacgccgacagcuucgugauccggggagaugaagugcggcagauugccccuggacagacaggcaacaucgccgacuacaacuacaagcugcccgacgacuucaccggcugugugauugccuggaacagcaacaaccuggacuccaaagucggcggcaacuacaauuaccuguaccggcuguuccggaaguccaaucugaagcccuucgagcgggacaucagcaccgaaaucuaucaggccggcagcaccccuugcaacggcgugaagggcuucaacugcuacuucccacugcaguccuacggcuuucagcccacauacggcgugggcuaucagcccuacagagugguggugcugagcuucgaacugcugcaugcuccugccacagugugcggcccuaagaaaagcaccaaucucgugaagaacaaaugcgugaacuucaacuucaacggccugaccggcaccggcgugcugacagagagcaacaagaaguuccugccauuccagcaguuuggccgggauaucgccgauaccacagacgccguuagagauccccagacacuggaaauccuggacaucaccccaugcagcuucggcggagugucugugaucaccccuggcaccaacaccagcaaucagguggcagugcuguaccagggcgugaacuguaccgaagugcccguggccauucacgccgaucagcugacaccuacauggcggguguacuccaccggcagcaauguguuucagaccagagccggcugucugaucggagccgagcacgugaacaauagcuacgagugcgacauccccaucggcgcuggcaucugugccagcuaccagacacagacaaacagccccagacgggcuagaagcguggccagccagagcaucauugccuacacaaugucucugggcguggagaacagcguggccuacuccaacaacucuaucgcuauccccaccaacuucaccaucagcgugaccaccgagauccugccuguguccaugaccaagaccagcguggacugcaccauguacaucugcggcgauuccaccgagugcuccaaccugcugcugcaguacggcagcuucugcacccagcugaauagagcccugacagggaucgccguggaacaggacaagaacacccaagagguguucgcccaagugaagcaaaucuacaagaccccuccuaucaaggacuucggcggcuucaauuucagccagauucugcccgauccuagcaagcccagcaagcggagcuucaucgaggaccugcuguucaacaaagugacacuggccgacgccggcuucaucaagcaguauggcgauugucugggcgacauugccgccagggaucugauuugcgcccagaaguuuaacggacugacagugcugccuccucugcugaccgaugagaugaucgcccaguacacaucugcccugcuggccggcacaaucacaagcggcuggacauuuggagcuggcgccgcucugcagauccccuuugcuaugcagauggccuaccgguucaacggcaucggagugacccagaaugugcuguacgagaaccagaagcugaucgccaaccaguucaacagcgccaucggcaagauccaggacagccugagcagcacagcaagcgcccugggaaagcugcaggacguggucaaccagaaugcccaggcacugaacacccuggucaagcagcuguccuccaacuucggcgccaucagcucugugcugaacgauauccugagcagacuggacccuccugaggccgaggugcagaucgacagacugaucacaggcagacugcagagccuccagacauacgugacccagcagcugaucagagccgccgagauuagagccucugccaaucuggccgccaccaagaugucugagugugugcugggccagagcaagagaguggacuuuugcggcaagggcuaccaccugaugagcuucccucagucugccccucacggcgugguguuucugcacgugacauaugugcccgcucaagagaagaauuucaccaccgcuccagccaucugccacgacggcaaagcccacuuuccuagagaaggcguguucguguccaacggcacccauugguucgugacacagcggaacuucuacgagccccagaucaucaccaccgacaacaccuucgugucuggcaacugcgacguugugaucggcauugugaacaauaccguguacgacccucugcagcccgagcuggacagcuucaaagaggaacuggacaaguacuuuaagaaccacacaagccccgacguggaccugggcgauaucagcggaaucaaugccagcgucgugaacauccagaaagagaucgaccggcugaacgagguggccaagaaucugaacgagagccugaucgaccugcaagaacuggggaaguacgagcaguacaucaaguggcccugguacaucuggcugggcuuuaucgccggacugauugccaucgugauggucacaaucaugcuguguugcaugaccagcugcuguagcugccugaagggcuguuguagcuguggcagcugcugcaaguucgacgaggacgauucugagcccgugcugaagggcgugaaacugcacuacaccugaggacuaguuauaagacugacuagcccgaugggccucccaacgggcccuccuccccuccuugcaccgagagaucucaaaggcucuuuucagagccaccaaaaaaaaaaaaaaaaaaaaaaaaaaaaaaaaaaaaaaaaaaaaaaaaaaaaaaaaaaaaaaaaaaaaaaaaaaaaaaaaaaaaaaaaaaaaaaaaaaaaa

SEQ ID NO: 24704 - RNA, 4035 nt, Artificial Sequence
  SARS-CoV-2/Wuhan/WIV05/2019__EPI_ISL_402128 spike protein mRNA gc mod (1-1273)(K986P_V987P_K986P_V987P_E484K_D614G)
aggagaaagcuuaccauguucguguuucuggugcugcugccccugguguccagccagugugugaaccugaccaccagaacacagcugccuccagccuacaccaacagcuucaccagaggcguguacuaccccgacaagguguucagauccagcgugcugcacucuacccaggaccuguuccugccuuucuucagcaacgugaccugguuccacgccauccacguguccggcaccaauggcaccaagagauucgacaaccccgugcugcccuucaacgacgggguguacuuugccagcaccgagaaguccaacaucaucagaggcuggaucuucggcaccacacuggacagcaagacccagagccugcugaucgugaacaacgccaccaacguggucaucaaagugugcgaguuccaguucugcaacgaccccuuccugggcgucuacuaccacaagaacaacaagagcuggauggaaagcgaguuccggguguacagcagcgccaacaacugcaccuucgaguacgugucccagccuuuccugauggaccuggaaggcaagcagggcaacuucaagaaccugcgcgaguucguguucaagaacaucgacggcuacuucaaaaucuacagcaagcacaccccuaucaaccucgugcgggaucugccucagggcuucucugcucuggaaccccugguggaucugcccaucggcaucaacaucacccgguuucagacacugcuggcccugcacagaagcuaccugacaccuggcgauagcagcagcggauggacagcuggugccgccgcuuacuaugugggcuaccugcagccuagaaccuuccugcugaaguacaacgagaacggcaccaucaccgacgccguggauugugcucuggauccucugagcgagacaaagugcacccugaaguccuucaccguggaaaagggcaucuaccagaccagcaacuuccgggugcagcccaccgaauccaucgugcgguuccccaauaucaccaaucugugccccuucggcgagguguucaaugccaccagauucgccucuguguacgccuggaaccggaagcggaucagcaauugcguggccgacuacuccgugcuguacaacuccgccagcuucagcaccuucaagugcuacggcguguccccuaccaagcugaacgaccugugcuucacaaacguguacgccgacagcuucgugauccggggagaugaagugcggcagauugccccuggacagacaggcaagaucgccgacuacaacuacaagcugcccgacgacuucaccggcugugugauugccuggaacagcaacaaccuggacuccaaagucggcggcaacuacaauuaccuguaccggcuguuccggaaguccaaucugaagcccuucgagcgggacaucagcaccgaaaucuaucaggccggcagcaccccuugcaacggcgugaagggcuucaacugcuacuucccacugcaguccuacggcuuucagcccacaaauggcgugggcuaucagcccuacagagugguggugcugagcuucgaacugcugcaugcuccugccacagugugcggcccuaagaaaagcaccaaucucgugaagaacaaaugcgugaacuucaacuucaacggccugaccggcaccggcgugcugacagagagcaacaagaaguuccugccauuccagcaguuuggccgggauaucgccgauaccacagacgccguuagagauccccagacacuggaaauccuggacaucaccccaugcagcuucggcggagugucugugaucaccccuggcaccaacaccagcaaucagguggcagugcuguaccagggcgugaacuguaccgaagugcccguggccauucacgccgaucagcugacaccuacauggcggguguacuccaccggcagcaauguguuucagaccagagccggcugucugaucggagccgagcacgugaacaauagcuacgagugcgacauccccaucggcgcuggcaucugugccagcuaccagacacagacaaacagccccagacgggcuagaagcguggccagccagagcaucauugccuacacaaugucucugggcgccgagaacagcguggccuacuccaacaacucuaucgcuauccccaccaacuucaccaucagcgugaccaccgagauccugccuguguccaugaccaagaccagcguggacugcaccauguacaucugcggcgauuccaccgagugcuccaaccugcugcugcaguacggcagcuucugcacccagcugaauagagcccugacagggaucgccguggaacaggacaagaacacccaagagguguucgcccaagugaagcaaaucuacaagaccccuccuaucaaggacuucggcggcuucaauuucagccagauucugcccgauccuagcaagcccagcaagcggagcuucaucgaggaccugcuguucaacaaagugacacuggccgacgccggcuucaucaagcaguauggcgauugucugggcgacauugccgccagggaucugauuugcgcccagaaguuuaacggacugacagugcugccuccucugcugaccgaugagaugaucgcccaguacacaucugcccugcuggccggcacaaucacaagcggcuggacauuuggagcuggcgccgcucugcagauccccuuugcuaugcagauggccuaccgguucaacggcaucggagugacccagaaugugcuguacgagaaccagaagcugaucgccaaccaguucaacagcgccaucggcaagauccaggacagccugagcagcacagcaagcgcccugggaaagcugcaggacguggucaaccagaaugcccaggcacugaacacccuggucaagcagcuguccuccaacuucggcgccaucagcucugugcugaacgauauccugagcagacuggacccuccugaggccgaggugcagaucgacagacugaucacaggcagacugcagagccuccagacauacgugacccagcagcugaucagagccgccgagauuagagccucugccaaucuggccgccaccaagaugucugagugugugcugggccagagcaagagaguggacuuuugcggcaagggcuaccaccugaugagcuucccucagucugccccucacggcgugguguuucugcacgugacauaugugcccgcucaagagaagaauuucaccaccgcuccagccaucugccacgacggcaaagcccacuuuccuagagaaggcguguucguguccaacggcacccauugguucgugacacagcggaacuucuacgagccccagaucaucaccaccgacaacaccuucgugucuggcaacugcgacguugugaucggcauugugaacaauaccguguacgacccucugcagcccgagcuggacagcuucaaagaggaacuggacaaguacuuuaagaaccacacaagccccgacguggaccugggcgauaucagcggaaucaaugccagcgucgugaacauccagaaagagaucgaccggcugaacgagguggccaagaaucugaacgagagccugaucgaccugcaagaacuggggaaguacgagcaguacaucaaguggcccugguacaucuggcugggcuuuaucgccggacugauugccaucgugauggucacaaucaugcuguguugcaugaccagcugcuguagcugccugaagggcuguuguagcuguggcagcugcugcaaguucgacgaggacgauucugagcccgugcugaagggcgugaaacugcacuacaccugaggacuaguuauaagacugacuagcccgaugggccucccaacgggcccuccuccccuccuugcaccgagagaucucaaaggcucuuuucagagccaccaaaaaaaaaaaaaaaaaaaaaaaaaaaaaaaaaaaaaaaaaaaaaaaaaaaaaaaaaaaaaaaaaaaaaaaaaaaaaaaaaaaaaaaaaaaaaaaaaaaaa

SEQ ID NO: 24705 - RNA, 4035 nt, Artificial Sequence
  SARS-CoV-2/Wuhan/WIV05/2019__EPI_ISL_402128 spike protein mRNA gc mod (1-1273)(K986P_V987P_K986P_V987P_L18F_T20N_P26S_D138Y_R190S_K417T _E484K_N501Y_D614G_H655Y_T1027I)
aggagaaagcuuaccauguucguguuucuggugcugcugccccugguguccagccagugugugaacuucaccaacagaacacagcugccuagcgccuacaccaacagcuucaccagaggcguguacuaccccgacaagguguucagauccagcgugcugcacucuacccaggaccuguuccugccuuucuucagcaacgugaccugguuccacgccauccacguguccggcaccaauggcaccaagagauucgacaaccccgugcugcccuucaacgacgggguguacuuugccagcaccgagaaguccaacaucaucagaggcuggaucuucggcaccacacuggacagcaagacccagagccugcugaucgugaacaacgccaccaacguggucaucaaagugugcgaguuccaguucugcaacuaccccuuccugggcgucuacuaccacaagaacaacaagagcuggauggaaagcgaguuccggguguacagcagcgccaacaacugcaccuucgaguacgugucccagccuuuccugauggaccuggaaggcaagcagggcaacuucaagaaccugagcgaguucguguucaagaacaucgacggcuacuucaaaaucuacagcaagcacaccccuaucaaccucgugcgggaucugccucagggcuucucugcucuggaaccccugguggaucugcccaucggcaucaacaucacccgguuucagacacugcuggcccugcacagaagcuaccugacaccuggcgauagcagcagcggauggacagcuggugccgccgcuuacuaugugggcuaccugcagccuagaaccuuccugcugaaguacaacgagaacggcaccaucaccgacgccguggauugugcucuggauccucugagcgagacaaagugcacccugaaguccuucaccguggaaaagggcaucuaccagaccagcaacuuccgggugcagcccaccgaauccaucgugcgguuccccaauaucaccaaucugugccccuucggcgagguguucaaugccaccagauucgccucuguguacgccuggaaccggaagcggaucagcaauugcguggccgacuacuccgugcuguacaacuccgccagcuucagcaccuucaagugcuacggcguguccccuaccaagcugaacgaccugugcuucacaaacguguacgccgacagcuucgugauccggggagaugaagugcggcagauugccccuggacagacaggcaccaucgccgacuacaacuacaagcugcccgacgacuucaccggcugugugauugccuggaacagcaacaaccuggacuccaaagucggcggcaacuacaauuaccuguaccggcuguuccggaaguccaaucugaagcccuucgagcgggacaucagcaccgaaaucuaucaggccggcagcaccccuugcaacggcgugaagggcuucaacugcuacuucccacugcaguccuacggcuuucagcccacauacggcgugggcuaucagcccuacagagugguggugcugagcuucgaacugcugcaugcuccugccacagugugcggcccuaagaaaagcaccaaucucgugaagaacaaaugcgugaacuucaacuucaacggccugaccggcaccggcgugcugacagagagcaacaagaaguuccugccauuccagcaguuuggccgggauaucgccgauaccacagacgccguuagagauccccagacacuggaaauccuggacaucaccccaugcagcuucggcggagugucugugaucaccccuggcaccaacaccagcaaucagguggcagugcuguaccagggcgugaacuguaccgaagugcccguggccauucacgccgaucagcugacaccuacauggcggguguacuccaccggcagcaauguguuucagaccagagccggcugucugaucggagccgaguacgugaacaauagcuacgagugcgacauccccaucggcgcuggcaucugugccagcuaccagacacagacaaacagccccagacgggcuagaagcguggccagccagagcaucauugccuacacaaugucucugggcgccgagaacagcguggccuacuccaacaacucuaucgcuauccccaccaacuucaccaucagcgugaccaccgagauccugccuguguccaugaccaagaccagcguggacugcaccauguacaucugcggcgauuccaccgagugcuccaaccugcugcugcaguacggcagcuucugcacccagcugaauagagcccugacagggaucgccguggaacaggacaagaacacccaagagguguucgcccaagugaagcaaaucuacaagaccccuccuaucaaggacuucggcggcuucaauuucagccagauucugcccgauccuagcaagcccagcaagcggagcuucaucgaggaccugcuguucaacaaagugacacuggccgacgccggcuucaucaagcaguauggcgauugucugggcgacauugccgccagggaucugauuugcgcccagaaguuuaacggacugacagugcugccuccucugcugaccgaugagaugaucgcccaguacacaucugcccugcuggccggcacaaucacaagcggcuggacauuuggagcuggcgccgcucugcagauccccuuugcuaugcagauggccuaccgguucaacggcaucggagugacccagaaugugcuguacgagaaccagaagcugaucgccaaccaguucaacagcgccaucggcaagauccaggacagccugagcagcacagcaagcgcccugggaaagcugcaggacguggucaaccagaaugcccaggcacugaacacccuggucaagcagcuguccuccaacuucggcgccaucagcucugugcugaacgauauccugagcagacuggacccuccugaggccgaggugcagaucgacagacugaucacaggcagacugcagagccuccagacauacgugacccagcagcugaucagagccgccgagauuagagccucugccaaucuggccgccaucaagaugucugagugugugcugggccagagcaagagaguggacuuuugcggcaagggcuaccaccugaugagcuucccucagucugccccucacggcgugguguuucugcacgugacauaugugcccgcucaagagaagaauuucaccaccgcuccagccaucugccacgacggcaaagcccacuuuccuagagaaggcguguucguguccaacggcacccauugguucgugacacagcggaacuucuacgagccccagaucaucaccaccgacaacaccuucgugucuggcaacugcgacguugugaucggcauugugaacaauaccguguacgacccucugcagcccgagcuggacagcuucaaagaggaacuggacaaguacuuuaagaaccacacaagccccgacguggaccugggcgauaucagcggaaucaaugccagcgucgugaacauccagaaagagaucgaccggcugaacgagguggccaagaaucugaacgagagccugaucgaccugcaagaacuggggaaguacgagcaguacaucaaguggcccugguacaucuggcugggcuuuaucgccggacugauugccaucgugauggucacaaucaugcuguguugcaugaccagcugcuguagcugccugaagggcuguuguagcuguggcagcugcugcaaguucgacgaggacgauucugagcccgugcugaagggcgugaaacugcacuacaccugaggacuaguuauaagacugacuagcccgaugggccucccaacgggcccuccuccccuccuugcaccgagagaucucaaaggcucuuuucagagccaccaaaaaaaaaaaaaaaaaaaaaaaaaaaaaaaaaaaaaaaaaaaaaaaaaaaaaaaaaaaaaaaaaaaaaaaaaaaaaaaaaaaaaaaaaaaaaaaaaaaaa

SEQ ID NO: 24706 - RNA, 4035 nt, Artificial Sequence
  SARS-CoV-2/Wuhan/WIV05/2019__EPI_ISL_402128 spike protein mRNA gc mod (1-1273)(K986P_V987P_K986P_V987P_S13I_W152C_L452R_D614G)
aggagaaagcuuaccauguucguguuucuggugcugcugccccugguguccauccagugugugaaccugaccaccagaacacagcugccuccagccuacaccaacagcuucaccagaggcguguacuaccccgacaagguguucagauccagcgugcugcacucuacccaggaccuguuccugccuuucuucagcaacgugaccugguuccacgccauccacguguccggcaccaauggcaccaagagauucgacaaccccgugcugcccuucaacgacgggguguacuuugccagcaccgagaaguccaacaucaucagaggcuggaucuucggcaccacacuggacagcaagacccagagccugcugaucgugaacaacgccaccaacguggucaucaaagugugcgaguuccaguucugcaacgaccccuuccugggcgucuacuaccacaagaacaacaagagcugcauggaaagcgaguuccggguguacagcagcgccaacaacugcaccuucgaguacgugucccagccuuuccugauggaccuggaaggcaagcagggcaacuucaagaaccugcgcgaguucguguucaagaacaucgacggcuacuucaaaaucuacagcaagcacaccccuaucaaccucgugcgggaucugccucagggcuucucugcucuggaaccccugguggaucugcccaucggcaucaacaucacccgguuucagacacugcuggcccugcacagaagcuaccugacaccuggcgauagcagcagcggauggacagcuggugccgccgcuuacuaugugggcuaccugcagccuagaaccuuccugcugaaguacaacgagaacggcaccaucaccgacgccguggauugugcucuggauccucugagcgagacaaagugcacccugaaguccuucaccguggaaaagggcaucuaccagaccagcaacuuccgggugcagcccaccgaauccaucgugcgguuccccaauaucaccaaucugugccccuucggcgagguguucaaugccaccagauucgccucuguguacgccuggaaccggaagcggaucagcaauugcguggccgacuacuccgugcuguacaacuccgccagcuucagcaccuucaagugcuacggcguguccccuaccaagcugaacgaccugugcuucacaaacguguacgccgacagcuucgugauccggggagaugaagugcggcagauugccccuggacagacaggcaagaucgccgacuacaacuacaagcugcccgacgacuucaccggcugugugauugccuggaacagcaacaaccuggacuccaaagucggcggcaacuacaauuaccgcuaccggcuguuccggaaguccaaucugaagcccuucgagcgggacaucagcaccgaaaucuaucaggccggcagcaccccuugcaacggcguggaaggcuucaacugcuacuucccacugcaguccuacggcuuucagcccacaaauggcgugggcuaucagcccuacagagugguggugcugagcuucgaacugcugcaugcuccugccacagugugcggcccuaagaaaagcaccaaucucgugaagaacaaaugcgugaacuucaacuucaacggccugaccggcaccggcgugcugacagagagcaacaagaaguuccugccauuccagcaguuuggccgggauaucgccgauaccacagacgccguuagagauccccagacacuggaaauccuggacaucaccccaugcagcuucggcggagugucugugaucaccccuggcaccaacaccagcaaucagguggcagugcuguaccagggcgugaacuguaccgaagugcccguggccauucacgccgaucagcugacaccuacauggcggguguacuccaccggcagcaauguguuucagaccagagccggcugucugaucggagccgagcacgugaacaauagcuacgagugcgacauccccaucggcgcuggcaucugugccagcuaccagacacagacaaacagccccagacgggcuagaagcguggccagccagagcaucauugccuacacaaugucucugggcgccgagaacagcguggccuacuccaacaacucuaucgcuauccccaccaacuucaccaucagcgugaccaccgagauccugccuguguccaugaccaagaccagcguggacugcaccauguacaucugcggcgauuccaccgagugcuccaaccugcugcugcaguacggcagcuucugcacccagcugaauagagcccugacagggaucgccguggaacaggacaagaacacccaagagguguucgcccaagugaagcaaaucuacaagaccccuccuaucaaggacuucggcggcuucaauuucagccagauucugcccgauccuagcaagcccagcaagcggagcuucaucgaggaccugcuguucaacaaagugacacuggccgacgccggcuucaucaagcaguauggcgauugucugggcgacauugccgccagggaucugauuugcgcccagaaguuuaacggacugacagugcugccuccucugcugaccgaugagaugaucgcccaguacacaucugcccugcuggccggcacaaucacaagcggcuggacauuuggagcuggcgccgcucugcagauccccuuugcuaugcagauggccuaccgguucaacggcaucggagugacccagaaugugcuguacgagaaccagaagcugaucgccaaccaguucaacagcgccaucggcaagauccaggacagccugagcagcacagcaagcgcccugggaaagcugcaggacguggucaaccagaaugcccaggcacugaacacccuggucaagcagcuguccuccaacuucggcgccaucagcucugugcugaacgauauccugagcagacuggacccuccugaggccgaggugcagaucgacagacugaucacaggcagacugcagagccuccagacauacgugacccagcagcugaucagagccgccgagauuagagccucugccaaucuggccgccaccaagaugucugagugugugcugggccagagcaagagaguggacuuuugcggcaagggcuaccaccugaugagcuucccucagucugccccucacggcgugguguuucugcacgugacauaugugcccgcucaagagaagaauuucaccaccgcuccagccaucugccacgacggcaaagcccacuuuccuagagaaggcguguucguguccaacggcacccauugguucgugacacagcggaacuucuacgagccccagaucaucaccaccgacaacaccuucgugucuggcaacugcgacguugugaucggcauugugaacaauaccguguacgacccucugcagcccgagcuggacagcuucaaagaggaacuggacaaguacuuuaagaaccacacaagccccgacguggaccugggcgauaucagcggaaucaaugccagcgucgugaacauccagaaagagaucgaccggcugaacgagguggccaagaaucugaacgagagccugaucgaccugcaagaacuggggaaguacgagcaguacaucaaguggcccugguacaucuggcugggcuuuaucgccggacugauugccaucgugauggucacaaucaugcuguguugcaugaccagcugcuguagcugccugaagggcuguuguagcuguggcagcugcugcaaguucgacgaggacgauucugagcccgugcugaagggcgugaaacugcacuacaccugaggacuaguuauaagacugacuagcccgaugggccucccaacgggcccuccuccccuccuugcaccgagagaucucaaaggcucuuuucagagccaccaaaaaaaaaaaaaaaaaaaaaaaaaaaaaaaaaaaaaaaaaaaaaaaaaaaaaaaaaaaaaaaaaaaaaaaaaaaaaaaaaaaaaaaaaaaaaaaaaaaaa

SEQ ID NO: 24707 - RNA, 4035 nt, Artificial Sequence
  SARS-CoV-2/Wuhan/WIV05/2019__EPI_ISL_402128 spike protein mRNA gc mod (1-1273)(K986P_V987P)
aggagaaagcuuaccauguucguguuccuggugcugcugccucugguguccagccagugugugaaccugaccaccagaacacagcugccuccagccuacaccaacagcuuuaccagaggcguguacuaccccgacaagguguucagauccagcgugcugcacucuacccaggaccuguuccugccuuucuucagcaacgugaccugguuccacgccauccacguguccggcaccaauggcaccaagagauucgacaaccccgugcugcccuucaacgacgggguguacuuugccagcaccgagaaguccaacaucaucagaggcuggaucuucggcaccacacuggacagcaagacccagagccugcugaucgugaacaacgccaccaacguggucaucaaagugugcgaguuccaguucugcaacgaccccuuccugggcgucuacuaccacaagaacaacaagagcuggauggaaagcgaguuccggguguacagcagcgccaacaacugcaccuucgaguacgugucccagccuuuccugauggaccuggaaggcaagcagggcaacuucaagaaccugcgcgaguucguguuuaagaacaucgacggcuacuucaagaucuacagcaagcacaccccuaucaaccucgugcgggaucugccucagggcuucucugcucuggaaccccugguggaucugcccaucggcaucaacaucacccgguuucagacacugcuggcccugcacagaagcuaccugacaccuggcgauagcagcagcggauggacagcuggugccgccgcuuacuaugugggcuaccugcagccuagaaccuuccugcugaaguacaacgagaacggcaccaucaccgacgccguggauugugcucuggauccucugagcgagacaaagugcacccugaaguccuucaccguggaaaagggcaucuaccagaccagcaacuuccgggugcagcccaccgaauccaucgugcgguuccccaauaucaccaaucugugccccuucggcgagguguucaaugccaccagauucgccucuguguacgccuggaaccggaagcggaucagcaauugcguggccgacuacuccgugcuguacaacuccgccagcuucagcaccuucaagugcuacggcguguccccuaccaagcugaacgaccugugcuucacaaacguguacgccgacagcuucgugauccggggagaugaagugcggcagauugccccuggacagacaggcaagaucgccgacuacaacuacaagcugcccgacgacuucaccggcugugugauugccuggaacagcaacaaccuggacuccaaagucggcggcaacuacaauuaccuguaccggcuguuccggaaguccaaucugaagcccuucgagcgggacaucuccaccgagaucuaucaggccggcagcaccccuuguaacggcguggaaggcuucaacugcuacuucccacugcaguccuacggcuuucagcccacaaauggcgugggcuaucagcccuacagagugguggugcugagcuucgaacugcugcaugccccugccacagugugcggcccuaagaaaagcaccaaucucgugaagaacaaaugcgugaacuucaacuucaacggccugaccggcaccggcgugcugacagagagcaacaagaaguuccugccauuccagcaguuuggccgggauaucgccgauaccacagacgccguuagagauccccagacacuggaaauccuggacaucaccccuugcagcuucggcggagugucugugaucaccccuggcaccaacaccagcaaucagguggcagugcuguaccaggacgugaacuguaccgaagugcccguggccauucacgccgaucagcugacaccuacauggcggguguacuccaccggcagcaauguguuucagaccagagccggcugucugaucggagccgagcacgugaacaauagcuacgagugcgacauccccaucggcgcuggaaucugcgccagcuaccagacacagacaaacagcccucggagagccagaagcguggccagccagagcaucauugccuacacaaugucucugggcgccgagaacagcguggccuacuccaacaacucuaucgcuauccccaccaacuucaccaucagcgugaccacagagauccugccuguguccaugaccaagaccagcguggacugcaccauguacaucugcggcgauuccaccgagugcuccaaccugcugcugcaguacggcagcuucugcacccagcugaauagagcccugacagggaucgccguggaacaggacaagaacacccaagagguguucgcccaagugaagcagaucuacaagaccccuccuaucaaggacuucggcggcuucaauuucagccagauucugcccgauccuagcaagcccagcaagcggagcuucaucgaggaccugcuguucaacaaagugacacuggccgacgccggcuucaucaagcaguauggcgauugucugggcgacauugccgccagggaucugauuugcgcccagaaguuuaacggacugacagugcugccuccucugcugaccgaugagaugaucgcccaguacacaucugcccugcuggccggcacaaucacaagcggcuggacauuuggagcaggcgccgcucugcagauccccuuugcuaugcagauggccuaccgguucaacggcaucggagugacccagaaugugcuguacgagaaccagaagcugaucgccaaccaguucaacagcgccaucggcaagauccaggacagccugagcagcacagcaagcgcccugggaaagcugcaggacguggucaaccagaaugcccaggcacugaacacccuggucaagcagcuguccuccaacuucggcgccaucagcucugugcugaacgauauccugagcagacuggacccuccugaggccgaggugcagaucgacagacugaucacaggcagacugcagagccuccagacauacgugacccagcagcugaucagagccgccgagauuagagccucugccaaucuggccgccaccaagaugucugagugugugcugggccagagcaagagaguggacuuuugcggcaagggcuaccaccugaugagcuucccucagucugccccucacggcgugguguuucugcacgugacauaugugcccgcucaagagaagaauuucaccaccgcuccagccaucugccacgacggcaaagcccacuuuccuagagaaggcguguucguguccaacggcacccauugguucgugacacagcggaacuucuacgagccccagaucaucaccaccgacaacaccuucgugucuggcaacugcgacgucgugaucggcauugugaacaauaccguguacgacccucugcagcccgagcuggacagcuucaaagaggaacuggacaaguacuuuaagaaccacacaagccccgacguggaccugggcgauaucagcggaaucaaugccagcgucgugaacauccagaaagagaucgaccggcugaacgagguggccaagaaucugaacgagagccugaucgaccugcaagaacuggggaaguacgagcaguacaucaaguggcccugguacaucuggcugggcuuuaucgccggacugauugccaucgugauggucacaaucaugcuguguugcaugaccagcugcuguagcugccugaagggcuguuguagcuguggcagcugcugcaaguucgacgaggacgauucugagcccgugcugaagggcgugaaacugcacuacacaugaggacuaguuauaagacugacuagcccgaugggccucccaacgggcccuccuccccuccuugcaccgagagaucucaaaggcucuuuucagagccaccaaaaaaaaaaaaaaaaaaaaaaaaaaaaaaaaaaaaaaaaaaaaaaaaaaaaaaaaaaaaaaaaaaaaaaaaaaaaaaaaaaaaaaaaaaaaaaaaaaaaa

SEQ ID NO: 24708 - RNA, 4035 nt, Artificial Sequence
  SARS-CoV-2/Wuhan/WIV05/2019__EPI_ISL_402128 spike protein mRNA gc mod (1-1273)(K986P_V987P_ D614G)
aggagaaagcuuaccauguucguguuccuggugcugcugccucugguguccagccagugugugaaccugaccaccagaacacagcugccuccagccuacaccaacagcuuuaccagaggcguguacuaccccgacaagguguucagauccagcgugcugcacucuacccaggaccuguuccugccuuucuucagcaacgugaccugguuccacgccauccacguguccggcaccaauggcaccaagagauucgacaaccccgugcugcccuucaacgacgggguguacuuugccagcaccgagaaguccaacaucaucagaggcuggaucuucggcaccacacuggacagcaagacccagagccugcugaucgugaacaacgccaccaacguggucaucaaagugugcgaguuccaguucugcaacgaccccuuccugggcgucuacuaccacaagaacaacaagagcuggauggaaagcgaguuccggguguacagcagcgccaacaacugcaccuucgaguacgugucccagccuuuccugauggaccuggaaggcaagcagggcaacuucaagaaccugcgcgaguucguguuuaagaacaucgacggcuacuucaagaucuacagcaagcacaccccuaucaaccucgugcgggaucugccucagggcuucucugcucuggaaccccugguggaucugcccaucggcaucaacaucacccgguuucagacacugcuggcccugcacagaagcuaccugacaccuggcgauagcagcagcggauggacagcuggugccgccgcuuacuaugugggcuaccugcagccuagaaccuuccugcugaaguacaacgagaacggcaccaucaccgacgccguggauugugcucuggauccucugagcgagacaaagugcacccugaaguccuucaccguggaaaagggcaucuaccagaccagcaacuuccgggugcagcccaccgaauccaucgugcgguuccccaauaucaccaaucugugccccuucggcgagguguucaaugccaccagauucgccucuguguacgccuggaaccggaagcggaucagcaauugcguggccgacuacuccgugcuguacaacuccgccagcuucagcaccuucaagugcuacggcguguccccuaccaagcugaacgaccugugcuucacaaacguguacgccgacagcuucgugauccggggagaugaagugcggcagauugccccuggacagacaggcaagaucgccgacuacaacuacaagcugcccgacgacuucaccggcugugugauugccuggaacagcaacaaccuggacuccaaagucggcggcaacuacaauuaccuguaccggcuguuccggaaguccaaucugaagcccuucgagcgggacaucuccaccgagaucuaucaggccggcagcaccccuuguaacggcguggaaggcuucaacugcuacuucccacugcaguccuacggcuuucagcccacaaauggcgugggcuaucagcccuacagagugguggugcugagcuucgaacugcugcaugccccugccacagugugcggcccuaagaaaagcaccaaucucgugaagaacaaaugcgugaacuucaacuucaacggccugaccggcaccggcgugcugacagagagcaacaagaaguuccugccauuccagcaguuuggccgggauaucgccgauaccacagacgccguuagagauccccagacacuggaaauccuggacaucaccccuugcagcuucggcggagugucugugaucaccccuggcaccaacaccagcaaucagguggcagugcuguaccagggcgugaacuguaccgaagugcccguggccauucacgccgaucagcugacaccuacauggcggguguacuccaccggcagcaauguguuucagaccagagccggcugucugaucggagccgagcacgugaacaauagcuacgagugcgacauccccaucggcgcuggaaucugcgccagcuaccagacacagacaaacagcccucggagagccagaagcguggccagccagagcaucauugccuacacaaugucucugggcgccgagaacagcguggccuacuccaacaacucuaucgcuauccccaccaacuucaccaucagcgugaccacagagauccugccuguguccaugaccaagaccagcguggacugcaccauguacaucugcggcgauuccaccgagugcuccaaccugcugcugcaguacggcagcuucugcacccagcugaauagagcccugacagggaucgccguggaacaggacaagaacacccaagagguguucgcccaagugaagcagaucuacaagaccccuccuaucaaggacuucggcggcuucaauuucagccagauucugcccgauccuagcaagcccagcaagcggagcuucaucgaggaccugcuguucaacaaagugacacuggccgacgccggcuucaucaagcaguauggcgauugucugggcgacauugccgccagggaucugauuugcgcccagaaguuuaacggacugacagugcugccuccucugcugaccgaugagaugaucgcccaguacacaucugcccugcuggccggcacaaucacaagcggcuggacauuuggagcaggcgccgcucugcagauccccuuugcuaugcagauggccuaccgguucaacggcaucggagugacccagaaugugcuguacgagaaccagaagcugaucgccaaccaguucaacagcgccaucggcaagauccaggacagccugagcagcacagcaagcgcccugggaaagcugcaggacguggucaaccagaaugcccaggcacugaacacccuggucaagcagcuguccuccaacuucggcgccaucagcucugugcugaacgauauccugagcagacuggacccuccugaggccgaggugcagaucgacagacugaucacaggcagacugcagagccuccagacauacgugacccagcagcugaucagagccgccgagauuagagccucugccaaucuggccgccaccaagaugucugagugugugcugggccagagcaagagaguggacuuuugcggcaagggcuaccaccugaugagcuucccucagucugccccucacggcgugguguuucugcacgugacauaugugcccgcucaagagaagaauuucaccaccgcuccagccaucugccacgacggcaaagcccacuuuccuagagaaggcguguucguguccaacggcacccauugguucgugacacagcggaacuucuacgagccccagaucaucaccaccgacaacaccuucgugucuggcaacugcgacgucgugaucggcauugugaacaauaccguguacgacccucugcagcccgagcuggacagcuucaaagaggaacuggacaaguacuuuaagaaccacacaagccccgacguggaccugggcgauaucagcggaaucaaugccagcgucgugaacauccagaaagagaucgaccggcugaacgagguggccaagaaucugaacgagagccugaucgaccugcaagaacuggggaaguacgagcaguacaucaaguggcccugguacaucuggcugggcuuuaucgccggacugauugccaucgugauggucacaaucaugcuguguugcaugaccagcugcuguagcugccugaagggcuguuguagcuguggcagcugcugcaaguucgacgaggacgauucugagcccgugcugaagggcgugaaacugcacuacacaugaggacuaguuauaagacugacuagcccgaugggccucccaacgggcccuccuccccuccuugcaccgagagaucucaaaggcucuuuucagagccaccaaaaaaaaaaaaaaaaaaaaaaaaaaaaaaaaaaaaaaaaaaaaaaaaaaaaaaaaaaaaaaaaaaaaaaaaaaaaaaaaaaaaaaaaaaaaaaaaaaaaa

SEQ ID NO: 24709 - RNA, 4035 nt, Artificial Sequence
  SARS-CoV-2/Wuhan/WIV05/2019__EPI_ISL_402128 spike protein mRNA gc mod (1-1273)(K986P_V987P_A222V_D614G)
aggagaaagcuuaccauguucguguuccuggugcugcugccucugguguccagccagugugugaaccugaccaccagaacacagcugccuccagccuacaccaacagcuuuaccagaggcguguacuaccccgacaagguguucagauccagcgugcugcacucuacccaggaccuguuccugccuuucuucagcaacgugaccugguuccacgccauccacguguccggcaccaauggcaccaagagauucgacaaccccgugcugcccuucaacgacgggguguacuuugccagcaccgagaaguccaacaucaucagaggcuggaucuucggcaccacacuggacagcaagacccagagccugcugaucgugaacaacgccaccaacguggucaucaaagugugcgaguuccaguucugcaacgaccccuuccugggcgucuacuaccacaagaacaacaagagcuggauggaaagcgaguuccggguguacagcagcgccaacaacugcaccuucgaguacgugucccagccuuuccugauggaccuggaaggcaagcagggcaacuucaagaaccugcgcgaguucguguuuaagaacaucgacggcuacuucaagaucuacagcaagcacaccccuaucaaccucgugcgggaucugccucagggcuucucugugcuggaaccccugguggaucugcccaucggcaucaacaucacccgguuucagacacugcuggcccugcacagaagcuaccugacaccuggcgauagcagcagcggauggacagcuggugccgccgcuuacuaugugggcuaccugcagccuagaaccuuccugcugaaguacaacgagaacggcaccaucaccgacgccguggauugugcucuggauccucugagcgagacaaagugcacccugaaguccuucaccguggaaaagggcaucuaccagaccagcaacuuccgggugcagcccaccgaauccaucgugcgguuccccaauaucaccaaucugugccccuucggcgagguguucaaugccaccagauucgccucuguguacgccuggaaccggaagcggaucagcaauugcguggccgacuacuccgugcuguacaacuccgccagcuucagcaccuucaagugcuacggcguguccccuaccaagcugaacgaccugugcuucacaaacguguacgccgacagcuucgugauccggggagaugaagugcggcagauugccccuggacagacaggcaagaucgccgacuacaacuacaagcugcccgacgacuucaccggcugugugauugccuggaacagcaacaaccuggacuccaaagucggcggcaacuacaauuaccuguaccggcuguuccggaaguccaaucugaagcccuucgagcgggacaucuccaccgagaucuaucaggccggcagcaccccuuguaacggcguggaaggcuucaacugcuacuucccacugcaguccuacggcuuucagcccacaaauggcgugggcuaucagcccuacagagugguggugcugagcuucgaacugcugcaugccccugccacagugugcggcccuaagaaaagcaccaaucucgugaagaacaaaugcgugaacuucaacuucaacggccugaccggcaccggcgugcugacagagagcaacaagaaguuccugccauuccagcaguuuggccgggauaucgccgauaccacagacgccguuagagauccccagacacuggaaauccuggacaucaccccuugcagcuucggcggagugucugugaucaccccuggcaccaacaccagcaaucagguggcagugcuguaccagggcgugaacuguaccgaagugcccguggccauucacgccgaucagcugacaccuacauggcggguguacuccaccggcagcaauguguuucagaccagagccggcugucugaucggagccgagcacgugaacaauagcuacgagugcgacauccccaucggcgcuggaaucugcgccagcuaccagacacagacaaacagcccucggagagccagaagcguggccagccagagcaucauugccuacacaaugucucugggcgccgagaacagcguggccuacuccaacaacucuaucgcuauccccaccaacuucaccaucagcgugaccacagagauccugccuguguccaugaccaagaccagcguggacugcaccauguacaucugcggcgauuccaccgagugcuccaaccugcugcugcaguacggcagcuucugcacccagcugaauagagcccugacagggaucgccguggaacaggacaagaacacccaagagguguucgcccaagugaagcagaucuacaagaccccuccuaucaaggacuucggcggcuucaauuucagccagauucugcccgauccuagcaagcccagcaagcggagcuucaucgaggaccugcuguucaacaaagugacacuggccgacgccggcuucaucaagcaguauggcgauugucugggcgacauugccgccagggaucugauuugcgcccagaaguuuaacggacugacagugcugccuccucugcugaccgaugagaugaucgcccaguacacaucugcccugcuggccggcacaaucacaagcggcuggacauuuggagcaggcgccgcucugcagauccccuuugcuaugcagauggccuaccgguucaacggcaucggagugacccagaaugugcuguacgagaaccagaagcugaucgccaaccaguucaacagcgccaucggcaagauccaggacagccugagcagcacagcaagcgcccugggaaagcugcaggacguggucaaccagaaugcccaggcacugaacacccuggucaagcagcuguccuccaacuucggcgccaucagcucugugcugaacgauauccugagcagacuggacccuccugaggccgaggugcagaucgacagacugaucacaggcagacugcagagccuccagacauacgugacccagcagcugaucagagccgccgagauuagagccucugccaaucuggccgccaccaagaugucugagugugugcugggccagagcaagagaguggacuuuugcggcaagggcuaccaccugaugagcuucccucagucugccccucacggcgugguguuucugcacgugacauaugugcccgcucaagagaagaauuucaccaccgcuccagccaucugccacgacggcaaagcccacuuuccuagagaaggcguguucguguccaacggcacccauugguucgugacacagcggaacuucuacgagccccagaucaucaccaccgacaacaccuucgugucuggcaacugcgacgucgugaucggcauugugaacaauaccguguacgacccucugcagcccgagcuggacagcuucaaagaggaacuggacaaguacuuuaagaaccacacaagccccgacguggaccugggcgauaucagcggaaucaaugccagcgucgugaacauccagaaagagaucgaccggcugaacgagguggccaagaaucugaacgagagccugaucgaccugcaagaacuggggaaguacgagcaguacaucaaguggcccugguacaucuggcugggcuuuaucgccggacugauugccaucgugauggucacaaucaugcuguguugcaugaccagcugcuguagcugccugaagggcuguuguagcuguggcagcugcugcaaguucgacgaggacgauucugagcccgugcugaagggcgugaaacugcacuacacaugaggacuaguuauaagacugacuagcccgaugggccucccaacgggcccuccuccccuccuugcaccgagagaucucaaaggcucuuuucagagccaccaaaaaaaaaaaaaaaaaaaaaaaaaaaaaaaaaaaaaaaaaaaaaaaaaaaaaaaaaaaaaaaaaaaaaaaaaaaaaaaaaaaaaaaaaaaaaaaaaaaaa

SEQ ID NO: 24710 - RNA, 4035 nt, Artificial Sequence
  SARS-CoV-2/Wuhan/WIV05/2019__EPI_ISL_402128 spike protein mRNA gc mod (1-1273)(K986P_V987P_N439K_D614G)
aggagaaagcuuaccauguucguguuccuggugcugcugccucugguguccagccagugugugaaccugaccaccagaacacagcugccuccagccuacaccaacagcuuuaccagaggcguguacuaccccgacaagguguucagauccagcgugcugcacucuacccaggaccuguuccugccuuucuucagcaacgugaccugguuccacgccauccacguguccggcaccaauggcaccaagagauucgacaaccccgugcugcccuucaacgacgggguguacuuugccagcaccgagaaguccaacaucaucagaggcuggaucuucggcaccacacuggacagcaagacccagagccugcugaucgugaacaacgccaccaacguggucaucaaagugugcgaguuccaguucugcaacgaccccuuccugggcgucuacuaccacaagaacaacaagagcuggauggaaagcgaguuccggguguacagcagcgccaacaacugcaccuucgaguacgugucccagccuuuccugauggaccuggaaggcaagcagggcaacuucaagaaccugcgcgaguucguguuuaagaacaucgacggcuacuucaagaucuacagcaagcacaccccuaucaaccucgugcgggaucugccucagggcuucucugcucuggaaccccugguggaucugcccaucggcaucaacaucacccgguuucagacacugcuggcccugcacagaagcuaccugacaccuggcgauagcagcagcggauggacagcuggugccgccgcuuacuaugugggcuaccugcagccuagaaccuuccugcugaaguacaacgagaacggcaccaucaccgacgccguggauugugcucuggauccucugagcgagacaaagugcacccugaaguccuucaccguggaaaagggcaucuaccagaccagcaacuuccgggugcagcccaccgaauccaucgugcgguuccccaauaucaccaaucugugccccuucggcgagguguucaaugccaccagauucgccucuguguacgccuggaaccggaagcggaucagcaauugcguggccgacuacuccgugcuguacaacuccgccagcuucagcaccuucaagugcuacggcguguccccuaccaagcugaacgaccugugcuucacaaacguguacgccgacagcuucgugauccggggagaugaagugcggcagauugccccuggacagacaggcaagaucgccgacuacaacuacaagcugcccgacgacuucaccggcugugugauugccuggaacagcaagaaccuggacuccaaagucggcggcaacuacaauuaccuguaccggcuguuccggaaguccaaucugaagcccuucgagcgggacaucuccaccgagaucuaucaggccggcagcaccccuuguaacggcguggaaggcuucaacugcuacuucccacugcaguccuacggcuuucagcccacaaauggcgugggcuaucagcccuacagagugguggugcugagcuucgaacugcugcaugccccugccacagugugcggcccuaagaaaagcaccaaucucgugaagaacaaaugcgugaacuucaacuucaacggccugaccggcaccggcgugcugacagagagcaacaagaaguuccugccauuccagcaguuuggccgggauaucgccgauaccacagacgccguuagagauccccagacacuggaaauccuggacaucaccccuugcagcuucggcggagugucugugaucaccccuggcaccaacaccagcaaucagguggcagugcuguaccagggcgugaacuguaccgaagugcccguggccauucacgccgaucagcugacaccuacauggcggguguacuccaccggcagcaauguguuucagaccagagccggcugucugaucggagccgagcacgugaacaauagcuacgagugcgacauccccaucggcgcuggaaucugcgccagcuaccagacacagacaaacagcccucggagagccagaagcguggccagccagagcaucauugccuacacaaugucucugggcgccgagaacagcguggccuacuccaacaacucuaucgcuauccccaccaacuucaccaucagcgugaccacagagauccugccuguguccaugaccaagaccagcguggacugcaccauguacaucugcggcgauuccaccgagugcuccaaccugcugcugcaguacggcagcuucugcacccagcugaauagagcccugacagggaucgccguggaacaggacaagaacacccaagagguguucgcccaagugaagcagaucuacaagaccccuccuaucaaggacuucggcggcuucaauuucagccagauucugcccgauccuagcaagcccagcaagcggagcuucaucgaggaccugcuguucaacaaagugacacuggccgacgccggcuucaucaagcaguauggcgauugucugggcgacauugccgccagggaucugauuugcgcccagaaguuuaacggacugacagugcugccuccucugcugaccgaugagaugaucgcccaguacacaucugcccugcuggccggcacaaucacaagcggcuggacauuuggagcaggcgccgcucugcagauccccuuugcuaugcagauggccuaccgguucaacggcaucggagugacccagaaugugcuguacgagaaccagaagcugaucgccaaccaguucaacagcgccaucggcaagauccaggacagccugagcagcacagcaagcgcccugggaaagcugcaggacguggucaaccagaaugcccaggcacugaacacccuggucaagcagcuguccuccaacuucggcgccaucagcucugugcugaacgauauccugagcagacuggacccuccugaggccgaggugcagaucgacagacugaucacaggcagacugcagagccuccagacauacgugacccagcagcugaucagagccgccgagauuagagccucugccaaucuggccgccaccaagaugucugagugugugcugggccagagcaagagaguggacuuuugcggcaagggcuaccaccugaugagcuucccucagucugccccucacggcgugguguuucugcacgugacauaugugcccgcucaagagaagaauuucaccaccgcuccagccaucugccacgacggcaaagcccacuuuccuagagaaggcguguucguguccaacggcacccauugguucgugacacagcggaacuucuacgagccccagaucaucaccaccgacaacaccuucgugucuggcaacugcgacgucgugaucggcauugugaacaauaccguguacgacccucugcagcccgagcuggacagcuucaaagaggaacuggacaaguacuuuaagaaccacacaagccccgacguggaccugggcgauaucagcggaaucaaugccagcgucgugaacauccagaaagagaucgaccggcugaacgagguggccaagaaucugaacgagagccugaucgaccugcaagaacuggggaaguacgagcaguacaucaaguggcccugguacaucuggcugggcuuuaucgccggacugauugccaucgugauggucacaaucaugcuguguugcaugaccagcugcuguagcugccugaagggcuguuguagcuguggcagcugcugcaaguucgacgaggacgauucugagcccgugcugaagggcgugaaacugcacuacacaugaggacuaguuauaagacugacuagcccgaugggccucccaacgggcccuccuccccuccuugcaccgagagaucucaaaggcucuuuucagagccaccaaaaaaaaaaaaaaaaaaaaaaaaaaaaaaaaaaaaaaaaaaaaaaaaaaaaaaaaaaaaaaaaaaaaaaaaaaaaaaaaaaaaaaaaaaaaaaaaaaaaa

SEQ ID NO: 24711 - RNA, 4035 nt, Artificial Sequence
  SARS-CoV-2/Wuhan/WIV05/2019__EPI_ISL_402128 spike protein mRNA gc mod (1-1273)(K986P_V987P_S477N_D614G)
aggagaaagcuuaccauguucguguuccuggugcugcugccucugguguccagccagugugugaaccugaccaccagaacacagcugccuccagccuacaccaacagcuuuaccagaggcguguacuaccccgacaagguguucagauccagcgugcugcacucuacccaggaccuguuccugccuuucuucagcaacgugaccugguuccacgccauccacguguccggcaccaauggcaccaagagauucgacaaccccgugcugcccuucaacgacgggguguacuuugccagcaccgagaaguccaacaucaucagaggcuggaucuucggcaccacacuggacagcaagacccagagccugcugaucgugaacaacgccaccaacguggucaucaaagugugcgaguuccaguucugcaacgaccccuuccugggcgucuacuaccacaagaacaacaagagcuggauggaaagcgaguuccggguguacagcagcgccaacaacugcaccuucgaguacgugucccagccuuuccugauggaccuggaaggcaagcagggcaacuucaagaaccugcgcgaguucguguuuaagaacaucgacggcuacuucaagaucuacagcaagcacaccccuaucaaccucgugcgggaucugccucagggcuucucugcucuggaaccccugguggaucugcccaucggcaucaacaucacccgguuucagacacugcuggcccugcacagaagcuaccugacaccuggcgauagcagcagcggauggacagcuggugccgccgcuuacuaugugggcuaccugcagccuagaaccuuccugcugaaguacaacgagaacggcaccaucaccgacgccguggauugugcucuggauccucugagcgagacaaagugcacccugaaguccuucaccguggaaaagggcaucuaccagaccagcaacuuccgggugcagcccaccgaauccaucgugcgguuccccaauaucaccaaucugugccccuucggcgagguguucaaugccaccagauucgccucuguguacgccuggaaccggaagcggaucagcaauugcguggccgacuacuccgugcuguacaacuccgccagcuucagcaccuucaagugcuacggcguguccccuaccaagcugaacgaccugugcuucacaaacguguacgccgacagcuucgugauccggggagaugaagugcggcagauugccccuggacagacaggcaagaucgccgacuacaacuacaagcugcccgacgacuucaccggcugugugauugccuggaacagcaacaaccuggacuccaaagucggcggcaacuacaauuaccuguaccggcuguuccggaaguccaaucugaagcccuucgagcgggacaucuccaccgagaucuaucaggccggcaacaccccuuguaacggcguggaaggcuucaacugcuacuucccacugcaguccuacggcuuucagcccacaaauggcgugggcuaucagcccuacagagugguggugcugagcuucgaacugcugcaugccccugccacagugugcggcccuaagaaaagcaccaaucucgugaagaacaaaugcgugaacuucaacuucaacggccugaccggcaccggcgugcugacagagagcaacaagaaguuccugccauuccagcaguuuggccgggauaucgccgauaccacagacgccguuagagauccccagacacuggaaauccuggacaucaccccuugcagcuucggcggagugucugugaucaccccuggcaccaacaccagcaaucagguggcagugcuguaccagggcgugaacuguaccgaagugcccguggccauucacgccgaucagcugacaccuacauggcggguguacuccaccggcagcaauguguuucagaccagagccggcugucugaucggagccgagcacgugaacaauagcuacgagugcgacauccccaucggcgcuggaaucugcgccagcuaccagacacagacaaacagcccucggagagccagaagcguggccagccagagcaucauugccuacacaaugucucugggcgccgagaacagcguggccuacuccaacaacucuaucgcuauccccaccaacuucaccaucagcgugaccacagagauccugccuguguccaugaccaagaccagcguggacugcaccauguacaucugcggcgauuccaccgagugcuccaaccugcugcugcaguacggcagcuucugcacccagcugaauagagcccugacagggaucgccguggaacaggacaagaacacccaagagguguucgcccaagugaagcagaucuacaagaccccuccuaucaaggacuucggcggcuucaauuucagccagauucugcccgauccuagcaagcccagcaagcggagcuucaucgaggaccugcuguucaacaaagugacacuggccgacgccggcuucaucaagcaguauggcgauugucugggcgacauugccgccagggaucugauuugcgcccagaaguuuaacggacugacagugcugccuccucugcugaccgaugagaugaucgcccaguacacaucugcccugcuggccggcacaaucacaagcggcuggacauuuggagcaggcgccgcucugcagauccccuuugcuaugcagauggccuaccgguucaacggcaucggagugacccagaaugugcuguacgagaaccagaagcugaucgccaaccaguucaacagcgccaucggcaagauccaggacagccugagcagcacagcaagcgcccugggaaagcugcaggacguggucaaccagaaugcccaggcacugaacacccuggucaagcagcuguccuccaacuucggcgccaucagcucugugcugaacgauauccugagcagacuggacccuccugaggccgaggugcagaucgacagacugaucacaggcagacugcagagccuccagacauacgugacccagcagcugaucagagccgccgagauuagagccucugccaaucuggccgccaccaagaugucugagugugugcugggccagagcaagagaguggacuuuugcggcaagggcuaccaccugaugagcuucccucagucugccccucacggcgugguguuucugcacgugacauaugugcccgcucaagagaagaauuucaccaccgcuccagccaucugccacgacggcaaagcccacuuuccuagagaaggcguguucguguccaacggcacccauugguucgugacacagcggaacuucuacgagccccagaucaucaccaccgacaacaccuucgugucuggcaacugcgacgucgugaucggcauugugaacaauaccguguacgacccucugcagcccgagcuggacagcuucaaagaggaacuggacaaguacuuuaagaaccacacaagccccgacguggaccugggcgauaucagcggaaucaaugccagcgucgugaacauccagaaagagaucgaccggcugaacgagguggccaagaaucugaacgagagccugaucgaccugcaagaacuggggaaguacgagcaguacaucaaguggcccugguacaucuggcugggcuuuaucgccggacugauugccaucgugauggucacaaucaugcuguguugcaugaccagcugcuguagcugccugaagggcuguuguagcuguggcagcugcugcaaguucgacgaggacgauucugagcccgugcugaagggcgugaaacugcacuacacaugaggacuaguuauaagacugacuagcccgaugggccucccaacgggcccuccuccccuccuugcaccgagagaucucaaaggcucuuuucagagccaccaaaaaaaaaaaaaaaaaaaaaaaaaaaaaaaaaaaaaaaaaaaaaaaaaaaaaaaaaaaaaaaaaaaaaaaaaaaaaaaaaaaaaaaaaaaaaaaaaaaaa

SEQ ID NO: 24712 - RNA, 4035 nt, Artificial Sequence
  SARS-CoV-2/Wuhan/WIV05/2019__EPI_ISL_402128 spike protein mRNA gc mod (1-1273)(K986P_V987P_N501Y_D614G)
aggagaaagcuuaccauguucguguuccuggugcugcugccucugguguccagccagugugugaaccugaccaccagaacacagcugccuccagccuacaccaacagcuuuaccagaggcguguacuaccccgacaagguguucagauccagcgugcugcacucuacccaggaccuguuccugccuuucuucagcaacgugaccugguuccacgccauccacguguccggcaccaauggcaccaagagauucgacaaccccgugcugcccuucaacgacgggguguacuuugccagcaccgagaaguccaacaucaucagaggcuggaucuucggcaccacacuggacagcaagacccagagccugcugaucgugaacaacgccaccaacguggucaucaaagugugcgaguuccaguucugcaacgaccccuuccugggcgucuacuaccacaagaacaacaagagcuggauggaaagcgaguuccggguguacagcagcgccaacaacugcaccuucgaguacgugucccagccuuuccugauggaccuggaaggcaagcagggcaacuucaagaaccugcgcgaguucguguuuaagaacaucgacggcuacuucaagaucuacagcaagcacaccccuaucaaccucgugcgggaucugccucagggcuucucugcucuggaaccccugguggaucugcccaucggcaucaacaucacccgguuucagacacugcuggcccugcacagaagcuaccugacaccuggcgauagcagcagcggauggacagcuggugccgccgcuuacuaugugggcuaccugcagccuagaaccuuccugcugaaguacaacgagaacggcaccaucaccgacgccguggauugugcucuggauccucugagcgagacaaagugcacccugaaguccuucaccguggaaaagggcaucuaccagaccagcaacuuccgggugcagcccaccgaauccaucgugcgguuccccaauaucaccaaucugugccccuucggcgagguguucaaugccaccagauucgccucuguguacgccuggaaccggaagcggaucagcaauugcguggccgacuacuccgugcuguacaacuccgccagcuucagcaccuucaagugcuacggcguguccccuaccaagcugaacgaccugugcuucacaaacguguacgccgacagcuucgugauccggggagaugaagugcggcagauugccccuggacagacaggcaagaucgccgacuacaacuacaagcugcccgacgacuucaccggcugugugauugccuggaacagcaacaaccuggacuccaaagucggcggcaacuacaauuaccuguaccggcuguuccggaaguccaaucugaagcccuucgagcgggacaucuccaccgagaucuaucaggccggcagcaccccuuguaacggcguggaaggcuucaacugcuacuucccacugcaguccuacggcuuucagcccacauacggcgugggcuaucagcccuacagagugguggugcugagcuucgaacugcugcaugccccugccacagugugcggcccuaagaaaagcaccaaucucgugaagaacaaaugcgugaacuucaacuucaacggccugaccggcaccggcgugcugacagagagcaacaagaaguuccugccauuccagcaguuuggccgggauaucgccgauaccacagacgccguuagagauccccagacacuggaaauccuggacaucaccccuugcagcuucggcggagugucugugaucaccccuggcaccaacaccagcaaucagguggcagugcuguaccagggcgugaacuguaccgaagugcccguggccauucacgccgaucagcugacaccuacauggcggguguacuccaccggcagcaauguguuucagaccagagccggcugucugaucggagccgagcacgugaacaauagcuacgagugcgacauccccaucggcgcuggaaucugcgccagcuaccagacacagacaaacagcccucggagagccagaagcguggccagccagagcaucauugccuacacaaugucucugggcgccgagaacagcguggccuacuccaacaacucuaucgcuauccccaccaacuucaccaucagcgugaccacagagauccugccuguguccaugaccaagaccagcguggacugcaccauguacaucugcggcgauuccaccgagugcuccaaccugcugcugcaguacggcagcuucugcacccagcugaauagagcccugacagggaucgccguggaacaggacaagaacacccaagagguguucgcccaagugaagcagaucuacaagaccccuccuaucaaggacuucggcggcuucaauuucagccagauucugcccgauccuagcaagcccagcaagcggagcuucaucgaggaccugcuguucaacaaagugacacuggccgacgccggcuucaucaagcaguauggcgauugucugggcgacauugccgccagggaucugauuugcgcccagaaguuuaacggacugacagugcugccuccucugcugaccgaugagaugaucgcccaguacacaucugcccugcuggccggcacaaucacaagcggcuggacauuuggagcaggcgccgcucugcagauccccuuugcuaugcagauggccuaccgguucaacggcaucggagugacccagaaugugcuguacgagaaccagaagcugaucgccaaccaguucaacagcgccaucggcaagauccaggacagccugagcagcacagcaagcgcccugggaaagcugcaggacguggucaaccagaaugcccaggcacugaacacccuggucaagcagcuguccuccaacuucggcgccaucagcucugugcugaacgauauccugagcagacuggacccuccugaggccgaggugcagaucgacagacugaucacaggcagacugcagagccuccagacauacgugacccagcagcugaucagagccgccgagauuagagccucugccaaucuggccgccaccaagaugucugagugugugcugggccagagcaagagaguggacuuuugcggcaagggcuaccaccugaugagcuucccucagucugccccucacggcgugguguuucugcacgugacauaugugcccgcucaagagaagaauuucaccaccgcuccagccaucugccacgacggcaaagcccacuuuccuagagaaggcguguucguguccaacggcacccauugguucgugacacagcggaacuucuacgagccccagaucaucaccaccgacaacaccuucgugucuggcaacugcgacgucgugaucggcauugugaacaauaccguguacgacccucugcagcccgagcuggacagcuucaaagaggaacuggacaaguacuuuaagaaccacacaagccccgacguggaccugggcgauaucagcggaaucaaugccagcgucgugaacauccagaaagagaucgaccggcugaacgagguggccaagaaucugaacgagagccugaucgaccugcaagaacuggggaaguacgagcaguacaucaaguggcccugguacaucuggcugggcuuuaucgccggacugauugccaucgugauggucacaaucaugcuguguugcaugaccagcugcuguagcugccugaagggcuguuguagcuguggcagcugcugcaaguucgacgaggacgauucugagcccgugcugaagggcgugaaacugcacuacacaugaggacuaguuauaagacugacuagcccgaugggccucccaacgggcccuccuccccuccuugcaccgagagaucucaaaggcucuuuucagagccaccaaaaaaaaaaaaaaaaaaaaaaaaaaaaaaaaaaaaaaaaaaaaaaaaaaaaaaaaaaaaaaaaaaaaaaaaaaaaaaaaaaaaaaaaaaaaaaaaaaaaa

SEQ ID NO: 24713 - RNA, 4029 nt, Artificial Sequence
  SARS-CoV-2/Wuhan/WIV05/2019__EPI_ISL_402128 spike protein mRNA gc mod (1-1273)(K986P_V987P_H69del_V70del_D614G)
aggagaaagcuuaccauguucguguuccuggugcugcugccucugguguccagccagugugugaaccugaccaccagaacacagcugccuccagccuacaccaacagcuuuaccagaggcguguacuaccccgacaagguguucagauccagcgugcugcacucuacccaggaccuguuccugccuuucuucagcaacgugaccugguuccacgccaucuccggcaccaauggcaccaagagauucgacaaccccgugcugcccuucaacgacgggguguacuuugccagcaccgagaaguccaacaucaucagaggcuggaucuucggcaccacacuggacagcaagacccagagccugcugaucgugaacaacgccaccaacguggucaucaaagugugcgaguuccaguucugcaacgaccccuuccugggcgucuacuaccacaagaacaacaagagcuggauggaaagcgaguuccggguguacagcagcgccaacaacugcaccuucgaguacgugucccagccuuuccugauggaccuggaaggcaagcagggcaacuucaagaaccugcgcgaguucguguuuaagaacaucgacggcuacuucaagaucuacagcaagcacaccccuaucaaccucgugcgggaucugccucagggcuucucugcucuggaaccccugguggaucugcccaucggcaucaacaucacccgguuucagacacugcuggcccugcacagaagcuaccugacaccuggcgauagcagcagcggauggacagcuggugccgccgcuuacuaugugggcuaccugcagccuagaaccuuccugcugaaguacaacgagaacggcaccaucaccgacgccguggauugugcucuggauccucugagcgagacaaagugcacccugaaguccuucaccguggaaaagggcaucuaccagaccagcaacuuccgggugcagcccaccgaauccaucgugcgguuccccaauaucaccaaucugugccccuucggcgagguguucaaugccaccagauucgccucuguguacgccuggaaccggaagcggaucagcaauugcguggccgacuacuccgugcuguacaacuccgccagcuucagcaccuucaagugcuacggcguguccccuaccaagcugaacgaccugugcuucacaaacguguacgccgacagcuucgugauccggggagaugaagugcggcagauugccccuggacagacaggcaagaucgccgacuacaacuacaagcugcccgacgacuucaccggcugugugauugccuggaacagcaacaaccuggacuccaaagucggcggcaacuacaauuaccuguaccggcuguuccggaaguccaaucugaagcccuucgagcgggacaucuccaccgagaucuaucaggccggcagcaccccuuguaacggcguggaaggcuucaacugcuacuucccacugcaguccuacggcuuucagcccacaaauggcgugggcuaucagcccuacagagugguggugcugagcuucgaacugcugcaugccccugccacagugugcggcccuaagaaaagcaccaaucucgugaagaacaaaugcgugaacuucaacuucaacggccugaccggcaccggcgugcugacagagagcaacaagaaguuccugccauuccagcaguuuggccgggauaucgccgauaccacagacgccguuagagauccccagacacuggaaauccuggacaucaccccuugcagcuucggcggagugucugugaucaccccuggcaccaacaccagcaaucagguggcagugcuguaccagggcgugaacuguaccgaagugcccguggccauucacgccgaucagcugacaccuacauggcggguguacuccaccggcagcaauguguuucagaccagagccggcugucugaucggagccgagcacgugaacaauagcuacgagugcgacauccccaucggcgcuggaaucugcgccagcuaccagacacagacaaacagcccucggagagccagaagcguggccagccagagcaucauugccuacacaaugucucugggcgccgagaacagcguggccuacuccaacaacucuaucgcuauccccaccaacuucaccaucagcgugaccacagagauccugccuguguccaugaccaagaccagcguggacugcaccauguacaucugcggcgauuccaccgagugcuccaaccugcugcugcaguacggcagcuucugcacccagcugaauagagcccugacagggaucgccguggaacaggacaagaacacccaagagguguucgcccaagugaagcagaucuacaagaccccuccuaucaaggacuucggcggcuucaauuucagccagauucugcccgauccuagcaagcccagcaagcggagcuucaucgaggaccugcuguucaacaaagugacacuggccgacgccggcuucaucaagcaguauggcgauugucugggcgacauugccgccagggaucugauuugcgcccagaaguuuaacggacugacagugcugccuccucugcugaccgaugagaugaucgcccaguacacaucugcccugcuggccggcacaaucacaagcggcuggacauuuggagcaggcgccgcucugcagauccccuuugcuaugcagauggccuaccgguucaacggcaucggagugacccagaaugugcuguacgagaaccagaagcugaucgccaaccaguucaacagcgccaucggcaagauccaggacagccugagcagcacagcaagcgcccugggaaagcugcaggacguggucaaccagaaugcccaggcacugaacacccuggucaagcagcuguccuccaacuucggcgccaucagcucugugcugaacgauauccugagcagacuggacccuccugaggccgaggugcagaucgacagacugaucacaggcagacugcagagccuccagacauacgugacccagcagcugaucagagccgccgagauuagagccucugccaaucuggccgccaccaagaugucugagugugugcugggccagagcaagagaguggacuuuugcggcaagggcuaccaccugaugagcuucccucagucugccccucacggcgugguguuucugcacgugacauaugugcccgcucaagagaagaauuucaccaccgcuccagccaucugccacgacggcaaagcccacuuuccuagagaaggcguguucguguccaacggcacccauugguucgugacacagcggaacuucuacgagccccagaucaucaccaccgacaacaccuucgugucuggcaacugcgacgucgugaucggcauugugaacaauaccguguacgacccucugcagcccgagcuggacagcuucaaagaggaacuggacaaguacuuuaagaaccacacaagccccgacguggaccugggcgauaucagcggaaucaaugccagcgucgugaacauccagaaagagaucgaccggcugaacgagguggccaagaaucugaacgagagccugaucgaccugcaagaacuggggaaguacgagcaguacaucaaguggcccugguacaucuggcugggcuuuaucgccggacugauugccaucgugauggucacaaucaugcuguguugcaugaccagcugcuguagcugccugaagggcuguuguagcuguggcagcugcugcaaguucgacgaggacgauucugagcccgugcugaagggcgugaaacugcacuacacaugaggacuaguuauaagacugacuagcccgaugggccucccaacgggcccuccuccccuccuugcaccgagagaucucaaaggcucuuuucagagccaccaaaaaaaaaaaaaaaaaaaaaaaaaaaaaaaaaaaaaaaaaaaaaaaaaaaaaaaaaaaaaaaaaaaaaaaaaaaaaaaaaaaaaaaaaaaaaaaaaaaaa

SEQ ID NO: 24714 - RNA, 4035 nt, Artificial Sequence
  SARS-CoV-2/Wuhan/WIV05/2019__EPI_ISL_402128 spike protein mRNA gc mod (1-1273)(K986P_V987P_Y453F_D614G)
aggagaaagcuuaccauguucguguuccuggugcugcugccucugguguccagccagugugugaaccugaccaccagaacacagcugccuccagccuacaccaacagcuuuaccagaggcguguacuaccccgacaagguguucagauccagcgugcugcacucuacccaggaccuguuccugccuuucuucagcaacgugaccugguuccacgccauccacguguccggcaccaauggcaccaagagauucgacaaccccgugcugcccuucaacgacgggguguacuuugccagcaccgagaaguccaacaucaucagaggcuggaucuucggcaccacacuggacagcaagacccagagccugcugaucgugaacaacgccaccaacguggucaucaaagugugcgaguuccaguucugcaacgaccccuuccugggcgucuacuaccacaagaacaacaagagcuggauggaaagcgaguuccggguguacagcagcgccaacaacugcaccuucgaguacgugucccagccuuuccugauggaccuggaaggcaagcagggcaacuucaagaaccugcgcgaguucguguuuaagaacaucgacggcuacuucaagaucuacagcaagcacaccccuaucaaccucgugcgggaucugccucagggcuucucugcucuggaaccccugguggaucugcccaucggcaucaacaucacccgguuucagacacugcuggcccugcacagaagcuaccugacaccuggcgauagcagcagcggauggacagcuggugccgccgcuuacuaugugggcuaccugcagccuagaaccuuccugcugaaguacaacgagaacggcaccaucaccgacgccguggauugugcucuggauccucugagcgagacaaagugcacccugaaguccuucaccguggaaaagggcaucuaccagaccagcaacuuccgggugcagcccaccgaauccaucgugcgguuccccaauaucaccaaucugugccccuucggcgagguguucaaugccaccagauucgccucuguguacgccuggaaccggaagcggaucagcaauugcguggccgacuacuccgugcuguacaacuccgccagcuucagcaccuucaagugcuacggcguguccccuaccaagcugaacgaccugugcuucacaaacguguacgccgacagcuucgugauccggggagaugaagugcggcagauugccccuggacagacaggcaagaucgccgacuacaacuacaagcugcccgacgacuucaccggcugugugauugccuggaacagcaacaaccuggacuccaaagucggcggcaacuacaauuaccuguuccggcuguuccggaaguccaaucugaagcccuucgagcgggacaucuccaccgagaucuaucaggccggcagcaccccuuguaacggcguggaaggcuucaacugcuacuucccacugcaguccuacggcuuucagcccacaaauggcgugggcuaucagcccuacagagugguggugcugagcuucgaacugcugcaugccccugccacagugugcggcccuaagaaaagcaccaaucucgugaagaacaaaugcgugaacuucaacuucaacggccugaccggcaccggcgugcugacagagagcaacaagaaguuccugccauuccagcaguuuggccgggauaucgccgauaccacagacgccguuagagauccccagacacuggaaauccuggacaucaccccuugcagcuucggcggagugucugugaucaccccuggcaccaacaccagcaaucagguggcagugcuguaccagggcgugaacuguaccgaagugcccguggccauucacgccgaucagcugacaccuacauggcggguguacuccaccggcagcaauguguuucagaccagagccggcugucugaucggagccgagcacgugaacaauagcuacgagugcgacauccccaucggcgcuggaaucugcgccagcuaccagacacagacaaacagcccucggagagccagaagcguggccagccagagcaucauugccuacacaaugucucugggcgccgagaacagcguggccuacuccaacaacucuaucgcuauccccaccaacuucaccaucagcgugaccacagagauccugccuguguccaugaccaagaccagcguggacugcaccauguacaucugcggcgauuccaccgagugcuccaaccugcugcugcaguacggcagcuucugcacccagcugaauagagcccugacagggaucgccguggaacaggacaagaacacccaagagguguucgcccaagugaagcagaucuacaagaccccuccuaucaaggacuucggcggcuucaauuucagccagauucugcccgauccuagcaagcccagcaagcggagcuucaucgaggaccugcuguucaacaaagugacacuggccgacgccggcuucaucaagcaguauggcgauugucugggcgacauugccgccagggaucugauuugcgcccagaaguuuaacggacugacagugcugccuccucugcugaccgaugagaugaucgcccaguacacaucugcccugcuggccggcacaaucacaagcggcuggacauuuggagcaggcgccgcucugcagauccccuuugcuaugcagauggccuaccgguucaacggcaucggagugacccagaaugugcuguacgagaaccagaagcugaucgccaaccaguucaacagcgccaucggcaagauccaggacagccugagcagcacagcaagcgcccugggaaagcugcaggacguggucaaccagaaugcccaggcacugaacacccuggucaagcagcuguccuccaacuucggcgccaucagcucugugcugaacgauauccugagcagacuggacccuccugaggccgaggugcagaucgacagacugaucacaggcagacugcagagccuccagacauacgugacccagcagcugaucagagccgccgagauuagagccucugccaaucuggccgccaccaagaugucugagugugugcugggccagagcaagagaguggacuuuugcggcaagggcuaccaccugaugagcuucccucagucugccccucacggcgugguguuucugcacgugacauaugugcccgcucaagagaagaauuucaccaccgcuccagccaucugccacgacggcaaagcccacuuuccuagagaaggcguguucguguccaacggcacccauugguucgugacacagcggaacuucuacgagccccagaucaucaccaccgacaacaccuucgugucuggcaacugcgacgucgugaucggcauugugaacaauaccguguacgacccucugcagcccgagcuggacagcuucaaagaggaacuggacaaguacuuuaagaaccacacaagccccgacguggaccugggcgauaucagcggaaucaaugccagcgucgugaacauccagaaagagaucgaccggcugaacgagguggccaagaaucugaacgagagccugaucgaccugcaagaacuggggaaguacgagcaguacaucaaguggcccugguacaucuggcugggcuuuaucgccggacugauugccaucgugauggucacaaucaugcuguguugcaugaccagcugcuguagcugccugaagggcuguuguagcuguggcagcugcugcaaguucgacgaggacgauucugagcccgugcugaagggcgugaaacugcacuacacaugaggacuaguuauaagacugacuagcccgaugggccucccaacgggcccuccuccccuccuugcaccgagagaucucaaaggcucuuuucagagccaccaaaaaaaaaaaaaaaaaaaaaaaaaaaaaaaaaaaaaaaaaaaaaaaaaaaaaaaaaaaaaaaaaaaaaaaaaaaaaaaaaaaaaaaaaaaaaaaaaaaaa

SEQ ID NO: 24715 - RNA, 4035 nt, Artificial Sequence
  SARS-CoV-2/Wuhan/WIV05/2019__EPI_ISL_402128 spike protein mRNA gc mod (1-1273)(K986P_V987P_D614G_I692V)
aggagaaagcuuaccauguucguguuccuggugcugcugccucugguguccagccagugugugaaccugaccaccagaacacagcugccuccagccuacaccaacagcuuuaccagaggcguguacuaccccgacaagguguucagauccagcgugcugcacucuacccaggaccuguuccugccuuucuucagcaacgugaccugguuccacgccauccacguguccggcaccaauggcaccaagagauucgacaaccccgugcugcccuucaacgacgggguguacuuugccagcaccgagaaguccaacaucaucagaggcuggaucuucggcaccacacuggacagcaagacccagagccugcugaucgugaacaacgccaccaacguggucaucaaagugugcgaguuccaguucugcaacgaccccuuccugggcgucuacuaccacaagaacaacaagagcuggauggaaagcgaguuccggguguacagcagcgccaacaacugcaccuucgaguacgugucccagccuuuccugauggaccuggaaggcaagcagggcaacuucaagaaccugcgcgaguucguguuuaagaacaucgacggcuacuucaagaucuacagcaagcacaccccuaucaaccucgugcgggaucugccucagggcuucucugcucuggaaccccugguggaucugcccaucggcaucaacaucacccgguuucagacacugcuggcccugcacagaagcuaccugacaccuggcgauagcagcagcggauggacagcuggugccgccgcuuacuaugugggcuaccugcagccuagaaccuuccugcugaaguacaacgagaacggcaccaucaccgacgccguggauugugcucuggauccucugagcgagacaaagugcacccugaaguccuucaccguggaaaagggcaucuaccagaccagcaacuuccgggugcagcccaccgaauccaucgugcgguuccccaauaucaccaaucugugccccuucggcgagguguucaaugccaccagauucgccucuguguacgccuggaaccggaagcggaucagcaauugcguggccgacuacuccgugcuguacaacuccgccagcuucagcaccuucaagugcuacggcguguccccuaccaagcugaacgaccugugcuucacaaacguguacgccgacagcuucgugauccggggagaugaagugcggcagauugccccuggacagacaggcaagaucgccgacuacaacuacaagcugcccgacgacuucaccggcugugugauugccuggaacagcaacaaccuggacuccaaagucggcggcaacuacaauuaccuguaccggcuguuccggaaguccaaucugaagcccuucgagcgggacaucuccaccgagaucuaucaggccggcagcaccccuuguaacggcguggaaggcuucaacugcuacuucccacugcaguccuacggcuuucagcccacaaauggcgugggcuaucagcccuacagagugguggugcugagcuucgaacugcugcaugccccugccacagugugcggcccuaagaaaagcaccaaucucgugaagaacaaaugcgugaacuucaacuucaacggccugaccggcaccggcgugcugacagagagcaacaagaaguuccugccauuccagcaguuuggccgggauaucgccgauaccacagacgccguuagagauccccagacacuggaaauccuggacaucaccccuugcagcuucggcggagugucugugaucaccccuggcaccaacaccagcaaucagguggcagugcuguaccagggcgugaacuguaccgaagugcccguggccauucacgccgaucagcugacaccuacauggcggguguacuccaccggcagcaauguguuucagaccagagccggcugucugaucggagccgagcacgugaacaauagcuacgagugcgacauccccaucggcgcuggaaucugcgccagcuaccagacacagacaaacagcccucggagagccagaagcguggccagccagagcgugauugccuacacaaugucucugggcgccgagaacagcguggccuacuccaacaacucuaucgcuauccccaccaacuucaccaucagcgugaccacagagauccugccuguguccaugaccaagaccagcguggacugcaccauguacaucugcggcgauuccaccgagugcuccaaccugcugcugcaguacggcagcuucugcacccagcugaauagagcccugacagggaucgccguggaacaggacaagaacacccaagagguguucgcccaagugaagcagaucuacaagaccccuccuaucaaggacuucggcggcuucaauuucagccagauucugcccgauccuagcaagcccagcaagcggagcuucaucgaggaccugcuguucaacaaagugacacuggccgacgccggcuucaucaagcaguauggcgauugucugggcgacauugccgccagggaucugauuugcgcccagaaguuuaacggacugacagugcugccuccucugcugaccgaugagaugaucgcccaguacacaucugcccugcuggccggcacaaucacaagcggcuggacauuuggagcaggcgccgcucugcagauccccuuugcuaugcagauggccuaccgguucaacggcaucggagugacccagaaugugcuguacgagaaccagaagcugaucgccaaccaguucaacagcgccaucggcaagauccaggacagccugagcagcacagcaagcgcccugggaaagcugcaggacguggucaaccagaaugcccaggcacugaacacccuggucaagcagcuguccuccaacuucggcgccaucagcucugugcugaacgauauccugagcagacuggacccuccugaggccgaggugcagaucgacagacugaucacaggcagacugcagagccuccagacauacgugacccagcagcugaucagagccgccgagauuagagccucugccaaucuggccgccaccaagaugucugagugugugcugggccagagcaagagaguggacuuuugcggcaagggcuaccaccugaugagcuucccucagucugccccucacggcgugguguuucugcacgugacauaugugcccgcucaagagaagaauuucaccaccgcuccagccaucugccacgacggcaaagcccacuuuccuagagaaggcguguucguguccaacggcacccauugguucgugacacagcggaacuucuacgagccccagaucaucaccaccgacaacaccuucgugucuggcaacugcgacgucgugaucggcauugugaacaauaccguguacgacccucugcagcccgagcuggacagcuucaaagaggaacuggacaaguacuuuaagaaccacacaagccccgacguggaccugggcgauaucagcggaaucaaugccagcgucgugaacauccagaaagagaucgaccggcugaacgagguggccaagaaucugaacgagagccugaucgaccugcaagaacuggggaaguacgagcaguacaucaaguggcccugguacaucuggcugggcuuuaucgccggacugauugccaucgugauggucacaaucaugcuguguugcaugaccagcugcuguagcugccugaagggcuguuguagcuguggcagcugcugcaaguucgacgaggacgauucugagcccgugcugaagggcgugaaacugcacuacacaugaggacuaguuauaagacugacuagcccgaugggccucccaacgggcccuccuccccuccuugcaccgagagaucucaaaggcucuuuucagagccaccaaaaaaaaaaaaaaaaaaaaaaaaaaaaaaaaaaaaaaaaaaaaaaaaaaaaaaaaaaaaaaaaaaaaaaaaaaaaaaaaaaaaaaaaaaaaaaaaaaaaa

SEQ ID NO: 24716 - RNA, 4035 nt, Artificial Sequence
  SARS-CoV-2/Wuhan/WIV05/2019__EPI_ISL_402128 spike protein mRNA gc mod (1-1273)(K986P_V987P_D614G_M1229I)
aggagaaagcuuaccauguucguguuccuggugcugcugccucugguguccagccagugugugaaccugaccaccagaacacagcugccuccagccuacaccaacagcuuuaccagaggcguguacuaccccgacaagguguucagauccagcgugcugcacucuacccaggaccuguuccugccuuucuucagcaacgugaccugguuccacgccauccacguguccggcaccaauggcaccaagagauucgacaaccccgugcugcccuucaacgacgggguguacuuugccagcaccgagaaguccaacaucaucagaggcuggaucuucggcaccacacuggacagcaagacccagagccugcugaucgugaacaacgccaccaacguggucaucaaagugugcgaguuccaguucugcaacgaccccuuccugggcgucuacuaccacaagaacaacaagagcuggauggaaagcgaguuccggguguacagcagcgccaacaacugcaccuucgaguacgugucccagccuuuccugauggaccuggaaggcaagcagggcaacuucaagaaccugcgcgaguucguguuuaagaacaucgacggcuacuucaagaucuacagcaagcacaccccuaucaaccucgugcgggaucugccucagggcuucucugcucuggaaccccugguggaucugcccaucggcaucaacaucacccgguuucagacacugcuggcccugcacagaagcuaccugacaccuggcgauagcagcagcggauggacagcuggugccgccgcuuacuaugugggcuaccugcagccuagaaccuuccugcugaaguacaacgagaacggcaccaucaccgacgccguggauugugcucuggauccucugagcgagacaaagugcacccugaaguccuucaccguggaaaagggcaucuaccagaccagcaacuuccgggugcagcccaccgaauccaucgugcgguuccccaauaucaccaaucugugccccuucggcgagguguucaaugccaccagauucgccucuguguacgccuggaaccggaagcggaucagcaauugcguggccgacuacuccgugcuguacaacuccgccagcuucagcaccuucaagugcuacggcguguccccuaccaagcugaacgaccugugcuucacaaacguguacgccgacagcuucgugauccggggagaugaagugcggcagauugccccuggacagacaggcaagaucgccgacuacaacuacaagcugcccgacgacuucaccggcugugugauugccuggaacagcaacaaccuggacuccaaagucggcggcaacuacaauuaccuguaccggcuguuccggaaguccaaucugaagcccuucgagcgggacaucuccaccgagaucuaucaggccggcagcaccccuuguaacggcguggaaggcuucaacugcuacuucccacugcaguccuacggcuuucagcccacaaauggcgugggcuaucagcccuacagagugguggugcugagcuucgaacugcugcaugccccugccacagugugcggcccuaagaaaagcaccaaucucgugaagaacaaaugcgugaacuucaacuucaacggccugaccggcaccggcgugcugacagagagcaacaagaaguuccugccauuccagcaguuuggccgggauaucgccgauaccacagacgccguuagagauccccagacacuggaaauccuggacaucaccccuugcagcuucggcggagugucugugaucaccccuggcaccaacaccagcaaucagguggcagugcuguaccagggcgugaacuguaccgaagugcccguggccauucacgccgaucagcugacaccuacauggcggguguacuccaccggcagcaauguguuucagaccagagccggcugucugaucggagccgagcacgugaacaauagcuacgagugcgacauccccaucggcgcuggaaucugcgccagcuaccagacacagacaaacagcccucggagagccagaagcguggccagccagagcaucauugccuacacaaugucucugggcgccgagaacagcguggccuacuccaacaacucuaucgcuauccccaccaacuucaccaucagcgugaccacagagauccugccuguguccaugaccaagaccagcguggacugcaccauguacaucugcggcgauuccaccgagugcuccaaccugcugcugcaguacggcagcuucugcacccagcugaauagagcccugacagggaucgccguggaacaggacaagaacacccaagagguguucgcccaagugaagcagaucuacaagaccccuccuaucaaggacuucggcggcuucaauuucagccagauucugcccgauccuagcaagcccagcaagcggagcuucaucgaggaccugcuguucaacaaagugacacuggccgacgccggcuucaucaagcaguauggcgauugucugggcgacauugccgccagggaucugauuugcgcccagaaguuuaacggacugacagugcugccuccucugcugaccgaugagaugaucgcccaguacacaucugcccugcuggccggcacaaucacaagcggcuggacauuuggagcaggcgccgcucugcagauccccuuugcuaugcagauggccuaccgguucaacggcaucggagugacccagaaugugcuguacgagaaccagaagcugaucgccaaccaguucaacagcgccaucggcaagauccaggacagccugagcagcacagcaagcgcccugggaaagcugcaggacguggucaaccagaaugcccaggcacugaacacccuggucaagcagcuguccuccaacuucggcgccaucagcucugugcugaacgauauccugagcagacuggacccuccugaggccgaggugcagaucgacagacugaucacaggcagacugcagagccuccagacauacgugacccagcagcugaucagagccgccgagauuagagccucugccaaucuggccgccaccaagaugucugagugugugcugggccagagcaagagaguggacuuuugcggcaagggcuaccaccugaugagcuucccucagucugccccucacggcgugguguuucugcacgugacauaugugcccgcucaagagaagaauuucaccaccgcuccagccaucugccacgacggcaaagcccacuuuccuagagaaggcguguucguguccaacggcacccauugguucgugacacagcggaacuucuacgagccccagaucaucaccaccgacaacaccuucgugucuggcaacugcgacgucgugaucggcauugugaacaauaccguguacgacccucugcagcccgagcuggacagcuucaaagaggaacuggacaaguacuuuaagaaccacacaagccccgacguggaccugggcgauaucagcggaaucaaugccagcgucgugaacauccagaaagagaucgaccggcugaacgagguggccaagaaucugaacgagagccugaucgaccugcaagaacuggggaaguacgagcaguacaucaaguggcccugguacaucuggcugggcuuuaucgccggacugauugccaucgugaucgucacaaucaugcuguguugcaugaccagcugcuguagcugccugaagggcuguuguagcuguggcagcugcugcaaguucgacgaggacgauucugagcccgugcugaagggcgugaaacugcacuacacaugaggacuaguuauaagacugacuagcccgaugggccucccaacgggcccuccuccccuccuugcaccgagagaucucaaaggcucuuuucagagccaccaaaaaaaaaaaaaaaaaaaaaaaaaaaaaaaaaaaaaaaaaaaaaaaaaaaaaaaaaaaaaaaaaaaaaaaaaaaaaaaaaaaaaaaaaaaaaaaaaaaaa

SEQ ID NO: 24717 - RNA, 4029 nt, Artificial Sequence
  SARS-CoV-2/Wuhan/WIV05/2019__EPI_ISL_402128 spike protein mRNA gc mod (1-1273)(K986P_V987P_H69del_V70del_A222V_Y453F_S477N_D614G_I692V)
aggagaaagcuuaccauguucguguuccuggugcugcugccucugguguccagccagugugugaaccugaccaccagaacacagcugccuccagccuacaccaacagcuuuaccagaggcguguacuaccccgacaagguguucagauccagcgugcugcacucuacccaggaccuguuccugccuuucuucagcaacgugaccugguuccacgccaucuccggcaccaauggcaccaagagauucgacaaccccgugcugcccuucaacgacgggguguacuuugccagcaccgagaaguccaacaucaucagaggcuggaucuucggcaccacacuggacagcaagacccagagccugcugaucgugaacaacgccaccaacguggucaucaaagugugcgaguuccaguucugcaacgaccccuuccugggcgucuacuaccacaagaacaacaagagcuggauggaaagcgaguuccggguguacagcagcgccaacaacugcaccuucgaguacgugucccagccuuuccugauggaccuggaaggcaagcagggcaacuucaagaaccugcgcgaguucguguuuaagaacaucgacggcuacuucaagaucuacagcaagcacaccccuaucaaccucgugcgggaucugccucagggcuucucugugcuggaaccccugguggaucugcccaucggcaucaacaucacccgguuucagacacugcuggcccugcacagaagcuaccugacaccuggcgauagcagcagcggauggacagcuggugccgccgcuuacuaugugggcuaccugcagccuagaaccuuccugcugaaguacaacgagaacggcaccaucaccgacgccguggauugugcucuggauccucugagcgagacaaagugcacccugaaguccuucaccguggaaaagggcaucuaccagaccagcaacuuccgggugcagcccaccgaauccaucgugcgguuccccaauaucaccaaucugugccccuucggcgagguguucaaugccaccagauucgccucuguguacgccuggaaccggaagcggaucagcaauugcguggccgacuacuccgugcuguacaacuccgccagcuucagcaccuucaagugcuacggcguguccccuaccaagcugaacgaccugugcuucacaaacguguacgccgacagcuucgugauccggggagaugaagugcggcagauugccccuggacagacaggcaagaucgccgacuacaacuacaagcugcccgacgacuucaccggcugugugauugccuggaacagcaacaaccuggacuccaaagucggcggcaacuacaauuaccuguuccggcuguuccggaaguccaaucugaagcccuucgagcgggacaucuccaccgagaucuaucaggccggcaacaccccuuguaacggcguggaaggcuucaacugcuacuucccacugcaguccuacggcuuucagcccacaaauggcgugggcuaucagcccuacagagugguggugcugagcuucgaacugcugcaugccccugccacagugugcggcccuaagaaaagcaccaaucucgugaagaacaaaugcgugaacuucaacuucaacggccugaccggcaccggcgugcugacagagagcaacaagaaguuccugccauuccagcaguuuggccgggauaucgccgauaccacagacgccguuagagauccccagacacuggaaauccuggacaucaccccuugcagcuucggcggagugucugugaucaccccuggcaccaacaccagcaaucagguggcagugcuguaccagggcgugaacuguaccgaagugcccguggccauucacgccgaucagcugacaccuacauggcggguguacuccaccggcagcaauguguuucagaccagagccggcugucugaucggagccgagcacgugaacaauagcuacgagugcgacauccccaucggcgcuggaaucugcgccagcuaccagacacagacaaacagcccucggagagccagaagcguggccagccagagcgugauugccuacacaaugucucugggcgccgagaacagcguggccuacuccaacaacucuaucgcuauccccaccaacuucaccaucagcgugaccacagagauccugccuguguccaugaccaagaccagcguggacugcaccauguacaucugcggcgauuccaccgagugcuccaaccugcugcugcaguacggcagcuucugcacccagcugaauagagcccugacagggaucgccguggaacaggacaagaacacccaagagguguucgcccaagugaagcagaucuacaagaccccuccuaucaaggacuucggcggcuucaauuucagccagauucugcccgauccuagcaagcccagcaagcggagcuucaucgaggaccugcuguucaacaaagugacacuggccgacgccggcuucaucaagcaguauggcgauugucugggcgacauugccgccagggaucugauuugcgcccagaaguuuaacggacugacagugcugccuccucugcugaccgaugagaugaucgcccaguacacaucugcccugcuggccggcacaaucacaagcggcuggacauuuggagcaggcgccgcucugcagauccccuuugcuaugcagauggccuaccgguucaacggcaucggagugacccagaaugugcuguacgagaaccagaagcugaucgccaaccaguucaacagcgccaucggcaagauccaggacagccugagcagcacagcaagcgcccugggaaagcugcaggacguggucaaccagaaugcccaggcacugaacacccuggucaagcagcuguccuccaacuucggcgccaucagcucugugcugaacgauauccugagcagacuggacccuccugaggccgaggugcagaucgacagacugaucacaggcagacugcagagccuccagacauacgugacccagcagcugaucagagccgccgagauuagagccucugccaaucuggccgccaccaagaugucugagugugugcugggccagagcaagagaguggacuuuugcggcaagggcuaccaccugaugagcuucccucagucugccccucacggcgugguguuucugcacgugacauaugugcccgcucaagagaagaauuucaccaccgcuccagccaucugccacgacggcaaagcccacuuuccuagagaaggcguguucguguccaacggcacccauugguucgugacacagcggaacuucuacgagccccagaucaucaccaccgacaacaccuucgugucuggcaacugcgacgucgugaucggcauugugaacaauaccguguacgacccucugcagcccgagcuggacagcuucaaagaggaacuggacaaguacuuuaagaaccacacaagccccgacguggaccugggcgauaucagcggaaucaaugccagcgucgugaacauccagaaagagaucgaccggcugaacgagguggccaagaaucugaacgagagccugaucgaccugcaagaacuggggaaguacgagcaguacaucaaguggcccugguacaucuggcugggcuuuaucgccggacugauugccaucgugauggucacaaucaugcuguguugcaugaccagcugcuguagcugccugaagggcuguuguagcuguggcagcugcugcaaguucgacgaggacgauucugagcccgugcugaagggcgugaaacugcacuacacaugaggacuaguuauaagacugacuagcccgaugggccucccaacgggcccuccuccccuccuugcaccgagagaucucaaaggcucuuuucagagccaccaaaaaaaaaaaaaaaaaaaaaaaaaaaaaaaaaaaaaaaaaaaaaaaaaaaaaaaaaaaaaaaaaaaaaaaaaaaaaaaaaaaaaaaaaaaaaaaaaaaaa

SEQ ID NO: 24718 - RNA, 4029 nt, Artificial Sequence
  SARS-CoV-2/Wuhan/WIV05/2019__EPI_ISL_402128 spike protein mRNA gc mod (1-1273)(K986P_V987P_H69del_V70del_Y453F_D614G_I692V_M1229I)
aggagaaagcuuaccauguucguguuccuggugcugcugccucugguguccagccagugugugaaccugaccaccagaacacagcugccuccagccuacaccaacagcuuuaccagaggcguguacuaccccgacaagguguucagauccagcgugcugcacucuacccaggaccuguuccugccuuucuucagcaacgugaccugguuccacgccaucuccggcaccaauggcaccaagagauucgacaaccccgugcugcccuucaacgacgggguguacuuugccagcaccgagaaguccaacaucaucagaggcuggaucuucggcaccacacuggacagcaagacccagagccugcugaucgugaacaacgccaccaacguggucaucaaagugugcgaguuccaguucugcaacgaccccuuccugggcgucuacuaccacaagaacaacaagagcuggauggaaagcgaguuccggguguacagcagcgccaacaacugcaccuucgaguacgugucccagccuuuccugauggaccuggaaggcaagcagggcaacuucaagaaccugcgcgaguucguguuuaagaacaucgacggcuacuucaagaucuacagcaagcacaccccuaucaaccucgugcgggaucugccucagggcuucucugcucuggaaccccugguggaucugcccaucggcaucaacaucacccgguuucagacacugcuggcccugcacagaagcuaccugacaccuggcgauagcagcagcggauggacagcuggugccgccgcuuacuaugugggcuaccugcagccuagaaccuuccugcugaaguacaacgagaacggcaccaucaccgacgccguggauugugcucuggauccucugagcgagacaaagugcacccugaaguccuucaccguggaaaagggcaucuaccagaccagcaacuuccgggugcagcccaccgaauccaucgugcgguuccccaauaucaccaaucugugccccuucggcgagguguucaaugccaccagauucgccucuguguacgccuggaaccggaagcggaucagcaauugcguggccgacuacuccgugcuguacaacuccgccagcuucagcaccuucaagugcuacggcguguccccuaccaagcugaacgaccugugcuucacaaacguguacgccgacagcuucgugauccggggagaugaagugcggcagauugccccuggacagacaggcaagaucgccgacuacaacuacaagcugcccgacgacuucaccggcugugugauugccuggaacagcaacaaccuggacuccaaagucggcggcaacuacaauuaccuguuccggcuguuccggaaguccaaucugaagcccuucgagcgggacaucuccaccgagaucuaucaggccggcagcaccccuuguaacggcguggaaggcuucaacugcuacuucccacugcaguccuacggcuuucagcccacaaauggcgugggcuaucagcccuacagagugguggugcugagcuucgaacugcugcaugccccugccacagugugcggcccuaagaaaagcaccaaucucgugaagaacaaaugcgugaacuucaacuucaacggccugaccggcaccggcgugcugacagagagcaacaagaaguuccugccauuccagcaguuuggccgggauaucgccgauaccacagacgccguuagagauccccagacacuggaaauccuggacaucaccccuugcagcuucggcggagugucugugaucaccccuggcaccaacaccagcaaucagguggcagugcuguaccagggcgugaacuguaccgaagugcccguggccauucacgccgaucagcugacaccuacauggcggguguacuccaccggcagcaauguguuucagaccagagccggcugucugaucggagccgagcacgugaacaauagcuacgagugcgacauccccaucggcgcuggaaucugcgccagcuaccagacacagacaaacagcccucggagagccagaagcguggccagccagagcgugauugccuacacaaugucucugggcgccgagaacagcguggccuacuccaacaacucuaucgcuauccccaccaacuucaccaucagcgugaccacagagauccugccuguguccaugaccaagaccagcguggacugcaccauguacaucugcggcgauuccaccgagugcuccaaccugcugcugcaguacggcagcuucugcacccagcugaauagagcccugacagggaucgccguggaacaggacaagaacacccaagagguguucgcccaagugaagcagaucuacaagaccccuccuaucaaggacuucggcggcuucaauuucagccagauucugcccgauccuagcaagcccagcaagcggagcuucaucgaggaccugcuguucaacaaagugacacuggccgacgccggcuucaucaagcaguauggcgauugucugggcgacauugccgccagggaucugauuugcgcccagaaguuuaacggacugacagugcugccuccucugcugaccgaugagaugaucgcccaguacacaucugcccugcuggccggcacaaucacaagcggcuggacauuuggagcaggcgccgcucugcagauccccuuugcuaugcagauggccuaccgguucaacggcaucggagugacccagaaugugcuguacgagaaccagaagcugaucgccaaccaguucaacagcgccaucggcaagauccaggacagccugagcagcacagcaagcgcccugggaaagcugcaggacguggucaaccagaaugcccaggcacugaacacccuggucaagcagcuguccuccaacuucggcgccaucagcucugugcugaacgauauccugagcagacuggacccuccugaggccgaggugcagaucgacagacugaucacaggcagacugcagagccuccagacauacgugacccagcagcugaucagagccgccgagauuagagccucugccaaucuggccgccaccaagaugucugagugugugcugggccagagcaagagaguggacuuuugcggcaagggcuaccaccugaugagcuucccucagucugccccucacggcgugguguuucugcacgugacauaugugcccgcucaagagaagaauuucaccaccgcuccagccaucugccacgacggcaaagcccacuuuccuagagaaggcguguucguguccaacggcacccauugguucgugacacagcggaacuucuacgagccccagaucaucaccaccgacaacaccuucgugucuggcaacugcgacgucgugaucggcauugugaacaauaccguguacgacccucugcagcccgagcuggacagcuucaaagaggaacuggacaaguacuuuaagaaccacacaagccccgacguggaccugggcgauaucagcggaaucaaugccagcgucgugaacauccagaaagagaucgaccggcugaacgagguggccaagaaucugaacgagagccugaucgaccugcaagaacuggggaaguacgagcaguacaucaaguggcccugguacaucuggcugggcuuuaucgccggacugauugccaucgugaucgucacaaucaugcuguguugcaugaccagcugcuguagcugccugaagggcuguuguagcuguggcagcugcugcaaguucgacgaggacgauucugagcccgugcugaagggcgugaaacugcacuacacaugaggacuaguuauaagacugacuagcccgaugggccucccaacgggcccuccuccccuccuugcaccgagagaucucaaaggcucuuuucagagccaccaaaaaaaaaaaaaaaaaaaaaaaaaaaaaaaaaaaaaaaaaaaaaaaaaaaaaaaaaaaaaaaaaaaaaaaaaaaaaaaaaaaaaaaaaaaaaaaaaaaaa

SEQ ID NO: 24719 - RNA, 4026 nt, Artificial Sequence
  SARS-CoV-2/Wuhan/WIV05/2019__EPI_ISL_402128 spike protein mRNA gc mod (1-1273)(K986P_V987P_K986P_V987P_H69del_V70del_Y144del_N501Y_A570 D_D614G_P681H_T716I_S982A_D1118H)
aggagaaagcuuaccauguucguguuccuggugcugcugccucugguguccagccagugugugaaccugaccaccagaacacagcugccuccagccuacaccaacagcuuuaccagaggcguguacuaccccgacaagguguucagauccagcgugcugcacucuacccaggaccuguuccugccuuucuucagcaacgugaccugguuccacgccaucuccggcaccaauggcaccaagagauucgacaaccccgugcugcccuucaacgacgggguguacuuugccagcaccgagaaguccaacaucaucagaggcuggaucuucggcaccacacuggacagcaagacccagagccugcugaucgugaacaacgccaccaacguggucaucaaagugugcgaguuccaguucugcaacgaccccuuccugggcgucuaccacaagaacaacaagagcuggauggaaagcgaguuccggguguacagcagcgccaacaacugcaccuucgaguacgugucccagccuuuccugauggaccuggaaggcaagcagggcaacuucaagaaccugcgcgaguucguguuuaagaacaucgacggcuacuucaagaucuacagcaagcacaccccuaucaaccucgugcgggaucugccucagggcuucucugcucuggaaccccugguggaucugcccaucggcaucaacaucacccgguuucagacacugcuggcccugcacagaagcuaccugacaccuggcgauagcagcagcggauggacagcuggugccgccgcuuacuaugugggcuaccugcagccuagaaccuuccugcugaaguacaacgagaacggcaccaucaccgacgccguggauugugcucuggauccucugagcgagacaaagugcacccugaaguccuucaccguggaaaagggcaucuaccagaccagcaacuuccgggugcagcccaccgaauccaucgugcgguuccccaauaucaccaaucugugccccuucggcgagguguucaaugccaccagauucgccucuguguacgccuggaaccggaagcggaucagcaauugcguggccgacuacuccgugcuguacaacuccgccagcuucagcaccuucaagugcuacggcguguccccuaccaagcugaacgaccugugcuucacaaacguguacgccgacagcuucgugauccggggagaugaagugcggcagauugccccuggacagacaggcaagaucgccgacuacaacuacaagcugcccgacgacuucaccggcugugugauugccuggaacagcaacaaccuggacuccaaagucggcggcaacuacaauuaccuguaccggcuguuccggaaguccaaucugaagcccuucgagcgggacaucuccaccgagaucuaucaggccggcagcaccccuuguaacggcguggaaggcuucaacugcuacuucccacugcaguccuacggcuuucagcccacauacggcgugggcuaucagcccuacagagugguggugcugagcuucgaacugcugcaugccccugccacagugugcggcccuaagaaaagcaccaaucucgugaagaacaaaugcgugaacuucaacuucaacggccugaccggcaccggcgugcugacagagagcaacaagaaguuccugccauuccagcaguuuggccgggauaucgacgauaccacagacgccguuagagauccccagacacuggaaauccuggacaucaccccuugcagcuucggcggagugucugugaucaccccuggcaccaacaccagcaaucagguggcagugcuguaccagggcgugaacuguaccgaagugcccguggccauucacgccgaucagcugacaccuacauggcggguguacuccaccggcagcaauguguuucagaccagagccggcugucugaucggagccgagcacgugaacaauagcuacgagugcgacauccccaucggcgcuggaaucugcgccagcuaccagacacagacaaacagccaccggagagccagaagcguggccagccagagcaucauugccuacacaaugucucugggcgccgagaacagcguggccuacuccaacaacucuaucgcuauccccaucaacuucaccaucagcgugaccacagagauccugccuguguccaugaccaagaccagcguggacugcaccauguacaucugcggcgauuccaccgagugcuccaaccugcugcugcaguacggcagcuucugcacccagcugaauagagcccugacagggaucgccguggaacaggacaagaacacccaagagguguucgcccaagugaagcagaucuacaagaccccuccuaucaaggacuucggcggcuucaauuucagccagauucugcccgauccuagcaagcccagcaagcggagcuucaucgaggaccugcuguucaacaaagugacacuggccgacgccggcuucaucaagcaguauggcgauugucugggcgacauugccgccagggaucugauuugcgcccagaaguuuaacggacugacagugcugccuccucugcugaccgaugagaugaucgcccaguacacaucugcccugcuggccggcacaaucacaagcggcuggacauuuggagcaggcgccgcucugcagauccccuuugcuaugcagauggccuaccgguucaacggcaucggagugacccagaaugugcuguacgagaaccagaagcugaucgccaaccaguucaacagcgccaucggcaagauccaggacagccugagcagcacagcaagcgcccugggaaagcugcaggacguggucaaccagaaugcccaggcacugaacacccuggucaagcagcuguccuccaacuucggcgccaucagcucugugcugaacgauauccuggccagacuggacccuccugaggccgaggugcagaucgacagacugaucacaggcagacugcagagccuccagacauacgugacccagcagcugaucagagccgccgagauuagagccucugccaaucuggccgccaccaagaugucugagugugugcugggccagagcaagagaguggacuuuugcggcaagggcuaccaccugaugagcuucccucagucugccccucacggcgugguguuucugcacgugacauaugugcccgcucaagagaagaauuucaccaccgcuccagccaucugccacgacggcaaagcccacuuuccuagagaaggcguguucguguccaacggcacccauugguucgugacacagcggaacuucuacgagccccagaucaucaccacccacaacaccuucgugucuggcaacugcgacgucgugaucggcauugugaacaauaccguguacgacccucugcagcccgagcuggacagcuucaaagaggaacuggacaaguacuuuaagaaccacacaagccccgacguggaccugggcgauaucagcggaaucaaugccagcgucgugaacauccagaaagagaucgaccggcugaacgagguggccaagaaucugaacgagagccugaucgaccugcaagaacuggggaaguacgagcaguacaucaaguggcccugguacaucuggcugggcuuuaucgccggacugauugccaucgugauggucacaaucaugcuguguugcaugaccagcugcuguagcugccugaagggcuguuguagcuguggcagcugcugcaaguucgacgaggacgauucugagcccgugcugaagggcgugaaacugcacuacacaugaggacuaguuauaagacugacuagcccgaugggccucccaacgggcccuccuccccuccuugcaccgagagaucucaaaggcucuuuucagagccaccaaaaaaaaaaaaaaaaaaaaaaaaaaaaaaaaaaaaaaaaaaaaaaaaaaaaaaaaaaaaaaaaaaaaaaaaaaaaaaaaaaaaaaaaaaaaaaaaaaaaa

SEQ ID NO: 24720 - RNA, 4035 nt, Artificial Sequence
  SARS-CoV-2/Wuhan/WIV05/2019__EPI_ISL_402128 spike protein mRNA gc mod (1-1273)(K986P_V987P_K986P_V987P_K417N_E484K_N501Y_D614G)
aggagaaagcuuaccauguucguguuccuggugcugcugccucugguguccagccagugugugaaccugaccaccagaacacagcugccuccagccuacaccaacagcuuuaccagaggcguguacuaccccgacaagguguucagauccagcgugcugcacucuacccaggaccuguuccugccuuucuucagcaacgugaccugguuccacgccauccacguguccggcaccaauggcaccaagagauucgacaaccccgugcugcccuucaacgacgggguguacuuugccagcaccgagaaguccaacaucaucagaggcuggaucuucggcaccacacuggacagcaagacccagagccugcugaucgugaacaacgccaccaacguggucaucaaagugugcgaguuccaguucugcaacgaccccuuccugggcgucuacuaccacaagaacaacaagagcuggauggaaagcgaguuccggguguacagcagcgccaacaacugcaccuucgaguacgugucccagccuuuccugauggaccuggaaggcaagcagggcaacuucaagaaccugcgcgaguucguguuuaagaacaucgacggcuacuucaagaucuacagcaagcacaccccuaucaaccucgugcgggaucugccucagggcuucucugcucuggaaccccugguggaucugcccaucggcaucaacaucacccgguuucagacacugcuggcccugcacagaagcuaccugacaccuggcgauagcagcagcggauggacagcuggugccgccgcuuacuaugugggcuaccugcagccuagaaccuuccugcugaaguacaacgagaacggcaccaucaccgacgccguggauugugcucuggauccucugagcgagacaaagugcacccugaaguccuucaccguggaaaagggcaucuaccagaccagcaacuuccgggugcagcccaccgaauccaucgugcgguuccccaauaucaccaaucugugccccuucggcgagguguucaaugccaccagauucgccucuguguacgccuggaaccggaagcggaucagcaauugcguggccgacuacuccgugcuguacaacuccgccagcuucagcaccuucaagugcuacggcguguccccuaccaagcugaacgaccugugcuucacaaacguguacgccgacagcuucgugauccggggagaugaagugcggcagauugccccuggacagacaggcaacaucgccgacuacaacuacaagcugcccgacgacuucaccggcugugugauugccuggaacagcaacaaccuggacuccaaagucggcggcaacuacaauuaccuguaccggcuguuccggaaguccaaucugaagcccuucgagcgggacaucuccaccgagaucuaucaggccggcagcaccccuuguaacggcgugaagggcuucaacugcuacuucccacugcaguccuacggcuuucagcccacauacggcgugggcuaucagcccuacagagugguggugcugagcuucgaacugcugcaugccccugccacagugugcggcccuaagaaaagcaccaaucucgugaagaacaaaugcgugaacuucaacuucaacggccugaccggcaccggcgugcugacagagagcaacaagaaguuccugccauuccagcaguuuggccgggauaucgccgauaccacagacgccguuagagauccccagacacuggaaauccuggacaucaccccuugcagcuucggcggagugucugugaucaccccuggcaccaacaccagcaaucagguggcagugcuguaccagggcgugaacuguaccgaagugcccguggccauucacgccgaucagcugacaccuacauggcggguguacuccaccggcagcaauguguuucagaccagagccggcugucugaucggagccgagcacgugaacaauagcuacgagugcgacauccccaucggcgcuggaaucugcgccagcuaccagacacagacaaacagcccucggagagccagaagcguggccagccagagcaucauugccuacacaaugucucugggcgccgagaacagcguggccuacuccaacaacucuaucgcuauccccaccaacuucaccaucagcgugaccacagagauccugccuguguccaugaccaagaccagcguggacugcaccauguacaucugcggcgauuccaccgagugcuccaaccugcugcugcaguacggcagcuucugcacccagcugaauagagcccugacagggaucgccguggaacaggacaagaacacccaagagguguucgcccaagugaagcagaucuacaagaccccuccuaucaaggacuucggcggcuucaauuucagccagauucugcccgauccuagcaagcccagcaagcggagcuucaucgaggaccugcuguucaacaaagugacacuggccgacgccggcuucaucaagcaguauggcgauugucugggcgacauugccgccagggaucugauuugcgcccagaaguuuaacggacugacagugcugccuccucugcugaccgaugagaugaucgcccaguacacaucugcccugcuggccggcacaaucacaagcggcuggacauuuggagcaggcgccgcucugcagauccccuuugcuaugcagauggccuaccgguucaacggcaucggagugacccagaaugugcuguacgagaaccagaagcugaucgccaaccaguucaacagcgccaucggcaagauccaggacagccugagcagcacagcaagcgcccugggaaagcugcaggacguggucaaccagaaugcccaggcacugaacacccuggucaagcagcuguccuccaacuucggcgccaucagcucugugcugaacgauauccugagcagacuggacccuccugaggccgaggugcagaucgacagacugaucacaggcagacugcagagccuccagacauacgugacccagcagcugaucagagccgccgagauuagagccucugccaaucuggccgccaccaagaugucugagugugugcugggccagagcaagagaguggacuuuugcggcaagggcuaccaccugaugagcuucccucagucugccccucacggcgugguguuucugcacgugacauaugugcccgcucaagagaagaauuucaccaccgcuccagccaucugccacgacggcaaagcccacuuuccuagagaaggcguguucguguccaacggcacccauugguucgugacacagcggaacuucuacgagccccagaucaucaccaccgacaacaccuucgugucuggcaacugcgacgucgugaucggcauugugaacaauaccguguacgacccucugcagcccgagcuggacagcuucaaagaggaacuggacaaguacuuuaagaaccacacaagccccgacguggaccugggcgauaucagcggaaucaaugccagcgucgugaacauccagaaagagaucgaccggcugaacgagguggccaagaaucugaacgagagccugaucgaccugcaagaacuggggaaguacgagcaguacaucaaguggcccugguacaucuggcugggcuuuaucgccggacugauugccaucgugauggucacaaucaugcuguguugcaugaccagcugcuguagcugccugaagggcuguuguagcuguggcagcugcugcaaguucgacgaggacgauucugagcccgugcugaagggcgugaaacugcacuacacaugaggacuaguuauaagacugacuagcccgaugggccucccaacgggcccuccuccccuccuugcaccgagagaucucaaaggcucuuuucagagccaccaaaaaaaaaaaaaaaaaaaaaaaaaaaaaaaaaaaaaaaaaaaaaaaaaaaaaaaaaaaaaaaaaaaaaaaaaaaaaaaaaaaaaaaaaaaaaaaaaaaaa

SEQ ID NO: 24721 - RNA, 4026 nt, Artificial Sequence
  SARS-CoV-2/Wuhan/WIV05/2019__EPI_ISL_402128 spike protein mRNA gc mod (1-1273)(K986P_V987P_K986P_V987P_L18F_D80A_D215G_L242del_A243del_ L244del_R246I_K417N_E484K_N501Y_D614G_A701V)
aggagaaagcuuaccauguucguguuccuggugcugcugccucugguguccagccagugugugaacuucaccaccagaacacagcugccuccagccuacaccaacagcuuuaccagaggcguguacuaccccgacaagguguucagauccagcgugcugcacucuacccaggaccuguuccugccuuucuucagcaacgugaccugguuccacgccauccacguguccggcaccaauggcaccaagagauucgccaaccccgugcugcccuucaacgacgggguguacuuugccagcaccgagaaguccaacaucaucagaggcuggaucuucggcaccacacuggacagcaagacccagagccugcugaucgugaacaacgccaccaacguggucaucaaagugugcgaguuccaguucugcaacgaccccuuccugggcgucuacuaccacaagaacaacaagagcuggauggaaagcgaguuccggguguacagcagcgccaacaacugcaccuucgaguacgugucccagccuuuccugauggaccuggaaggcaagcagggcaacuucaagaaccugcgcgaguucguguuuaagaacaucgacggcuacuucaagaucuacagcaagcacaccccuaucaaccucgugcggggccugccucagggcuucucugcucuggaaccccugguggaucugcccaucggcaucaacaucacccgguuucagacacugcacaucagcuaccugacaccuggcgauagcagcagcggauggacagcuggugccgccgcuuacuaugugggcuaccugcagccuagaaccuuccugcugaaguacaacgagaacggcaccaucaccgacgccguggauugugcucuggauccucugagcgagacaaagugcacccugaaguccuucaccguggaaaagggcaucuaccagaccagcaacuuccgggugcagcccaccgaauccaucgugcgguuccccaauaucaccaaucugugccccuucggcgagguguucaaugccaccagauucgccucuguguacgccuggaaccggaagcggaucagcaauugcguggccgacuacuccgugcuguacaacuccgccagcuucagcaccuucaagugcuacggcguguccccuaccaagcugaacgaccugugcuucacaaacguguacgccgacagcuucgugauccggggagaugaagugcggcagauugccccuggacagacaggcaacaucgccgacuacaacuacaagcugcccgacgacuucaccggcugugugauugccuggaacagcaacaaccuggacuccaaagucggcggcaacuacaauuaccuguaccggcuguuccggaaguccaaucugaagcccuucgagcgggacaucuccaccgagaucuaucaggccggcagcaccccuuguaacggcgugaagggcuucaacugcuacuucccacugcaguccuacggcuuucagcccacauacggcgugggcuaucagcccuacagagugguggugcugagcuucgaacugcugcaugccccugccacagugugcggcccuaagaaaagcaccaaucucgugaagaacaaaugcgugaacuucaacuucaacggccugaccggcaccggcgugcugacagagagcaacaagaaguuccugccauuccagcaguuuggccgggauaucgccgauaccacagacgccguuagagauccccagacacuggaaauccuggacaucaccccuugcagcuucggcggagugucugugaucaccccuggcaccaacaccagcaaucagguggcagugcuguaccagggcgugaacuguaccgaagugcccguggccauucacgccgaucagcugacaccuacauggcggguguacuccaccggcagcaauguguuucagaccagagccggcugucugaucggagccgagcacgugaacaauagcuacgagugcgacauccccaucggcgcuggaaucugcgccagcuaccagacacagacaaacagcccucggagagccagaagcguggccagccagagcaucauugccuacacaaugucucugggcguggagaacagcguggccuacuccaacaacucuaucgcuauccccaccaacuucaccaucagcgugaccacagagauccugccuguguccaugaccaagaccagcguggacugcaccauguacaucugcggcgauuccaccgagugcuccaaccugcugcugcaguacggcagcuucugcacccagcugaauagagcccugacagggaucgccguggaacaggacaagaacacccaagagguguucgcccaagugaagcagaucuacaagaccccuccuaucaaggacuucggcggcuucaauuucagccagauucugcccgauccuagcaagcccagcaagcggagcuucaucgaggaccugcuguucaacaaagugacacuggccgacgccggcuucaucaagcaguauggcgauugucugggcgacauugccgccagggaucugauuugcgcccagaaguuuaacggacugacagugcugccuccucugcugaccgaugagaugaucgcccaguacacaucugcccugcuggccggcacaaucacaagcggcuggacauuuggagcaggcgccgcucugcagauccccuuugcuaugcagauggccuaccgguucaacggcaucggagugacccagaaugugcuguacgagaaccagaagcugaucgccaaccaguucaacagcgccaucggcaagauccaggacagccugagcagcacagcaagcgcccugggaaagcugcaggacguggucaaccagaaugcccaggcacugaacacccuggucaagcagcuguccuccaacuucggcgccaucagcucugugcugaacgauauccugagcagacuggacccuccugaggccgaggugcagaucgacagacugaucacaggcagacugcagagccuccagacauacgugacccagcagcugaucagagccgccgagauuagagccucugccaaucuggccgccaccaagaugucugagugugugcugggccagagcaagagaguggacuuuugcggcaagggcuaccaccugaugagcuucccucagucugccccucacggcgugguguuucugcacgugacauaugugcccgcucaagagaagaauuucaccaccgcuccagccaucugccacgacggcaaagcccacuuuccuagagaaggcguguucguguccaacggcacccauugguucgugacacagcggaacuucuacgagccccagaucaucaccaccgacaacaccuucgugucuggcaacugcgacgucgugaucggcauugugaacaauaccguguacgacccucugcagcccgagcuggacagcuucaaagaggaacuggacaaguacuuuaagaaccacacaagccccgacguggaccugggcgauaucagcggaaucaaugccagcgucgugaacauccagaaagagaucgaccggcugaacgagguggccaagaaucugaacgagagccugaucgaccugcaagaacuggggaaguacgagcaguacaucaaguggcccugguacaucuggcugggcuuuaucgccggacugauugccaucgugauggucacaaucaugcuguguugcaugaccagcugcuguagcugccugaagggcuguuguagcuguggcagcugcugcaaguucgacgaggacgauucugagcccgugcugaagggcgugaaacugcacuacacaugaggacuaguuauaagacugacuagcccgaugggccucccaacgggcccuccuccccuccuugcaccgagagaucucaaaggcucuuuucagagccaccaaaaaaaaaaaaaaaaaaaaaaaaaaaaaaaaaaaaaaaaaaaaaaaaaaaaaaaaaaaaaaaaaaaaaaaaaaaaaaaaaaaaaaaaaaaaaaaaaaaaa

SEQ ID NO: 24722 - RNA, 4035 nt, Artificial Sequence
  SARS-CoV-2/Wuhan/WIV05/2019__EPI_ISL_402128 spike protein mRNA gc mod (1-1273)(K986P_V987P_K986P_V987P_E484K_D614G)
aggagaaagcuuaccauguucguguuccuggugcugcugccucugguguccagccagugugugaaccugaccaccagaacacagcugccuccagccuacaccaacagcuuuaccagaggcguguacuaccccgacaagguguucagauccagcgugcugcacucuacccaggaccuguuccugccuuucuucagcaacgugaccugguuccacgccauccacguguccggcaccaauggcaccaagagauucgacaaccccgugcugcccuucaacgacgggguguacuuugccagcaccgagaaguccaacaucaucagaggcuggaucuucggcaccacacuggacagcaagacccagagccugcugaucgugaacaacgccaccaacguggucaucaaagugugcgaguuccaguucugcaacgaccccuuccugggcgucuacuaccacaagaacaacaagagcuggauggaaagcgaguuccggguguacagcagcgccaacaacugcaccuucgaguacgugucccagccuuuccugauggaccuggaaggcaagcagggcaacuucaagaaccugcgcgaguucguguuuaagaacaucgacggcuacuucaagaucuacagcaagcacaccccuaucaaccucgugcgggaucugccucagggcuucucugcucuggaaccccugguggaucugcccaucggcaucaacaucacccgguuucagacacugcuggcccugcacagaagcuaccugacaccuggcgauagcagcagcggauggacagcuggugccgccgcuuacuaugugggcuaccugcagccuagaaccuuccugcugaaguacaacgagaacggcaccaucaccgacgccguggauugugcucuggauccucugagcgagacaaagugcacccugaaguccuucaccguggaaaagggcaucuaccagaccagcaacuuccgggugcagcccaccgaauccaucgugcgguuccccaauaucaccaaucugugccccuucggcgagguguucaaugccaccagauucgccucuguguacgccuggaaccggaagcggaucagcaauugcguggccgacuacuccgugcuguacaacuccgccagcuucagcaccuucaagugcuacggcguguccccuaccaagcugaacgaccugugcuucacaaacguguacgccgacagcuucgugauccggggagaugaagugcggcagauugccccuggacagacaggcaagaucgccgacuacaacuacaagcugcccgacgacuucaccggcugugugauugccuggaacagcaacaaccuggacuccaaagucggcggcaacuacaauuaccuguaccggcuguuccggaaguccaaucugaagcccuucgagcgggacaucuccaccgagaucuaucaggccggcagcaccccuuguaacggcgugaagggcuucaacugcuacuucccacugcaguccuacggcuuucagcccacaaauggcgugggcuaucagcccuacagagugguggugcugagcuucgaacugcugcaugccccugccacagugugcggcccuaagaaaagcaccaaucucgugaagaacaaaugcgugaacuucaacuucaacggccugaccggcaccggcgugcugacagagagcaacaagaaguuccugccauuccagcaguuuggccgggauaucgccgauaccacagacgccguuagagauccccagacacuggaaauccuggacaucaccccuugcagcuucggcggagugucugugaucaccccuggcaccaacaccagcaaucagguggcagugcuguaccagggcgugaacuguaccgaagugcccguggccauucacgccgaucagcugacaccuacauggcggguguacuccaccggcagcaauguguuucagaccagagccggcugucugaucggagccgagcacgugaacaauagcuacgagugcgacauccccaucggcgcuggaaucugcgccagcuaccagacacagacaaacagcccucggagagccagaagcguggccagccagagcaucauugccuacacaaugucucugggcgccgagaacagcguggccuacuccaacaacucuaucgcuauccccaccaacuucaccaucagcgugaccacagagauccugccuguguccaugaccaagaccagcguggacugcaccauguacaucugcggcgauuccaccgagugcuccaaccugcugcugcaguacggcagcuucugcacccagcugaauagagcccugacagggaucgccguggaacaggacaagaacacccaagagguguucgcccaagugaagcagaucuacaagaccccuccuaucaaggacuucggcggcuucaauuucagccagauucugcccgauccuagcaagcccagcaagcggagcuucaucgaggaccugcuguucaacaaagugacacuggccgacgccggcuucaucaagcaguauggcgauugucugggcgacauugccgccagggaucugauuugcgcccagaaguuuaacggacugacagugcugccuccucugcugaccgaugagaugaucgcccaguacacaucugcccugcuggccggcacaaucacaagcggcuggacauuuggagcaggcgccgcucugcagauccccuuugcuaugcagauggccuaccgguucaacggcaucggagugacccagaaugugcuguacgagaaccagaagcugaucgccaaccaguucaacagcgccaucggcaagauccaggacagccugagcagcacagcaagcgcccugggaaagcugcaggacguggucaaccagaaugcccaggcacugaacacccuggucaagcagcuguccuccaacuucggcgccaucagcucugugcugaacgauauccugagcagacuggacccuccugaggccgaggugcagaucgacagacugaucacaggcagacugcagagccuccagacauacgugacccagcagcugaucagagccgccgagauuagagccucugccaaucuggccgccaccaagaugucugagugugugcugggccagagcaagagaguggacuuuugcggcaagggcuaccaccugaugagcuucccucagucugccccucacggcgugguguuucugcacgugacauaugugcccgcucaagagaagaauuucaccaccgcuccagccaucugccacgacggcaaagcccacuuuccuagagaaggcguguucguguccaacggcacccauugguucgugacacagcggaacuucuacgagccccagaucaucaccaccgacaacaccuucgugucuggcaacugcgacgucgugaucggcauugugaacaauaccguguacgacccucugcagcccgagcuggacagcuucaaagaggaacuggacaaguacuuuaagaaccacacaagccccgacguggaccugggcgauaucagcggaaucaaugccagcgucgugaacauccagaaagagaucgaccggcugaacgagguggccaagaaucugaacgagagccugaucgaccugcaagaacuggggaaguacgagcaguacaucaaguggcccugguacaucuggcugggcuuuaucgccggacugauugccaucgugauggucacaaucaugcuguguugcaugaccagcugcuguagcugccugaagggcuguuguagcuguggcagcugcugcaaguucgacgaggacgauucugagcccgugcugaagggcgugaaacugcacuacacaugaggacuaguuauaagacugacuagcccgaugggccucccaacgggcccuccuccccuccuugcaccgagagaucucaaaggcucuuuucagagccaccaaaaaaaaaaaaaaaaaaaaaaaaaaaaaaaaaaaaaaaaaaaaaaaaaaaaaaaaaaaaaaaaaaaaaaaaaaaaaaaaaaaaaaaaaaaaaaaaaaaaa

SEQ ID NO: 24723 - RNA, 4035 nt, Artificial Sequence
  SARS-CoV-2/Wuhan/WIV05/2019__EPI_ISL_402128 spike protein mRNA gc mod (1-1273)(K986P_V987P_K986P_V987P_L18F_T20N_P26S_D138Y_R190S_K417T _E484K_N501Y_D614G_H655Y_T1027I)
aggagaaagcuuaccauguucguguuccuggugcugcugccucugguguccagccagugugugaacuucaccaacagaacacagcugccuagcgccuacaccaacagcuuuaccagaggcguguacuaccccgacaagguguucagauccagcgugcugcacucuacccaggaccuguuccugccuuucuucagcaacgugaccugguuccacgccauccacguguccggcaccaauggcaccaagagauucgacaaccccgugcugcccuucaacgacgggguguacuuugccagcaccgagaaguccaacaucaucagaggcuggaucuucggcaccacacuggacagcaagacccagagccugcugaucgugaacaacgccaccaacguggucaucaaagugugcgaguuccaguucugcaacuaccccuuccugggcgucuacuaccacaagaacaacaagagcuggauggaaagcgaguuccggguguacagcagcgccaacaacugcaccuucgaguacgugucccagccuuuccugauggaccuggaaggcaagcagggcaacuucaagaaccugagcgaguucguguuuaagaacaucgacggcuacuucaagaucuacagcaagcacaccccuaucaaccucgugcgggaucugccucagggcuucucugcucuggaaccccugguggaucugcccaucggcaucaacaucacccgguuucagacacugcuggcccugcacagaagcuaccugacaccuggcgauagcagcagcggauggacagcuggugccgccgcuuacuaugugggcuaccugcagccuagaaccuuccugcugaaguacaacgagaacggcaccaucaccgacgccguggauugugcucuggauccucugagcgagacaaagugcacccugaaguccuucaccguggaaaagggcaucuaccagaccagcaacuuccgggugcagcccaccgaauccaucgugcgguuccccaauaucaccaaucugugccccuucggcgagguguucaaugccaccagauucgccucuguguacgccuggaaccggaagcggaucagcaauugcguggccgacuacuccgugcuguacaacuccgccagcuucagcaccuucaagugcuacggcguguccccuaccaagcugaacgaccugugcuucacaaacguguacgccgacagcuucgugauccggggagaugaagugcggcagauugccccuggacagacaggcaccaucgccgacuacaacuacaagcugcccgacgacuucaccggcugugugauugccuggaacagcaacaaccuggacuccaaagucggcggcaacuacaauuaccuguaccggcuguuccggaaguccaaucugaagcccuucgagcgggacaucuccaccgagaucuaucaggccggcagcaccccuuguaacggcgugaagggcuucaacugcuacuucccacugcaguccuacggcuuucagcccacauacggcgugggcuaucagcccuacagagugguggugcugagcuucgaacugcugcaugccccugccacagugugcggcccuaagaaaagcaccaaucucgugaagaacaaaugcgugaacuucaacuucaacggccugaccggcaccggcgugcugacagagagcaacaagaaguuccugccauuccagcaguuuggccgggauaucgccgauaccacagacgccguuagagauccccagacacuggaaauccuggacaucaccccuugcagcuucggcggagugucugugaucaccccuggcaccaacaccagcaaucagguggcagugcuguaccagggcgugaacuguaccgaagugcccguggccauucacgccgaucagcugacaccuacauggcggguguacuccaccggcagcaauguguuucagaccagagccggcugucugaucggagccgaguacgugaacaauagcuacgagugcgacauccccaucggcgcuggaaucugcgccagcuaccagacacagacaaacagcccucggagagccagaagcguggccagccagagcaucauugccuacacaaugucucugggcgccgagaacagcguggccuacuccaacaacucuaucgcuauccccaccaacuucaccaucagcgugaccacagagauccugccuguguccaugaccaagaccagcguggacugcaccauguacaucugcggcgauuccaccgagugcuccaaccugcugcugcaguacggcagcuucugcacccagcugaauagagcccugacagggaucgccguggaacaggacaagaacacccaagagguguucgcccaagugaagcagaucuacaagaccccuccuaucaaggacuucggcggcuucaauuucagccagauucugcccgauccuagcaagcccagcaagcggagcuucaucgaggaccugcuguucaacaaagugacacuggccgacgccggcuucaucaagcaguauggcgauugucugggcgacauugccgccagggaucugauuugcgcccagaaguuuaacggacugacagugcugccuccucugcugaccgaugagaugaucgcccaguacacaucugcccugcuggccggcacaaucacaagcggcuggacauuuggagcaggcgccgcucugcagauccccuuugcuaugcagauggccuaccgguucaacggcaucggagugacccagaaugugcuguacgagaaccagaagcugaucgccaaccaguucaacagcgccaucggcaagauccaggacagccugagcagcacagcaagcgcccugggaaagcugcaggacguggucaaccagaaugcccaggcacugaacacccuggucaagcagcuguccuccaacuucggcgccaucagcucugugcugaacgauauccugagcagacuggacccuccugaggccgaggugcagaucgacagacugaucacaggcagacugcagagccuccagacauacgugacccagcagcugaucagagccgccgagauuagagccucugccaaucuggccgccaucaagaugucugagugugugcugggccagagcaagagaguggacuuuugcggcaagggcuaccaccugaugagcuucccucagucugccccucacggcgugguguuucugcacgugacauaugugcccgcucaagagaagaauuucaccaccgcuccagccaucugccacgacggcaaagcccacuuuccuagagaaggcguguucguguccaacggcacccauugguucgugacacagcggaacuucuacgagccccagaucaucaccaccgacaacaccuucgugucuggcaacugcgacgucgugaucggcauugugaacaauaccguguacgacccucugcagcccgagcuggacagcuucaaagaggaacuggacaaguacuuuaagaaccacacaagccccgacguggaccugggcgauaucagcggaaucaaugccagcgucgugaacauccagaaagagaucgaccggcugaacgagguggccaagaaucugaacgagagccugaucgaccugcaagaacuggggaaguacgagcaguacaucaaguggcccugguacaucuggcugggcuuuaucgccggacugauugccaucgugauggucacaaucaugcuguguugcaugaccagcugcuguagcugccugaagggcuguuguagcuguggcagcugcugcaaguucgacgaggacgauucugagcccgugcugaagggcgugaaacugcacuacacaugaggacuaguuauaagacugacuagcccgaugggccucccaacgggcccuccuccccuccuugcaccgagagaucucaaaggcucuuuucagagccaccaaaaaaaaaaaaaaaaaaaaaaaaaaaaaaaaaaaaaaaaaaaaaaaaaaaaaaaaaaaaaaaaaaaaaaaaaaaaaaaaaaaaaaaaaaaaaaaaaaaaa

SEQ ID NO: 24724 - RNA, 4035 nt, Artificial Sequence
  SARS-CoV-2/Wuhan/WIV05/2019__EPI_ISL_402128 spike protein mRNA gc mod (1-1273)(K986P_V987P_K986P_V987P_S13I_W152C_L452R_D614G)
aggagaaagcuuaccauguucguguuccuggugcugcugccucugguguccauccagugugugaaccugaccaccagaacacagcugccuccagccuacaccaacagcuuuaccagaggcguguacuaccccgacaagguguucagauccagcgugcugcacucuacccaggaccuguuccugccuuucuucagcaacgugaccugguuccacgccauccacguguccggcaccaauggcaccaagagauucgacaaccccgugcugcccuucaacgacgggguguacuuugccagcaccgagaaguccaacaucaucagaggcuggaucuucggcaccacacuggacagcaagacccagagccugcugaucgugaacaacgccaccaacguggucaucaaagugugcgaguuccaguucugcaacgaccccuuccugggcgucuacuaccacaagaacaacaagagcugcauggaaagcgaguuccggguguacagcagcgccaacaacugcaccuucgaguacgugucccagccuuuccugauggaccuggaaggcaagcagggcaacuucaagaaccugcgcgaguucguguuuaagaacaucgacggcuacuucaagaucuacagcaagcacaccccuaucaaccucgugcgggaucugccucagggcuucucugcucuggaaccccugguggaucugcccaucggcaucaacaucacccgguuucagacacugcuggcccugcacagaagcuaccugacaccuggcgauagcagcagcggauggacagcuggugccgccgcuuacuaugugggcuaccugcagccuagaaccuuccugcugaaguacaacgagaacggcaccaucaccgacgccguggauugugcucuggauccucugagcgagacaaagugcacccugaaguccuucaccguggaaaagggcaucuaccagaccagcaacuuccgggugcagcccaccgaauccaucgugcgguuccccaauaucaccaaucugugccccuucggcgagguguucaaugccaccagauucgccucuguguacgccuggaaccggaagcggaucagcaauugcguggccgacuacuccgugcuguacaacuccgccagcuucagcaccuucaagugcuacggcguguccccuaccaagcugaacgaccugugcuucacaaacguguacgccgacagcuucgugauccggggagaugaagugcggcagauugccccuggacagacaggcaagaucgccgacuacaacuacaagcugcccgacgacuucaccggcugugugauugccuggaacagcaacaaccuggacuccaaagucggcggcaacuacaauuaccgcuaccggcuguuccggaaguccaaucugaagcccuucgagcgggacaucuccaccgagaucuaucaggccggcagcaccccuuguaacggcguggaaggcuucaacugcuacuucccacugcaguccuacggcuuucagcccacaaauggcgugggcuaucagcccuacagagugguggugcugagcuucgaacugcugcaugccccugccacagugugcggcccuaagaaaagcaccaaucucgugaagaacaaaugcgugaacuucaacuucaacggccugaccggcaccggcgugcugacagagagcaacaagaaguuccugccauuccagcaguuuggccgggauaucgccgauaccacagacgccguuagagauccccagacacuggaaauccuggacaucaccccuugcagcuucggcggagugucugugaucaccccuggcaccaacaccagcaaucagguggcagugcuguaccagggcgugaacuguaccgaagugcccguggccauucacgccgaucagcugacaccuacauggcggguguacuccaccggcagcaauguguuucagaccagagccggcugucugaucggagccgagcacgugaacaauagcuacgagugcgacauccccaucggcgcuggaaucugcgccagcuaccagacacagacaaacagcccucggagagccagaagcguggccagccagagcaucauugccuacacaaugucucugggcgccgagaacagcguggccuacuccaacaacucuaucgcuauccccaccaacuucaccaucagcgugaccacagagauccugccuguguccaugaccaagaccagcguggacugcaccauguacaucugcggcgauuccaccgagugcuccaaccugcugcugcaguacggcagcuucugcacccagcugaauagagcccugacagggaucgccguggaacaggacaagaacacccaagagguguucgcccaagugaagcagaucuacaagaccccuccuaucaaggacuucggcggcuucaauuucagccagauucugcccgauccuagcaagcccagcaagcggagcuucaucgaggaccugcuguucaacaaagugacacuggccgacgccggcuucaucaagcaguauggcgauugucugggcgacauugccgccagggaucugauuugcgcccagaaguuuaacggacugacagugcugccuccucugcugaccgaugagaugaucgcccaguacacaucugcccugcuggccggcacaaucacaagcggcuggacauuuggagcaggcgccgcucugcagauccccuuugcuaugcagauggccuaccgguucaacggcaucggagugacccagaaugugcuguacgagaaccagaagcugaucgccaaccaguucaacagcgccaucggcaagauccaggacagccugagcagcacagcaagcgcccugggaaagcugcaggacguggucaaccagaaugcccaggcacugaacacccuggucaagcagcuguccuccaacuucggcgccaucagcucugugcugaacgauauccugagcagacuggacccuccugaggccgaggugcagaucgacagacugaucacaggcagacugcagagccuccagacauacgugacccagcagcugaucagagccgccgagauuagagccucugccaaucuggccgccaccaagaugucugagugugugcugggccagagcaagagaguggacuuuugcggcaagggcuaccaccugaugagcuucccucagucugccccucacggcgugguguuucugcacgugacauaugugcccgcucaagagaagaauuucaccaccgcuccagccaucugccacgacggcaaagcccacuuuccuagagaaggcguguucguguccaacggcacccauugguucgugacacagcggaacuucuacgagccccagaucaucaccaccgacaacaccuucgugucuggcaacugcgacgucgugaucggcauugugaacaauaccguguacgacccucugcagcccgagcuggacagcuucaaagaggaacuggacaaguacuuuaagaaccacacaagccccgacguggaccugggcgauaucagcggaaucaaugccagcgucgugaacauccagaaagagaucgaccggcugaacgagguggccaagaaucugaacgagagccugaucgaccugcaagaacuggggaaguacgagcaguacaucaaguggcccugguacaucuggcugggcuuuaucgccggacugauugccaucgugauggucacaaucaugcuguguugcaugaccagcugcuguagcugccugaagggcuguuguagcuguggcagcugcugcaaguucgacgaggacgauucugagcccgugcugaagggcgugaaacugcacuacacaugaggacuaguuauaagacugacuagcccgaugggccucccaacgggcccuccuccccuccuugcaccgagagaucucaaaggcucuuuucagagccaccaaaaaaaaaaaaaaaaaaaaaaaaaaaaaaaaaaaaaaaaaaaaaaaaaaaaaaaaaaaaaaaaaaaaaaaaaaaaaaaaaaaaaaaaaaaaaaaaaaaaa

SEQ ID NO: 24725 - RNA, 1400 nt, Artificial Sequence
  SARS-CoV-2/Wuhan/WIV05/2019__EPI_ISL_402128 spike protein mRNA gc (1-15,334-528) Ferritin construct
aggagagucccgcagucggcguccagcggcucugcuuguucgugugugugucguugcaggccuuauucaagcuuaccauguucguguuccugguccuccugccccuggugagcucccagugcaaccugugccccuucggcgagguguucaacgccacccgguucgccagcgucuacgccuggaaccgcaagcggaucuccaacugcguggcggacuacagcgugcuguacaacuccgccagcuucuccacguucaagugcuacggcgucagccccaccaagcucaacgaccugugcuucaccaacguguacgccgacuccuucgugauccgcggggacgagguccggcagaucgcccccggccagaccgggaagaucgccgacuacaacuacaagcugccggacgacuucacgggcugcgugaucgcguggaacagcaacaaccucgacuccaaggucgggggcaacuacaacuaccuguaccgccuguuccgcaagagcaaccucaagcccuucgagcgggacaucuccaccgagaucuaccaggccggcagcacccccugcaacgggguggagggcuucaacugcuacuucccccugcaguccuacggguuccagccgaccaacggcgugggguaccagcccuaccggguggucgugcugagcuucgagcuccugcacgcccccgccacggugugcggccccaagggcggggguggaagcggcggggguggaagugacaucaucaagcuccugaacgagcaggucaacaaggagaugcaguccagcaaccuguacauguccaugagcuccuggugcuacacccacagccucgacggcgccgggcuguuccuguucgaccacgccgcggaggaguacgagcacgccaagaagcucaucaucuuccugaacgagaacaacgugcccgugcagcugaccuccaucagcgccccggagcacaaguucgagggccucacgcagaucuuccagaaggccuacgagcacgagcagcacaucuccgagagcaucaacaacaucguggaccacgccaucaaguccaaggaccacgcgaccuucaacuuccugcagugguacgucgccgagcagcacgaggaggaggugcuguucaaggacauccucgacaagaucgagcugaucgggaacgagaaccacggccuguaccucgccgaccaguacgugaaggggaucgccaagagccgcaaguccugaggacuagucccuguucccagagcccacuuuuuuuucuuuuuuugaaauaaaauagccugucuuucagaucuaaaaaaaaaaaaaaaaaaaaaaaaaaaaaaaaaaaaaaaaaaaaaaaaaaaaaaaaaaaaaaaaaaaaaaaaaaaaaaaaaaaaaaaaaaaaaaaaaaaa

SEQ ID NO: 24726 - RNA, 998 nt, Artificial Sequence
  SARS-CoV-2/Wuhan/WIV05/2019__EPI_ISL_402128 spike protein mRNA gc (334-528) Foldon construct
aggagagucccgcagucggcguccagcggcucugcuuguucgugugugugucguugcaggccuuauucaagcuuaccaugcccaugggcagccugcagccgcucgccacccuguaccugcucgggaugcugguggccuccguccuggcgaaccugugccccuucggcgagguguucaacgccacccgguucgccagcgucuacgccuggaaccgcaagcggaucuccaacugcguggcggacuacagcgugcuguacaacuccgccagcuucuccacguucaagugcuacggcgucagccccaccaagcucaacgaccugugcuucaccaacguguacgccgacuccuucgugauccgcggggacgagguccggcagaucgcccccggccagaccgggaagaucgccgacuacaacuacaagcugccggacgacuucacgggcugcgugaucgcguggaacagcaacaaccucgacuccaaggucgggggcaacuacaacuaccuguaccgccuguuccgcaagagcaaccucaagcccuucgagcgggacaucuccaccgagaucuaccaggccggcagcacccccugcaacgggguggagggcuucaacugcuacuucccccugcaguccuacggguuccagccgaccaacggcgugggguaccagcccuaccggguggucgugcugagcuucgagcuccugcacgcccccgccacggugugcggccccaagggcagcggcggguacauccccgaggccccgcgcgacggccaggccuacgugcggaaggacggcgaguggguccugcugagcaccuuccucugaggacuagucccuguucccagagcccacuuuuuuuucuuuuuuugaaauaaaauagccugucuuucagaucuaaaaaaaaaaaaaaaaaaaaaaaaaaaaaaaaaaaaaaaaaaaaaaaaaaaaaaaaaaaaaaaaaaaaaaaaaaaaaaaaaaaaaaaaaaaaaaaaaaaa

SEQ ID NO: 24727 - RNA, 1376 nt, Artificial Sequence
  SARS-CoV-2/Wuhan/WIV05/2019__EPI_ISL_402128 spike protein mRNA gc (1-15,334-528) LumSynth construct
aggagagucccgcagucggcguccagcggcucugcuuguucgugugugugucguugcaggccuuauucaagcuuaccauguucguguuccugguccuccugccccuggugagcucccagugcaaccugugccccuucggcgagguguucaacgccacccgguucgccagcgucuacgccuggaaccgcaagcggaucuccaacugcguggcggacuacagcgugcuguacaacuccgccagcuucuccacguucaagugcuacggcgucagccccaccaagcucaacgaccugugcuucaccaacguguacgccgacuccuucgugauccgcggggacgagguccggcagaucgcccccggccagaccgggaagaucgccgacuacaacuacaagcugccggacgacuucacgggcugcgugaucgcguggaacagcaacaaccucgacuccaaggucgggggcaacuacaacuaccuguaccgccuguuccgcaagagcaaccucaagcccuucgagcgggacaucuccaccgagaucuaccaggccggcagcacccccugcaacgggguggagggcuucaacugcuacuucccccugcaguccuacggguuccagccgaccaacggcgugggguaccagcccuaccggguggucgugcugagcuucgagcuccugcacgcccccgccacggugugcggccccaagggcggcggcggcuccggaggcggagguagcgggggacagaucuacgagggcaagcugaccgccgaggggcuccgcuucggcaucguggccagccgguucaaccacgcgcuggucgaccgccugguggagggggccaucgacgccaucgugcggcacggcgggcgcgaggaggacaucacccucguccgggugcccggcuccugggagaucccgguggccgccggcgagcuggcccgcaaggaggacaucgacgcggucaucgccaucggggugcugauccggggcgccacgccccacuucgacuacaucgccagcgagguguccaaggggcucgcggaccugagccuggagcuccgcaagcccaucaccuucggcgucaucaccgccgacacccuggagcaggccaucgagcgggccgggacgaagcacggcaacaagggcugggaggccgcgcuguccgccaucgagauggccaaccucuucaagagccugcgcugaggacuagucccuguucccagagcccacuuuuuuuucuuuuuuugaaauaaaauagccugucuuucagaucuaaaaaaaaaaaaaaaaaaaaaaaaaaaaaaaaaaaaaaaaaaaaaaaaaaaaaaaaaaaaaaaaaaaaaaaaaaaaaaaaaaaaaaaaaaaaaaaaaaaa

SEQ ID NO: 24728 - RNA, 1337 nt, Artificial Sequence
  SARS-CoV-2/Wuhan/WIV05/2019__EPI_ISL_402128 spike protein mRNA gc (334-528) LumSynth construct
aggagagucccgcagucggcguccagcggcucugcuuguucgugugugugucguugcaggccuuauucaagcuuaccaugcagaucuacgagggcaagcugaccgccgaggggcuccgcuucggcaucguggccagccgguucaaccacgcgcuggucgaccgccugguggagggggccaucgacgccaucgugcggcacggcgggcgcgaggaggacaucacccucguccgggugcccggcuccugggagaucccgguggccgccggcgagcuggcccgcaaggaggacaucgacgcggucaucgccaucggggugcugauccggggcgccacgccccacuucgacuacaucgccagcgagguguccaaggggcucgcggaccugagccuggagcuccgcaagcccaucaccuucggcgucaucaccgccgacacccuggagcaggccaucgagcgggccgggacgaagcacggcaacaagggcugggaggccgcgcuguccgccaucgagauggccaaccucuucaagagccugcgcggcgggggcgggagcggcgggggcggcuccgggggcgggaaccugugccccuucggcgagguguucaacgccacccgguucgccagcgucuacgccuggaaccgcaagcggaucuccaacugcguggcggacuacagcgugcuguacaacuccgccagcuucuccacguucaagugcuacggcgucagccccaccaagcucaacgaccugugcuucaccaacguguacgccgacuccuucgugauccgcggggacgagguccggcagaucgcccccggccagaccgggaagaucgccgacuacaacuacaagcugccggacgacuucacgggcugcgugaucgcguggaacagcaacaaccucgacuccaaggucgggggcaacuacaacuaccuguaccgccuguuccgcaagagcaaccucaagcccuucgagcgggacaucuccaccgagaucuaccaggccggcagcacccccugcaacgggguggagggcuucaacugcuacuucccccugcaguccuacggguuccagccgaccaacggcgugggguaccagcccuaccggguggucgugcugagcuucgagcuccugcacgcccccgccacggugugcggccccaagugaggacuagucccuguucccagagcccacuuuuuuuucuuuuuuugaaauaaaauagccugucuuucagaucuaaaaaaaaaaaaaaaaaaaaaaaaaaaaaaaaaaaaaaaaaaaaaaaaaaaaaaaaaaaaaaaaaaaaaaaaaaaaaaaaaaaaaaaaaaaaaaaaaaaa

SEQ ID NO: 24729 - RNA, 4070 nt, Artificial Sequence
  SARS-CoV-2/Wuhan/WIV05/2019__EPI_ISL_402128 spike protein mRNA gc (1-1273)
aggagagucccgcagucggcguccagcggcucugcuuguucgugugugugucguugcaggccuuauucaagcuuaccauguucguguuccugguccuccugccccuggugagcucccagugcgugaaccucaccacccgcacgcagcugccgcccgccuacaccaacagcuucacccggggcgucuacuaccccgacaagguguuccgcuccagcgugcugcacuccacccaggaccucuuccugcccuucuucagcaacgucacgugguuccacgccauccacguguccgggaccaacggcaccaagcgguucgacaacccggugcugcccuucaacgacggggucuacuucgcgagcaccgagaaguccaacaucauccgcggcuggaucuucgggacgacccucgacagcaagacccagucccugcugaucgugaacaacgccaccaacguggucaucaaggugugcgaguuccaguucugcaacgaccccuuccucggcguguacuaccacaagaacaacaagagcuggauggaguccgaguuccgggucuacagcuccgccaacaacugcacguucgaguacgugagccagcccuuccugauggaccuggagggcaagcaggggaacuucaagaaccuccgcgaguucguguucaagaacaucgacggcuacuucaagaucuacuccaagcacaccccgaucaaccugguccgggaccugccccagggguucagcgcccucgagccccugguggaccugcccaucggcaucaacaucacccgcuuccagacccuccuggcccugcaccgguccuaccucacgccgggggacagcagcuccggcuggaccgcgggcgccgccgccuacuacgugggguaccugcagccccgcaccuuccugcucaaguacaacgagaacggcaccaucacggacgcggucgacugcgcccuggacccccugagcgagaccaagugcacccucaaguccuucaccguggagaaggggaucuaccagacgagcaacuuccgggugcagcccaccgaguccaucguccgcuucccgaacaucaccaaccugugccccuucggcgagguguucaacgccacccgguucgccagcgucuacgccuggaaccgcaagcggaucuccaacugcguggcggacuacagcgugcuguacaacuccgccagcuucuccacguucaagugcuacggcgucagccccaccaagcucaacgaccugugcuucaccaacguguacgccgacuccuucgugauccgcggggacgagguccggcagaucgcccccggccagaccgggaagaucgccgacuacaacuacaagcugccggacgacuucacgggcugcgugaucgcguggaacagcaacaaccucgacuccaaggucgggggcaacuacaacuaccuguaccgccuguuccgcaagagcaaccucaagcccuucgagcgggacaucuccaccgagaucuaccaggccggcagcacccccugcaacgggguggagggcuucaacugcuacuucccccugcaguccuacggguuccagccgaccaacggcgugggguaccagcccuaccggguggucgugcugagcuucgagcuccugcacgcccccgccacggugugcggccccaagaaguccaccaaccuggucaagaacaagugcgugaacuucaacuucaacggccucaccgggaccggcgugcugaccgagagcaacaagaaguuccugccguuccagcaguucgggcgcgacaucgccgacacgaccgacgcgguccgcgacccccagacccuggagauccucgacaucacccccugcagcuucggcgggguguccgugaucacgccgggcaccaacaccagcaaccaggucgccgugcuguaccaggacgugaacugcaccgagguccccguggccauccacgccgaccagcugacgcccaccuggcggguguacuccaccggcagcaacgucuuccagacccgcgccgggugccucaucggcgcggagcacgugaacaacuccuacgagugcgacauccccaucggggccggcaucugcgccagcuaccagacgcagaccaacuccccgcggcgcgcccggagcguggcgucccagagcaucaucgccuacaccaugucccugggcgccgagaacagcgucgccuacuccaacaacagcaucgccauccccaccaacuucacgaucuccgugaccaccgagauccugcccgugagcaugaccaagacgagcgucgacugcaccauguacaucugcggggacuccaccgagugcagcaaccuccugcugcaguacggcuccuucugcacccagcucaaccgcgcgcugacggggaucgccguggagcaggacaagaacacccaggagguguucgcccaggucaagcagaucuacaagacgcccccgaucaaggacuucggcggguucaacuucagccagauccugcccgaccccuccaagcccagcaagcgguccuucaucgaggaccuccuguucaacaaggugacccuggccgacgccggcuucaucaagcaguacggcgacugccucggggacaucgcggcccgcgaccugaucugcgcccagaaguucaacggccugaccgugcucccgccccugcugaccgacgagaugaucgcccaguacaccagcgcccuccuggcggggaccaucacguccggcuggaccuucggggccggcgccgcccugcagauccccuucgcgaugcagauggccuaccgguucaacggcaucggggucacccagaacgugcucuacgagaaccagaagcugaucgccaaccaguucaacagcgccaucggcaagauccaggacucccugagcuccaccgccagcgcgcucgggaagcugcaggacguggucaaccagaacgcccaggcccugaacacgcucgugaagcagcuguccagcaacuucggcgccaucuccagcgugcugaacgacauccucucccgccuggacaaggucgaggccgaggugcagaucgaccggcugaucaccgggcgccuccagagccugcagaccuacgugacccagcagcugauccgggcggccgagauccgcgccagcgccaaccucgccgcgaccaagauguccgagugcguccugggccagagcaagcggguggacuucugcggcaagggguaccaccugauguccuucccccagagcgccccgcacggcguggucuuccuccacgugacguacguccccgcccaggagaagaacuucaccaccgcccccgcgaucugccacgacgggaaggcccacuucccccgcgagggcguguucguguccaacgggacccacugguucgucacgcagcggaacuucuacgagccgcagaucaucaccaccgacaacaccuucgugagcggcaacugcgacguggucaucggcaucgugaacaacacgguguacgacccccugcagcccgagcuggacuccuucaaggaggagcucgacaaguacuucaagaaccacaccagccccgacgucgaccugggggacaucuccggcaucaacgccagcguggugaacauccagaaggagaucgaccgccugaacgaggucgccaagaaccucaacgagucccugaucgaccugcaggagcucgggaaguacgagcaguacaucaaguggccgugguacaucuggcugggcuucaucgccggccugaucgcgaucgugauggugaccaucaugcucugcugcaugaccagcugcugcuccugccugaaggggugcugcagcugcggcuccugcugcaaguucgacgaggacgacagcgagcccguccugaagggggugaagcuccacuacacgugaggacuagucccuguucccagagcccacuuuuuuuucuuuuuuugaaauaaaauagccugucuuucagaucuaaaaaaaaaaaaaaaaaaaaaaaaaaaaaaaaaaaaaaaaaaaaaaaaaaaaaaaaaaaaaaaaaaaaaaaaaaaaaaaaaaaaaaaaaaaaaaaaaaaa

SEQ ID NO: 24730 - RNA, 4070 nt, Artificial Sequence
  SARS-CoV-2/Wuhan/WIV05/2019__EPI_ISL_402128 spike protein mRNA gc (1-1273)(D614G)
aggagagucccgcagucggcguccagcggcucugcuuguucgugugugugucguugcaggccuuauucaagcuuaccauguucguguuccugguccuccugccccuggugagcucccagugcgugaaccucaccacccgcacgcagcugccgcccgccuacaccaacagcuucacccggggcgucuacuaccccgacaagguguuccgcuccagcgugcugcacuccacccaggaccucuuccugcccuucuucagcaacgucacgugguuccacgccauccacguguccgggaccaacggcaccaagcgguucgacaacccggugcugcccuucaacgacggggucuacuucgcgagcaccgagaaguccaacaucauccgcggcuggaucuucgggacgacccucgacagcaagacccagucccugcugaucgugaacaacgccaccaacguggucaucaaggugugcgaguuccaguucugcaacgaccccuuccucggcguguacuaccacaagaacaacaagagcuggauggaguccgaguuccgggucuacagcuccgccaacaacugcacguucgaguacgugagccagcccuuccugauggaccuggagggcaagcaggggaacuucaagaaccuccgcgaguucguguucaagaacaucgacggcuacuucaagaucuacuccaagcacaccccgaucaaccugguccgggaccugccccagggguucagcgcccucgagccccugguggaccugcccaucggcaucaacaucacccgcuuccagacccuccuggcccugcaccgguccuaccucacgccgggggacagcagcuccggcuggaccgcgggcgccgccgccuacuacgugggguaccugcagccccgcaccuuccugcucaaguacaacgagaacggcaccaucacggacgcggucgacugcgcccuggacccccugagcgagaccaagugcacccucaaguccuucaccguggagaaggggaucuaccagacgagcaacuuccgggugcagcccaccgaguccaucguccgcuucccgaacaucaccaaccugugccccuucggcgagguguucaacgccacccgguucgccagcgucuacgccuggaaccgcaagcggaucuccaacugcguggcggacuacagcgugcuguacaacuccgccagcuucuccacguucaagugcuacggcgucagccccaccaagcucaacgaccugugcuucaccaacguguacgccgacuccuucgugauccgcggggacgagguccggcagaucgcccccggccagaccgggaagaucgccgacuacaacuacaagcugccggacgacuucacgggcugcgugaucgcguggaacagcaacaaccucgacuccaaggucgggggcaacuacaacuaccuguaccgccuguuccgcaagagcaaccucaagcccuucgagcgggacaucuccaccgagaucuaccaggccggcagcacccccugcaacgggguggagggcuucaacugcuacuucccccugcaguccuacggguuccagccgaccaacggcgugggguaccagcccuaccggguggucgugcugagcuucgagcuccugcacgcccccgccacggugugcggccccaagaaguccaccaaccuggucaagaacaagugcgugaacuucaacuucaacggccucaccgggaccggcgugcugaccgagagcaacaagaaguuccugccguuccagcaguucgggcgcgacaucgccgacacgaccgacgcgguccgcgacccccagacccuggagauccucgacaucacccccugcagcuucggcgggguguccgugaucacgccgggcaccaacaccagcaaccaggucgccgugcuguaccagggcgugaacugcaccgagguccccguggccauccacgccgaccagcugacgcccaccuggcggguguacuccaccggcagcaacgucuuccagacccgcgccgggugccucaucggcgcggagcacgugaacaacuccuacgagugcgacauccccaucggggccggcaucugcgccagcuaccagacgcagaccaacuccccgcggcgcgcccggagcguggcgucccagagcaucaucgccuacaccaugucccugggcgccgagaacagcgucgccuacuccaacaacagcaucgccauccccaccaacuucacgaucuccgugaccaccgagauccugcccgugagcaugaccaagacgagcgucgacugcaccauguacaucugcggggacuccaccgagugcagcaaccuccugcugcaguacggcuccuucugcacccagcucaaccgcgcgcugacggggaucgccguggagcaggacaagaacacccaggagguguucgcccaggucaagcagaucuacaagacgcccccgaucaaggacuucggcggguucaacuucagccagauccugcccgaccccuccaagcccagcaagcgguccuucaucgaggaccuccuguucaacaaggugacccuggccgacgccggcuucaucaagcaguacggcgacugccucggggacaucgcggcccgcgaccugaucugcgcccagaaguucaacggccugaccgugcucccgccccugcugaccgacgagaugaucgcccaguacaccagcgcccuccuggcggggaccaucacguccggcuggaccuucggggccggcgccgcccugcagauccccuucgcgaugcagauggccuaccgguucaacggcaucggggucacccagaacgugcucuacgagaaccagaagcugaucgccaaccaguucaacagcgccaucggcaagauccaggacucccugagcuccaccgccagcgcgcucgggaagcugcaggacguggucaaccagaacgcccaggcccugaacacgcucgugaagcagcuguccagcaacuucggcgccaucuccagcgugcugaacgacauccucucccgccuggacaaggucgaggccgaggugcagaucgaccggcugaucaccgggcgccuccagagccugcagaccuacgugacccagcagcugauccgggcggccgagauccgcgccagcgccaaccucgccgcgaccaagauguccgagugcguccugggccagagcaagcggguggacuucugcggcaagggguaccaccugauguccuucccccagagcgccccgcacggcguggucuuccuccacgugacguacguccccgcccaggagaagaacuucaccaccgcccccgcgaucugccacgacgggaaggcccacuucccccgcgagggcguguucguguccaacgggacccacugguucgucacgcagcggaacuucuacgagccgcagaucaucaccaccgacaacaccuucgugagcggcaacugcgacguggucaucggcaucgugaacaacacgguguacgacccccugcagcccgagcuggacuccuucaaggaggagcucgacaaguacuucaagaaccacaccagccccgacgucgaccugggggacaucuccggcaucaacgccagcguggugaacauccagaaggagaucgaccgccugaacgaggucgccaagaaccucaacgagucccugaucgaccugcaggagcucgggaaguacgagcaguacaucaaguggccgugguacaucuggcugggcuucaucgccggccugaucgcgaucgugauggugaccaucaugcucugcugcaugaccagcugcugcuccugccugaaggggugcugcagcugcggcuccugcugcaaguucgacgaggacgacagcgagcccguccugaagggggugaagcuccacuacacgugaggacuagucccuguucccagagcccacuuuuuuuucuuuuuuugaaauaaaauagccugucuuucagaucuaaaaaaaaaaaaaaaaaaaaaaaaaaaaaaaaaaaaaaaaaaaaaaaaaaaaaaaaaaaaaaaaaaaaaaaaaaaaaaaaaaaaaaaaaaaaaaaaaaaa

SEQ ID NO: 24731 - RNA, 4070 nt, Artificial Sequence
  SARS-CoV-2/Wuhan/WIV05/2019__EPI_ISL_402128 spike protein mRNA gc (1-1273)(A222V_D614G)
aggagagucccgcagucggcguccagcggcucugcuuguucgugugugugucguugcaggccuuauucaagcuuaccauguucguguuccugguccuccugccccuggugagcucccagugcgugaaccucaccacccgcacgcagcugccgcccgccuacaccaacagcuucacccggggcgucuacuaccccgacaagguguuccgcuccagcgugcugcacuccacccaggaccucuuccugcccuucuucagcaacgucacgugguuccacgccauccacguguccgggaccaacggcaccaagcgguucgacaacccggugcugcccuucaacgacggggucuacuucgcgagcaccgagaaguccaacaucauccgcggcuggaucuucgggacgacccucgacagcaagacccagucccugcugaucgugaacaacgccaccaacguggucaucaaggugugcgaguuccaguucugcaacgaccccuuccucggcguguacuaccacaagaacaacaagagcuggauggaguccgaguuccgggucuacagcuccgccaacaacugcacguucgaguacgugagccagcccuuccugauggaccuggagggcaagcaggggaacuucaagaaccuccgcgaguucguguucaagaacaucgacggcuacuucaagaucuacuccaagcacaccccgaucaaccugguccgggaccugccccagggguucagcguccucgagccccugguggaccugcccaucggcaucaacaucacccgcuuccagacccuccuggcccugcaccgguccuaccucacgccgggggacagcagcuccggcuggaccgcgggcgccgccgccuacuacgugggguaccugcagccccgcaccuuccugcucaaguacaacgagaacggcaccaucacggacgcggucgacugcgcccuggacccccugagcgagaccaagugcacccucaaguccuucaccguggagaaggggaucuaccagacgagcaacuuccgggugcagcccaccgaguccaucguccgcuucccgaacaucaccaaccugugccccuucggcgagguguucaacgccacccgguucgccagcgucuacgccuggaaccgcaagcggaucuccaacugcguggcggacuacagcgugcuguacaacuccgccagcuucuccacguucaagugcuacggcgucagccccaccaagcucaacgaccugugcuucaccaacguguacgccgacuccuucgugauccgcggggacgagguccggcagaucgcccccggccagaccgggaagaucgccgacuacaacuacaagcugccggacgacuucacgggcugcgugaucgcguggaacagcaacaaccucgacuccaaggucgggggcaacuacaacuaccuguaccgccuguuccgcaagagcaaccucaagcccuucgagcgggacaucuccaccgagaucuaccaggccggcagcacccccugcaacgggguggagggcuucaacugcuacuucccccugcaguccuacggguuccagccgaccaacggcgugggguaccagcccuaccggguggucgugcugagcuucgagcuccugcacgcccccgccacggugugcggccccaagaaguccaccaaccuggucaagaacaagugcgugaacuucaacuucaacggccucaccgggaccggcgugcugaccgagagcaacaagaaguuccugccguuccagcaguucgggcgcgacaucgccgacacgaccgacgcgguccgcgacccccagacccuggagauccucgacaucacccccugcagcuucggcgggguguccgugaucacgccgggcaccaacaccagcaaccaggucgccgugcuguaccagggcgugaacugcaccgagguccccguggccauccacgccgaccagcugacgcccaccuggcggguguacuccaccggcagcaacgucuuccagacccgcgccgggugccucaucggcgcggagcacgugaacaacuccuacgagugcgacauccccaucggggccggcaucugcgccagcuaccagacgcagaccaacuccccgcggcgcgcccggagcguggcgucccagagcaucaucgccuacaccaugucccugggcgccgagaacagcgucgccuacuccaacaacagcaucgccauccccaccaacuucacgaucuccgugaccaccgagauccugcccgugagcaugaccaagacgagcgucgacugcaccauguacaucugcggggacuccaccgagugcagcaaccuccugcugcaguacggcuccuucugcacccagcucaaccgcgcgcugacggggaucgccguggagcaggacaagaacacccaggagguguucgcccaggucaagcagaucuacaagacgcccccgaucaaggacuucggcggguucaacuucagccagauccugcccgaccccuccaagcccagcaagcgguccuucaucgaggaccuccuguucaacaaggugacccuggccgacgccggcuucaucaagcaguacggcgacugccucggggacaucgcggcccgcgaccugaucugcgcccagaaguucaacggccugaccgugcucccgccccugcugaccgacgagaugaucgcccaguacaccagcgcccuccuggcggggaccaucacguccggcuggaccuucggggccggcgccgcccugcagauccccuucgcgaugcagauggccuaccgguucaacggcaucggggucacccagaacgugcucuacgagaaccagaagcugaucgccaaccaguucaacagcgccaucggcaagauccaggacucccugagcuccaccgccagcgcgcucgggaagcugcaggacguggucaaccagaacgcccaggcccugaacacgcucgugaagcagcuguccagcaacuucggcgccaucuccagcgugcugaacgacauccucucccgccuggacaaggucgaggccgaggugcagaucgaccggcugaucaccgggcgccuccagagccugcagaccuacgugacccagcagcugauccgggcggccgagauccgcgccagcgccaaccucgccgcgaccaagauguccgagugcguccugggccagagcaagcggguggacuucugcggcaagggguaccaccugauguccuucccccagagcgccccgcacggcguggucuuccuccacgugacguacguccccgcccaggagaagaacuucaccaccgcccccgcgaucugccacgacgggaaggcccacuucccccgcgagggcguguucguguccaacgggacccacugguucgucacgcagcggaacuucuacgagccgcagaucaucaccaccgacaacaccuucgugagcggcaacugcgacguggucaucggcaucgugaacaacacgguguacgacccccugcagcccgagcuggacuccuucaaggaggagcucgacaaguacuucaagaaccacaccagccccgacgucgaccugggggacaucuccggcaucaacgccagcguggugaacauccagaaggagaucgaccgccugaacgaggucgccaagaaccucaacgagucccugaucgaccugcaggagcucgggaaguacgagcaguacaucaaguggccgugguacaucuggcugggcuucaucgccggccugaucgcgaucgugauggugaccaucaugcucugcugcaugaccagcugcugcuccugccugaaggggugcugcagcugcggcuccugcugcaaguucgacgaggacgacagcgagcccguccugaagggggugaagcuccacuacacgugaggacuagucccuguucccagagcccacuuuuuuuucuuuuuuugaaauaaaauagccugucuuucagaucuaaaaaaaaaaaaaaaaaaaaaaaaaaaaaaaaaaaaaaaaaaaaaaaaaaaaaaaaaaaaaaaaaaaaaaaaaaaaaaaaaaaaaaaaaaaaaaaaaaaa

SEQ ID NO: 24732 - RNA, 4070 nt, Artificial Sequence
  SARS-CoV-2/Wuhan/WIV05/2019__EPI_ISL_402128 spike protein mRNA gc (1-1273)(N439K_D614G)
aggagagucccgcagucggcguccagcggcucugcuuguucgugugugugucguugcaggccuuauucaagcuuaccauguucguguuccugguccuccugccccuggugagcucccagugcgugaaccucaccacccgcacgcagcugccgcccgccuacaccaacagcuucacccggggcgucuacuaccccgacaagguguuccgcuccagcgugcugcacuccacccaggaccucuuccugcccuucuucagcaacgucacgugguuccacgccauccacguguccgggaccaacggcaccaagcgguucgacaacccggugcugcccuucaacgacggggucuacuucgcgagcaccgagaaguccaacaucauccgcggcuggaucuucgggacgacccucgacagcaagacccagucccugcugaucgugaacaacgccaccaacguggucaucaaggugugcgaguuccaguucugcaacgaccccuuccucggcguguacuaccacaagaacaacaagagcuggauggaguccgaguuccgggucuacagcuccgccaacaacugcacguucgaguacgugagccagcccuuccugauggaccuggagggcaagcaggggaacuucaagaaccuccgcgaguucguguucaagaacaucgacggcuacuucaagaucuacuccaagcacaccccgaucaaccugguccgggaccugccccagggguucagcgcccucgagccccugguggaccugcccaucggcaucaacaucacccgcuuccagacccuccuggcccugcaccgguccuaccucacgccgggggacagcagcuccggcuggaccgcgggcgccgccgccuacuacgugggguaccugcagccccgcaccuuccugcucaaguacaacgagaacggcaccaucacggacgcggucgacugcgcccuggacccccugagcgagaccaagugcacccucaaguccuucaccguggagaaggggaucuaccagacgagcaacuuccgggugcagcccaccgaguccaucguccgcuucccgaacaucaccaaccugugccccuucggcgagguguucaacgccacccgguucgccagcgucuacgccuggaaccgcaagcggaucuccaacugcguggcggacuacagcgugcuguacaacuccgccagcuucuccacguucaagugcuacggcgucagccccaccaagcucaacgaccugugcuucaccaacguguacgccgacuccuucgugauccgcggggacgagguccggcagaucgcccccggccagaccgggaagaucgccgacuacaacuacaagcugccggacgacuucacgggcugcgugaucgcguggaacagcaagaaccucgacuccaaggucgggggcaacuacaacuaccuguaccgccuguuccgcaagagcaaccucaagcccuucgagcgggacaucuccaccgagaucuaccaggccggcagcacccccugcaacgggguggagggcuucaacugcuacuucccccugcaguccuacggguuccagccgaccaacggcgugggguaccagcccuaccggguggucgugcugagcuucgagcuccugcacgcccccgccacggugugcggccccaagaaguccaccaaccuggucaagaacaagugcgugaacuucaacuucaacggccucaccgggaccggcgugcugaccgagagcaacaagaaguuccugccguuccagcaguucgggcgcgacaucgccgacacgaccgacgcgguccgcgacccccagacccuggagauccucgacaucacccccugcagcuucggcgggguguccgugaucacgccgggcaccaacaccagcaaccaggucgccgugcuguaccagggcgugaacugcaccgagguccccguggccauccacgccgaccagcugacgcccaccuggcggguguacuccaccggcagcaacgucuuccagacccgcgccgggugccucaucggcgcggagcacgugaacaacuccuacgagugcgacauccccaucggggccggcaucugcgccagcuaccagacgcagaccaacuccccgcggcgcgcccggagcguggcgucccagagcaucaucgccuacaccaugucccugggcgccgagaacagcgucgccuacuccaacaacagcaucgccauccccaccaacuucacgaucuccgugaccaccgagauccugcccgugagcaugaccaagacgagcgucgacugcaccauguacaucugcggggacuccaccgagugcagcaaccuccugcugcaguacggcuccuucugcacccagcucaaccgcgcgcugacggggaucgccguggagcaggacaagaacacccaggagguguucgcccaggucaagcagaucuacaagacgcccccgaucaaggacuucggcggguucaacuucagccagauccugcccgaccccuccaagcccagcaagcgguccuucaucgaggaccuccuguucaacaaggugacccuggccgacgccggcuucaucaagcaguacggcgacugccucggggacaucgcggcccgcgaccugaucugcgcccagaaguucaacggccugaccgugcucccgccccugcugaccgacgagaugaucgcccaguacaccagcgcccuccuggcggggaccaucacguccggcuggaccuucggggccggcgccgcccugcagauccccuucgcgaugcagauggccuaccgguucaacggcaucggggucacccagaacgugcucuacgagaaccagaagcugaucgccaaccaguucaacagcgccaucggcaagauccaggacucccugagcuccaccgccagcgcgcucgggaagcugcaggacguggucaaccagaacgcccaggcccugaacacgcucgugaagcagcuguccagcaacuucggcgccaucuccagcgugcugaacgacauccucucccgccuggacaaggucgaggccgaggugcagaucgaccggcugaucaccgggcgccuccagagccugcagaccuacgugacccagcagcugauccgggcggccgagauccgcgccagcgccaaccucgccgcgaccaagauguccgagugcguccugggccagagcaagcggguggacuucugcggcaagggguaccaccugauguccuucccccagagcgccccgcacggcguggucuuccuccacgugacguacguccccgcccaggagaagaacuucaccaccgcccccgcgaucugccacgacgggaaggcccacuucccccgcgagggcguguucguguccaacgggacccacugguucgucacgcagcggaacuucuacgagccgcagaucaucaccaccgacaacaccuucgugagcggcaacugcgacguggucaucggcaucgugaacaacacgguguacgacccccugcagcccgagcuggacuccuucaaggaggagcucgacaaguacuucaagaaccacaccagccccgacgucgaccugggggacaucuccggcaucaacgccagcguggugaacauccagaaggagaucgaccgccugaacgaggucgccaagaaccucaacgagucccugaucgaccugcaggagcucgggaaguacgagcaguacaucaaguggccgugguacaucuggcugggcuucaucgccggccugaucgcgaucgugauggugaccaucaugcucugcugcaugaccagcugcugcuccugccugaaggggugcugcagcugcggcuccugcugcaaguucgacgaggacgacagcgagcccguccugaagggggugaagcuccacuacacgugaggacuagucccuguucccagagcccacuuuuuuuucuuuuuuugaaauaaaauagccugucuuucagaucuaaaaaaaaaaaaaaaaaaaaaaaaaaaaaaaaaaaaaaaaaaaaaaaaaaaaaaaaaaaaaaaaaaaaaaaaaaaaaaaaaaaaaaaaaaaaaaaaaaaa

SEQ ID NO: 24733 - RNA, 4070 nt, Artificial Sequence
  SARS-CoV-2/Wuhan/WIV05/2019__EPI_ISL_402128 spike protein mRNA gc (1-1273)(S477N_D614G)
aggagagucccgcagucggcguccagcggcucugcuuguucgugugugugucguugcaggccuuauucaagcuuaccauguucguguuccugguccuccugccccuggugagcucccagugcgugaaccucaccacccgcacgcagcugccgcccgccuacaccaacagcuucacccggggcgucuacuaccccgacaagguguuccgcuccagcgugcugcacuccacccaggaccucuuccugcccuucuucagcaacgucacgugguuccacgccauccacguguccgggaccaacggcaccaagcgguucgacaacccggugcugcccuucaacgacggggucuacuucgcgagcaccgagaaguccaacaucauccgcggcuggaucuucgggacgacccucgacagcaagacccagucccugcugaucgugaacaacgccaccaacguggucaucaaggugugcgaguuccaguucugcaacgaccccuuccucggcguguacuaccacaagaacaacaagagcuggauggaguccgaguuccgggucuacagcuccgccaacaacugcacguucgaguacgugagccagcccuuccugauggaccuggagggcaagcaggggaacuucaagaaccuccgcgaguucguguucaagaacaucgacggcuacuucaagaucuacuccaagcacaccccgaucaaccugguccgggaccugccccagggguucagcgcccucgagccccugguggaccugcccaucggcaucaacaucacccgcuuccagacccuccuggcccugcaccgguccuaccucacgccgggggacagcagcuccggcuggaccgcgggcgccgccgccuacuacgugggguaccugcagccccgcaccuuccugcucaaguacaacgagaacggcaccaucacggacgcggucgacugcgcccuggacccccugagcgagaccaagugcacccucaaguccuucaccguggagaaggggaucuaccagacgagcaacuuccgggugcagcccaccgaguccaucguccgcuucccgaacaucaccaaccugugccccuucggcgagguguucaacgccacccgguucgccagcgucuacgccuggaaccgcaagcggaucuccaacugcguggcggacuacagcgugcuguacaacuccgccagcuucuccacguucaagugcuacggcgucagccccaccaagcucaacgaccugugcuucaccaacguguacgccgacuccuucgugauccgcggggacgagguccggcagaucgcccccggccagaccgggaagaucgccgacuacaacuacaagcugccggacgacuucacgggcugcgugaucgcguggaacagcaacaaccucgacuccaaggucgggggcaacuacaacuaccuguaccgccuguuccgcaagagcaaccucaagcccuucgagcgggacaucuccaccgagaucuaccaggccggcaacacccccugcaacgggguggagggcuucaacugcuacuucccccugcaguccuacggguuccagccgaccaacggcgugggguaccagcccuaccggguggucgugcugagcuucgagcuccugcacgcccccgccacggugugcggccccaagaaguccaccaaccuggucaagaacaagugcgugaacuucaacuucaacggccucaccgggaccggcgugcugaccgagagcaacaagaaguuccugccguuccagcaguucgggcgcgacaucgccgacacgaccgacgcgguccgcgacccccagacccuggagauccucgacaucacccccugcagcuucggcgggguguccgugaucacgccgggcaccaacaccagcaaccaggucgccgugcuguaccagggcgugaacugcaccgagguccccguggccauccacgccgaccagcugacgcccaccuggcggguguacuccaccggcagcaacgucuuccagacccgcgccgggugccucaucggcgcggagcacgugaacaacuccuacgagugcgacauccccaucggggccggcaucugcgccagcuaccagacgcagaccaacuccccgcggcgcgcccggagcguggcgucccagagcaucaucgccuacaccaugucccugggcgccgagaacagcgucgccuacuccaacaacagcaucgccauccccaccaacuucacgaucuccgugaccaccgagauccugcccgugagcaugaccaagacgagcgucgacugcaccauguacaucugcggggacuccaccgagugcagcaaccuccugcugcaguacggcuccuucugcacccagcucaaccgcgcgcugacggggaucgccguggagcaggacaagaacacccaggagguguucgcccaggucaagcagaucuacaagacgcccccgaucaaggacuucggcggguucaacuucagccagauccugcccgaccccuccaagcccagcaagcgguccuucaucgaggaccuccuguucaacaaggugacccuggccgacgccggcuucaucaagcaguacggcgacugccucggggacaucgcggcccgcgaccugaucugcgcccagaaguucaacggccugaccgugcucccgccccugcugaccgacgagaugaucgcccaguacaccagcgcccuccuggcggggaccaucacguccggcuggaccuucggggccggcgccgcccugcagauccccuucgcgaugcagauggccuaccgguucaacggcaucggggucacccagaacgugcucuacgagaaccagaagcugaucgccaaccaguucaacagcgccaucggcaagauccaggacucccugagcuccaccgccagcgcgcucgggaagcugcaggacguggucaaccagaacgcccaggcccugaacacgcucgugaagcagcuguccagcaacuucggcgccaucuccagcgugcugaacgacauccucucccgccuggacaaggucgaggccgaggugcagaucgaccggcugaucaccgggcgccuccagagccugcagaccuacgugacccagcagcugauccgggcggccgagauccgcgccagcgccaaccucgccgcgaccaagauguccgagugcguccugggccagagcaagcggguggacuucugcggcaagggguaccaccugauguccuucccccagagcgccccgcacggcguggucuuccuccacgugacguacguccccgcccaggagaagaacuucaccaccgcccccgcgaucugccacgacgggaaggcccacuucccccgcgagggcguguucguguccaacgggacccacugguucgucacgcagcggaacuucuacgagccgcagaucaucaccaccgacaacaccuucgugagcggcaacugcgacguggucaucggcaucgugaacaacacgguguacgacccccugcagcccgagcuggacuccuucaaggaggagcucgacaaguacuucaagaaccacaccagccccgacgucgaccugggggacaucuccggcaucaacgccagcguggugaacauccagaaggagaucgaccgccugaacgaggucgccaagaaccucaacgagucccugaucgaccugcaggagcucgggaaguacgagcaguacaucaaguggccgugguacaucuggcugggcuucaucgccggccugaucgcgaucgugauggugaccaucaugcucugcugcaugaccagcugcugcuccugccugaaggggugcugcagcugcggcuccugcugcaaguucgacgaggacgacagcgagcccguccugaagggggugaagcuccacuacacgugaggacuagucccuguucccagagcccacuuuuuuuucuuuuuuugaaauaaaauagccugucuuucagaucuaaaaaaaaaaaaaaaaaaaaaaaaaaaaaaaaaaaaaaaaaaaaaaaaaaaaaaaaaaaaaaaaaaaaaaaaaaaaaaaaaaaaaaaaaaaaaaaaaaaa

SEQ ID NO: 24734 - RNA, 4070 nt, Artificial Sequence
  SARS-CoV-2/Wuhan/WIV05/2019__EPI_ISL_402128 spike protein mRNA gc (1-1273)(N501Y_D614G)
aggagagucccgcagucggcguccagcggcucugcuuguucgugugugugucguugcaggccuuauucaagcuuaccauguucguguuccugguccuccugccccuggugagcucccagugcgugaaccucaccacccgcacgcagcugccgcccgccuacaccaacagcuucacccggggcgucuacuaccccgacaagguguuccgcuccagcgugcugcacuccacccaggaccucuuccugcccuucuucagcaacgucacgugguuccacgccauccacguguccgggaccaacggcaccaagcgguucgacaacccggugcugcccuucaacgacggggucuacuucgcgagcaccgagaaguccaacaucauccgcggcuggaucuucgggacgacccucgacagcaagacccagucccugcugaucgugaacaacgccaccaacguggucaucaaggugugcgaguuccaguucugcaacgaccccuuccucggcguguacuaccacaagaacaacaagagcuggauggaguccgaguuccgggucuacagcuccgccaacaacugcacguucgaguacgugagccagcccuuccugauggaccuggagggcaagcaggggaacuucaagaaccuccgcgaguucguguucaagaacaucgacggcuacuucaagaucuacuccaagcacaccccgaucaaccugguccgggaccugccccagggguucagcgcccucgagccccugguggaccugcccaucggcaucaacaucacccgcuuccagacccuccuggcccugcaccgguccuaccucacgccgggggacagcagcuccggcuggaccgcgggcgccgccgccuacuacgugggguaccugcagccccgcaccuuccugcucaaguacaacgagaacggcaccaucacggacgcggucgacugcgcccuggacccccugagcgagaccaagugcacccucaaguccuucaccguggagaaggggaucuaccagacgagcaacuuccgggugcagcccaccgaguccaucguccgcuucccgaacaucaccaaccugugccccuucggcgagguguucaacgccacccgguucgccagcgucuacgccuggaaccgcaagcggaucuccaacugcguggcggacuacagcgugcuguacaacuccgccagcuucuccacguucaagugcuacggcgucagccccaccaagcucaacgaccugugcuucaccaacguguacgccgacuccuucgugauccgcggggacgagguccggcagaucgcccccggccagaccgggaagaucgccgacuacaacuacaagcugccggacgacuucacgggcugcgugaucgcguggaacagcaacaaccucgacuccaaggucgggggcaacuacaacuaccuguaccgccuguuccgcaagagcaaccucaagcccuucgagcgggacaucuccaccgagaucuaccaggccggcagcacccccugcaacgggguggagggcuucaacugcuacuucccccugcaguccuacggguuccagccgaccuacggcgugggguaccagcccuaccggguggucgugcugagcuucgagcuccugcacgcccccgccacggugugcggccccaagaaguccaccaaccuggucaagaacaagugcgugaacuucaacuucaacggccucaccgggaccggcgugcugaccgagagcaacaagaaguuccugccguuccagcaguucgggcgcgacaucgccgacacgaccgacgcgguccgcgacccccagacccuggagauccucgacaucacccccugcagcuucggcgggguguccgugaucacgccgggcaccaacaccagcaaccaggucgccgugcuguaccagggcgugaacugcaccgagguccccguggccauccacgccgaccagcugacgcccaccuggcggguguacuccaccggcagcaacgucuuccagacccgcgccgggugccucaucggcgcggagcacgugaacaacuccuacgagugcgacauccccaucggggccggcaucugcgccagcuaccagacgcagaccaacuccccgcggcgcgcccggagcguggcgucccagagcaucaucgccuacaccaugucccugggcgccgagaacagcgucgccuacuccaacaacagcaucgccauccccaccaacuucacgaucuccgugaccaccgagauccugcccgugagcaugaccaagacgagcgucgacugcaccauguacaucugcggggacuccaccgagugcagcaaccuccugcugcaguacggcuccuucugcacccagcucaaccgcgcgcugacggggaucgccguggagcaggacaagaacacccaggagguguucgcccaggucaagcagaucuacaagacgcccccgaucaaggacuucggcggguucaacuucagccagauccugcccgaccccuccaagcccagcaagcgguccuucaucgaggaccuccuguucaacaaggugacccuggccgacgccggcuucaucaagcaguacggcgacugccucggggacaucgcggcccgcgaccugaucugcgcccagaaguucaacggccugaccgugcucccgccccugcugaccgacgagaugaucgcccaguacaccagcgcccuccuggcggggaccaucacguccggcuggaccuucggggccggcgccgcccugcagauccccuucgcgaugcagauggccuaccgguucaacggcaucggggucacccagaacgugcucuacgagaaccagaagcugaucgccaaccaguucaacagcgccaucggcaagauccaggacucccugagcuccaccgccagcgcgcucgggaagcugcaggacguggucaaccagaacgcccaggcccugaacacgcucgugaagcagcuguccagcaacuucggcgccaucuccagcgugcugaacgacauccucucccgccuggacaaggucgaggccgaggugcagaucgaccggcugaucaccgggcgccuccagagccugcagaccuacgugacccagcagcugauccgggcggccgagauccgcgccagcgccaaccucgccgcgaccaagauguccgagugcguccugggccagagcaagcggguggacuucugcggcaagggguaccaccugauguccuucccccagagcgccccgcacggcguggucuuccuccacgugacguacguccccgcccaggagaagaacuucaccaccgcccccgcgaucugccacgacgggaaggcccacuucccccgcgagggcguguucguguccaacgggacccacugguucgucacgcagcggaacuucuacgagccgcagaucaucaccaccgacaacaccuucgugagcggcaacugcgacguggucaucggcaucgugaacaacacgguguacgacccccugcagcccgagcuggacuccuucaaggaggagcucgacaaguacuucaagaaccacaccagccccgacgucgaccugggggacaucuccggcaucaacgccagcguggugaacauccagaaggagaucgaccgccugaacgaggucgccaagaaccucaacgagucccugaucgaccugcaggagcucgggaaguacgagcaguacaucaaguggccgugguacaucuggcugggcuucaucgccggccugaucgcgaucgugauggugaccaucaugcucugcugcaugaccagcugcugcuccugccugaaggggugcugcagcugcggcuccugcugcaaguucgacgaggacgacagcgagcccguccugaagggggugaagcuccacuacacgugaggacuagucccuguucccagagcccacuuuuuuuucuuuuuuugaaauaaaauagccugucuuucagaucuaaaaaaaaaaaaaaaaaaaaaaaaaaaaaaaaaaaaaaaaaaaaaaaaaaaaaaaaaaaaaaaaaaaaaaaaaaaaaaaaaaaaaaaaaaaaaaaaaaaa

SEQ ID NO: 24735 - RNA, 4064 nt, Artificial Sequence
  SARS-CoV-2/Wuhan/WIV05/2019__EPI_ISL_402128 spike protein mRNA gc (1-1273)(H69del_V70del_D614G)
aggagagucccgcagucggcguccagcggcucugcuuguucgugugugugucguugcaggccuuauucaagcuuaccauguucguguuccugguccuccugccccuggugagcucccagugcgugaaccucaccacccgcacgcagcugccgcccgccuacaccaacagcuucacccggggcgucuacuaccccgacaagguguuccgcuccagcgugcugcacuccacccaggaccucuuccugcccuucuucagcaacgucacgugguuccacgccaucuccgggaccaacggcaccaagcgguucgacaacccggugcugcccuucaacgacggggucuacuucgcgagcaccgagaaguccaacaucauccgcggcuggaucuucgggacgacccucgacagcaagacccagucccugcugaucgugaacaacgccaccaacguggucaucaaggugugcgaguuccaguucugcaacgaccccuuccucggcguguacuaccacaagaacaacaagagcuggauggaguccgaguuccgggucuacagcuccgccaacaacugcacguucgaguacgugagccagcccuuccugauggaccuggagggcaagcaggggaacuucaagaaccuccgcgaguucguguucaagaacaucgacggcuacuucaagaucuacuccaagcacaccccgaucaaccugguccgggaccugccccagggguucagcgcccucgagccccugguggaccugcccaucggcaucaacaucacccgcuuccagacccuccuggcccugcaccgguccuaccucacgccgggggacagcagcuccggcuggaccgcgggcgccgccgccuacuacgugggguaccugcagccccgcaccuuccugcucaaguacaacgagaacggcaccaucacggacgcggucgacugcgcccuggacccccugagcgagaccaagugcacccucaaguccuucaccguggagaaggggaucuaccagacgagcaacuuccgggugcagcccaccgaguccaucguccgcuucccgaacaucaccaaccugugccccuucggcgagguguucaacgccacccgguucgccagcgucuacgccuggaaccgcaagcggaucuccaacugcguggcggacuacagcgugcuguacaacuccgccagcuucuccacguucaagugcuacggcgucagccccaccaagcucaacgaccugugcuucaccaacguguacgccgacuccuucgugauccgcggggacgagguccggcagaucgcccccggccagaccgggaagaucgccgacuacaacuacaagcugccggacgacuucacgggcugcgugaucgcguggaacagcaacaaccucgacuccaaggucgggggcaacuacaacuaccuguaccgccuguuccgcaagagcaaccucaagcccuucgagcgggacaucuccaccgagaucuaccaggccggcagcacccccugcaacgggguggagggcuucaacugcuacuucccccugcaguccuacggguuccagccgaccaacggcgugggguaccagcccuaccggguggucgugcugagcuucgagcuccugcacgcccccgccacggugugcggccccaagaaguccaccaaccuggucaagaacaagugcgugaacuucaacuucaacggccucaccgggaccggcgugcugaccgagagcaacaagaaguuccugccguuccagcaguucgggcgcgacaucgccgacacgaccgacgcgguccgcgacccccagacccuggagauccucgacaucacccccugcagcuucggcgggguguccgugaucacgccgggcaccaacaccagcaaccaggucgccgugcuguaccagggcgugaacugcaccgagguccccguggccauccacgccgaccagcugacgcccaccuggcggguguacuccaccggcagcaacgucuuccagacccgcgccgggugccucaucggcgcggagcacgugaacaacuccuacgagugcgacauccccaucggggccggcaucugcgccagcuaccagacgcagaccaacuccccgcggcgcgcccggagcguggcgucccagagcaucaucgccuacaccaugucccugggcgccgagaacagcgucgccuacuccaacaacagcaucgccauccccaccaacuucacgaucuccgugaccaccgagauccugcccgugagcaugaccaagacgagcgucgacugcaccauguacaucugcggggacuccaccgagugcagcaaccuccugcugcaguacggcuccuucugcacccagcucaaccgcgcgcugacggggaucgccguggagcaggacaagaacacccaggagguguucgcccaggucaagcagaucuacaagacgcccccgaucaaggacuucggcggguucaacuucagccagauccugcccgaccccuccaagcccagcaagcgguccuucaucgaggaccuccuguucaacaaggugacccuggccgacgccggcuucaucaagcaguacggcgacugccucggggacaucgcggcccgcgaccugaucugcgcccagaaguucaacggccugaccgugcucccgccccugcugaccgacgagaugaucgcccaguacaccagcgcccuccuggcggggaccaucacguccggcuggaccuucggggccggcgccgcccugcagauccccuucgcgaugcagauggccuaccgguucaacggcaucggggucacccagaacgugcucuacgagaaccagaagcugaucgccaaccaguucaacagcgccaucggcaagauccaggacucccugagcuccaccgccagcgcgcucgggaagcugcaggacguggucaaccagaacgcccaggcccugaacacgcucgugaagcagcuguccagcaacuucggcgccaucuccagcgugcugaacgacauccucucccgccuggacaaggucgaggccgaggugcagaucgaccggcugaucaccgggcgccuccagagccugcagaccuacgugacccagcagcugauccgggcggccgagauccgcgccagcgccaaccucgccgcgaccaagauguccgagugcguccugggccagagcaagcggguggacuucugcggcaagggguaccaccugauguccuucccccagagcgccccgcacggcguggucuuccuccacgugacguacguccccgcccaggagaagaacuucaccaccgcccccgcgaucugccacgacgggaaggcccacuucccccgcgagggcguguucguguccaacgggacccacugguucgucacgcagcggaacuucuacgagccgcagaucaucaccaccgacaacaccuucgugagcggcaacugcgacguggucaucggcaucgugaacaacacgguguacgacccccugcagcccgagcuggacuccuucaaggaggagcucgacaaguacuucaagaaccacaccagccccgacgucgaccugggggacaucuccggcaucaacgccagcguggugaacauccagaaggagaucgaccgccugaacgaggucgccaagaaccucaacgagucccugaucgaccugcaggagcucgggaaguacgagcaguacaucaaguggccgugguacaucuggcugggcuucaucgccggccugaucgcgaucgugauggugaccaucaugcucugcugcaugaccagcugcugcuccugccugaaggggugcugcagcugcggcuccugcugcaaguucgacgaggacgacagcgagcccguccugaagggggugaagcuccacuacacgugaggacuagucccuguucccagagcccacuuuuuuuucuuuuuuugaaauaaaauagccugucuuucagaucuaaaaaaaaaaaaaaaaaaaaaaaaaaaaaaaaaaaaaaaaaaaaaaaaaaaaaaaaaaaaaaaaaaaaaaaaaaaaaaaaaaaaaaaaaaaaaaaaaaaa

SEQ ID NO: 24736 - RNA, 4070 nt, Artificial Sequence
  SARS-CoV-2/Wuhan/WIV05/2019__EPI_ISL_402128 spike protein mRNA gc (1-1273)(Y453F_D614G)
aggagagucccgcagucggcguccagcggcucugcuuguucgugugugugucguugcaggccuuauucaagcuuaccauguucguguuccugguccuccugccccuggugagcucccagugcgugaaccucaccacccgcacgcagcugccgcccgccuacaccaacagcuucacccggggcgucuacuaccccgacaagguguuccgcuccagcgugcugcacuccacccaggaccucuuccugcccuucuucagcaacgucacgugguuccacgccauccacguguccgggaccaacggcaccaagcgguucgacaacccggugcugcccuucaacgacggggucuacuucgcgagcaccgagaaguccaacaucauccgcggcuggaucuucgggacgacccucgacagcaagacccagucccugcugaucgugaacaacgccaccaacguggucaucaaggugugcgaguuccaguucugcaacgaccccuuccucggcguguacuaccacaagaacaacaagagcuggauggaguccgaguuccgggucuacagcuccgccaacaacugcacguucgaguacgugagccagcccuuccugauggaccuggagggcaagcaggggaacuucaagaaccuccgcgaguucguguucaagaacaucgacggcuacuucaagaucuacuccaagcacaccccgaucaaccugguccgggaccugccccagggguucagcgcccucgagccccugguggaccugcccaucggcaucaacaucacccgcuuccagacccuccuggcccugcaccgguccuaccucacgccgggggacagcagcuccggcuggaccgcgggcgccgccgccuacuacgugggguaccugcagccccgcaccuuccugcucaaguacaacgagaacggcaccaucacggacgcggucgacugcgcccuggacccccugagcgagaccaagugcacccucaaguccuucaccguggagaaggggaucuaccagacgagcaacuuccgggugcagcccaccgaguccaucguccgcuucccgaacaucaccaaccugugccccuucggcgagguguucaacgccacccgguucgccagcgucuacgccuggaaccgcaagcggaucuccaacugcguggcggacuacagcgugcuguacaacuccgccagcuucuccacguucaagugcuacggcgucagccccaccaagcucaacgaccugugcuucaccaacguguacgccgacuccuucgugauccgcggggacgagguccggcagaucgcccccggccagaccgggaagaucgccgacuacaacuacaagcugccggacgacuucacgggcugcgugaucgcguggaacagcaacaaccucgacuccaaggucgggggcaacuacaacuaccuguuccgccuguuccgcaagagcaaccucaagcccuucgagcgggacaucuccaccgagaucuaccaggccggcagcacccccugcaacgggguggagggcuucaacugcuacuucccccugcaguccuacggguuccagccgaccaacggcgugggguaccagcccuaccggguggucgugcugagcuucgagcuccugcacgcccccgccacggugugcggccccaagaaguccaccaaccuggucaagaacaagugcgugaacuucaacuucaacggccucaccgggaccggcgugcugaccgagagcaacaagaaguuccugccguuccagcaguucgggcgcgacaucgccgacacgaccgacgcgguccgcgacccccagacccuggagauccucgacaucacccccugcagcuucggcgggguguccgugaucacgccgggcaccaacaccagcaaccaggucgccgugcuguaccagggcgugaacugcaccgagguccccguggccauccacgccgaccagcugacgcccaccuggcggguguacuccaccggcagcaacgucuuccagacccgcgccgggugccucaucggcgcggagcacgugaacaacuccuacgagugcgacauccccaucggggccggcaucugcgccagcuaccagacgcagaccaacuccccgcggcgcgcccggagcguggcgucccagagcaucaucgccuacaccaugucccugggcgccgagaacagcgucgccuacuccaacaacagcaucgccauccccaccaacuucacgaucuccgugaccaccgagauccugcccgugagcaugaccaagacgagcgucgacugcaccauguacaucugcggggacuccaccgagugcagcaaccuccugcugcaguacggcuccuucugcacccagcucaaccgcgcgcugacggggaucgccguggagcaggacaagaacacccaggagguguucgcccaggucaagcagaucuacaagacgcccccgaucaaggacuucggcggguucaacuucagccagauccugcccgaccccuccaagcccagcaagcgguccuucaucgaggaccuccuguucaacaaggugacccuggccgacgccggcuucaucaagcaguacggcgacugccucggggacaucgcggcccgcgaccugaucugcgcccagaaguucaacggccugaccgugcucccgccccugcugaccgacgagaugaucgcccaguacaccagcgcccuccuggcggggaccaucacguccggcuggaccuucggggccggcgccgcccugcagauccccuucgcgaugcagauggccuaccgguucaacggcaucggggucacccagaacgugcucuacgagaaccagaagcugaucgccaaccaguucaacagcgccaucggcaagauccaggacucccugagcuccaccgccagcgcgcucgggaagcugcaggacguggucaaccagaacgcccaggcccugaacacgcucgugaagcagcuguccagcaacuucggcgccaucuccagcgugcugaacgacauccucucccgccuggacaaggucgaggccgaggugcagaucgaccggcugaucaccgggcgccuccagagccugcagaccuacgugacccagcagcugauccgggcggccgagauccgcgccagcgccaaccucgccgcgaccaagauguccgagugcguccugggccagagcaagcggguggacuucugcggcaagggguaccaccugauguccuucccccagagcgccccgcacggcguggucuuccuccacgugacguacguccccgcccaggagaagaacuucaccaccgcccccgcgaucugccacgacgggaaggcccacuucccccgcgagggcguguucguguccaacgggacccacugguucgucacgcagcggaacuucuacgagccgcagaucaucaccaccgacaacaccuucgugagcggcaacugcgacguggucaucggcaucgugaacaacacgguguacgacccccugcagcccgagcuggacuccuucaaggaggagcucgacaaguacuucaagaaccacaccagccccgacgucgaccugggggacaucuccggcaucaacgccagcguggugaacauccagaaggagaucgaccgccugaacgaggucgccaagaaccucaacgagucccugaucgaccugcaggagcucgggaaguacgagcaguacaucaaguggccgugguacaucuggcugggcuucaucgccggccugaucgcgaucgugauggugaccaucaugcucugcugcaugaccagcugcugcuccugccugaaggggugcugcagcugcggcuccugcugcaaguucgacgaggacgacagcgagcccguccugaagggggugaagcuccacuacacgugaggacuagucccuguucccagagcccacuuuuuuuucuuuuuuugaaauaaaauagccugucuuucagaucuaaaaaaaaaaaaaaaaaaaaaaaaaaaaaaaaaaaaaaaaaaaaaaaaaaaaaaaaaaaaaaaaaaaaaaaaaaaaaaaaaaaaaaaaaaaaaaaaaaaa

SEQ ID NO: 24737 - RNA, 4070 nt, Artificial Sequence
  SARS-CoV-2/Wuhan/WIV05/2019__EPI_ISL_402128 spike protein mRNA gc (1-1273)(D614G_I692V)
aggagagucccgcagucggcguccagcggcucugcuuguucgugugugugucguugcaggccuuauucaagcuuaccauguucguguuccugguccuccugccccuggugagcucccagugcgugaaccucaccacccgcacgcagcugccgcccgccuacaccaacagcuucacccggggcgucuacuaccccgacaagguguuccgcuccagcgugcugcacuccacccaggaccucuuccugcccuucuucagcaacgucacgugguuccacgccauccacguguccgggaccaacggcaccaagcgguucgacaacccggugcugcccuucaacgacggggucuacuucgcgagcaccgagaaguccaacaucauccgcggcuggaucuucgggacgacccucgacagcaagacccagucccugcugaucgugaacaacgccaccaacguggucaucaaggugugcgaguuccaguucugcaacgaccccuuccucggcguguacuaccacaagaacaacaagagcuggauggaguccgaguuccgggucuacagcuccgccaacaacugcacguucgaguacgugagccagcccuuccugauggaccuggagggcaagcaggggaacuucaagaaccuccgcgaguucguguucaagaacaucgacggcuacuucaagaucuacuccaagcacaccccgaucaaccugguccgggaccugccccagggguucagcgcccucgagccccugguggaccugcccaucggcaucaacaucacccgcuuccagacccuccuggcccugcaccgguccuaccucacgccgggggacagcagcuccggcuggaccgcgggcgccgccgccuacuacgugggguaccugcagccccgcaccuuccugcucaaguacaacgagaacggcaccaucacggacgcggucgacugcgcccuggacccccugagcgagaccaagugcacccucaaguccuucaccguggagaaggggaucuaccagacgagcaacuuccgggugcagcccaccgaguccaucguccgcuucccgaacaucaccaaccugugccccuucggcgagguguucaacgccacccgguucgccagcgucuacgccuggaaccgcaagcggaucuccaacugcguggcggacuacagcgugcuguacaacuccgccagcuucuccacguucaagugcuacggcgucagccccaccaagcucaacgaccugugcuucaccaacguguacgccgacuccuucgugauccgcggggacgagguccggcagaucgcccccggccagaccgggaagaucgccgacuacaacuacaagcugccggacgacuucacgggcugcgugaucgcguggaacagcaacaaccucgacuccaaggucgggggcaacuacaacuaccuguaccgccuguuccgcaagagcaaccucaagcccuucgagcgggacaucuccaccgagaucuaccaggccggcagcacccccugcaacgggguggagggcuucaacugcuacuucccccugcaguccuacggguuccagccgaccaacggcgugggguaccagcccuaccggguggucgugcugagcuucgagcuccugcacgcccccgccacggugugcggccccaagaaguccaccaaccuggucaagaacaagugcgugaacuucaacuucaacggccucaccgggaccggcgugcugaccgagagcaacaagaaguuccugccguuccagcaguucgggcgcgacaucgccgacacgaccgacgcgguccgcgacccccagacccuggagauccucgacaucacccccugcagcuucggcgggguguccgugaucacgccgggcaccaacaccagcaaccaggucgccgugcuguaccagggcgugaacugcaccgagguccccguggccauccacgccgaccagcugacgcccaccuggcggguguacuccaccggcagcaacgucuuccagacccgcgccgggugccucaucggcgcggagcacgugaacaacuccuacgagugcgacauccccaucggggccggcaucugcgccagcuaccagacgcagaccaacuccccgcggcgcgcccggagcguggcgucccagagcgucaucgccuacaccaugucccugggcgccgagaacagcgucgccuacuccaacaacagcaucgccauccccaccaacuucacgaucuccgugaccaccgagauccugcccgugagcaugaccaagacgagcgucgacugcaccauguacaucugcggggacuccaccgagugcagcaaccuccugcugcaguacggcuccuucugcacccagcucaaccgcgcgcugacggggaucgccguggagcaggacaagaacacccaggagguguucgcccaggucaagcagaucuacaagacgcccccgaucaaggacuucggcggguucaacuucagccagauccugcccgaccccuccaagcccagcaagcgguccuucaucgaggaccuccuguucaacaaggugacccuggccgacgccggcuucaucaagcaguacggcgacugccucggggacaucgcggcccgcgaccugaucugcgcccagaaguucaacggccugaccgugcucccgccccugcugaccgacgagaugaucgcccaguacaccagcgcccuccuggcggggaccaucacguccggcuggaccuucggggccggcgccgcccugcagauccccuucgcgaugcagauggccuaccgguucaacggcaucggggucacccagaacgugcucuacgagaaccagaagcugaucgccaaccaguucaacagcgccaucggcaagauccaggacucccugagcuccaccgccagcgcgcucgggaagcugcaggacguggucaaccagaacgcccaggcccugaacacgcucgugaagcagcuguccagcaacuucggcgccaucuccagcgugcugaacgacauccucucccgccuggacaaggucgaggccgaggugcagaucgaccggcugaucaccgggcgccuccagagccugcagaccuacgugacccagcagcugauccgggcggccgagauccgcgccagcgccaaccucgccgcgaccaagauguccgagugcguccugggccagagcaagcggguggacuucugcggcaagggguaccaccugauguccuucccccagagcgccccgcacggcguggucuuccuccacgugacguacguccccgcccaggagaagaacuucaccaccgcccccgcgaucugccacgacgggaaggcccacuucccccgcgagggcguguucguguccaacgggacccacugguucgucacgcagcggaacuucuacgagccgcagaucaucaccaccgacaacaccuucgugagcggcaacugcgacguggucaucggcaucgugaacaacacgguguacgacccccugcagcccgagcuggacuccuucaaggaggagcucgacaaguacuucaagaaccacaccagccccgacgucgaccugggggacaucuccggcaucaacgccagcguggugaacauccagaaggagaucgaccgccugaacgaggucgccaagaaccucaacgagucccugaucgaccugcaggagcucgggaaguacgagcaguacaucaaguggccgugguacaucuggcugggcuucaucgccggccugaucgcgaucgugauggugaccaucaugcucugcugcaugaccagcugcugcuccugccugaaggggugcugcagcugcggcuccugcugcaaguucgacgaggacgacagcgagcccguccugaagggggugaagcuccacuacacgugaggacuagucccuguucccagagcccacuuuuuuuucuuuuuuugaaauaaaauagccugucuuucagaucuaaaaaaaaaaaaaaaaaaaaaaaaaaaaaaaaaaaaaaaaaaaaaaaaaaaaaaaaaaaaaaaaaaaaaaaaaaaaaaaaaaaaaaaaaaaaaaaaaaaa

SEQ ID NO: 24738 - RNA, 4070 nt, Artificial Sequence
  SARS-CoV-2/Wuhan/WIV05/2019__EPI_ISL_402128 spike protein mRNA gc (1-1273)(D614G_M1229I)
aggagagucccgcagucggcguccagcggcucugcuuguucgugugugugucguugcaggccuuauucaagcuuaccauguucguguuccugguccuccugccccuggugagcucccagugcgugaaccucaccacccgcacgcagcugccgcccgccuacaccaacagcuucacccggggcgucuacuaccccgacaagguguuccgcuccagcgugcugcacuccacccaggaccucuuccugcccuucuucagcaacgucacgugguuccacgccauccacguguccgggaccaacggcaccaagcgguucgacaacccggugcugcccuucaacgacggggucuacuucgcgagcaccgagaaguccaacaucauccgcggcuggaucuucgggacgacccucgacagcaagacccagucccugcugaucgugaacaacgccaccaacguggucaucaaggugugcgaguuccaguucugcaacgaccccuuccucggcguguacuaccacaagaacaacaagagcuggauggaguccgaguuccgggucuacagcuccgccaacaacugcacguucgaguacgugagccagcccuuccugauggaccuggagggcaagcaggggaacuucaagaaccuccgcgaguucguguucaagaacaucgacggcuacuucaagaucuacuccaagcacaccccgaucaaccugguccgggaccugccccagggguucagcgcccucgagccccugguggaccugcccaucggcaucaacaucacccgcuuccagacccuccuggcccugcaccgguccuaccucacgccgggggacagcagcuccggcuggaccgcgggcgccgccgccuacuacgugggguaccugcagccccgcaccuuccugcucaaguacaacgagaacggcaccaucacggacgcggucgacugcgcccuggacccccugagcgagaccaagugcacccucaaguccuucaccguggagaaggggaucuaccagacgagcaacuuccgggugcagcccaccgaguccaucguccgcuucccgaacaucaccaaccugugccccuucggcgagguguucaacgccacccgguucgccagcgucuacgccuggaaccgcaagcggaucuccaacugcguggcggacuacagcgugcuguacaacuccgccagcuucuccacguucaagugcuacggcgucagccccaccaagcucaacgaccugugcuucaccaacguguacgccgacuccuucgugauccgcggggacgagguccggcagaucgcccccggccagaccgggaagaucgccgacuacaacuacaagcugccggacgacuucacgggcugcgugaucgcguggaacagcaacaaccucgacuccaaggucgggggcaacuacaacuaccuguaccgccuguuccgcaagagcaaccucaagcccuucgagcgggacaucuccaccgagaucuaccaggccggcagcacccccugcaacgggguggagggcuucaacugcuacuucccccugcaguccuacggguuccagccgaccaacggcgugggguaccagcccuaccggguggucgugcugagcuucgagcuccugcacgcccccgccacggugugcggccccaagaaguccaccaaccuggucaagaacaagugcgugaacuucaacuucaacggccucaccgggaccggcgugcugaccgagagcaacaagaaguuccugccguuccagcaguucgggcgcgacaucgccgacacgaccgacgcgguccgcgacccccagacccuggagauccucgacaucacccccugcagcuucggcgggguguccgugaucacgccgggcaccaacaccagcaaccaggucgccgugcuguaccagggcgugaacugcaccgagguccccguggccauccacgccgaccagcugacgcccaccuggcggguguacuccaccggcagcaacgucuuccagacccgcgccgggugccucaucggcgcggagcacgugaacaacuccuacgagugcgacauccccaucggggccggcaucugcgccagcuaccagacgcagaccaacuccccgcggcgcgcccggagcguggcgucccagagcaucaucgccuacaccaugucccugggcgccgagaacagcgucgccuacuccaacaacagcaucgccauccccaccaacuucacgaucuccgugaccaccgagauccugcccgugagcaugaccaagacgagcgucgacugcaccauguacaucugcggggacuccaccgagugcagcaaccuccugcugcaguacggcuccuucugcacccagcucaaccgcgcgcugacggggaucgccguggagcaggacaagaacacccaggagguguucgcccaggucaagcagaucuacaagacgcccccgaucaaggacuucggcggguucaacuucagccagauccugcccgaccccuccaagcccagcaagcgguccuucaucgaggaccuccuguucaacaaggugacccuggccgacgccggcuucaucaagcaguacggcgacugccucggggacaucgcggcccgcgaccugaucugcgcccagaaguucaacggccugaccgugcucccgccccugcugaccgacgagaugaucgcccaguacaccagcgcccuccuggcggggaccaucacguccggcuggaccuucggggccggcgccgcccugcagauccccuucgcgaugcagauggccuaccgguucaacggcaucggggucacccagaacgugcucuacgagaaccagaagcugaucgccaaccaguucaacagcgccaucggcaagauccaggacucccugagcuccaccgccagcgcgcucgggaagcugcaggacguggucaaccagaacgcccaggcccugaacacgcucgugaagcagcuguccagcaacuucggcgccaucuccagcgugcugaacgacauccucucccgccuggacaaggucgaggccgaggugcagaucgaccggcugaucaccgggcgccuccagagccugcagaccuacgugacccagcagcugauccgggcggccgagauccgcgccagcgccaaccucgccgcgaccaagauguccgagugcguccugggccagagcaagcggguggacuucugcggcaagggguaccaccugauguccuucccccagagcgccccgcacggcguggucuuccuccacgugacguacguccccgcccaggagaagaacuucaccaccgcccccgcgaucugccacgacgggaaggcccacuucccccgcgagggcguguucguguccaacgggacccacugguucgucacgcagcggaacuucuacgagccgcagaucaucaccaccgacaacaccuucgugagcggcaacugcgacguggucaucggcaucgugaacaacacgguguacgacccccugcagcccgagcuggacuccuucaaggaggagcucgacaaguacuucaagaaccacaccagccccgacgucgaccugggggacaucuccggcaucaacgccagcguggugaacauccagaaggagaucgaccgccugaacgaggucgccaagaaccucaacgagucccugaucgaccugcaggagcucgggaaguacgagcaguacaucaaguggccgugguacaucuggcugggcuucaucgccggccugaucgcgaucgugaucgugaccaucaugcucugcugcaugaccagcugcugcuccugccugaaggggugcugcagcugcggcuccugcugcaaguucgacgaggacgacagcgagcccguccugaagggggugaagcuccacuacacgugaggacuagucccuguucccagagcccacuuuuuuuucuuuuuuugaaauaaaauagccugucuuucagaucuaaaaaaaaaaaaaaaaaaaaaaaaaaaaaaaaaaaaaaaaaaaaaaaaaaaaaaaaaaaaaaaaaaaaaaaaaaaaaaaaaaaaaaaaaaaaaaaaaaaa

SEQ ID NO: 24739 - RNA, 4064 nt, Artificial Sequence
  SARS-CoV-2/Wuhan/WIV05/2019__EPI_ISL_402128 spike protein mRNA gc (1-1273)(H69del_V70del_A222V_Y453F_S477N_D614G_I692V)
aggagagucccgcagucggcguccagcggcucugcuuguucgugugugugucguugcaggccuuauucaagcuuaccauguucguguuccugguccuccugccccuggugagcucccagugcgugaaccucaccacccgcacgcagcugccgcccgccuacaccaacagcuucacccggggcgucuacuaccccgacaagguguuccgcuccagcgugcugcacuccacccaggaccucuuccugcccuucuucagcaacgucacgugguuccacgccaucuccgggaccaacggcaccaagcgguucgacaacccggugcugcccuucaacgacggggucuacuucgcgagcaccgagaaguccaacaucauccgcggcuggaucuucgggacgacccucgacagcaagacccagucccugcugaucgugaacaacgccaccaacguggucaucaaggugugcgaguuccaguucugcaacgaccccuuccucggcguguacuaccacaagaacaacaagagcuggauggaguccgaguuccgggucuacagcuccgccaacaacugcacguucgaguacgugagccagcccuuccugauggaccuggagggcaagcaggggaacuucaagaaccuccgcgaguucguguucaagaacaucgacggcuacuucaagaucuacuccaagcacaccccgaucaaccugguccgggaccugccccagggguucagcguccucgagccccugguggaccugcccaucggcaucaacaucacccgcuuccagacccuccuggcccugcaccgguccuaccucacgccgggggacagcagcuccggcuggaccgcgggcgccgccgccuacuacgugggguaccugcagccccgcaccuuccugcucaaguacaacgagaacggcaccaucacggacgcggucgacugcgcccuggacccccugagcgagaccaagugcacccucaaguccuucaccguggagaaggggaucuaccagacgagcaacuuccgggugcagcccaccgaguccaucguccgcuucccgaacaucaccaaccugugccccuucggcgagguguucaacgccacccgguucgccagcgucuacgccuggaaccgcaagcggaucuccaacugcguggcggacuacagcgugcuguacaacuccgccagcuucuccacguucaagugcuacggcgucagccccaccaagcucaacgaccugugcuucaccaacguguacgccgacuccuucgugauccgcggggacgagguccggcagaucgcccccggccagaccgggaagaucgccgacuacaacuacaagcugccggacgacuucacgggcugcgugaucgcguggaacagcaacaaccucgacuccaaggucgggggcaacuacaacuaccuguuccgccuguuccgcaagagcaaccucaagcccuucgagcgggacaucuccaccgagaucuaccaggccggcaacacccccugcaacgggguggagggcuucaacugcuacuucccccugcaguccuacggguuccagccgaccaacggcgugggguaccagcccuaccggguggucgugcugagcuucgagcuccugcacgcccccgccacggugugcggccccaagaaguccaccaaccuggucaagaacaagugcgugaacuucaacuucaacggccucaccgggaccggcgugcugaccgagagcaacaagaaguuccugccguuccagcaguucgggcgcgacaucgccgacacgaccgacgcgguccgcgacccccagacccuggagauccucgacaucacccccugcagcuucggcgggguguccgugaucacgccgggcaccaacaccagcaaccaggucgccgugcuguaccagggcgugaacugcaccgagguccccguggccauccacgccgaccagcugacgcccaccuggcggguguacuccaccggcagcaacgucuuccagacccgcgccgggugccucaucggcgcggagcacgugaacaacuccuacgagugcgacauccccaucggggccggcaucugcgccagcuaccagacgcagaccaacuccccgcggcgcgcccggagcguggcgucccagagcgucaucgccuacaccaugucccugggcgccgagaacagcgucgccuacuccaacaacagcaucgccauccccaccaacuucacgaucuccgugaccaccgagauccugcccgugagcaugaccaagacgagcgucgacugcaccauguacaucugcggggacuccaccgagugcagcaaccuccugcugcaguacggcuccuucugcacccagcucaaccgcgcgcugacggggaucgccguggagcaggacaagaacacccaggagguguucgcccaggucaagcagaucuacaagacgcccccgaucaaggacuucggcggguucaacuucagccagauccugcccgaccccuccaagcccagcaagcgguccuucaucgaggaccuccuguucaacaaggugacccuggccgacgccggcuucaucaagcaguacggcgacugccucggggacaucgcggcccgcgaccugaucugcgcccagaaguucaacggccugaccgugcucccgccccugcugaccgacgagaugaucgcccaguacaccagcgcccuccuggcggggaccaucacguccggcuggaccuucggggccggcgccgcccugcagauccccuucgcgaugcagauggccuaccgguucaacggcaucggggucacccagaacgugcucuacgagaaccagaagcugaucgccaaccaguucaacagcgccaucggcaagauccaggacucccugagcuccaccgccagcgcgcucgggaagcugcaggacguggucaaccagaacgcccaggcccugaacacgcucgugaagcagcuguccagcaacuucggcgccaucuccagcgugcugaacgacauccucucccgccuggacaaggucgaggccgaggugcagaucgaccggcugaucaccgggcgccuccagagccugcagaccuacgugacccagcagcugauccgggcggccgagauccgcgccagcgccaaccucgccgcgaccaagauguccgagugcguccugggccagagcaagcggguggacuucugcggcaagggguaccaccugauguccuucccccagagcgccccgcacggcguggucuuccuccacgugacguacguccccgcccaggagaagaacuucaccaccgcccccgcgaucugccacgacgggaaggcccacuucccccgcgagggcguguucguguccaacgggacccacugguucgucacgcagcggaacuucuacgagccgcagaucaucaccaccgacaacaccuucgugagcggcaacugcgacguggucaucggcaucgugaacaacacgguguacgacccccugcagcccgagcuggacuccuucaaggaggagcucgacaaguacuucaagaaccacaccagccccgacgucgaccugggggacaucuccggcaucaacgccagcguggugaacauccagaaggagaucgaccgccugaacgaggucgccaagaaccucaacgagucccugaucgaccugcaggagcucgggaaguacgagcaguacaucaaguggccgugguacaucuggcugggcuucaucgccggccugaucgcgaucgugauggugaccaucaugcucugcugcaugaccagcugcugcuccugccugaaggggugcugcagcugcggcuccugcugcaaguucgacgaggacgacagcgagcccguccugaagggggugaagcuccacuacacgugaggacuagucccuguucccagagcccacuuuuuuuucuuuuuuugaaauaaaauagccugucuuucagaucuaaaaaaaaaaaaaaaaaaaaaaaaaaaaaaaaaaaaaaaaaaaaaaaaaaaaaaaaaaaaaaaaaaaaaaaaaaaaaaaaaaaaaaaaaaaaaaaaaaaa

SEQ ID NO: 24740 - RNA, 4064 nt, Artificial Sequence
  SARS-CoV-2/Wuhan/WIV05/2019__EPI_ISL_402128 spike protein mRNA gc (1-1273)(H69del_V70del_Y453F_D614G_I692V_M1229I)
aggagagucccgcagucggcguccagcggcucugcuuguucgugugugugucguugcaggccuuauucaagcuuaccauguucguguuccugguccuccugccccuggugagcucccagugcgugaaccucaccacccgcacgcagcugccgcccgccuacaccaacagcuucacccggggcgucuacuaccccgacaagguguuccgcuccagcgugcugcacuccacccaggaccucuuccugcccuucuucagcaacgucacgugguuccacgccaucuccgggaccaacggcaccaagcgguucgacaacccggugcugcccuucaacgacggggucuacuucgcgagcaccgagaaguccaacaucauccgcggcuggaucuucgggacgacccucgacagcaagacccagucccugcugaucgugaacaacgccaccaacguggucaucaaggugugcgaguuccaguucugcaacgaccccuuccucggcguguacuaccacaagaacaacaagagcuggauggaguccgaguuccgggucuacagcuccgccaacaacugcacguucgaguacgugagccagcccuuccugauggaccuggagggcaagcaggggaacuucaagaaccuccgcgaguucguguucaagaacaucgacggcuacuucaagaucuacuccaagcacaccccgaucaaccugguccgggaccugccccagggguucagcgcccucgagccccugguggaccugcccaucggcaucaacaucacccgcuuccagacccuccuggcccugcaccgguccuaccucacgccgggggacagcagcuccggcuggaccgcgggcgccgccgccuacuacgugggguaccugcagccccgcaccuuccugcucaaguacaacgagaacggcaccaucacggacgcggucgacugcgcccuggacccccugagcgagaccaagugcacccucaaguccuucaccguggagaaggggaucuaccagacgagcaacuuccgggugcagcccaccgaguccaucguccgcuucccgaacaucaccaaccugugccccuucggcgagguguucaacgccacccgguucgccagcgucuacgccuggaaccgcaagcggaucuccaacugcguggcggacuacagcgugcuguacaacuccgccagcuucuccacguucaagugcuacggcgucagccccaccaagcucaacgaccugugcuucaccaacguguacgccgacuccuucgugauccgcggggacgagguccggcagaucgcccccggccagaccgggaagaucgccgacuacaacuacaagcugccggacgacuucacgggcugcgugaucgcguggaacagcaacaaccucgacuccaaggucgggggcaacuacaacuaccuguuccgccuguuccgcaagagcaaccucaagcccuucgagcgggacaucuccaccgagaucuaccaggccggcagcacccccugcaacgggguggagggcuucaacugcuacuucccccugcaguccuacggguuccagccgaccaacggcgugggguaccagcccuaccggguggucgugcugagcuucgagcuccugcacgcccccgccacggugugcggccccaagaaguccaccaaccuggucaagaacaagugcgugaacuucaacuucaacggccucaccgggaccggcgugcugaccgagagcaacaagaaguuccugccguuccagcaguucgggcgcgacaucgccgacacgaccgacgcgguccgcgacccccagacccuggagauccucgacaucacccccugcagcuucggcgggguguccgugaucacgccgggcaccaacaccagcaaccaggucgccgugcuguaccagggcgugaacugcaccgagguccccguggccauccacgccgaccagcugacgcccaccuggcggguguacuccaccggcagcaacgucuuccagacccgcgccgggugccucaucggcgcggagcacgugaacaacuccuacgagugcgacauccccaucggggccggcaucugcgccagcuaccagacgcagaccaacuccccgcggcgcgcccggagcguggcgucccagagcgugaucgccuacaccaugucccugggcgccgagaacagcgucgccuacuccaacaacagcaucgccauccccaccaacuucacgaucuccgugaccaccgagauccugcccgugagcaugaccaagacgagcgucgacugcaccauguacaucugcggggacuccaccgagugcagcaaccuccugcugcaguacggcuccuucugcacccagcucaaccgcgcgcugacggggaucgccguggagcaggacaagaacacccaggagguguucgcccaggucaagcagaucuacaagacgcccccgaucaaggacuucggcggguucaacuucagccagauccugcccgaccccuccaagcccagcaagcgguccuucaucgaggaccuccuguucaacaaggugacccuggccgacgccggcuucaucaagcaguacggcgacugccucggggacaucgcggcccgcgaccugaucugcgcccagaaguucaacggccugaccgugcucccgccccugcugaccgacgagaugaucgcccaguacaccagcgcccuccuggcggggaccaucacguccggcuggaccuucggggccggcgccgcccugcagauccccuucgcgaugcagauggccuaccgguucaacggcaucggggucacccagaacgugcucuacgagaaccagaagcugaucgccaaccaguucaacagcgccaucggcaagauccaggacucccugagcuccaccgccagcgcgcucgggaagcugcaggacguggucaaccagaacgcccaggcccugaacacgcucgugaagcagcuguccagcaacuucggcgccaucuccagcgugcugaacgacauccucucccgccuggacaaggucgaggccgaggugcagaucgaccggcugaucaccgggcgccuccagagccugcagaccuacgugacccagcagcugauccgggcggccgagauccgcgccagcgccaaccucgccgcgaccaagauguccgagugcguccugggccagagcaagcggguggacuucugcggcaagggguaccaccugauguccuucccccagagcgccccgcacggcguggucuuccuccacgugacguacguccccgcccaggagaagaacuucaccaccgcccccgcgaucugccacgacgggaaggcccacuucccccgcgagggcguguucguguccaacgggacccacugguucgucacgcagcggaacuucuacgagccgcagaucaucaccaccgacaacaccuucgugagcggcaacugcgacguggucaucggcaucgugaacaacacgguguacgacccccugcagcccgagcuggacuccuucaaggaggagcucgacaaguacuucaagaaccacaccagccccgacgucgaccugggggacaucuccggcaucaacgccagcguggugaacauccagaaggagaucgaccgccugaacgaggucgccaagaaccucaacgagucccugaucgaccugcaggagcucgggaaguacgagcaguacaucaaguggccgugguacaucuggcugggcuucaucgccggccugaucgcgaucgugaucgugaccaucaugcucugcugcaugaccagcugcugcuccugccugaaggggugcugcagcugcggcuccugcugcaaguucgacgaggacgacagcgagcccguccugaagggggugaagcuccacuacacgugaggacuagucccuguucccagagcccacuuuuuuuucuuuuuuugaaauaaaauagccugucuuucagaucuaaaaaaaaaaaaaaaaaaaaaaaaaaaaaaaaaaaaaaaaaaaaaaaaaaaaaaaaaaaaaaaaaaaaaaaaaaaaaaaaaaaaaaaaaaaaaaaaaaaa

SEQ ID NO: 24741 - RNA, 4061 nt, Artificial Sequence
  SARS-CoV-2/Wuhan/WIV05/2019__EPI_ISL_402128 spike protein mRNA gc (1-1273)(H69del_V70del_Y144del_N501Y_A570D_D614G_P681H_T716I_S982 A_D1118H)
aggagagucccgcagucggcguccagcggcucugcuuguucgugugugugucguugcaggccuuauucaagcuuaccauguucguguuccugguccuccugccccuggugagcucccagugcgugaaccucaccacccgcacgcagcugccgcccgccuacaccaacagcuucacccggggcgucuacuaccccgacaagguguuccgcuccagcgugcugcacuccacccaggaccucuuccugcccuucuucagcaacgucacgugguuccacgccaucuccgggaccaacggcaccaagcgguucgacaacccggugcugcccuucaacgacggggucuacuucgcgagcaccgagaaguccaacaucauccgcggcuggaucuucgggacgacccucgacagcaagacccagucccugcugaucgugaacaacgccaccaacguggucaucaaggugugcgaguuccaguucugcaacgaccccuuccucggcguguaccacaagaacaacaagagcuggauggaguccgaguuccgggucuacagcuccgccaacaacugcacguucgaguacgugagccagcccuuccugauggaccuggagggcaagcaggggaacuucaagaaccuccgcgaguucguguucaagaacaucgacggcuacuucaagaucuacuccaagcacaccccgaucaaccugguccgggaccugccccagggguucagcgcccucgagccccugguggaccugcccaucggcaucaacaucacccgcuuccagacccuccuggcccugcaccgguccuaccucacgccgggggacagcagcuccggcuggaccgcgggcgccgccgccuacuacgugggguaccugcagccccgcaccuuccugcucaaguacaacgagaacggcaccaucacggacgcggucgacugcgcccuggacccccugagcgagaccaagugcacccucaaguccuucaccguggagaaggggaucuaccagacgagcaacuuccgggugcagcccaccgaguccaucguccgcuucccgaacaucaccaaccugugccccuucggcgagguguucaacgccacccgguucgccagcgucuacgccuggaaccgcaagcggaucuccaacugcguggcggacuacagcgugcuguacaacuccgccagcuucuccacguucaagugcuacggcgucagccccaccaagcucaacgaccugugcuucaccaacguguacgccgacuccuucgugauccgcggggacgagguccggcagaucgcccccggccagaccgggaagaucgccgacuacaacuacaagcugccggacgacuucacgggcugcgugaucgcguggaacagcaacaaccucgacuccaaggucgggggcaacuacaacuaccuguaccgccuguuccgcaagagcaaccucaagcccuucgagcgggacaucuccaccgagaucuaccaggccggcagcacccccugcaacgggguggagggcuucaacugcuacuucccccugcaguccuacggguuccagccgaccuacggcgugggguaccagcccuaccggguggucgugcugagcuucgagcuccugcacgcccccgccacggugugcggccccaagaaguccaccaaccuggucaagaacaagugcgugaacuucaacuucaacggccucaccgggaccggcgugcugaccgagagcaacaagaaguuccugccguuccagcaguucgggcgcgacaucgacgacacgaccgacgcgguccgcgacccccagacccuggagauccucgacaucacccccugcagcuucggcgggguguccgugaucacgccgggcaccaacaccagcaaccaggucgccgugcuguaccagggcgugaacugcaccgagguccccguggccauccacgccgaccagcugacgcccaccuggcggguguacuccaccggcagcaacgucuuccagacccgcgccgggugccucaucggcgcggagcacgugaacaacuccuacgagugcgacauccccaucggggccggcaucugcgccagcuaccagacgcagaccaacucccaccggcgcgcccggagcguggcgucccagagcaucaucgccuacaccaugucccugggcgccgagaacagcgucgccuacuccaacaacagcaucgccauccccaucaacuucacgaucuccgugaccaccgagauccugcccgugagcaugaccaagacgagcgucgacugcaccauguacaucugcggggacuccaccgagugcagcaaccuccugcugcaguacggcuccuucugcacccagcucaaccgcgcgcugacggggaucgccguggagcaggacaagaacacccaggagguguucgcccaggucaagcagaucuacaagacgcccccgaucaaggacuucggcggguucaacuucagccagauccugcccgaccccuccaagcccagcaagcgguccuucaucgaggaccuccuguucaacaaggugacccuggccgacgccggcuucaucaagcaguacggcgacugccucggggacaucgcggcccgcgaccugaucugcgcccagaaguucaacggccugaccgugcucccgccccugcugaccgacgagaugaucgcccaguacaccagcgcccuccuggcggggaccaucacguccggcuggaccuucggggccggcgccgcccugcagauccccuucgcgaugcagauggccuaccgguucaacggcaucggggucacccagaacgugcucuacgagaaccagaagcugaucgccaaccaguucaacagcgccaucggcaagauccaggacucccugagcuccaccgccagcgcgcucgggaagcugcaggacguggucaaccagaacgcccaggcccugaacacgcucgugaagcagcuguccagcaacuucggcgccaucuccagcgugcugaacgacauccucgcccgccuggacaaggucgaggccgaggugcagaucgaccggcugaucaccgggcgccuccagagccugcagaccuacgugacccagcagcugauccgggcggccgagauccgcgccagcgccaaccucgccgcgaccaagauguccgagugcguccugggccagagcaagcggguggacuucugcggcaagggguaccaccugauguccuucccccagagcgccccgcacggcguggucuuccuccacgugacguacguccccgcccaggagaagaacuucaccaccgcccccgcgaucugccacgacgggaaggcccacuucccccgcgagggcguguucguguccaacgggacccacugguucgucacgcagcggaacuucuacgagccgcagaucaucaccacccacaacaccuucgugagcggcaacugcgacguggucaucggcaucgugaacaacacgguguacgacccccugcagcccgagcuggacuccuucaaggaggagcucgacaaguacuucaagaaccacaccagccccgacgucgaccugggggacaucuccggcaucaacgccagcguggugaacauccagaaggagaucgaccgccugaacgaggucgccaagaaccucaacgagucccugaucgaccugcaggagcucgggaaguacgagcaguacaucaaguggccgugguacaucuggcugggcuucaucgccggccugaucgcgaucgugauggugaccaucaugcucugcugcaugaccagcugcugcuccugccugaaggggugcugcagcugcggcuccugcugcaaguucgacgaggacgacagcgagcccguccugaagggggugaagcuccacuacacgugaggacuagucccuguucccagagcccacuuuuuuuucuuuuuuugaaauaaaauagccugucuuucagaucuaaaaaaaaaaaaaaaaaaaaaaaaaaaaaaaaaaaaaaaaaaaaaaaaaaaaaaaaaaaaaaaaaaaaaaaaaaaaaaaaaaaaaaaaaaaaaaaaaaaa

SEQ ID NO: 24742 - RNA, 4070 nt, Artificial Sequence
  SARS-CoV-2/Wuhan/WIV05/2019__EPI_ISL_402128 spike protein mRNA gc (1-1273)(K417N_E484K_N501Y_D614G)
aggagagucccgcagucggcguccagcggcucugcuuguucgugugugugucguugcaggccuuauucaagcuuaccauguucguguuccugguccuccugccccuggugagcucccagugcgugaaccucaccacccgcacgcagcugccgcccgccuacaccaacagcuucacccggggcgucuacuaccccgacaagguguuccgcuccagcgugcugcacuccacccaggaccucuuccugcccuucuucagcaacgucacgugguuccacgccauccacguguccgggaccaacggcaccaagcgguucgacaacccggugcugcccuucaacgacggggucuacuucgcgagcaccgagaaguccaacaucauccgcggcuggaucuucgggacgacccucgacagcaagacccagucccugcugaucgugaacaacgccaccaacguggucaucaaggugugcgaguuccaguucugcaacgaccccuuccucggcguguacuaccacaagaacaacaagagcuggauggaguccgaguuccgggucuacagcuccgccaacaacugcacguucgaguacgugagccagcccuuccugauggaccuggagggcaagcaggggaacuucaagaaccuccgcgaguucguguucaagaacaucgacggcuacuucaagaucuacuccaagcacaccccgaucaaccugguccgggaccugccccagggguucagcgcccucgagccccugguggaccugcccaucggcaucaacaucacccgcuuccagacccuccuggcccugcaccgguccuaccucacgccgggggacagcagcuccggcuggaccgcgggcgccgccgccuacuacgugggguaccugcagccccgcaccuuccugcucaaguacaacgagaacggcaccaucacggacgcggucgacugcgcccuggacccccugagcgagaccaagugcacccucaaguccuucaccguggagaaggggaucuaccagacgagcaacuuccgggugcagcccaccgaguccaucguccgcuucccgaacaucaccaaccugugccccuucggcgagguguucaacgccacccgguucgccagcgucuacgccuggaaccgcaagcggaucuccaacugcguggcggacuacagcgugcuguacaacuccgccagcuucuccacguucaagugcuacggcgucagccccaccaagcucaacgaccugugcuucaccaacguguacgccgacuccuucgugauccgcggggacgagguccggcagaucgcccccggccagaccgggaacaucgccgacuacaacuacaagcugccggacgacuucacgggcugcgugaucgcguggaacagcaacaaccucgacuccaaggucgggggcaacuacaacuaccuguaccgccuguuccgcaagagcaaccucaagcccuucgagcgggacaucuccaccgagaucuaccaggccggcagcacccccugcaacggggugaagggcuucaacugcuacuucccccugcaguccuacggguuccagccgaccuacggcgugggguaccagcccuaccggguggucgugcugagcuucgagcuccugcacgcccccgccacggugugcggccccaagaaguccaccaaccuggucaagaacaagugcgugaacuucaacuucaacggccucaccgggaccggcgugcugaccgagagcaacaagaaguuccugccguuccagcaguucgggcgcgacaucgccgacacgaccgacgcgguccgcgacccccagacccuggagauccucgacaucacccccugcagcuucggcgggguguccgugaucacgccgggcaccaacaccagcaaccaggucgccgugcuguaccagggcgugaacugcaccgagguccccguggccauccacgccgaccagcugacgcccaccuggcggguguacuccaccggcagcaacgucuuccagacccgcgccgggugccucaucggcgcggagcacgugaacaacuccuacgagugcgacauccccaucggggccggcaucugcgccagcuaccagacgcagaccaacuccccgcggcgcgcccggagcguggcgucccagagcaucaucgccuacaccaugucccugggcgccgagaacagcgucgccuacuccaacaacagcaucgccauccccaccaacuucacgaucuccgugaccaccgagauccugcccgugagcaugaccaagacgagcgucgacugcaccauguacaucugcggggacuccaccgagugcagcaaccuccugcugcaguacggcuccuucugcacccagcucaaccgcgcgcugacggggaucgccguggagcaggacaagaacacccaggagguguucgcccaggucaagcagaucuacaagacgcccccgaucaaggacuucggcggguucaacuucagccagauccugcccgaccccuccaagcccagcaagcgguccuucaucgaggaccuccuguucaacaaggugacccuggccgacgccggcuucaucaagcaguacggcgacugccucggggacaucgcggcccgcgaccugaucugcgcccagaaguucaacggccugaccgugcucccgccccugcugaccgacgagaugaucgcccaguacaccagcgcccuccuggcggggaccaucacguccggcuggaccuucggggccggcgccgcccugcagauccccuucgcgaugcagauggccuaccgguucaacggcaucggggucacccagaacgugcucuacgagaaccagaagcugaucgccaaccaguucaacagcgccaucggcaagauccaggacucccugagcuccaccgccagcgcgcucgggaagcugcaggacguggucaaccagaacgcccaggcccugaacacgcucgugaagcagcuguccagcaacuucggcgccaucuccagcgugcugaacgacauccucucccgccuggacaaggucgaggccgaggugcagaucgaccggcugaucaccgggcgccuccagagccugcagaccuacgugacccagcagcugauccgggcggccgagauccgcgccagcgccaaccucgccgcgaccaagauguccgagugcguccugggccagagcaagcggguggacuucugcggcaagggguaccaccugauguccuucccccagagcgccccgcacggcguggucuuccuccacgugacguacguccccgcccaggagaagaacuucaccaccgcccccgcgaucugccacgacgggaaggcccacuucccccgcgagggcguguucguguccaacgggacccacugguucgucacgcagcggaacuucuacgagccgcagaucaucaccaccgacaacaccuucgugagcggcaacugcgacguggucaucggcaucgugaacaacacgguguacgacccccugcagcccgagcuggacuccuucaaggaggagcucgacaaguacuucaagaaccacaccagccccgacgucgaccugggggacaucuccggcaucaacgccagcguggugaacauccagaaggagaucgaccgccugaacgaggucgccaagaaccucaacgagucccugaucgaccugcaggagcucgggaaguacgagcaguacaucaaguggccgugguacaucuggcugggcuucaucgccggccugaucgcgaucgugauggugaccaucaugcucugcugcaugaccagcugcugcuccugccugaaggggugcugcagcugcggcuccugcugcaaguucgacgaggacgacagcgagcccguccugaagggggugaagcuccacuacacgugaggacuagucccuguucccagagcccacuuuuuuuucuuuuuuugaaauaaaauagccugucuuucagaucuaaaaaaaaaaaaaaaaaaaaaaaaaaaaaaaaaaaaaaaaaaaaaaaaaaaaaaaaaaaaaaaaaaaaaaaaaaaaaaaaaaaaaaaaaaaaaaaaaaaa

SEQ ID NO: 24743 - RNA, 4061 nt, Artificial Sequence
  SARS-CoV-2/Wuhan/WIV05/2019__EPI_ISL_402128 spike protein mRNA gc (1-1273)(L18F_D80A_D215G_L242del_A243del_L244del_R246I_K417N_E484 K_N501Y_D614G_A701V)
aggagagucccgcagucggcguccagcggcucugcuuguucgugugugugucguugcaggccuuauucaagcuuaccauguucguguuccugguccuccugccccuggugagcucccagugcgugaacuucaccacccgcacgcagcugccgcccgccuacaccaacagcuucacccggggcgucuacuaccccgacaagguguuccgcuccagcgugcugcacuccacccaggaccucuuccugcccuucuucagcaacgucacgugguuccacgccauccacguguccgggaccaacggcaccaagcgguucgccaacccggugcugcccuucaacgacggggucuacuucgcgagcaccgagaaguccaacaucauccgcggcuggaucuucgggacgacccucgacagcaagacccagucccugcugaucgugaacaacgccaccaacguggucaucaaggugugcgaguuccaguucugcaacgaccccuuccucggcguguacuaccacaagaacaacaagagcuggauggaguccgaguuccgggucuacagcuccgccaacaacugcacguucgaguacgugagccagcccuuccugauggaccuggagggcaagcaggggaacuucaagaaccuccgcgaguucguguucaagaacaucgacggcuacuucaagaucuacuccaagcacaccccgaucaaccugguccggggccugccccagggguucagcgcccucgagccccugguggaccugcccaucggcaucaacaucacccgcuuccagacccuccacaucuccuaccucacgccgggggacagcagcuccggcuggaccgcgggcgccgccgccuacuacgugggguaccugcagccccgcaccuuccugcucaaguacaacgagaacggcaccaucacggacgcggucgacugcgcccuggacccccugagcgagaccaagugcacccucaaguccuucaccguggagaaggggaucuaccagacgagcaacuuccgggugcagcccaccgaguccaucguccgcuucccgaacaucaccaaccugugccccuucggcgagguguucaacgccacccgguucgccagcgucuacgccuggaaccgcaagcggaucuccaacugcguggcggacuacagcgugcuguacaacuccgccagcuucuccacguucaagugcuacggcgucagccccaccaagcucaacgaccugugcuucaccaacguguacgccgacuccuucgugauccgcggggacgagguccggcagaucgcccccggccagaccgggaacaucgccgacuacaacuacaagcugccggacgacuucacgggcugcgugaucgcguggaacagcaacaaccucgacuccaaggucgggggcaacuacaacuaccuguaccgccuguuccgcaagagcaaccucaagcccuucgagcgggacaucuccaccgagaucuaccaggccggcagcacccccugcaacggggugaagggcuucaacugcuacuucccccugcaguccuacggguuccagccgaccuacggcgugggguaccagcccuaccggguggucgugcugagcuucgagcuccugcacgcccccgccacggugugcggccccaagaaguccaccaaccuggucaagaacaagugcgugaacuucaacuucaacggccucaccgggaccggcgugcugaccgagagcaacaagaaguuccugccguuccagcaguucgggcgcgacaucgccgacacgaccgacgcgguccgcgacccccagacccuggagauccucgacaucacccccugcagcuucggcgggguguccgugaucacgccgggcaccaacaccagcaaccaggucgccgugcuguaccagggcgugaacugcaccgagguccccguggccauccacgccgaccagcugacgcccaccuggcggguguacuccaccggcagcaacgucuuccagacccgcgccgggugccucaucggcgcggagcacgugaacaacuccuacgagugcgacauccccaucggggccggcaucugcgccagcuaccagacgcagaccaacuccccgcggcgcgcccggagcguggcgucccagagcaucaucgccuacaccaugucccugggcguggagaacagcgucgccuacuccaacaacagcaucgccauccccaccaacuucacgaucuccgugaccaccgagauccugcccgugagcaugaccaagacgagcgucgacugcaccauguacaucugcggggacuccaccgagugcagcaaccuccugcugcaguacggcuccuucugcacccagcucaaccgcgcgcugacggggaucgccguggagcaggacaagaacacccaggagguguucgcccaggucaagcagaucuacaagacgcccccgaucaaggacuucggcggguucaacuucagccagauccugcccgaccccuccaagcccagcaagcgguccuucaucgaggaccuccuguucaacaaggugacccuggccgacgccggcuucaucaagcaguacggcgacugccucggggacaucgcggcccgcgaccugaucugcgcccagaaguucaacggccugaccgugcucccgccccugcugaccgacgagaugaucgcccaguacaccagcgcccuccuggcggggaccaucacguccggcuggaccuucggggccggcgccgcccugcagauccccuucgcgaugcagauggccuaccgguucaacggcaucggggucacccagaacgugcucuacgagaaccagaagcugaucgccaaccaguucaacagcgccaucggcaagauccaggacucccugagcuccaccgccagcgcgcucgggaagcugcaggacguggucaaccagaacgcccaggcccugaacacgcucgugaagcagcuguccagcaacuucggcgccaucuccagcgugcugaacgacauccucucccgccuggacaaggucgaggccgaggugcagaucgaccggcugaucaccgggcgccuccagagccugcagaccuacgugacccagcagcugauccgggcggccgagauccgcgccagcgccaaccucgccgcgaccaagauguccgagugcguccugggccagagcaagcggguggacuucugcggcaagggguaccaccugauguccuucccccagagcgccccgcacggcguggucuuccuccacgugacguacguccccgcccaggagaagaacuucaccaccgcccccgcgaucugccacgacgggaaggcccacuucccccgcgagggcguguucguguccaacgggacccacugguucgucacgcagcggaacuucuacgagccgcagaucaucaccaccgacaacaccuucgugagcggcaacugcgacguggucaucggcaucgugaacaacacgguguacgacccccugcagcccgagcuggacuccuucaaggaggagcucgacaaguacuucaagaaccacaccagccccgacgucgaccugggggacaucuccggcaucaacgccagcguggugaacauccagaaggagaucgaccgccugaacgaggucgccaagaaccucaacgagucccugaucgaccugcaggagcucgggaaguacgagcaguacaucaaguggccgugguacaucuggcugggcuucaucgccggccugaucgcgaucgugauggugaccaucaugcucugcugcaugaccagcugcugcuccugccugaaggggugcugcagcugcggcuccugcugcaaguucgacgaggacgacagcgagcccguccugaagggggugaagcuccacuacacgugaggacuagucccuguucccagagcccacuuuuuuuucuuuuuuugaaauaaaauagccugucuuucagaucuaaaaaaaaaaaaaaaaaaaaaaaaaaaaaaaaaaaaaaaaaaaaaaaaaaaaaaaaaaaaaaaaaaaaaaaaaaaaaaaaaaaaaaaaaaaaaaaaaaaa

SEQ ID NO: 24744 - RNA, 4070 nt, Artificial Sequence
  SARS-CoV-2/Wuhan/WIV05/2019__EPI_ISL_402128 spike protein mRNA gc (1-1273)(E484K_D614G)
aggagagucccgcagucggcguccagcggcucugcuuguucgugugugugucguugcaggccuuauucaagcuuaccauguucguguuccugguccuccugccccuggugagcucccagugcgugaaccucaccacccgcacgcagcugccgcccgccuacaccaacagcuucacccggggcgucuacuaccccgacaagguguuccgcuccagcgugcugcacuccacccaggaccucuuccugcccuucuucagcaacgucacgugguuccacgccauccacguguccgggaccaacggcaccaagcgguucgacaacccggugcugcccuucaacgacggggucuacuucgcgagcaccgagaaguccaacaucauccgcggcuggaucuucgggacgacccucgacagcaagacccagucccugcugaucgugaacaacgccaccaacguggucaucaaggugugcgaguuccaguucugcaacgaccccuuccucggcguguacuaccacaagaacaacaagagcuggauggaguccgaguuccgggucuacagcuccgccaacaacugcacguucgaguacgugagccagcccuuccugauggaccuggagggcaagcaggggaacuucaagaaccuccgcgaguucguguucaagaacaucgacggcuacuucaagaucuacuccaagcacaccccgaucaaccugguccgggaccugccccagggguucagcgcccucgagccccugguggaccugcccaucggcaucaacaucacccgcuuccagacccuccuggcccugcaccgguccuaccucacgccgggggacagcagcuccggcuggaccgcgggcgccgccgccuacuacgugggguaccugcagccccgcaccuuccugcucaaguacaacgagaacggcaccaucacggacgcggucgacugcgcccuggacccccugagcgagaccaagugcacccucaaguccuucaccguggagaaggggaucuaccagacgagcaacuuccgggugcagcccaccgaguccaucguccgcuucccgaacaucaccaaccugugccccuucggcgagguguucaacgccacccgguucgccagcgucuacgccuggaaccgcaagcggaucuccaacugcguggcggacuacagcgugcuguacaacuccgccagcuucuccacguucaagugcuacggcgucagccccaccaagcucaacgaccugugcuucaccaacguguacgccgacuccuucgugauccgcggggacgagguccggcagaucgcccccggccagaccgggaagaucgccgacuacaacuacaagcugccggacgacuucacgggcugcgugaucgcguggaacagcaacaaccucgacuccaaggucgggggcaacuacaacuaccuguaccgccuguuccgcaagagcaaccucaagcccuucgagcgggacaucuccaccgagaucuaccaggccggcagcacccccugcaacggggugaagggcuucaacugcuacuucccccugcaguccuacggguuccagccgaccaacggcgugggguaccagcccuaccggguggucgugcugagcuucgagcuccugcacgcccccgccacggugugcggccccaagaaguccaccaaccuggucaagaacaagugcgugaacuucaacuucaacggccucaccgggaccggcgugcugaccgagagcaacaagaaguuccugccguuccagcaguucgggcgcgacaucgccgacacgaccgacgcgguccgcgacccccagacccuggagauccucgacaucacccccugcagcuucggcgggguguccgugaucacgccgggcaccaacaccagcaaccaggucgccgugcuguaccagggcgugaacugcaccgagguccccguggccauccacgccgaccagcugacgcccaccuggcggguguacuccaccggcagcaacgucuuccagacccgcgccgggugccucaucggcgcggagcacgugaacaacuccuacgagugcgacauccccaucggggccggcaucugcgccagcuaccagacgcagaccaacuccccgcggcgcgcccggagcguggcgucccagagcaucaucgccuacaccaugucccugggcgccgagaacagcgucgccuacuccaacaacagcaucgccauccccaccaacuucacgaucuccgugaccaccgagauccugcccgugagcaugaccaagacgagcgucgacugcaccauguacaucugcggggacuccaccgagugcagcaaccuccugcugcaguacggcuccuucugcacccagcucaaccgcgcgcugacggggaucgccguggagcaggacaagaacacccaggagguguucgcccaggucaagcagaucuacaagacgcccccgaucaaggacuucggcggguucaacuucagccagauccugcccgaccccuccaagcccagcaagcgguccuucaucgaggaccuccuguucaacaaggugacccuggccgacgccggcuucaucaagcaguacggcgacugccucggggacaucgcggcccgcgaccugaucugcgcccagaaguucaacggccugaccgugcucccgccccugcugaccgacgagaugaucgcccaguacaccagcgcccuccuggcggggaccaucacguccggcuggaccuucggggccggcgccgcccugcagauccccuucgcgaugcagauggccuaccgguucaacggcaucggggucacccagaacgugcucuacgagaaccagaagcugaucgccaaccaguucaacagcgccaucggcaagauccaggacucccugagcuccaccgccagcgcgcucgggaagcugcaggacguggucaaccagaacgcccaggcccugaacacgcucgugaagcagcuguccagcaacuucggcgccaucuccagcgugcugaacgacauccucucccgccuggacaaggucgaggccgaggugcagaucgaccggcugaucaccgggcgccuccagagccugcagaccuacgugacccagcagcugauccgggcggccgagauccgcgccagcgccaaccucgccgcgaccaagauguccgagugcguccugggccagagcaagcggguggacuucugcggcaagggguaccaccugauguccuucccccagagcgccccgcacggcguggucuuccuccacgugacguacguccccgcccaggagaagaacuucaccaccgcccccgcgaucugccacgacgggaaggcccacuucccccgcgagggcguguucguguccaacgggacccacugguucgucacgcagcggaacuucuacgagccgcagaucaucaccaccgacaacaccuucgugagcggcaacugcgacguggucaucggcaucgugaacaacacgguguacgacccccugcagcccgagcuggacuccuucaaggaggagcucgacaaguacuucaagaaccacaccagccccgacgucgaccugggggacaucuccggcaucaacgccagcguggugaacauccagaaggagaucgaccgccugaacgaggucgccaagaaccucaacgagucccugaucgaccugcaggagcucgggaaguacgagcaguacaucaaguggccgugguacaucuggcugggcuucaucgccggccugaucgcgaucgugauggugaccaucaugcucugcugcaugaccagcugcugcuccugccugaaggggugcugcagcugcggcuccugcugcaaguucgacgaggacgacagcgagcccguccugaagggggugaagcuccacuacacgugaggacuagucccuguucccagagcccacuuuuuuuucuuuuuuugaaauaaaauagccugucuuucagaucuaaaaaaaaaaaaaaaaaaaaaaaaaaaaaaaaaaaaaaaaaaaaaaaaaaaaaaaaaaaaaaaaaaaaaaaaaaaaaaaaaaaaaaaaaaaaaaaaaaaa

SEQ ID NO: 24745 - RNA, 4070 nt, Artificial Sequence
  SARS-CoV-2/Wuhan/WIV05/2019__EPI_ISL_402128 spike protein mRNA gc (1-1273)(L18F_T20N_P26S_D138Y_R190S_K417T_E484K_N501Y_D614G_H655Y _T1027I)
aggagagucccgcagucggcguccagcggcucugcuuguucgugugugugucguugcaggccuuauucaagcuuaccauguucguguuccugguccuccugccccuggugagcucccagugcgugaacuucaccaaccgcacgcagcugccgagcgccuacaccaacagcuucacccggggcgucuacuaccccgacaagguguuccgcuccagcgugcugcacuccacccaggaccucuuccugcccuucuucagcaacgucacgugguuccacgccauccacguguccgggaccaacggcaccaagcgguucgacaacccggugcugcccuucaacgacggggucuacuucgcgagcaccgagaaguccaacaucauccgcggcuggaucuucgggacgacccucgacagcaagacccagucccugcugaucgugaacaacgccaccaacguggucaucaaggugugcgaguuccaguucugcaacuaccccuuccucggcguguacuaccacaagaacaacaagagcuggauggaguccgaguuccgggucuacagcuccgccaacaacugcacguucgaguacgugagccagcccuuccugauggaccuggagggcaagcaggggaacuucaagaaccucagcgaguucguguucaagaacaucgacggcuacuucaagaucuacuccaagcacaccccgaucaaccugguccgggaccugccccagggguucagcgcccucgagccccugguggaccugcccaucggcaucaacaucacccgcuuccagacccuccuggcccugcaccgguccuaccucacgccgggggacagcagcuccggcuggaccgcgggcgccgccgccuacuacgugggguaccugcagccccgcaccuuccugcucaaguacaacgagaacggcaccaucacggacgcggucgacugcgcccuggacccccugagcgagaccaagugcacccucaaguccuucaccguggagaaggggaucuaccagacgagcaacuuccgggugcagcccaccgaguccaucguccgcuucccgaacaucaccaaccugugccccuucggcgagguguucaacgccacccgguucgccagcgucuacgccuggaaccgcaagcggaucuccaacugcguggcggacuacagcgugcuguacaacuccgccagcuucuccacguucaagugcuacggcgucagccccaccaagcucaacgaccugugcuucaccaacguguacgccgacuccuucgugauccgcggggacgagguccggcagaucgcccccggccagaccgggaccaucgccgacuacaacuacaagcugccggacgacuucacgggcugcgugaucgcguggaacagcaacaaccucgacuccaaggucgggggcaacuacaacuaccuguaccgccuguuccgcaagagcaaccucaagcccuucgagcgggacaucuccaccgagaucuaccaggccggcagcacccccugcaacggggugaagggcuucaacugcuacuucccccugcaguccuacggguuccagccgaccuacggcgugggguaccagcccuaccggguggucgugcugagcuucgagcuccugcacgcccccgccacggugugcggccccaagaaguccaccaaccuggucaagaacaagugcgugaacuucaacuucaacggccucaccgggaccggcgugcugaccgagagcaacaagaaguuccugccguuccagcaguucgggcgcgacaucgccgacacgaccgacgcgguccgcgacccccagacccuggagauccucgacaucacccccugcagcuucggcgggguguccgugaucacgccgggcaccaacaccagcaaccaggucgccgugcuguaccagggcgugaacugcaccgagguccccguggccauccacgccgaccagcugacgcccaccuggcggguguacuccaccggcagcaacgucuuccagacccgcgccgggugccucaucggcgcggaguacgugaacaacuccuacgagugcgacauccccaucggggccggcaucugcgccagcuaccagacgcagaccaacuccccgcggcgcgcccggagcguggcgucccagagcaucaucgccuacaccaugucccugggcgccgagaacagcgucgccuacuccaacaacagcaucgccauccccaccaacuucacgaucuccgugaccaccgagauccugcccgugagcaugaccaagacgagcgucgacugcaccauguacaucugcggggacuccaccgagugcagcaaccuccugcugcaguacggcuccuucugcacccagcucaaccgcgcgcugacggggaucgccguggagcaggacaagaacacccaggagguguucgcccaggucaagcagaucuacaagacgcccccgaucaaggacuucggcggguucaacuucagccagauccugcccgaccccuccaagcccagcaagcgguccuucaucgaggaccuccuguucaacaaggugacccuggccgacgccggcuucaucaagcaguacggcgacugccucggggacaucgcggcccgcgaccugaucugcgcccagaaguucaacggccugaccgugcucccgccccugcugaccgacgagaugaucgcccaguacaccagcgcccuccuggcggggaccaucacguccggcuggaccuucggggccggcgccgcccugcagauccccuucgcgaugcagauggccuaccgguucaacggcaucggggucacccagaacgugcucuacgagaaccagaagcugaucgccaaccaguucaacagcgccaucggcaagauccaggacucccugagcuccaccgccagcgcgcucgggaagcugcaggacguggucaaccagaacgcccaggcccugaacacgcucgugaagcagcuguccagcaacuucggcgccaucuccagcgugcugaacgacauccucucccgccuggacaaggucgaggccgaggugcagaucgaccggcugaucaccgggcgccuccagagccugcagaccuacgugacccagcagcugauccgggcggccgagauccgcgccagcgccaaccucgccgcgaucaagauguccgagugcguccugggccagagcaagcggguggacuucugcggcaagggguaccaccugauguccuucccccagagcgccccgcacggcguggucuuccuccacgugacguacguccccgcccaggagaagaacuucaccaccgcccccgcgaucugccacgacgggaaggcccacuucccccgcgagggcguguucguguccaacgggacccacugguucgucacgcagcggaacuucuacgagccgcagaucaucaccaccgacaacaccuucgugagcggcaacugcgacguggucaucggcaucgugaacaacacgguguacgacccccugcagcccgagcuggacuccuucaaggaggagcucgacaaguacuucaagaaccacaccagccccgacgucgaccugggggacaucuccggcaucaacgccagcguggugaacauccagaaggagaucgaccgccugaacgaggucgccaagaaccucaacgagucccugaucgaccugcaggagcucgggaaguacgagcaguacaucaaguggccgugguacaucuggcugggcuucaucgccggccugaucgcgaucgugauggugaccaucaugcucugcugcaugaccagcugcugcuccugccugaaggggugcugcagcugcggcuccugcugcaaguucgacgaggacgacagcgagcccguccugaagggggugaagcuccacuacacgugaggacuagucccuguucccagagcccacuuuuuuuucuuuuuuugaaauaaaauagccugucuuucagaucuaaaaaaaaaaaaaaaaaaaaaaaaaaaaaaaaaaaaaaaaaaaaaaaaaaaaaaaaaaaaaaaaaaaaaaaaaaaaaaaaaaaaaaaaaaaaaaaaaaaa

SEQ ID NO: 24746 - RNA, 4070 nt, Artificial Sequence
  SARS-CoV-2/Wuhan/WIV05/2019__EPI_ISL_402128 spike protein mRNA gc (1-1273)(S13I_W152C_L452R_D614G)
aggagagucccgcagucggcguccagcggcucugcuuguucgugugugugucguugcaggccuuauucaagcuuaccauguucguguuccugguccuccugccccuggugagcauccagugcgugaaccucaccacccgcacgcagcugccgcccgccuacaccaacagcuucacccggggcgucuacuaccccgacaagguguuccgcuccagcgugcugcacuccacccaggaccucuuccugcccuucuucagcaacgucacgugguuccacgccauccacguguccgggaccaacggcaccaagcgguucgacaacccggugcugcccuucaacgacggggucuacuucgcgagcaccgagaaguccaacaucauccgcggcuggaucuucgggacgacccucgacagcaagacccagucccugcugaucgugaacaacgccaccaacguggucaucaaggugugcgaguuccaguucugcaacgaccccuuccucggcguguacuaccacaagaacaacaagagcugcauggaguccgaguuccgggucuacagcuccgccaacaacugcacguucgaguacgugagccagcccuuccugauggaccuggagggcaagcaggggaacuucaagaaccuccgcgaguucguguucaagaacaucgacggcuacuucaagaucuacuccaagcacaccccgaucaaccugguccgggaccugccccagggguucagcgcccucgagccccugguggaccugcccaucggcaucaacaucacccgcuuccagacccuccuggcccugcaccgguccuaccucacgccgggggacagcagcuccggcuggaccgcgggcgccgccgccuacuacgugggguaccugcagccccgcaccuuccugcucaaguacaacgagaacggcaccaucacggacgcggucgacugcgcccuggacccccugagcgagaccaagugcacccucaaguccuucaccguggagaaggggaucuaccagacgagcaacuuccgggugcagcccaccgaguccaucguccgcuucccgaacaucaccaaccugugccccuucggcgagguguucaacgccacccgguucgccagcgucuacgccuggaaccgcaagcggaucuccaacugcguggcggacuacagcgugcuguacaacuccgccagcuucuccacguucaagugcuacggcgucagccccaccaagcucaacgaccugugcuucaccaacguguacgccgacuccuucgugauccgcggggacgagguccggcagaucgcccccggccagaccgggaagaucgccgacuacaacuacaagcugccggacgacuucacgggcugcgugaucgcguggaacagcaacaaccucgacuccaaggucgggggcaacuacaacuaccgcuaccgccuguuccgcaagagcaaccucaagcccuucgagcgggacaucuccaccgagaucuaccaggccggcagcacccccugcaacgggguggagggcuucaacugcuacuucccccugcaguccuacggguuccagccgaccaacggcgugggguaccagcccuaccggguggucgugcugagcuucgagcuccugcacgcccccgccacggugugcggccccaagaaguccaccaaccuggucaagaacaagugcgugaacuucaacuucaacggccucaccgggaccggcgugcugaccgagagcaacaagaaguuccugccguuccagcaguucgggcgcgacaucgccgacacgaccgacgcgguccgcgacccccagacccuggagauccucgacaucacccccugcagcuucggcgggguguccgugaucacgccgggcaccaacaccagcaaccaggucgccgugcuguaccagggcgugaacugcaccgagguccccguggccauccacgccgaccagcugacgcccaccuggcggguguacuccaccggcagcaacgucuuccagacccgcgccgggugccucaucggcgcggagcacgugaacaacuccuacgagugcgacauccccaucggggccggcaucugcgccagcuaccagacgcagaccaacuccccgcggcgcgcccggagcguggcgucccagagcaucaucgccuacaccaugucccugggcgccgagaacagcgucgccuacuccaacaacagcaucgccauccccaccaacuucacgaucuccgugaccaccgagauccugcccgugagcaugaccaagacgagcgucgacugcaccauguacaucugcggggacuccaccgagugcagcaaccuccugcugcaguacggcuccuucugcacccagcucaaccgcgcgcugacggggaucgccguggagcaggacaagaacacccaggagguguucgcccaggucaagcagaucuacaagacgcccccgaucaaggacuucggcggguucaacuucagccagauccugcccgaccccuccaagcccagcaagcgguccuucaucgaggaccuccuguucaacaaggugacccuggccgacgccggcuucaucaagcaguacggcgacugccucggggacaucgcggcccgcgaccugaucugcgcccagaaguucaacggccugaccgugcucccgccccugcugaccgacgagaugaucgcccaguacaccagcgcccuccuggcggggaccaucacguccggcuggaccuucggggccggcgccgcccugcagauccccuucgcgaugcagauggccuaccgguucaacggcaucggggucacccagaacgugcucuacgagaaccagaagcugaucgccaaccaguucaacagcgccaucggcaagauccaggacucccugagcuccaccgccagcgcgcucgggaagcugcaggacguggucaaccagaacgcccaggcccugaacacgcucgugaagcagcuguccagcaacuucggcgccaucuccagcgugcugaacgacauccucucccgccuggacaaggucgaggccgaggugcagaucgaccggcugaucaccgggcgccuccagagccugcagaccuacgugacccagcagcugauccgggcggccgagauccgcgccagcgccaaccucgccgcgaccaagauguccgagugcguccugggccagagcaagcggguggacuucugcggcaagggguaccaccugauguccuucccccagagcgccccgcacggcguggucuuccuccacgugacguacguccccgcccaggagaagaacuucaccaccgcccccgcgaucugccacgacgggaaggcccacuucccccgcgagggcguguucguguccaacgggacccacugguucgucacgcagcggaacuucuacgagccgcagaucaucaccaccgacaacaccuucgugagcggcaacugcgacguggucaucggcaucgugaacaacacgguguacgacccccugcagcccgagcuggacuccuucaaggaggagcucgacaaguacuucaagaaccacaccagccccgacgucgaccugggggacaucuccggcaucaacgccagcguggugaacauccagaaggagaucgaccgccugaacgaggucgccaagaaccucaacgagucccugaucgaccugcaggagcucgggaaguacgagcaguacaucaaguggccgugguacaucuggcugggcuucaucgccggccugaucgcgaucgugauggugaccaucaugcucugcugcaugaccagcugcugcuccugccugaaggggugcugcagcugcggcuccugcugcaaguucgacgaggacgacagcgagcccguccugaagggggugaagcuccacuacacgugaggacuagucccuguucccagagcccacuuuuuuuucuuuuuuugaaauaaaauagccugucuuucagaucuaaaaaaaaaaaaaaaaaaaaaaaaaaaaaaaaaaaaaaaaaaaaaaaaaaaaaaaaaaaaaaaaaaaaaaaaaaaaaaaaaaaaaaaaaaaaaaaaaaaa

SEQ ID NO: 24747 - RNA, 4070 nt, Artificial Sequence; identical to SEQ ID NO: 24729
  SARS-CoV-2/Wuhan/WIV05/2019__EPI_ISL_402128 spike protein mRNA gc (1-1273)

SEQ ID NO: 24748 - RNA, 4070 nt, Artificial Sequence
  SARS-CoV-2/Wuhan/WIV05/2019__EPI_ISL_402128 spike protein mRNA gc (1-1273)(D614G)
aggagagucccgcagucggcguccagcggcucugcuuguucgugugugugucguugcaggccuuauucaagcuuaccauguucguguuccugguccuccugccccuggugagcucccagugcgugaaccucaccacccgcacgcagcugccgcccgccuacaccaacagcuucacccggggcgucuacuaccccgacaagguguuccgcuccagcgugcugcacuccacccaggaccucuuccugcccuucuucagcaacgucacgugguuccacgccauccacguguccgggaccaacggcaccaagcgguucgacaacccggugcugcccuucaacgacggggucuacuucgcgagcaccgagaaguccaacaucauccgcggcuggaucuucgggacgacccucgacagcaagacccagucccugcugaucgugaacaacgccaccaacguggucaucaaggugugcgaguuccaguucugcaacgaccccuuccucggcguguacuaccacaagaacaacaagagcuggauggaguccgaguuccgggucuacagcuccgccaacaacugcacguucgaguacgugagccagcccuuccugauggaccuggagggcaagcaggggaacuucaagaaccuccgcgaguucguguucaagaacaucgacggcuacuucaagaucuacuccaagcacaccccgaucaaccugguccgggaccugccccagggguucagcgcccucgagccccugguggaccugcccaucggcaucaacaucacccgcuuccagacccuccuggcccugcaccgguccuaccucacgccgggggacagcagcuccggcuggaccgcgggcgccgccgccuacuacgugggguaccugcagccccgcaccuuccugcucaaguacaacgagaacggcaccaucacggacgcggucgacugcgcccuggacccccugagcgagaccaagugcacccucaaguccuucaccguggagaaggggaucuaccagacgagcaacuuccgggugcagcccaccgaguccaucguccgcuucccgaacaucaccaaccugugccccuucggcgagguguucaacgccacccgguucgccagcgucuacgccuggaaccgcaagcggaucuccaacugcguggcggacuacagcgugcuguacaacuccgccagcuucuccacguucaagugcuacggcgucagccccaccaagcucaacgaccugugcuucaccaacguguacgccgacuccuucgugauccgcggggacgagguccggcagaucgcccccggccagaccgggaagaucgccgacuacaacuacaagcugccggacgacuucacgggcugcgugaucgcguggaacagcaacaaccucgacuccaaggucgggggcaacuacaacuaccuguaccgccuguuccgcaagagcaaccucaagcccuucgagcgggacaucuccaccgagaucuaccaggccggcagcacccccugcaacgggguggagggcuucaacugcuacuucccccugcaguccuacggguuccagccgaccaacggcgugggguaccagcccuaccggguggucgugcugagcuucgagcuccugcacgcccccgccacggugugcggccccaagaaguccaccaaccuggucaagaacaagugcgugaacuucaacuucaacggccucaccgggaccggcgugcugaccgagagcaacaagaaguuccugccguuccagcaguucgggcgcgacaucgccgacacgaccgacgcgguccgcgacccccagacccuggagauccucgacaucacccccugcagcuucggcgggguguccgugaucacgccgggcaccaacaccagcaaccaggucgccgugcuguaccagggcgugaacugcaccgagguccccguggccauccacgccgaccagcugacgcccaccuggcggguguacuccaccgggagcaacgucuuccagacccgcgccggcugccucaucggggcggagcacgugaacaacuccuacgagugcgacauccccaucggcgccggcaucugcgccagcuaccagacgcagaccaacuccccgcggcgcgcccggagcguggcgucccagagcaucaucgccuacaccaugucccugggggccgagaacagcgucgccuacuccaacaacagcaucgccauccccaccaacuucacgaucuccgugaccaccgagauccugcccgugagcaugaccaagacgagcgucgacugcaccauguacaucugcggcgacuccaccgagugcagcaaccuccugcugcaguacggguccuucugcacccagcucaaccgcgcgcugacgggcaucgccguggagcaggacaagaacacccaggagguguucgcccaggucaagcagaucuacaagacgcccccgaucaaggacuucgggggcuucaacuucagccagauccugcccgaccccuccaagcccagcaagcgguccuucaucgaggaccuccuguucaacaaggugacccuggccgacgccggcuucaucaagcaguacggggacugccucggcgacaucgcggcccgcgaccugaucugcgcccagaaguucaacgggcugaccgugcucccgccccugcugaccgacgagaugaucgcccaguacaccagcgcccuccuggcgggcaccaucacguccggguggaccuucggcgccggcgccgcccugcagauccccuucgcgaugcagauggccuaccgguucaacgggaucggcgucacccagaacgugcucuacgagaaccagaagcugaucgccaaccaguucaacagcgccaucgggaagauccaggacucccugagcuccaccgccagcgcgcucggcaagcugcaggacguggucaaccagaacgcccaggcccugaacacgcucgugaagcagcuguccagcaacuucggggccaucuccagcgugcugaacgacauccucucccgccuggacaaggucgaggccgaggugcagaucgaccggcugaucaccggccgccuccagagccugcagaccuacgugacccagcagcugauccgggcggccgagauccgcgccagcgccaaccucgccgcgaccaagauguccgagugcguccugggccagagcaagcggguggacuucugcgggaagggcuaccaccugauguccuucccccagagcgccccgcacgggguggucuuccuccacgugacguacguccccgcccaggagaagaacuucaccaccgcccccgcgaucugccacgacggcaaggcccacuucccccgcgaggggguguucguguccaacggcacccacugguucgucacgcagcggaacuucuacgagccgcagaucaucaccaccgacaacaccuucgugagcggcaacugcgacguggucaucgggaucgugaacaacacgguguacgacccccugcagcccgagcuggacuccuucaaggaggagcucgacaaguacuucaagaaccacaccagccccgacgucgaccugggcgacaucuccgggaucaacgccagcguggugaacauccagaaggagaucgaccgccugaacgaggucgccaagaaccucaacgagucccugaucgaccugcaggagcucggcaaguacgagcaguacaucaaguggccgugguacaucuggcugggcuucaucgccgggcugaucgcgaucgugauggugaccaucaugcucugcugcaugaccagcugcugcuccugccugaagggcugcugcagcugcggguccugcugcaaguucgacgaggacgacagcgagcccguccugaagggcgugaagcuccacuacacgugaggacuagucccuguucccagagcccacuuuuuuuucuuuuuuugaaauaaaauagccugucuuucagaucuaaaaaaaaaaaaaaaaaaaaaaaaaaaaaaaaaaaaaaaaaaaaaaaaaaaaaaaaaaaaaaaaaaaaaaaaaaaaaaaaaaaaaaaaaaaaaaaaaaaa

SEQ ID NO: 24749 - RNA, 4070 nt, Artificial Sequence
  SARS-CoV-2/Wuhan/WIV05/2019__EPI_ISL_402128 spike protein mRNA gc (1-1273)(A222V_D614G)
aggagagucccgcagucggcguccagcggcucugcuuguucgugugugugucguugcaggccuuauucaagcuuaccauguucguguuccugguccuccugccccuggugagcucccagugcgugaaccucaccacccgcacgcagcugccgcccgccuacaccaacagcuucacccggggcgucuacuaccccgacaagguguuccgcuccagcgugcugcacuccacccaggaccucuuccugcccuucuucagcaacgucacgugguuccacgccauccacguguccgggaccaacggcaccaagcgguucgacaacccggugcugcccuucaacgacggggucuacuucgcgagcaccgagaaguccaacaucauccgcggcuggaucuucgggacgacccucgacagcaagacccagucccugcugaucgugaacaacgccaccaacguggucaucaaggugugcgaguuccaguucugcaacgaccccuuccucggcguguacuaccacaagaacaacaagagcuggauggaguccgaguuccgggucuacagcuccgccaacaacugcacguucgaguacgugagccagcccuuccugauggaccuggagggcaagcaggggaacuucaagaaccuccgcgaguucguguucaagaacaucgacggcuacuucaagaucuacuccaagcacaccccgaucaaccugguccgggaccugccccagggguucagcgugcucgagccccugguggaccugcccaucggcaucaacaucacccgcuuccagacccuccuggcccugcaccgguccuaccucacgccgggggacagcagcuccggcuggaccgccggcgcggccgccuacuacgucggguaccugcagccccgcaccuuccugcucaaguacaacgagaacggcaccaucacggacgccguggacugcgcgcuggacccccugagcgagaccaagugcacccucaaguccuucaccguggagaaggggaucuaccagacgagcaacuuccggguccagcccaccgaguccaucgugcgcuucccgaacaucaccaaccugugccccuucggcgaggucuucaacgccacccgguucgccagcguguacgccuggaaccgcaagcggaucuccaacugcguggccgacuacagcguccuguacaacuccgcgagcuucuccacguucaagugcuacggcgugagccccaccaagcucaacgaccugugcuucaccaacguguacgccgacuccuucgucauccgcggggacgaggugcggcagaucgcccccggccagaccgggaagaucgccgacuacaacuacaagcugccggacgacuucacgggcugcgugaucgccuggaacagcaacaaccucgacuccaaggucgggggcaacuacaacuaccuguaccgccuguuccgcaagagcaaccucaagcccuucgagcgggacaucuccaccgagaucuaccaggcgggcagcacccccugcaacgggguggagggcuucaacugcuacuucccccugcaguccuacggguuccagccgaccaacggcgugggguaccagcccuaccgggucguggugcugagcuucgagcuccugcacgcccccgccacggucugcggccccaagaaguccaccaaccuggugaagaacaagugcgugaacuucaacuucaacggccucaccgggaccggcguccugaccgagagcaacaagaaguuccugccguuccagcaguucgggcgcgacaucgccgacacgaccgacgccgugcgcgacccccagacccuggagauccucgacaucacccccugcagcuucggcgggguguccgucaucacgccgggcaccaacaccagcaaccagguggcggugcuguaccagggcgucaacugcaccgaggugcccguggccauccacgccgaccagcugacgcccaccuggcgggucuacuccaccgggagcaacguguuccagacccgcgccggcugccucaucggggccgagcacgugaacaacuccuacgagugcgacauccccaucggcgcgggcaucugcgccagcuaccagacgcagaccaacuccccgcggcgcgcccggagcgucgccucccagagcaucaucgcguacaccaugucccugggggccgagaacagcguggccuacuccaacaacagcaucgccauccccaccaacuucacgaucuccgugaccaccgagauccugcccgucagcaugaccaagacgagcguggacugcaccauguacaucugcggcgacuccaccgagugcagcaaccuccugcugcaguacggguccuucugcacccagcucaaccgcgcccugacgggcaucgcgguggagcaggacaagaacacccaggaggucuucgcccaggugaagcagaucuacaagacgcccccgaucaaggacuucgggggcuucaacuucagccagauccugcccgaccccuccaagcccagcaagcgguccuucaucgaggaccuccuguucaacaaggugacccuggccgacgccggcuucaucaagcaguacggggacugccucggcgacaucgccgcgcgcgaccugaucugcgcccagaaguucaacgggcugaccguccucccgccccugcugaccgacgagaugaucgcccaguacaccagcgcccuccuggccggcaccaucacguccggguggaccuucggcgcgggcgccgcccugcagauccccuucgccaugcagauggcguaccgguucaacgggaucggcgugacccagaacgugcucuacgagaaccagaagcugaucgccaaccaguucaacagcgccaucgggaagauccaggacucccugagcuccaccgccagcgcccucggcaagcugcaggacgucgugaaccagaacgcgcaggcccugaacacgcucgugaagcagcuguccagcaacuucggggccaucuccagcguccugaacgacauccucucccgccuggacaagguggaggccgaggugcagaucgaccggcugaucaccggccgccuccagagccugcagaccuacgucacccagcagcugauccgggccgcggagauccgcgccagcgccaaccucgccgccaccaagauguccgagugcgugcugggccagagcaagcggguggacuucugcgggaagggcuaccaccugauguccuucccccagagcgcgccgcacggggucguguuccuccacgucacguacgugcccgcccaggagaagaacuucaccaccgcccccgccaucugccacgacggcaaggcgcacuucccccgcgaggggguguucgucuccaacggcacccacugguucgugacgcagcggaacuucuacgagccgcagaucaucaccaccgacaacaccuucgugagcggcaacugcgacgucgugaucgggaucgugaacaacacggucuacgacccccugcagcccgagcuggacuccuucaaggaggagcucgacaaguacuucaagaaccacaccagccccgacguggaccugggcgacaucuccgggaucaacgccagcguggucaacauccagaaggagaucgaccgccugaacgagguggccaagaaccucaacgagucccugaucgaccugcaggagcucggcaaguacgagcaguacaucaaguggccgugguacaucuggcugggcuucaucgccgggcugaucgccaucgugauggucaccaucaugcucugcugcaugaccagcugcugcuccugccugaagggcugcugcagcugcggguccugcugcaaguucgacgaggacgacagcgagcccgugcugaagggcgugaagcuccacuacacgugaggacuagucccuguucccagagcccacuuuuuuuucuuuuuuugaaauaaaauagccugucuuucagaucuaaaaaaaaaaaaaaaaaaaaaaaaaaaaaaaaaaaaaaaaaaaaaaaaaaaaaaaaaaaaaaaaaaaaaaaaaaaaaaaaaaaaaaaaaaaaaaaaaaaa

SEQ ID NO: 24750 - RNA, 4070 nt, Artificial Sequence
  SARS-CoV-2/Wuhan/WIV05/2019__EPI_ISL_402128 spike protein mRNA gc (1-1273)(N439K_D614G)
aggagagucccgcagucggcguccagcggcucugcuuguucgugugugugucguugcaggccuuauucaagcuuaccauguucguguuccugguccuccugccccuggugagcucccagugcgugaaccucaccacccgcacgcagcugccgcccgccuacaccaacagcuucacccggggcgucuacuaccccgacaagguguuccgcuccagcgugcugcacuccacccaggaccucuuccugcccuucuucagcaacgucacgugguuccacgccauccacguguccgggaccaacggcaccaagcgguucgacaacccggugcugcccuucaacgacggggucuacuucgcgagcaccgagaaguccaacaucauccgcggcuggaucuucgggacgacccucgacagcaagacccagucccugcugaucgugaacaacgccaccaacguggucaucaaggugugcgaguuccaguucugcaacgaccccuuccucggcguguacuaccacaagaacaacaagagcuggauggaguccgaguuccgggucuacagcuccgccaacaacugcacguucgaguacgugagccagcccuuccugauggaccuggagggcaagcaggggaacuucaagaaccuccgcgaguucguguucaagaacaucgacggcuacuucaagaucuacuccaagcacaccccgaucaaccugguccgggaccugccccagggguucagcgcccucgagccccugguggaccugcccaucggcaucaacaucacccgcuuccagacccuccuggcccugcaccgguccuaccucacgccgggggacagcagcuccggcuggaccgcgggcgccgccgccuacuacgugggguaccugcagccccgcaccuuccugcucaaguacaacgagaacggcaccaucacggacgcggucgacugcgcccuggacccccugagcgagaccaagugcacccucaaguccuucaccguggagaaggggaucuaccagacgagcaacuuccgggugcagcccaccgaguccaucguccgcuucccgaacaucaccaaccugugccccuucggcgagguguucaacgccacccgguucgccagcgucuacgccuggaaccgcaagcggaucuccaacugcguggcggacuacagcgugcuguacaacuccgccagcuucuccacguucaagugcuacggcgucagccccaccaagcucaacgaccugugcuucaccaacguguacgccgacuccuucgugauccgcggggacgagguccggcagaucgcccccggccagaccgggaagaucgccgacuacaacuacaagcugccggacgacuucacgggcugcgugaucgcguggaacagcaagaaccucgacuccaaggucgggggcaacuacaacuaccuguaccgccuguuccgcaagagcaaccucaagcccuucgagcgggacaucuccaccgagaucuaccaggccggcagcacccccugcaacgggguggagggcuucaacugcuacuucccccugcaguccuacggguuccagccgaccaacggcgugggguaccagcccuaccggguggucgugcugagcuucgagcuccugcacgcccccgccacggugugcggccccaagaaguccaccaaccuggucaagaacaagugcgugaacuucaacuucaacggccucaccgggaccggcgugcugaccgagagcaacaagaaguuccugccguuccagcaguucgggcgcgacaucgccgacacgaccgacgcgguccgcgacccccagacccuggagauccucgacaucacccccugcagcuucggcgggguguccgugaucacgccgggcaccaacaccagcaaccaggucgccgugcuguaccagggcgugaacugcaccgagguccccguggccauccacgccgaccagcugacgcccaccuggcggguguacuccaccgggagcaacgucuuccagacccgcgccggcugccucaucggggcggagcacgugaacaacuccuacgagugcgacauccccaucggcgccggcaucugcgccagcuaccagacgcagaccaacuccccgcggcgcgcccggagcguggcgucccagagcaucaucgccuacaccaugucccugggggccgagaacagcgucgccuacuccaacaacagcaucgccauccccaccaacuucacgaucuccgugaccaccgagauccugcccgugagcaugaccaagacgagcgucgacugcaccauguacaucugcggcgacuccaccgagugcagcaaccuccugcugcaguacggguccuucugcacccagcucaaccgcgcgcugacgggcaucgccguggagcaggacaagaacacccaggagguguucgcccaggucaagcagaucuacaagacgcccccgaucaaggacuucgggggcuucaacuucagccagauccugcccgaccccuccaagcccagcaagcgguccuucaucgaggaccuccuguucaacaaggugacccuggccgacgccggcuucaucaagcaguacggggacugccucggcgacaucgcggcccgcgaccugaucugcgcccagaaguucaacgggcugaccgugcucccgccccugcugaccgacgagaugaucgcccaguacaccagcgcccuccuggcgggcaccaucacguccggguggaccuucggcgccggcgccgcccugcagauccccuucgcgaugcagauggccuaccgguucaacgggaucggcgucacccagaacgugcucuacgagaaccagaagcugaucgccaaccaguucaacagcgccaucgggaagauccaggacucccugagcuccaccgccagcgcgcucggcaagcugcaggacguggucaaccagaacgcccaggcccugaacacgcucgugaagcagcuguccagcaacuucggggccaucuccagcgugcugaacgacauccucucccgccuggacaaggucgaggccgaggugcagaucgaccggcugaucaccggccgccuccagagccugcagaccuacgugacccagcagcugauccgggcggccgagauccgcgccagcgccaaccucgccgcgaccaagauguccgagugcguccugggccagagcaagcggguggacuucugcgggaagggcuaccaccugauguccuucccccagagcgccccgcacgggguggucuuccuccacgugacguacguccccgcccaggagaagaacuucaccaccgcccccgcgaucugccacgacggcaaggcccacuucccccgcgaggggguguucguguccaacggcacccacugguucgucacgcagcggaacuucuacgagccgcagaucaucaccaccgacaacaccuucgugagcggcaacugcgacguggucaucgggaucgugaacaacacgguguacgacccccugcagcccgagcuggacuccuucaaggaggagcucgacaaguacuucaagaaccacaccagccccgacgucgaccugggcgacaucuccgggaucaacgccagcguggugaacauccagaaggagaucgaccgccugaacgaggucgccaagaaccucaacgagucccugaucgaccugcaggagcucggcaaguacgagcaguacaucaaguggccgugguacaucuggcugggcuucaucgccgggcugaucgcgaucgugauggugaccaucaugcucugcugcaugaccagcugcugcuccugccugaagggcugcugcagcugcggguccugcugcaaguucgacgaggacgacagcgagcccguccugaagggcgugaagcuccacuacacgugaggacuagucccuguucccagagcccacuuuuuuuucuuuuuuugaaauaaaauagccugucuuucagaucuaaaaaaaaaaaaaaaaaaaaaaaaaaaaaaaaaaaaaaaaaaaaaaaaaaaaaaaaaaaaaaaaaaaaaaaaaaaaaaaaaaaaaaaaaaaaaaaaaaaa

SEQ ID NO: 24751 - RNA, 4070 nt, Artificial Sequence
  SARS-CoV-2/Wuhan/WIV05/2019__EPI_ISL_402128 spike protein mRNA gc (1-1273)(S477N_D614G)
aggagagucccgcagucggcguccagcggcucugcuuguucgugugugugucguugcaggccuuauucaagcuuaccauguucguguuccugguccuccugccccuggugagcucccagugcgugaaccucaccacccgcacgcagcugccgcccgccuacaccaacagcuucacccggggcgucuacuaccccgacaagguguuccgcuccagcgugcugcacuccacccaggaccucuuccugcccuucuucagcaacgucacgugguuccacgccauccacguguccgggaccaacggcaccaagcgguucgacaacccggugcugcccuucaacgacggggucuacuucgcgagcaccgagaaguccaacaucauccgcggcuggaucuucgggacgacccucgacagcaagacccagucccugcugaucgugaacaacgccaccaacguggucaucaaggugugcgaguuccaguucugcaacgaccccuuccucggcguguacuaccacaagaacaacaagagcuggauggaguccgaguuccgggucuacagcuccgccaacaacugcacguucgaguacgugagccagcccuuccugauggaccuggagggcaagcaggggaacuucaagaaccuccgcgaguucguguucaagaacaucgacggcuacuucaagaucuacuccaagcacaccccgaucaaccugguccgggaccugccccagggguucagcgcccucgagccccugguggaccugcccaucggcaucaacaucacccgcuuccagacccuccuggcccugcaccgguccuaccucacgccgggggacagcagcuccggcuggaccgcgggcgccgccgccuacuacgugggguaccugcagccccgcaccuuccugcucaaguacaacgagaacggcaccaucacggacgcggucgacugcgcccuggacccccugagcgagaccaagugcacccucaaguccuucaccguggagaaggggaucuaccagacgagcaacuuccgggugcagcccaccgaguccaucguccgcuucccgaacaucaccaaccugugccccuucggcgagguguucaacgccacccgguucgccagcgucuacgccuggaaccgcaagcggaucuccaacugcguggcggacuacagcgugcuguacaacuccgccagcuucuccacguucaagugcuacggcgucagccccaccaagcucaacgaccugugcuucaccaacguguacgccgacuccuucgugauccgcggggacgagguccggcagaucgcccccggccagaccgggaagaucgccgacuacaacuacaagcugccggacgacuucacgggcugcgugaucgcguggaacagcaacaaccucgacuccaaggucgggggcaacuacaacuaccuguaccgccuguuccgcaagagcaaccucaagcccuucgagcgggacaucuccaccgagaucuaccaggccggcaacacccccugcaacgggguggagggcuucaacugcuacuucccccugcagagcuacggguuccagccgaccaacggcgugggguaccagcccuaccggguggucgugcuguccuucgagcuccugcacgcccccgccacggugugcggccccaagaaguccaccaaccuggucaagaacaagugcgugaacuucaacuucaacggccucaccgggaccggcgugcugaccgagagcaacaagaaguuccugccguuccagcaguucgggcgcgacaucgccgacacgaccgacgcgguccgcgacccccagacccuggagauccucgacaucacccccugcagcuucggcggggugagcgugaucacgccgggcaccaacaccuccaaccaggucgccgugcuguaccagggcgugaacugcaccgagguccccguggccauccacgccgaccagcugacgcccaccuggcggguguacagcaccggguccaacgucuuccagacccgcgccggcugccucaucggggcggagcacgugaacaacagcuacgagugcgacauccccaucggcgccggcaucugcgccuccuaccagacgcagaccaacagcccgcggcgcgcccgguccguggcgagccaguccaucaucgccuacaccaugagccugggggccgagaacuccgucgccuacagcaacaacuccaucgccauccccaccaacuucacgaucagcgugaccaccgagauccugcccguguccaugaccaagacgagcgucgacugcaccauguacaucugcggcgacagcaccgagugcuccaaccuccugcugcaguacgggagcuucugcacccagcucaaccgcgcgcugacgggcaucgccguggagcaggacaagaacacccaggagguguucgcccaggucaagcagaucuacaagacgcccccgaucaaggacuucgggggcuucaacuucucccagauccugcccgaccccagcaagcccuccaagcggagcuucaucgaggaccuccuguucaacaaggugacccuggccgacgccggcuucaucaagcaguacggggacugccucggcgacaucgcggcccgcgaccugaucugcgcccagaaguucaacgggcugaccgugcucccgccccugcugaccgacgagaugaucgcccaguacaccuccgcccuccuggcgggcaccaucacgagcggguggaccuucggcgccggcgccgcccugcagauccccuucgcgaugcagauggccuaccgguucaacgggaucggcgucacccagaacgugcucuacgagaaccagaagcugaucgccaaccaguucaacuccgccaucgggaagauccaggacagccuguccagcaccgccuccgcgcucggcaagcugcaggacguggucaaccagaacgcccaggcccugaacacgcucgugaagcagcugagcuccaacuucggggccaucagcuccgugcugaacgacauccucagccgccuggacaaggucgaggccgaggugcagaucgaccggcugaucaccggccgccuccagucccugcagaccuacgugacccagcagcugauccgggcggccgagauccgcgccagcgccaaccucgccgcgaccaagaugagcgagugcguccugggccaguccaagcggguggacuucugcgggaagggcuaccaccugaugagcuucccccaguccgccccgcacgggguggucuuccuccacgugacguacguccccgcccaggagaagaacuucaccaccgcccccgcgaucugccacgacggcaaggcccacuucccccgcgaggggguguucgugagcaacggcacccacugguucgucacgcagcggaacuucuacgagccgcagaucaucaccaccgacaacaccuucguguccggcaacugcgacguggucaucgggaucgugaacaacacgguguacgacccccugcagcccgagcuggacagcuucaaggaggagcucgacaaguacuucaagaaccacaccucccccgacgucgaccugggcgacaucagcgggaucaacgccuccguggugaacauccagaaggagaucgaccgccugaacgaggucgccaagaaccucaacgagagccugaucgaccugcaggagcucggcaaguacgagcaguacaucaaguggccgugguacaucuggcugggcuucaucgccgggcugaucgcgaucgugauggugaccaucaugcucugcugcaugaccuccugcugcagcugccugaagggcugcugcuccugcgggagcugcugcaaguucgacgaggacgacuccgagcccguccugaagggcgugaagcuccacuacacgugaggacuagucccuguucccagagcccacuuuuuuuucuuuuuuugaaauaaaauagccugucuuucagaucuaaaaaaaaaaaaaaaaaaaaaaaaaaaaaaaaaaaaaaaaaaaaaaaaaaaaaaaaaaaaaaaaaaaaaaaaaaaaaaaaaaaaaaaaaaaaaaaaaaaa

SEQ ID NO: 24752 - RNA, 4070 nt, Artificial Sequence
  SARS-CoV-2/Wuhan/WIV05/2019__EPI_ISL_402128 spike protein mRNA gc (1-1273)(N501Y_D614G)
aggagagucccgcagucggcguccagcggcucugcuuguucgugugugugucguugcaggccuuauucaagcuuaccauguucguguuccugguccuccugccccuggugagcucccagugcgugaaccucaccacccgcacgcagcugccgcccgccuacaccaacagcuucacccggggcgucuacuaccccgacaagguguuccgcuccagcgugcugcacuccacccaggaccucuuccugcccuucuucagcaacgucacgugguuccacgccauccacguguccgggaccaacggcaccaagcgguucgacaacccggugcugcccuucaacgacggggucuacuucgcgagcaccgagaaguccaacaucauccgcggcuggaucuucgggacgacccucgacagcaagacccagucccugcugaucgugaacaacgccaccaacguggucaucaaggugugcgaguuccaguucugcaacgaccccuuccucggcguguacuaccacaagaacaacaagagcuggauggaguccgaguuccgggucuacagcuccgccaacaacugcacguucgaguacgugagccagcccuuccugauggaccuggagggcaagcaggggaacuucaagaaccuccgcgaguucguguucaagaacaucgacggcuacuucaagaucuacuccaagcacaccccgaucaaccugguccgggaccugccccagggguucagcgcccucgagccccugguggaccugcccaucggcaucaacaucacccgcuuccagacccuccuggcccugcaccgguccuaccucacgccgggggacagcagcuccggcuggaccgcgggcgccgccgccuacuacgugggguaccugcagccccgcaccuuccugcucaaguacaacgagaacggcaccaucacggacgcggucgacugcgcccuggacccccugagcgagaccaagugcacccucaaguccuucaccguggagaaggggaucuaccagacgagcaacuuccgggugcagcccaccgaguccaucguccgcuucccgaacaucaccaaccugugccccuucggcgagguguucaacgccacccgguucgccagcgucuacgccuggaaccgcaagcggaucuccaacugcguggcggacuacagcgugcuguacaacuccgccagcuucuccacguucaagugcuacggcgucagccccaccaagcucaacgaccugugcuucaccaacguguacgccgacuccuucgugauccgcggggacgagguccggcagaucgcccccggccagaccgggaagaucgccgacuacaacuacaagcugccggacgacuucacgggcugcgugaucgcguggaacagcaacaaccucgacuccaaggucgggggcaacuacaacuaccuguaccgccuguuccgcaagagcaaccucaagcccuucgagcgggacaucuccaccgagaucuaccaggccggcagcacccccugcaacgggguggagggcuucaacugcuacuucccccugcaguccuacggguuccagccgaccuacggcgugggguaccagcccuaccggguggucgugcugagcuucgagcuccugcacgcccccgccacggugugcggccccaagaaguccaccaaccuggucaagaacaagugcgugaacuucaacuucaacggccucaccgggaccggcgugcugaccgagagcaacaagaaguuccugccguuccagcaguucgggcgcgacaucgccgacacgaccgacgcgguccgcgacccccagacccuggagauccucgacaucacccccugcagcuucggcgggguguccgugaucacgccgggcaccaacaccagcaaccaggucgccgugcuguaccagggcgugaacugcaccgagguccccguggccauccacgccgaccagcugacgcccaccuggcggguguacuccaccgggagcaacgucuuccagacccgcgccggcugccucaucggggcggagcacgugaacaacuccuacgagugcgacauccccaucggcgccggcaucugcgccagcuaccagacgcagaccaacuccccgcggcgcgcccggagcguggcgucccagagcaucaucgccuacaccaugucccugggggccgagaacagcgucgccuacuccaacaacagcaucgccauccccaccaacuucacgaucuccgugaccaccgagauccugcccgugagcaugaccaagacgagcgucgacugcaccauguacaucugcggcgacuccaccgagugcagcaaccuccugcugcaguacggguccuucugcacccagcucaaccgcgcgcugacgggcaucgccguggagcaggacaagaacacccaggagguguucgcccaggucaagcagaucuacaagacgcccccgaucaaggacuucgggggcuucaacuucagccagauccugcccgaccccuccaagcccagcaagcgguccuucaucgaggaccuccuguucaacaaggugacccuggccgacgccggcuucaucaagcaguacggggacugccucggcgacaucgcggcccgcgaccugaucugcgcccagaaguucaacgggcugaccgugcucccgccccugcugaccgacgagaugaucgcccaguacaccagcgcccuccuggcgggcaccaucacguccggguggaccuucggcgccggcgccgcccugcagauccccuucgcgaugcagauggccuaccgguucaacgggaucggcgucacccagaacgugcucuacgagaaccagaagcugaucgccaaccaguucaacagcgccaucgggaagauccaggacucccugagcuccaccgccagcgcgcucggcaagcugcaggacguggucaaccagaacgcccaggcccugaacacgcucgugaagcagcuguccagcaacuucggggccaucuccagcgugcugaacgacauccucucccgccuggacaaggucgaggccgaggugcagaucgaccggcugaucaccggccgccuccagagccugcagaccuacgugacccagcagcugauccgggcggccgagauccgcgccagcgccaaccucgccgcgaccaagauguccgagugcguccugggccagagcaagcggguggacuucugcgggaagggcuaccaccugauguccuucccccagagcgccccgcacgggguggucuuccuccacgugacguacguccccgcccaggagaagaacuucaccaccgcccccgcgaucugccacgacggcaaggcccacuucccccgcgaggggguguucguguccaacggcacccacugguucgucacgcagcggaacuucuacgagccgcagaucaucaccaccgacaacaccuucgugagcggcaacugcgacguggucaucgggaucgugaacaacacgguguacgacccccugcagcccgagcuggacuccuucaaggaggagcucgacaaguacuucaagaaccacaccagccccgacgucgaccugggcgacaucuccgggaucaacgccagcguggugaacauccagaaggagaucgaccgccugaacgaggucgccaagaaccucaacgagucccugaucgaccugcaggagcucggcaaguacgagcaguacaucaaguggccgugguacaucuggcugggcuucaucgccgggcugaucgcgaucgugauggugaccaucaugcucugcugcaugaccagcugcugcuccugccugaagggcugcugcagcugcggguccugcugcaaguucgacgaggacgacagcgagcccguccugaagggcgugaagcuccacuacacgugaggacuagucccuguucccagagcccacuuuuuuuucuuuuuuugaaauaaaauagccugucuuucagaucuaaaaaaaaaaaaaaaaaaaaaaaaaaaaaaaaaaaaaaaaaaaaaaaaaaaaaaaaaaaaaaaaaaaaaaaaaaaaaaaaaaaaaaaaaaaaaaaaaaaa

SEQ ID NO: 24753 - RNA, 4064 nt, Artificial Sequence
  SARS-CoV-2/Wuhan/WIV05/2019__EPI_ISL_402128 spike protein mRNA gc (1-1273)(H69del_V70del_D614G)
aggagagucccgcagucggcguccagcggcucugcuuguucgugugugugucguugcaggccuuauucaagcuuaccauguucguguuccugguccuccugccccuggugagcucccagugcgugaaccucaccacccgcacgcagcugccgcccgccuacaccaacagcuucacccggggcgucuacuaccccgacaagguguuccgcuccagcgugcugcacuccacccaggaccucuuccugcccuucuucagcaacgucacgugguuccacgccaucuccgggaccaacggcaccaagcgguucgacaacccggugcugcccuucaacgacgggguguacuucgcgagcaccgagaaguccaacaucauccgcggcuggaucuucgggacgacccucgacagcaagacccagucccugcugaucgucaacaacgccaccaacguggugaucaaggucugcgaguuccaguucugcaacgaccccuuccucggcguguacuaccacaagaacaacaagagcuggauggaguccgaguuccggguguacagcuccgccaacaacugcacguucgaguacgucagccagcccuuccugauggaccuggagggcaagcaggggaacuucaagaaccuccgcgaguucguguucaagaacaucgacggcuacuucaagaucuacuccaagcacaccccgaucaaccuggugcgggaccugccccagggguucagcgcccucgagccccuggucgaccugcccaucggcaucaacaucacccgcuuccagacccuccuggcccugcaccgguccuaccucacgccgggggacagcagcuccggcuggaccgcgggcgccgccgccuacuacgugggguaccugcagccccgcaccuuccugcucaaguacaacgagaacggcaccaucacggacgcgguggacugcgcccuggacccccugagcgagaccaagugcacccucaaguccuucaccgucgagaaggggaucuaccagacgagcaacuuccgggugcagcccaccgaguccaucgugcgcuucccgaacaucaccaaccugugccccuucggcgaggucuucaacgccacccgguucgccagcguguacgccuggaaccgcaagcggaucuccaacugcgucgcggacuacagcgugcuguacaacuccgccagcuucuccacguucaagugcuacggcgugagccccaccaagcucaacgaccugugcuucaccaacgucuacgccgacuccuucgugauccgcggggacgaggugcggcagaucgcccccggccagaccgggaagaucgccgacuacaacuacaagcugccggacgacuucacgggcugcgucaucgcguggaacagcaacaaccucgacuccaaggucgggggcaacuacaacuaccuguaccgccuguuccgcaagagcaaccucaagcccuucgagcgggacaucuccaccgagaucuaccaggccggcagcacccccugcaacgggguggagggcuucaacugcuacuucccccugcaguccuacggguuccagccgaccaacggcgugggguaccagcccuaccggguggugguccugagcuucgagcuccugcacgcccccgccacggugugcggccccaagaaguccaccaaccuggugaagaacaagugcgucaacuucaacuucaacggccucaccgggaccggcgugcugaccgagagcaacaagaaguuccugccguuccagcaguucgggcgcgacaucgccgacacgaccgacgcggugcgcgacccccagacccuggagauccucgacaucacccccugcagcuucggcggggucuccgugaucacgccgggcaccaacaccagcaaccagguggccguccuguaccagggcgugaacugcaccgaggugcccgucgccauccacgccgaccagcugacgcccaccuggcggguguacuccaccgggagcaacguguuccagacccgcgccggcugccucaucggggcggagcacgucaacaacuccuacgagugcgacauccccaucggcgccggcaucugcgccagcuaccagacgcagaccaacuccccgcggcgcgcccggagcguggcgucccagagcaucaucgccuacaccaugucccugggggccgagaacagcguggccuacuccaacaacagcaucgccauccccaccaacuucacgaucuccgucaccaccgagauccugcccgugagcaugaccaagacgagcguggacugcaccauguacaucugcggcgacuccaccgagugcagcaaccuccugcugcaguacggguccuucugcacccagcucaaccgcgcgcugacgggcaucgccgucgagcaggacaagaacacccaggagguguucgcccaggugaagcagaucuacaagacgcccccgaucaaggacuucgggggcuucaacuucagccagauccugcccgaccccuccaagcccagcaagcgguccuucaucgaggaccuccuguucaacaaggucacccuggccgacgccggcuucaucaagcaguacggggacugccucggcgacaucgcggcccgcgaccugaucugcgcccagaaguucaacgggcugaccgugcucccgccccugcugaccgacgagaugaucgcccaguacaccagcgcccuccuggcgggcaccaucacguccggguggaccuucggcgccggcgccgcccugcagauccccuucgcgaugcagauggccuaccgguucaacgggaucggcgugacccagaacguccucuacgagaaccagaagcugaucgccaaccaguucaacagcgccaucgggaagauccaggacucccugagcuccaccgccagcgcgcucggcaagcugcaggacguggugaaccagaacgcccaggcccugaacacgcucgucaagcagcuguccagcaacuucggggccaucuccagcgugcugaacgacauccucucccgccuggacaagguggaggccgagguccagaucgaccggcugaucaccggccgccuccagagccugcagaccuacgugacccagcagcugauccgggcggccgagauccgcgccagcgccaaccucgccgcgaccaagauguccgagugcgugcugggccagagcaagcgggucgacuucugcgggaagggcuaccaccugauguccuucccccagagcgccccgcacggggugguguuccuccacgucacguacgugcccgcccaggagaagaacuucaccaccgcccccgcgaucugccacgacggcaaggcccacuucccccgcgagggggucuucguguccaacggcacccacugguucgugacgcagcggaacuucuacgagccgcagaucaucaccaccgacaacaccuucgucagcggcaacugcgacguggugaucgggaucgucaacaacacgguguacgacccccugcagcccgagcuggacuccuucaaggaggagcucgacaaguacuucaagaaccacaccagccccgacguggaccugggcgacaucuccgggaucaacgccagcgucgugaacauccagaaggagaucgaccgccugaacgagguggccaagaaccucaacgagucccugaucgaccugcaggagcucggcaaguacgagcaguacaucaaguggccgugguacaucuggcugggcuucaucgccgggcugaucgcgaucgucauggugaccaucaugcucugcugcaugaccagcugcugcuccugccugaagggcugcugcagcugcggguccugcugcaaguucgacgaggacgacagcgagcccgugcugaagggcgucaagcuccacuacacgugaggacuagucccuguucccagagcccacuuuuuuuucuuuuuuugaaauaaaauagccugucuuucagaucuaaaaaaaaaaaaaaaaaaaaaaaaaaaaaaaaaaaaaaaaaaaaaaaaaaaaaaaaaaaaaaaaaaaaaaaaaaaaaaaaaaaaaaaaaaaaaaaaaaaa

SEQ ID NO: 24754 - RNA, 4070 nt, Artificial Sequence
  SARS-CoV-2/Wuhan/WIV05/2019__EPI_ISL_402128 spike protein mRNA gc (1-1273)(Y453F_D614G)
aggagagucccgcagucggcguccagcggcucugcuuguucgugugugugucguugcaggccuuauucaagcuuaccauguucguguuccugguccuccugccccuggugagcucccagugcgugaaccucaccacccgcacgcagcugccgcccgccuacaccaacagcuucacccggggcgucuacuaccccgacaagguguuccgcuccagcgugcugcacuccacccaggaccucuuccugcccuucuucagcaacgucacgugguuccacgccauccacguguccgggaccaacggcaccaagcgguucgacaacccggugcugcccuucaacgacggggucuacuucgcgagcaccgagaaguccaacaucauccgcggcuggaucuucgggacgacccucgacagcaagacccagucccugcugaucgugaacaacgccaccaacguggucaucaaggugugcgaguuccaguucugcaacgaccccuuccucggcguguacuaccacaagaacaacaagagcuggauggaguccgaguuccgggucuacagcuccgccaacaacugcacguucgaguacgugagccagcccuuccugauggaccuggagggcaagcaggggaacuucaagaaccuccgcgaguucguguucaagaacaucgacggcuacuucaagaucuacuccaagcacaccccgaucaaccugguccgggaccugccccagggguucagcgcccucgagccccugguggaccugcccaucggcaucaacaucacccgcuuccagacccuccuggcccugcaccgguccuaccucacgccgggggacagcagcuccggcuggaccgcgggcgccgccgccuacuacgugggguaccugcagccccgcaccuuccugcucaaguacaacgagaacggcaccaucacggacgcggucgacugcgcccuggacccccugagcgagaccaagugcacccucaaguccuucaccguggagaaggggaucuaccagacgagcaacuuccgggugcagcccaccgaguccaucguccgcuucccgaacaucaccaaccugugccccuucggcgagguguucaacgccacccgguucgccagcgucuacgccuggaaccgcaagcggaucuccaacugcguggcggacuacagcgugcuguacaacuccgccagcuucuccacguucaagugcuacggcgucagccccaccaagcucaacgaccugugcuucaccaacguguacgccgacuccuucgugauccgcggggacgagguccggcagaucgcccccggccagaccgggaagaucgccgacuacaacuacaagcugccggacgacuucacgggcugcgugaucgcguggaacagcaacaaccucgacuccaaggucgggggcaacuacaacuaccuguuccgccuguuccgcaagagcaaccucaagcccuucgagcgggacaucuccaccgagaucuaccaggccggcagcacccccugcaacgggguggagggcuucaacugcuacuucccccugcaguccuacggguuccagccgaccaacggcgugggguaccagcccuaccggguggucgugcugagcuucgagcuccugcacgcccccgccacggugugcggccccaagaaguccaccaaccuggucaagaacaagugcgugaacuucaacuucaacggccucaccgggaccggcgugcugaccgagagcaacaagaaguuccugccguuccagcaguucgggcgcgacaucgccgacacgaccgacgcgguccgcgacccccagacccuggagauccucgacaucacccccugcagcuucggcgggguguccgugaucacgccgggcaccaacaccagcaaccaggucgccgugcuguaccagggcgugaacugcaccgagguccccguggccauccacgccgaccagcugacgcccaccuggcggguguacuccaccgggagcaacgucuuccagacccgcgccggcugccucaucggggcggagcacgugaacaacuccuacgagugcgacauccccaucggcgccggcaucugcgccagcuaccagacgcagaccaacuccccgcggcgcgcccggagcguggcgucccagagcaucaucgccuacaccaugucccugggggccgagaacagcgucgccuacuccaacaacagcaucgccauccccaccaacuucacgaucuccgugaccaccgagauccugcccgugagcaugaccaagacgagcgucgacugcaccauguacaucugcggcgacuccaccgagugcagcaaccuccugcugcaguacggguccuucugcacccagcucaaccgcgcgcugacgggcaucgccguggagcaggacaagaacacccaggagguguucgcccaggucaagcagaucuacaagacgcccccgaucaaggacuucgggggcuucaacuucagccagauccugcccgaccccuccaagcccagcaagcgguccuucaucgaggaccuccuguucaacaaggugacccuggccgacgccggcuucaucaagcaguacggggacugccucggcgacaucgcggcccgcgaccugaucugcgcccagaaguucaacgggcugaccgugcucccgccccugcugaccgacgagaugaucgcccaguacaccagcgcccuccuggcgggcaccaucacguccggguggaccuucggcgccggcgccgcccugcagauccccuucgcgaugcagauggccuaccgguucaacgggaucggcgucacccagaacgugcucuacgagaaccagaagcugaucgccaaccaguucaacagcgccaucgggaagauccaggacucccugagcuccaccgccagcgcgcucggcaagcugcaggacguggucaaccagaacgcccaggcccugaacacgcucgugaagcagcuguccagcaacuucggggccaucuccagcgugcugaacgacauccucucccgccuggacaaggucgaggccgaggugcagaucgaccggcugaucaccggccgccuccagagccugcagaccuacgugacccagcagcugauccgggcggccgagauccgcgccagcgccaaccucgccgcgaccaagauguccgagugcguccugggccagagcaagcggguggacuucugcgggaagggcuaccaccugauguccuucccccagagcgccccgcacgggguggucuuccuccacgugacguacguccccgcccaggagaagaacuucaccaccgcccccgcgaucugccacgacggcaaggcccacuucccccgcgaggggguguucguguccaacggcacccacugguucgucacgcagcggaacuucuacgagccgcagaucaucaccaccgacaacaccuucgugagcggcaacugcgacguggucaucgggaucgugaacaacacgguguacgacccccugcagcccgagcuggacuccuucaaggaggagcucgacaaguacuucaagaaccacaccagccccgacgucgaccugggcgacaucuccgggaucaacgccagcguggugaacauccagaaggagaucgaccgccugaacgaggucgccaagaaccucaacgagucccugaucgaccugcaggagcucggcaaguacgagcaguacaucaaguggccgugguacaucuggcugggcuucaucgccgggcugaucgcgaucgugauggugaccaucaugcucugcugcaugaccagcugcugcuccugccugaagggcugcugcagcugcggguccugcugcaaguucgacgaggacgacagcgagcccguccugaagggcgugaagcuccacuacacgugaggacuagucccuguucccagagcccacuuuuuuuucuuuuuuugaaauaaaauagccugucuuucagaucuaaaaaaaaaaaaaaaaaaaaaaaaaaaaaaaaaaaaaaaaaaaaaaaaaaaaaaaaaaaaaaaaaaaaaaaaaaaaaaaaaaaaaaaaaaaaaaaaaaaa

SEQ ID NO: 24755 - RNA, 4070 nt, Artificial Sequence
  SARS-CoV-2/Wuhan/WIV05/2019__EPI_ISL_402128 spike protein mRNA gc (1-1273)(D614G_I692V)
aggagagucccgcagucggcguccagcggcucugcuuguucgugugugugucguugcaggccuuauucaagcuuaccauguucguguuccugguccuccugccccuggugagcucccagugcgugaaccucaccacccgcacgcagcugccgcccgccuacaccaacagcuucacccggggcgucuacuaccccgacaagguguuccgcuccagcgugcugcacuccacccaggaccucuuccugcccuucuucagcaacgucacgugguuccacgccauccacguguccgggaccaacggcaccaagcgguucgacaacccggugcugcccuucaacgacggggucuacuucgcgagcaccgagaaguccaacaucauccgcggcuggaucuucgggacgacccucgacagcaagacccagucccugcugaucgugaacaacgccaccaacguggucaucaaggugugcgaguuccaguucugcaacgaccccuuccucggcguguacuaccacaagaacaacaagagcuggauggaguccgaguuccgggucuacagcuccgccaacaacugcacguucgaguacgugagccagcccuuccugauggaccuggagggcaagcaggggaacuucaagaaccuccgcgaguucguguucaagaacaucgacggcuacuucaagaucuacuccaagcacaccccgaucaaccugguccgggaccugccccagggguucagcgcccucgagccccugguggaccugcccaucggcaucaacaucacccgcuuccagacccuccuggcccugcaccgguccuaccucacgccgggggacagcagcuccggcuggaccgcgggcgccgccgccuacuacgugggguaccugcagccccgcaccuuccugcucaaguacaacgagaacggcaccaucacggacgcggucgacugcgcccuggacccccugagcgagaccaagugcacccucaaguccuucaccguggagaaggggaucuaccagacgagcaacuuccgggugcagcccaccgaguccaucguccgcuucccgaacaucaccaaccugugccccuucggcgagguguucaacgccacccgguucgccagcgucuacgccuggaaccgcaagcggaucuccaacugcguggcggacuacagcgugcuguacaacuccgccagcuucuccacguucaagugcuacggcgucagccccaccaagcucaacgaccugugcuucaccaacguguacgccgacuccuucgugauccgcggggacgagguccggcagaucgcccccggccagaccgggaagaucgccgacuacaacuacaagcugccggacgacuucacgggcugcgugaucgcguggaacagcaacaaccucgacuccaaggucgggggcaacuacaacuaccuguaccgccuguuccgcaagagcaaccucaagcccuucgagcgggacaucuccaccgagaucuaccaggccggcagcacccccugcaacgggguggagggcuucaacugcuacuucccccugcaguccuacggguuccagccgaccaacggcgugggguaccagcccuaccggguggucgugcugagcuucgagcuccugcacgcccccgccacggugugcggccccaagaaguccaccaaccuggucaagaacaagugcgugaacuucaacuucaacggccucaccgggaccggcgugcugaccgagagcaacaagaaguuccugccguuccagcaguucgggcgcgacaucgccgacacgaccgacgcgguccgcgacccccagacccuggagauccucgacaucacccccugcagcuucggcgggguguccgugaucacgccgggcaccaacaccagcaaccaggucgccgugcuguaccagggcgugaacugcaccgagguccccguggccauccacgccgaccagcugacgcccaccuggcggguguacuccaccgggagcaacgucuuccagacccgcgccggcugccucaucggggcggagcacgugaacaacuccuacgagugcgacauccccaucggcgccggcaucugcgccagcuaccagacgcagaccaacuccccgcggcgcgcccggagcguggcgucccagagcgucaucgccuacaccaugucccugggggccgagaacagcguggccuacuccaacaacagcaucgccauccccaccaacuucacgaucuccgugaccaccgagauccugcccgucagcaugaccaagacgagcguggacugcaccauguacaucugcggcgacuccaccgagugcagcaaccuccugcugcaguacggguccuucugcacccagcucaaccgcgcgcugacgggcaucgccguggagcaggacaagaacacccaggaggucuucgcccaggugaagcagaucuacaagacgcccccgaucaaggacuucgggggcuucaacuucagccagauccugcccgaccccuccaagcccagcaagcgguccuucaucgaggaccuccuguucaacaaggugacccuggccgacgccggcuucaucaagcaguacggggacugccucggcgacaucgcggcccgcgaccugaucugcgcccagaaguucaacgggcugaccguccucccgccccugcugaccgacgagaugaucgcccaguacaccagcgcccuccuggcgggcaccaucacguccggguggaccuucggcgccggcgccgcccugcagauccccuucgcgaugcagauggccuaccgguucaacgggaucggcgugacccagaacgugcucuacgagaaccagaagcugaucgccaaccaguucaacagcgccaucgggaagauccaggacucccugagcuccaccgccagcgcgcucggcaagcugcaggacgucgugaaccagaacgcccaggcccugaacacgcucgugaagcagcuguccagcaacuucggggccaucuccagcguccugaacgacauccucucccgccuggacaagguggaggccgaggugcagaucgaccggcugaucaccggccgccuccagagccugcagaccuacgucacccagcagcugauccgggcggccgagauccgcgccagcgccaaccucgccgcgaccaagauguccgagugcgugcugggccagagcaagcggguggacuucugcgggaagggcuaccaccugauguccuucccccagagcgccccgcacggggucguguuccuccacgucacguacgugcccgcccaggagaagaacuucaccaccgcccccgcgaucugccacgacggcaaggcccacuucccccgcgaggggguguucgucuccaacggcacccacugguucgugacgcagcggaacuucuacgagccgcagaucaucaccaccgacaacaccuucgugagcggcaacugcgacgucgugaucgggaucgugaacaacacggucuacgacccccugcagcccgagcuggacuccuucaaggaggagcucgacaaguacuucaagaaccacaccagccccgacguggaccugggcgacaucuccgggaucaacgccagcguggucaacauccagaaggagaucgaccgccugaacgagguggccaagaaccucaacgagucccugaucgaccugcaggagcucggcaaguacgagcaguacaucaaguggccgugguacaucuggcugggcuucaucgccgggcugaucgcgaucgugauggucaccaucaugcucugcugcaugaccagcugcugcuccugccugaagggcugcugcagcugcggguccugcugcaaguucgacgaggacgacagcgagcccgugcugaagggcgugaagcuccacuacacgugaggacuagucccuguucccagagcccacuuuuuuuucuuuuuuugaaauaaaauagccugucuuucagaucuaaaaaaaaaaaaaaaaaaaaaaaaaaaaaaaaaaaaaaaaaaaaaaaaaaaaaaaaaaaaaaaaaaaaaaaaaaaaaaaaaaaaaaaaaaaaaaaaaaaa

SEQ ID NO: 24756 - RNA, 4070 nt, Artificial Sequence
  SARS-CoV-2/Wuhan/WIV05/2019__EPI_ISL_402128 spike protein mRNA gc (1-1273)(D614G_M1229I)
aggagagucccgcagucggcguccagcggcucugcuuguucgugugugugucguugcaggccuuauucaagcuuaccauguucguguuccugguccuccugccccuggugagcucccagugcgugaaccucaccacccgcacgcagcugccgcccgccuacaccaacagcuucacccggggcgucuacuaccccgacaagguguuccgcuccagcgugcugcacuccacccaggaccucuuccugcccuucuucagcaacgucacgugguuccacgccauccacguguccgggaccaacggcaccaagcgguucgacaacccggugcugcccuucaacgacggggucuacuucgcgagcaccgagaaguccaacaucauccgcggcuggaucuucgggacgacccucgacagcaagacccagucccugcugaucgugaacaacgccaccaacguggucaucaaggugugcgaguuccaguucugcaacgaccccuuccucggcguguacuaccacaagaacaacaagagcuggauggaguccgaguuccgggucuacagcuccgccaacaacugcacguucgaguacgugagccagcccuuccugauggaccuggagggcaagcaggggaacuucaagaaccuccgcgaguucguguucaagaacaucgacggcuacuucaagaucuacuccaagcacaccccgaucaaccugguccgggaccugccccagggguucagcgcccucgagccccugguggaccugcccaucggcaucaacaucacccgcuuccagacccuccuggcccugcaccgguccuaccucacgccgggggacagcagcuccggcuggaccgcgggcgccgccgccuacuacgugggguaccugcagccccgcaccuuccugcucaaguacaacgagaacggcaccaucacggacgcggucgacugcgcccuggacccccugagcgagaccaagugcacccucaaguccuucaccguggagaaggggaucuaccagacgagcaacuuccgggugcagcccaccgaguccaucguccgcuucccgaacaucaccaaccugugccccuucggcgagguguucaacgccacccgguucgccagcgucuacgccuggaaccgcaagcggaucuccaacugcguggcggacuacagcgugcuguacaacuccgccagcuucuccacguucaagugcuacggcgucagccccaccaagcucaacgaccugugcuucaccaacguguacgccgacuccuucgugauccgcggggacgagguccggcagaucgcccccggccagaccgggaagaucgccgacuacaacuacaagcugccggacgacuucacgggcugcgugaucgcguggaacagcaacaaccucgacuccaaggucgggggcaacuacaacuaccuguaccgccuguuccgcaagagcaaccucaagcccuucgagcgggacaucuccaccgagaucuaccaggccggcagcacccccugcaacgggguggagggcuucaacugcuacuucccccugcaguccuacggguuccagccgaccaacggcgugggguaccagcccuaccggguggucgugcugagcuucgagcuccugcacgcccccgccacggugugcggccccaagaaguccaccaaccuggucaagaacaagugcgugaacuucaacuucaacggccucaccgggaccggcgugcugaccgagagcaacaagaaguuccugccguuccagcaguucgggcgcgacaucgccgacacgaccgacgcgguccgcgacccccagacccuggagauccucgacaucacccccugcagcuucggcgggguguccgugaucacgccgggcaccaacaccagcaaccaggucgccgugcuguaccagggcgugaacugcaccgagguccccguggccauccacgccgaccagcugacgcccaccuggcggguguacuccaccgggagcaacgucuuccagacccgcgccggcugccucaucggggcggagcacgugaacaacuccuacgagugcgacauccccaucggcgccggcaucugcgccagcuaccagacgcagaccaacuccccgcggcgcgcccggagcguggcgucccagagcaucaucgccuacaccaugucccugggggccgagaacagcgucgccuacuccaacaacagcaucgccauccccaccaacuucacgaucuccgugaccaccgagauccugcccgugagcaugaccaagacgagcgucgacugcaccauguacaucugcggcgacuccaccgagugcagcaaccuccugcugcaguacggguccuucugcacccagcucaaccgcgcgcugacgggcaucgccguggagcaggacaagaacacccaggagguguucgcccaggucaagcagaucuacaagacgcccccgaucaaggacuucgggggcuucaacuucagccagauccugcccgaccccuccaagcccagcaagcgguccuucaucgaggaccuccuguucaacaaggugacccuggccgacgccggcuucaucaagcaguacggggacugccucggcgacaucgcggcccgcgaccugaucugcgcccagaaguucaacgggcugaccgugcucccgccccugcugaccgacgagaugaucgcccaguacaccagcgcccuccuggcgggcaccaucacguccggguggaccuucggcgccggcgccgcccugcagauccccuucgcgaugcagauggccuaccgguucaacgggaucggcgucacccagaacgugcucuacgagaaccagaagcugaucgccaaccaguucaacagcgccaucgggaagauccaggacucccugagcuccaccgccagcgcgcucggcaagcugcaggacguggucaaccagaacgcccaggcccugaacacgcucgugaagcagcuguccagcaacuucggggccaucuccagcgugcugaacgacauccucucccgccuggacaaggucgaggccgaggugcagaucgaccggcugaucaccggccgccuccagagccugcagaccuacgugacccagcagcugauccgggcggccgagauccgcgccagcgccaaccucgccgcgaccaagauguccgagugcguccugggccagagcaagcggguggacuucugcgggaagggcuaccaccugauguccuucccccagagcgccccgcacgggguggucuuccuccacgugacguacguccccgcccaggagaagaacuucaccaccgcccccgcgaucugccacgacggcaaggcccacuucccccgcgaggggguguucguguccaacggcacccacugguucgucacgcagcggaacuucuacgagccgcagaucaucaccaccgacaacaccuucgugagcggcaacugcgacguggucaucgggaucgugaacaacacgguguacgacccccugcagcccgagcuggacuccuucaaggaggagcucgacaaguacuucaagaaccacaccagccccgacgucgaccugggcgacaucuccgggaucaacgccagcguggugaacauccagaaggagaucgaccgccugaacgaggucgccaagaaccucaacgagucccugaucgaccugcaggagcucggcaaguacgagcaguacaucaaguggccgugguacaucuggcugggcuucaucgccgggcugaucgcgaucgugaucgugaccaucaugcucugcugcaugaccagcugcugcuccugccugaagggcugcugcagcugcggguccugcugcaaguucgacgaggacgacagcgagcccguccugaagggcgugaagcuccacuacacgugaggacuagucccuguucccagagcccacuuuuuuuucuuuuuuugaaauaaaauagccugucuuucagaucuaaaaaaaaaaaaaaaaaaaaaaaaaaaaaaaaaaaaaaaaaaaaaaaaaaaaaaaaaaaaaaaaaaaaaaaaaaaaaaaaaaaaaaaaaaaaaaaaaaaa

SEQ ID NO: 24757 - RNA, 4064 nt, Artificial Sequence
  SARS-CoV-2/Wuhan/WIV05/2019__EPI_ISL_402128 spike protein mRNA gc (1-1273)(H69del_V70del_A222V_Y453F_S477N_D614G_I692V)
aggagagucccgcagucggcguccagcggcucugcuuguucgugugugugucguugcaggccuuauucaagcuuaccauguucguguuccugguccuccugccccuggugagcucccagugcgugaaccucaccacccgcacgcagcugccgcccgccuacaccaacagcuucacccggggcgucuacuaccccgacaagguguuccgcuccagcgugcugcacuccacccaggaccucuuccugcccuucuucagcaacgucacgugguuccacgccaucuccgggaccaacggcaccaagcgguucgacaacccggugcugcccuucaacgacgggguguacuucgcgagcaccgagaaguccaacaucauccgcggcuggaucuucgggacgacccucgacagcaagacccagucccugcugaucgucaacaacgccaccaacguggugaucaaggucugcgaguuccaguucugcaacgaccccuuccucggcguguacuaccacaagaacaacaagagcuggauggaguccgaguuccggguguacagcuccgccaacaacugcacguucgaguacgucagccagcccuuccugauggaccuggagggcaagcaggggaacuucaagaaccuccgcgaguucguguucaagaacaucgacggcuacuucaagaucuacuccaagcacaccccgaucaaccuggugcgggaccugccccagggguucagcguccucgagccccugguggaccugcccaucggcaucaacaucacccgcuuccagacccuccuggcccugcaccgguccuaccucacgccgggggacagcagcuccggcuggaccgccggcgcggccgccuacuacgugggguaccugcagccccgcaccuuccugcucaaguacaacgagaacggcaccaucacggacgccgucgacugcgcgcuggacccccugagcgagaccaagugcacccucaaguccuucaccguggagaaggggaucuaccagacgagcaacuuccgggugcagcccaccgaguccaucguccgcuucccgaacaucaccaaccugugccccuucggcgagguguucaacgccacccgguucgccagcgucuacgccuggaaccgcaagcggaucuccaacugcguggccgacuacagcgugcuguacaacuccgcgagcuucuccacguucaagugcuacggcgucagccccaccaagcucaacgaccugugcuucaccaacguguacgccgacuccuucgugauccgcggggacgagguccggcagaucgcccccggccagaccgggaagaucgccgacuacaacuacaagcugccggacgacuucacgggcugcgugaucgccuggaacagcaacaaccucgacuccaaggucgggggcaacuacaacuaccuguuccgccuguuccgcaagagcaaccucaagcccuucgagcgggacaucuccaccgagaucuaccaggcgggcaacacccccugcaacgggguggagggcuucaacugcuacuucccccugcagagcuacggguuccagccgaccaacggcgugggguaccagcccuaccggguggucgugcuguccuucgagcuccugcacgcccccgccacggugugcggccccaagaaguccaccaaccuggucaagaacaagugcgugaacuucaacuucaacggccucaccgggaccggcgugcugaccgagagcaacaagaaguuccugccguuccagcaguucgggcgcgacaucgccgacacgaccgacgccguccgcgacccccagacccuggagauccucgacaucacccccugcagcuucggcggggugagcgugaucacgccgggcaccaacaccuccaaccaggucgcggugcuguaccagggcgugaacugcaccgagguccccguggccauccacgccgaccagcugacgcccaccuggcggguguacagcaccggguccaacgucuuccagacccgcgccggcugccucaucggggccgagcacgugaacaacagcuacgagugcgacauccccaucggcgcgggcaucugcgccuccuaccagacgcagaccaacagcccgcggcgcgcccgguccguggccagccaguccgucaucgcguacaccaugagccugggggccgagaacuccguggccuacagcaacaacuccaucgccauccccaccaacuucacgaucagcgugaccaccgagauccugcccgucuccaugaccaagacgagcguggacugcaccauguacaucugcggcgacagcaccgagugcuccaaccuccugcugcaguacgggagcuucugcacccagcucaaccgcgcccugacgggcaucgcgguggagcaggacaagaacacccaggaggucuucgcccaggugaagcagaucuacaagacgcccccgaucaaggacuucgggggcuucaacuucucccagauccugcccgaccccagcaagcccuccaagcggagcuucaucgaggaccuccuguucaacaaggugacccuggccgacgccggcuucaucaagcaguacggggacugccucggcgacaucgccgcgcgcgaccugaucugcgcccagaaguucaacgggcugaccguccucccgccccugcugaccgacgagaugaucgcccaguacaccuccgcccuccuggccggcaccaucacgagcggguggaccuucggcgcgggcgccgcccugcagauccccuucgccaugcagauggcguaccgguucaacgggaucggcgugacccagaacgugcucuacgagaaccagaagcugaucgccaaccaguucaacuccgccaucgggaagauccaggacagccuguccagcaccgccuccgcccucggcaagcugcaggacgucgugaaccagaacgcgcaggcccugaacacgcucgugaagcagcugagcuccaacuucggggccaucagcuccguccugaacgacauccucagccgccuggacaagguggaggccgaggugcagaucgaccggcugaucaccggccgccuccagucccugcagaccuacgucacccagcagcugauccgggccgcggagauccgcgccagcgccaaccucgccgccaccaagaugagcgagugcgugcugggccaguccaagcggguggacuucugcgggaagggcuaccaccugaugagcuucccccaguccgcgccgcacggggucguguuccuccacgucacguacgugcccgcccaggagaagaacuucaccaccgcccccgccaucugccacgacggcaaggcgcacuucccccgcgaggggguguucgucagcaacggcacccacugguucgugacgcagcggaacuucuacgagccgcagaucaucaccaccgacaacaccuucguguccggcaacugcgacgucgugaucgggaucgugaacaacacggucuacgacccccugcagcccgagcuggacagcuucaaggaggagcucgacaaguacuucaagaaccacaccucccccgacguggaccugggcgacaucagcgggaucaacgccuccguggucaacauccagaaggagaucgaccgccugaacgagguggccaagaaccucaacgagagccugaucgaccugcaggagcucggcaaguacgagcaguacaucaaguggccgugguacaucuggcugggcuucaucgccgggcugaucgccaucgugauggucaccaucaugcucugcugcaugaccuccugcugcagcugccugaagggcugcugcuccugcgggagcugcugcaaguucgacgaggacgacuccgagcccgugcugaagggcgugaagcuccacuacacgugaggacuagucccuguucccagagcccacuuuuuuuucuuuuuuugaaauaaaauagccugucuuucagaucuaaaaaaaaaaaaaaaaaaaaaaaaaaaaaaaaaaaaaaaaaaaaaaaaaaaaaaaaaaaaaaaaaaaaaaaaaaaaaaaaaaaaaaaaaaaaaaaaaaaa

SEQ ID NO: 24758 - RNA, 4064 nt, Artificial Sequence
  SARS-CoV-2/Wuhan/WIV05/2019__EPI_ISL_402128 spike protein mRNA gc (1-1273)(H69del_V70del_Y453F_D614G_I692V_M1229I)
aggagagucccgcagucggcguccagcggcucugcuuguucgugugugugucguugcaggccuuauucaagcuuaccauguucguguuccugguccuccugccccuggugagcucccagugcgugaaccucaccacccgcacgcagcugccgcccgccuacaccaacagcuucacccggggcgucuacuaccccgacaagguguuccgcuccagcgugcugcacuccacccaggaccucuuccugcccuucuucagcaacgucacgugguuccacgccaucuccgggaccaacggcaccaagcgguucgacaacccggugcugcccuucaacgacgggguguacuucgcgagcaccgagaaguccaacaucauccgcggcuggaucuucgggacgacccucgacagcaagacccagucccugcugaucgucaacaacgccaccaacguggugaucaaggucugcgaguuccaguucugcaacgaccccuuccucggcguguacuaccacaagaacaacaagagcuggauggaguccgaguuccggguguacagcuccgccaacaacugcacguucgaguacgucagccagcccuuccugauggaccuggagggcaagcaggggaacuucaagaaccuccgcgaguucguguucaagaacaucgacggcuacuucaagaucuacuccaagcacaccccgaucaaccuggugcgggaccugccccagggguucagcgcccucgagccccuggucgaccugcccaucggcaucaacaucacccgcuuccagacccuccuggcccugcaccgguccuaccucacgccgggggacagcagcuccggcuggaccgcgggcgccgccgccuacuacgugggguaccugcagccccgcaccuuccugcucaaguacaacgagaacggcaccaucacggacgcgguggacugcgcccuggacccccugagcgagaccaagugcacccucaaguccuucaccgucgagaaggggaucuaccagacgagcaacuuccgggugcagcccaccgaguccaucgugcgcuucccgaacaucaccaaccugugccccuucggcgaggucuucaacgccacccgguucgccagcguguacgccuggaaccgcaagcggaucuccaacugcgucgcggacuacagcgugcuguacaacuccgccagcuucuccacguucaagugcuacggcgugagccccaccaagcucaacgaccugugcuucaccaacgucuacgccgacuccuucgugauccgcggggacgaggugcggcagaucgcccccggccagaccgggaagaucgccgacuacaacuacaagcugccggacgacuucacgggcugcgucaucgcguggaacagcaacaaccucgacuccaaggucgggggcaacuacaacuaccuguuccgccuguuccgcaagagcaaccucaagcccuucgagcgggacaucuccaccgagaucuaccaggccggcagcacccccugcaacgggguggagggcuucaacugcuacuucccccugcaguccuacggguuccagccgaccaacggcgugggguaccagcccuaccggguggugguccugagcuucgagcuccugcacgcccccgccacggugugcggccccaagaaguccaccaaccuggugaagaacaagugcgucaacuucaacuucaacggccucaccgggaccggcgugcugaccgagagcaacaagaaguuccugccguuccagcaguucgggcgcgacaucgccgacacgaccgacgcggugcgcgacccccagacccuggagauccucgacaucacccccugcagcuucggcggggucuccgugaucacgccgggcaccaacaccagcaaccagguggccguccuguaccagggcgugaacugcaccgaggugcccgucgccauccacgccgaccagcugacgcccaccuggcggguguacuccaccgggagcaacguguuccagacccgcgccggcugccucaucggggcggagcacgucaacaacuccuacgagugcgacauccccaucggcgccggcaucugcgccagcuaccagacgcagaccaacuccccgcggcgcgcccggagcguggcgucccagagcgugaucgccuacaccaugucccugggggccgagaacagcgucgccuacuccaacaacagcaucgccauccccaccaacuucacgaucuccgugaccaccgagauccugcccgugagcaugaccaagacgagcgucgacugcaccauguacaucugcggcgacuccaccgagugcagcaaccuccugcugcaguacggguccuucugcacccagcucaaccgcgcgcugacgggcaucgccguggagcaggacaagaacacccaggagguguucgcccaggucaagcagaucuacaagacgcccccgaucaaggacuucgggggcuucaacuucagccagauccugcccgaccccuccaagcccagcaagcgguccuucaucgaggaccuccuguucaacaaggugacccuggccgacgccggcuucaucaagcaguacggggacugccucggcgacaucgcggcccgcgaccugaucugcgcccagaaguucaacgggcugaccgugcucccgccccugcugaccgacgagaugaucgcccaguacaccagcgcccuccuggcgggcaccaucacguccggguggaccuucggcgccggcgccgcccugcagauccccuucgcgaugcagauggccuaccgguucaacgggaucggcgucacccagaacgugcucuacgagaaccagaagcugaucgccaaccaguucaacagcgccaucgggaagauccaggacucccugagcuccaccgccagcgcgcucggcaagcugcaggacguggucaaccagaacgcccaggcccugaacacgcucgugaagcagcuguccagcaacuucggggccaucuccagcgugcugaacgacauccucucccgccuggacaaggucgaggccgaggugcagaucgaccggcugaucaccggccgccuccagagccugcagaccuacgugacccagcagcugauccgggcggccgagauccgcgccagcgccaaccucgccgcgaccaagauguccgagugcguccugggccagagcaagcggguggacuucugcgggaagggcuaccaccugauguccuucccccagagcgccccgcacgggguggucuuccuccacgugacguacguccccgcccaggagaagaacuucaccaccgcccccgcgaucugccacgacggcaaggcccacuucccccgcgaggggguguucguguccaacggcacccacugguucgucacgcagcggaacuucuacgagccgcagaucaucaccaccgacaacaccuucgugagcggcaacugcgacguggucaucgggaucgugaacaacacgguguacgacccccugcagcccgagcuggacuccuucaaggaggagcucgacaaguacuucaagaaccacaccagccccgacgucgaccugggcgacaucuccgggaucaacgccagcguggugaacauccagaaggagaucgaccgccugaacgaggucgccaagaaccucaacgagucccugaucgaccugcaggagcucggcaaguacgagcaguacaucaaguggccgugguacaucuggcugggcuucaucgccgggcugaucgcgaucgugaucgugaccaucaugcucugcugcaugaccagcugcugcuccugccugaagggcugcugcagcugcggguccugcugcaaguucgacgaggacgacagcgagcccguccugaagggcgugaagcuccacuacacgugaggacuagucccuguucccagagcccacuuuuuuuucuuuuuuugaaauaaaauagccugucuuucagaucuaaaaaaaaaaaaaaaaaaaaaaaaaaaaaaaaaaaaaaaaaaaaaaaaaaaaaaaaaaaaaaaaaaaaaaaaaaaaaaaaaaaaaaaaaaaaaaaaaaaa

SEQ ID NO: 24759 - RNA, 4061 nt, Artificial Sequence
  SARS-CoV-2/Wuhan/WIV05/2019__EPI_ISL_402128 spike protein mRNA gc (1-1273)(H69del_V70del_Y144del_N501Y_A570D_D614G_P681H_T716I_S982 A_D1118H)
aggagagucccgcagucggcguccagcggcucugcuuguucgugugugugucguugcaggccuuauucaagcuuaccauguucguguuccugguccuccugccccuggugagcucccagugcgugaaccucaccacccgcacgcagcugccgcccgccuacaccaacagcuucacccggggcgucuacuaccccgacaagguguuccgcuccagcgugcugcacuccacccaggaccucuuccugcccuucuucagcaacgucacgugguuccacgccaucuccgggaccaacggcaccaagcgguucgacaacccggugcugcccuucaacgacgggguguacuucgcgagcaccgagaaguccaacaucauccgcggcuggaucuucgggacgacccucgacagcaagacccagucccugcugaucgucaacaacgccaccaacguggugaucaaggucugcgaguuccaguucugcaacgaccccuuccucggcguguaccacaagaacaacaagagcuggauggaguccgaguuccggguguacagcuccgccaacaacugcacguucgaguacgucagccagcccuuccugauggaccuggagggcaagcaggggaacuucaagaaccuccgcgaguucguguucaagaacaucgacggcuacuucaagaucuacuccaagcacaccccgaucaaccuggugcgggaccugccccagggguucagcgcccucgagccccuggucgaccugcccaucggcaucaacaucacccgcuuccagacccuccuggcccugcaccgguccuaccucacgccgggggacagcagcuccggcuggaccgcgggcgccgccgccuacuacgugggguaccugcagccccgcaccuuccugcucaaguacaacgagaacggcaccaucacggacgcgguggacugcgcccuggacccccugagcgagaccaagugcacccucaaguccuucaccgucgagaaggggaucuaccagacgagcaacuuccgggugcagcccaccgaguccaucgugcgcuucccgaacaucaccaaccugugccccuucggcgaggucuucaacgccacccgguucgccagcguguacgccuggaaccgcaagcggaucuccaacugcgucgcggacuacagcgugcuguacaacuccgccagcuucuccacguucaagugcuacggcgugagccccaccaagcucaacgaccugugcuucaccaacgucuacgccgacuccuucgugauccgcggggacgaggugcggcagaucgcccccggccagaccgggaagaucgccgacuacaacuacaagcugccggacgacuucacgggcugcgucaucgcguggaacagcaacaaccucgacuccaaggucgggggcaacuacaacuaccuguaccgccuguuccgcaagagcaaccucaagcccuucgagcgggacaucuccaccgagaucuaccaggccggcagcacccccugcaacgggguggagggcuucaacugcuacuucccccugcaguccuacggguuccagccgaccuacggcgugggguaccagcccuaccggguggugguccugagcuucgagcuccugcacgcccccgccacggugugcggccccaagaaguccaccaaccuggugaagaacaagugcgucaacuucaacuucaacggccucaccgggaccggcgugcugaccgagagcaacaagaaguuccugccguuccagcaguucgggcgcgacaucgacgacacgaccgacgccgugcgcgacccccagacccuggagauccucgacaucacccccugcagcuucggcggggucuccgugaucacgccgggcaccaacaccagcaaccagguggcgguccuguaccagggcgugaacugcaccgaggugcccgucgccauccacgccgaccagcugacgcccaccuggcggguguacuccaccgggagcaacguguuccagacccgcgccggcugccucaucggggccgagcacgucaacaacuccuacgagugcgacauccccaucggcgcgggcaucugcgccagcuaccagacgcagaccaacucccaccggcgcgcccggagcguggccucccagagcaucaucgcguacaccaugucccugggggccgagaacagcguggccuacuccaacaacagcaucgccaucccgaucaacuucaccaucuccgucacgaccgagauccugcccgugagcaugaccaagaccagcguggacugcacgauguacaucugcggcgacuccaccgagugcagcaaccuccugcugcaguacggguccuucugcacccagcucaaccgcgcccugaccggcaucgcggucgagcaggacaagaacacgcaggagguguucgcccaggugaagcagaucuacaagaccccgcccaucaaggacuucgggggcuucaacuucagccagauccugcccgaccccuccaagcccagcaagcgguccuucaucgaggaccuccuguucaacaaggucacccuggccgacgccggcuucaucaagcaguacggggacugccucggcgacaucgccgcgcgcgaccugaucugcgcccagaaguucaacgggcugaccgugcugcccccgcuccugacggacgagaugaucgcccaguacaccagcgcccuccuggccggcaccaucaccuccggguggacguucggcgcgggcgccgcccugcagauccccuucgccaugcagauggcguaccgguucaacgggaucggcgugacccagaacguccucuacgagaaccagaagcugaucgccaaccaguucaacagcgccaucgggaagauccaggacucccugagcuccaccgccagcgcccucggcaagcugcaggacguggugaaccagaacgcgcaggcccugaacacccucgucaagcagcuguccagcaacuucggggccaucuccagcgugcugaacgacauccucgcccgccuggacaagguggaggccgagguccagaucgaccggcugaucacgggccgccuccagucccugcagaccuacgugacccagcagcugauccgggcggccgagauccgcgccagcgccaaccucgccgcgaccaagaugagcgagugcgugcugggccaguccaagcgggucgacuucugcgggaagggcuaccaccugaugagcuucccccaguccgcgccccacggggugguguuccuccacgucaccuacgugccggcccaggagaagaacuucacgaccgcccccgccaucugccacgacggcaaggcccacuucccccgcgagggggucuucgugagcaacggcacccacugguucgugacccagcggaacuucuacgagccccagaucaucacgacccacaacaccuucgucuccggcaacugcgacguggugaucgggaucgucaacaacaccguguacgacccgcugcagcccgagcuggacagcuucaaggaggagcucgacaaguacuucaagaaccacacgucccccgacguggaccugggcgacaucagcgggaucaacgccuccgucgugaacauccagaaggagaucgaccgccugaacgagguggccaagaaccucaacgagagccugaucgaccugcaggagcucggcaaguacgagcaguacaucaaguggcccugguacaucuggcugggcuucaucgccgggcugaucgcgaucgucauggugaccaucaugcucugcugcaugaccuccugcugcagcugccugaagggcugcugcuccugcgggagcugcugcaaguucgacgaggacgacuccgagccggugcugaagggcgucaagcuccacuacaccugaggacuagucccuguucccagagcccacuuuuuuuucuuuuuuugaaauaaaauagccugucuuucagaucuaaaaaaaaaaaaaaaaaaaaaaaaaaaaaaaaaaaaaaaaaaaaaaaaaaaaaaaaaaaaaaaaaaaaaaaaaaaaaaaaaaaaaaaaaaaaaaaaaaaa

SEQ ID NO: 24760 - RNA, 4070 nt, Artificial Sequence
  SARS-CoV-2/Wuhan/WIV05/2019__EPI_ISL_402128 spike protein mRNA gc (1-1273)(K417N_E484K_N501Y_D614G)
aggagagucccgcagucggcguccagcggcucugcuuguucgugugugugucguugcaggccuuauucaagcuuaccauguucguguuccugguccuccugccccuggugagcucccagugcgugaaccucaccacccgcacgcagcugccgcccgccuacaccaacagcuucacccggggcgucuacuaccccgacaagguguuccgcuccagcgugcugcacuccacccaggaccucuuccugcccuucuucagcaacgucacgugguuccacgccauccacguguccgggaccaacggcaccaagcgguucgacaacccggugcugcccuucaacgacggggucuacuucgcgagcaccgagaaguccaacaucauccgcggcuggaucuucgggacgacccucgacagcaagacccagucccugcugaucgugaacaacgccaccaacguggucaucaaggugugcgaguuccaguucugcaacgaccccuuccucggcguguacuaccacaagaacaacaagagcuggauggaguccgaguuccgggucuacagcuccgccaacaacugcacguucgaguacgugagccagcccuuccugauggaccuggagggcaagcaggggaacuucaagaaccuccgcgaguucguguucaagaacaucgacggcuacuucaagaucuacuccaagcacaccccgaucaaccugguccgggaccugccccagggguucagcgcccucgagccccugguggaccugcccaucggcaucaacaucacccgcuuccagacccuccuggcccugcaccgguccuaccucacgccgggggacagcagcuccggcuggaccgcgggcgccgccgccuacuacgugggguaccugcagccccgcaccuuccugcucaaguacaacgagaacggcaccaucacggacgcggucgacugcgcccuggacccccugagcgagaccaagugcacccucaaguccuucaccguggagaaggggaucuaccagacgagcaacuuccgggugcagcccaccgaguccaucguccgcuucccgaacaucaccaaccugugccccuucggcgagguguucaacgccacccgguucgccagcgucuacgccuggaaccgcaagcggaucuccaacugcguggcggacuacagcgugcuguacaacuccgccagcuucuccacguucaagugcuacggcgucagccccaccaagcucaacgaccugugcuucaccaacguguacgccgacuccuucgugauccgcggggacgagguccggcagaucgcccccggccagaccgggaacaucgccgacuacaacuacaagcugccggacgacuucacgggcugcgugaucgcguggaacagcaacaaccucgacuccaaggucgggggcaacuacaacuaccuguaccgccuguuccgcaagagcaaccucaagcccuucgagcgggacaucuccaccgagaucuaccaggccggcagcacccccugcaacggggugaagggcuucaacugcuacuucccccugcaguccuacggguuccagccgaccuacggcgugggguaccagcccuaccggguggucgugcugagcuucgagcuccugcacgcccccgccacggugugcggccccaagaaguccaccaaccuggucaagaacaagugcgugaacuucaacuucaacggccucaccgggaccggcgugcugaccgagagcaacaagaaguuccugccguuccagcaguucgggcgcgacaucgccgacacgaccgacgcgguccgcgacccccagacccuggagauccucgacaucacccccugcagcuucggcgggguguccgugaucacgccgggcaccaacaccagcaaccaggucgccgugcuguaccagggcgugaacugcaccgagguccccguggccauccacgccgaccagcugacgcccaccuggcggguguacuccaccgggagcaacgucuuccagacccgcgccggcugccucaucggggcggagcacgugaacaacuccuacgagugcgacauccccaucggcgccggcaucugcgccagcuaccagacgcagaccaacuccccgcggcgcgcccggagcguggcgucccagagcaucaucgccuacaccaugucccugggggccgagaacagcgucgccuacuccaacaacagcaucgccauccccaccaacuucacgaucuccgugaccaccgagauccugcccgugagcaugaccaagacgagcgucgacugcaccauguacaucugcggcgacuccaccgagugcagcaaccuccugcugcaguacggguccuucugcacccagcucaaccgcgcgcugacgggcaucgccguggagcaggacaagaacacccaggagguguucgcccaggucaagcagaucuacaagacgcccccgaucaaggacuucgggggcuucaacuucagccagauccugcccgaccccuccaagcccagcaagcgguccuucaucgaggaccuccuguucaacaaggugacccuggccgacgccggcuucaucaagcaguacggggacugccucggcgacaucgcggcccgcgaccugaucugcgcccagaaguucaacgggcugaccgugcucccgccccugcugaccgacgagaugaucgcccaguacaccagcgcccuccuggcgggcaccaucacguccggguggaccuucggcgccggcgccgcccugcagauccccuucgcgaugcagauggccuaccgguucaacgggaucggcgucacccagaacgugcucuacgagaaccagaagcugaucgccaaccaguucaacagcgccaucgggaagauccaggacucccugagcuccaccgccagcgcgcucggcaagcugcaggacguggucaaccagaacgcccaggcccugaacacgcucgugaagcagcuguccagcaacuucggggccaucuccagcgugcugaacgacauccucucccgccuggacaaggucgaggccgaggugcagaucgaccggcugaucaccggccgccuccagagccugcagaccuacgugacccagcagcugauccgggcggccgagauccgcgccagcgccaaccucgccgcgaccaagauguccgagugcguccugggccagagcaagcggguggacuucugcgggaagggcuaccaccugauguccuucccccagagcgccccgcacgggguggucuuccuccacgugacguacguccccgcccaggagaagaacuucaccaccgcccccgcgaucugccacgacggcaaggcccacuucccccgcgaggggguguucguguccaacggcacccacugguucgucacgcagcggaacuucuacgagccgcagaucaucaccaccgacaacaccuucgugagcggcaacugcgacguggucaucgggaucgugaacaacacgguguacgacccccugcagcccgagcuggacuccuucaaggaggagcucgacaaguacuucaagaaccacaccagccccgacgucgaccugggcgacaucuccgggaucaacgccagcguggugaacauccagaaggagaucgaccgccugaacgaggucgccaagaaccucaacgagucccugaucgaccugcaggagcucggcaaguacgagcaguacaucaaguggccgugguacaucuggcugggcuucaucgccgggcugaucgcgaucgugauggugaccaucaugcucugcugcaugaccagcugcugcuccugccugaagggcugcugcagcugcggguccugcugcaaguucgacgaggacgacagcgagcccguccugaagggcgugaagcuccacuacacgugaggacuagucccuguucccagagcccacuuuuuuuucuuuuuuugaaauaaaauagccugucuuucagaucuaaaaaaaaaaaaaaaaaaaaaaaaaaaaaaaaaaaaaaaaaaaaaaaaaaaaaaaaaaaaaaaaaaaaaaaaaaaaaaaaaaaaaaaaaaaaaaaaaaaa

SEQ ID NO: 24761 - RNA, 4061 nt, Artificial Sequence
  SARS-CoV-2/Wuhan/WIV05/2019__EPI_ISL_402128 spike protein mRNA gc (1-1273)(L18F_D80A_D215G_L242del_A243del_L244del_R246I_K417N_E484 K_N501Y_D614G_A701V)
aggagagucccgcagucggcguccagcggcucugcuuguucgugugugugucguugcaggccuuauucaagcuuaccauguucguguuccugguccuccugccccuggugagcucccagugcgugaacuucaccacccgcacgcagcucccgcccgccuacaccaacagcuucacccggggcgucuacuaccccgacaagguguuccgcuccagcgugcugcacuccacccaggaccuguuccuccccuucuucagcaacgucacgugguuccacgccauccacguguccgggaccaacggcaccaagcgguucgcgaacccggugcugcccuucaacgacggggucuacuucgccagcaccgagaaguccaacaucauccgcggcuggaucuucgggacgacccuggacagcaagacccagucccuccugaucgugaacaacgccaccaacguggucaucaaggugugcgaguuccaguucugcaacgaccccuuccugggcguguacuaccacaagaacaacaagagcuggauggaguccgaguuccgggucuacagcuccgccaacaacugcacguucgaguacgugagccagcccuuccucauggaccuggagggcaagcaggggaacuucaagaaccugcgcgaguucguguucaagaacaucgacggcuacuucaagaucuacuccaagcacaccccgaucaaccucguccgggggcugccccagggcuucagcgcccuggagccccucguggaccugcccaucgggaucaacaucacccgcuuccagacccugcacaucuccuaccucacgccgggcgacagcagcuccggcuggaccgcgggggccgccgccuacuacgugggcuaccugcagccccggaccuuccugcucaaguacaacgagaacgggaccaucacggacgcggucgacugcgcccuggacccccugagcgagaccaagugcacccucaaguccuucaccguggagaagggcaucuaccagacgagcaacuuccgcgugcagcccaccgaguccaucguccgguucccgaacaucaccaaccugugccccuucggcgagguguucaacgccacccgcuucgccagcgucuacgccuggaaccggaagcgcaucuccaacugcguggcggacuacagcgugcuguacaacuccgccagcuucuccacguucaagugcuacggggucagccccaccaagcucaacgaccugugcuucaccaacguguacgccgacuccuucgugauccggggcgacgagguccgccagaucgcccccgggcagaccggcaacaucgccgacuacaacuacaagcugccggacgacuucacggggugcgugaucgcguggaacagcaacaaccucgacuccaaggugggcggcaacuacaacuaccuguaccggcuguuccgcaagagcaaccucaagcccuucgagcgggacaucuccaccgagaucuaccaggccgggagcacccccugcaacggcgucaagggguucaacugcuacuucccccugcaguccuacggcuuccagccgaccuacggggugggcuaccagcccuaccgcguggucgugcugagcuucgagcuccugcacgcccccgccacggugugcggccccaagaaguccaccaaccuggucaagaacaagugcgugaacuucaacuucaacgggcucaccggcaccggggugcugaccgagagcaacaagaaguuccugccguuccagcaguucggccgggacaucgccgacacgaccgacgcgguccgcgacccccagacccucgagauccuggacaucacccccugcagcuucgggggcguguccgugaucacgccgggcaccaacaccagcaaccaggucgccgugcuguaccagggggugaacugcaccgagguccccguggccauccacgccgaccagcugacgcccaccuggcgcguguacuccaccggcagcaacgucuuccagacccgggccgggugccucaucggcgcggagcacgugaacaacuccuacgagugcgacauccccaucggcgccgggaucugcgccagcuaccagacgcagaccaacuccccgcgccgggcccgcagcguggcgucccagagcaucaucgccuacaccaugucccugggcgucgagaacagcguggccuacuccaacaacagcaucgccauccccaccaacuucacgaucuccgugaccaccgagauccugcccgucagcaugaccaagacgagcguggacugcaccauguacaucugcggggacuccaccgagugcagcaaccuccugcugcaguacggcuccuucugcacccagcucaaccgggcccugacggggaucgcgguggagcaggacaagaacacccaggaggucuucgcccaggugaagcagaucuacaagacgcccccgaucaaggacuucggcggcuucaacuucagccagauccugcccgaccccuccaagcccagcaagcgcuccuucaucgaggaccuccuguucaacaaggugacccuggccgacgccggguucaucaagcaguacggcgacugccucggggacaucgccgcgcgggaccugaucugcgcccagaaguucaacggccugaccguccucccgccccugcugaccgacgagaugaucgcccaguacaccagcgcccuccuggccgggaccaucacguccggcuggaccuucggcgcgggggccgcccugcagauccccuucgccaugcagauggcguaccgcuucaacggcaucggggugacccagaacgugcucuacgagaaccagaagcugaucgccaaccaguucaacagcgccaucggcaagauccaggacucccugagcuccaccgccagcgcccucgggaagcugcaggacgucgugaaccagaacgcgcaggcccugaacacgcucgugaagcagcuguccagcaacuucggcgccaucuccagcguccugaacgacauccucucccggcuggacaagguggaggccgaggugcagaucgaccgccugaucaccggccggcuccagagccugcagaccuacgucacccagcagcugauccgcgccgcggagauccgggccagcgccaaccucgccgccaccaagauguccgagugcgugcuggggcagagcaagcgcguggacuucugcggcaagggguaccaccugauguccuucccccagagcgcgccgcacggcgucguguuccuccacgucacguacgugcccgcccaggagaagaacuucaccaccgcccccgccaucugccacgacgggaaggcgcacuucccccgggagggcguguucgucuccaacggcacccacugguucgugacgcagcgcaacuucuacgagccgcagaucaucaccaccgacaacaccuucgugagcgggaacugcgacgucgugaucggcaucgugaacaacacggucuacgacccccugcagcccgagcuggacuccuucaaggaggagcucgacaaguacuucaagaaccacaccagccccgacguggaccugggggacaucuccggcaucaacgccagcguggucaacauccagaaggagaucgaccggcugaacgagguggccaagaaccucaacgagucccugaucgaccugcaggagcucggcaaguacgagcaguacaucaaguggccgugguacaucuggcugggguucaucgccggccugaucgccaucgugauggucaccaucaugcucugcugcaugaccagcugcugcuccugccugaaggggugcugcagcugcggcuccugcugcaaguucgacgaggacgacagcgagcccgugcugaagggggugaagcuccacuacacgugaggacuagucccuguucccagagcccacuuuuuuuucuuuuuuugaaauaaaauagccugucuuucagaucuaaaaaaaaaaaaaaaaaaaaaaaaaaaaaaaaaaaaaaaaaaaaaaaaaaaaaaaaaaaaaaaaaaaaaaaaaaaaaaaaaaaaaaaaaaaaaaaaaaaa

SEQ ID NO: 24762 - RNA, 4070 nt, Artificial Sequence
  SARS-CoV-2/Wuhan/WIV05/2019__EPI_ISL_402128 spike protein mRNA gc (1-1273)(E484K_D614G)
aggagagucccgcagucggcguccagcggcucugcuuguucgugugugugucguugcaggccuuauucaagcuuaccauguucguguuccugguccuccugccccuggugagcucccagugcgugaaccucaccacccgcacgcagcugccgcccgccuacaccaacagcuucacccggggcgucuacuaccccgacaagguguuccgcuccagcgugcugcacuccacccaggaccucuuccugcccuucuucagcaacgucacgugguuccacgccauccacguguccgggaccaacggcaccaagcgguucgacaacccggugcugcccuucaacgacggggucuacuucgcgagcaccgagaaguccaacaucauccgcggcuggaucuucgggacgacccucgacagcaagacccagucccugcugaucgugaacaacgccaccaacguggucaucaaggugugcgaguuccaguucugcaacgaccccuuccucggcguguacuaccacaagaacaacaagagcuggauggaguccgaguuccgggucuacagcuccgccaacaacugcacguucgaguacgugagccagcccuuccugauggaccuggagggcaagcaggggaacuucaagaaccuccgcgaguucguguucaagaacaucgacggcuacuucaagaucuacuccaagcacaccccgaucaaccugguccgggaccugccccagggguucagcgcccucgagccccugguggaccugcccaucggcaucaacaucacccgcuuccagacccuccuggcccugcaccgguccuaccucacgccgggggacagcagcuccggcuggaccgcgggcgccgccgccuacuacgugggguaccugcagccccgcaccuuccugcucaaguacaacgagaacggcaccaucacggacgcggucgacugcgcccuggacccccugagcgagaccaagugcacccucaaguccuucaccguggagaaggggaucuaccagacgagcaacuuccgggugcagcccaccgaguccaucguccgcuucccgaacaucaccaaccugugccccuucggcgagguguucaacgccacccgguucgccagcgucuacgccuggaaccgcaagcggaucuccaacugcguggcggacuacagcgugcuguacaacuccgccagcuucuccacguucaagugcuacggcgucagccccaccaagcucaacgaccugugcuucaccaacguguacgccgacuccuucgugauccgcggggacgagguccggcagaucgcccccggccagaccgggaagaucgccgacuacaacuacaagcugccggacgacuucacgggcugcgugaucgcguggaacagcaacaaccucgacuccaaggucgggggcaacuacaacuaccuguaccgccuguuccgcaagagcaaccucaagcccuucgagcgggacaucuccaccgagaucuaccaggccggcagcacccccugcaacggggugaagggcuucaacugcuacuucccccugcaguccuacggguuccagccgaccaacggcgugggguaccagcccuaccggguggucgugcugagcuucgagcuccugcacgcccccgccacggugugcggccccaagaaguccaccaaccuggucaagaacaagugcgugaacuucaacuucaacggccucaccgggaccggcgugcugaccgagagcaacaagaaguuccugccguuccagcaguucgggcgcgacaucgccgacacgaccgacgcgguccgcgacccccagacccuggagauccucgacaucacccccugcagcuucggcgggguguccgugaucacgccgggcaccaacaccagcaaccaggucgccgugcuguaccagggcgugaacugcaccgagguccccguggccauccacgccgaccagcugacgcccaccuggcggguguacuccaccgggagcaacgucuuccagacccgcgccggcugccucaucggggcggagcacgugaacaacuccuacgagugcgacauccccaucggcgccggcaucugcgccagcuaccagacgcagaccaacuccccgcggcgcgcccggagcguggcgucccagagcaucaucgccuacaccaugucccugggggccgagaacagcgucgccuacuccaacaacagcaucgccauccccaccaacuucacgaucuccgugaccaccgagauccugcccgugagcaugaccaagacgagcgucgacugcaccauguacaucugcggcgacuccaccgagugcagcaaccuccugcugcaguacggguccuucugcacccagcucaaccgcgcgcugacgggcaucgccguggagcaggacaagaacacccaggagguguucgcccaggucaagcagaucuacaagacgcccccgaucaaggacuucgggggcuucaacuucagccagauccugcccgaccccuccaagcccagcaagcgguccuucaucgaggaccuccuguucaacaaggugacccuggccgacgccggcuucaucaagcaguacggggacugccucggcgacaucgcggcccgcgaccugaucugcgcccagaaguucaacgggcugaccgugcucccgccccugcugaccgacgagaugaucgcccaguacaccagcgcccuccuggcgggcaccaucacguccggguggaccuucggcgccggcgccgcccugcagauccccuucgcgaugcagauggccuaccgguucaacgggaucggcgucacccagaacgugcucuacgagaaccagaagcugaucgccaaccaguucaacagcgccaucgggaagauccaggacucccugagcuccaccgccagcgcgcucggcaagcugcaggacguggucaaccagaacgcccaggcccugaacacgcucgugaagcagcuguccagcaacuucggggccaucuccagcgugcugaacgacauccucucccgccuggacaaggucgaggccgaggugcagaucgaccggcugaucaccggccgccuccagagccugcagaccuacgugacccagcagcugauccgggcggccgagauccgcgccagcgccaaccucgccgcgaccaagauguccgagugcguccugggccagagcaagcggguggacuucugcgggaagggcuaccaccugauguccuucccccagagcgccccgcacgggguggucuuccuccacgugacguacguccccgcccaggagaagaacuucaccaccgcccccgcgaucugccacgacggcaaggcccacuucccccgcgaggggguguucguguccaacggcacccacugguucgucacgcagcggaacuucuacgagccgcagaucaucaccaccgacaacaccuucgugagcggcaacugcgacguggucaucgggaucgugaacaacacgguguacgacccccugcagcccgagcuggacuccuucaaggaggagcucgacaaguacuucaagaaccacaccagccccgacgucgaccugggcgacaucuccgggaucaacgccagcguggugaacauccagaaggagaucgaccgccugaacgaggucgccaagaaccucaacgagucccugaucgaccugcaggagcucggcaaguacgagcaguacaucaaguggccgugguacaucuggcugggcuucaucgccgggcugaucgcgaucgugauggugaccaucaugcucugcugcaugaccagcugcugcuccugccugaagggcugcugcagcugcggguccugcugcaaguucgacgaggacgacagcgagcccguccugaagggcgugaagcuccacuacacgugaggacuagucccuguucccagagcccacuuuuuuuucuuuuuuugaaauaaaauagccugucuuucagaucuaaaaaaaaaaaaaaaaaaaaaaaaaaaaaaaaaaaaaaaaaaaaaaaaaaaaaaaaaaaaaaaaaaaaaaaaaaaaaaaaaaaaaaaaaaaaaaaaaaaa

SEQ ID NO: 24763 - RNA, 4070 nt, Artificial Sequence
  SARS-CoV-2/Wuhan/WIV05/2019__EPI_ISL_402128 spike protein mRNA gc (1-1273)(L18F_T20N_P26S_D138Y_R190S_K417T_E484K_N501Y_D614G_H655Y _T1027I)
aggagagucccgcagucggcguccagcggcucugcuuguucgugugugugucguugcaggccuuauucaagcuuaccauguucguguuccugguccuccugccccuggugagcucccagugcgugaacuucaccaaccgcacccagcucccgagcgccuacacgaacuccuucacccggggcgucuacuaccccgacaagguguuccgcagcuccgugcugcacagcacccaggaccuguuccuccccuucuucuccaacgucaccugguuccacgccauccacgugagcgggacgaacggcaccaagcgguucgacaaccccgugcugccguucaacgacggggucuacuucgcguccaccgagaaguccaacaucauccgcggcuggaucuucgggaccacgcuggacuccaagacccagagccuccugaucgugaacaacgccaccaacguggucaucaaggugugcgaguuccaguucugcaacuaccccuuccugggcguguacuaccacaagaacaacaaguccuggauggagagcgaguuccgggucuacuccagcgccaacaacugcaccuucgaguacgugucccagcccuuccucauggaccuggagggcaagcaggggaacuucaagaaccugagcgaguucguguucaagaacaucgacggcuacuucaagaucuacuccaagcacacgcccaucaaccucguccgcgaccugccgcagggguucagcgcccuggagccccucguggaccugcccaucggcaucaacaucacccgguuccagacccugcucgcccugcaccgcagcuaccugacccccggggacuccagcuccggcuggacggcgggcgccgccgccuacuacgugggguaccuccagccgcggaccuuccugcugaaguacaacgagaacggcaccaucaccgacgcggucgacugcgcccucgacccccugagcgagacgaagugcacccugaaguccuucaccguggagaaggggaucuaccagaccagcaacuuccgcgugcagcccacggaguccaucguccgguuccccaacaucaccaaccucugcccguucggcgagguguucaacgccacccgcuucgccagcgucuacgccuggaaccggaagcgcaucuccaacugcguggcggacuacagcgugcuguacaacuccgccagcuucuccaccuucaagugcuacggcgucagccccacgaagcugaacgaccucugcuucaccaacguguacgccgacuccuucgugauccgcggggacgagguccggcagaucgcccccggccagaccgggaccaucgccgacuacaacuacaagcugcccgacgacuucacgggcugcgugaucgcguggaacagcaacaaccuggacuccaaggucgggggcaacuacaacuaccucuaccggcuguuccgcaagagcaaccugaagccguucgagcgggacaucuccaccgagaucuaccaggccggcagcacccccugcaacggggugaagggcuucaacugcuacuucccccuccagagcuacggguuccagcccaccuacggcgugggguaccagccguaccgcguggucgugcuguccuucgagcugcuccacgcccccgccacggugugcggccccaagaaguccaccaaccuggucaagaacaagugcgugaacuucaacuucaacggccugaccgggaccggcgugcucaccgagagcaacaagaaguuccugcccuuccagcaguucgggcgggacaucgccgacacgaccgacgcgguccgcgacccgcagacccuggagauccuggacaucacccccugcagcuucggcgggguguccgugaucacgcccggcaccaacaccagcaaccaggucgccgugcucuaccagggcgugaacugcaccgaggucccgguggccauccacgccgaccagcugacgcccaccuggcgcguguacuccaccgggagcaacgucuuccagacccgggccggcugccugaucggggcggaguacgugaacaacuccuacgagugcgacauccccaucggcgccggcaucugcgccagcuaccagacgcagaccaacagcccccgccgggcccgcagcguggcgucccagagcaucaucgccuacaccaugucccucggggccgagaacagcgucgccuacuccaacaacagcaucgccaucccgaccaacuucacgaucagcgugaccaccgagauccugcccguguccaugaccaagacgagcgucgacugcaccauguacaucugcggcgacuccaccgagugcagcaaccugcuccugcaguacggguccuucugcacccagcugaaccgggcgcucacgggcaucgccguggagcaggacaagaacacccaggagguguucgcccaggucaagcagaucuacaagaccccgcccaucaaggacuucgggggcuucaacuucagccagauccugcccgaccccuccaagcccagcaagcgcuccuucaucgaggaccuccuguucaacaaggugacccuggccgacgccggcuucaucaagcaguacggggacugccugggcgacaucgcggcccgggaccucaucugcgcccagaaguucaacgggcugacggugcugcccccgcuccugaccgacgagaugaucgcccaguacaccagcgcccugcucgcgggcaccaucacguccggguggaccuucggcgccggcgccgcccugcagauccccuucgcgaugcagauggccuaccgcuucaacgggaucggcgucacccagaacgugcuguacgagaaccagaagcucaucgccaaccaguucaacagcgccaucgggaagauccaggacucccugagcuccaccgccagcgcgcugggcaagcuccaggacguggucaaccagaacgcccaggcccugaacacgcuggugaagcagcucuccagcaacuucggggccaucuccagcgugcugaacgacauccugagccggcucgacaaggucgaggccgaggugcagaucgaccgccugaucaccggccggcugcagucccuccagaccuacgugacccagcagcugauccgcgcggccgagauccgggccagcgccaaccuggccgcgaucaagauguccgagugcguccucggccagagcaagcgcguggacuucugcgggaagggcuaccaccugauguccuucccccagagcgcgccccacgggguggucuuccugcacgugaccuacgucccggcccaggagaagaacuucacgaccgcccccgccaucugccacgacggcaaggcccacuucccccgggaggggguguucguguccaacggcacccacugguucgucacccagcgcaacuucuacgagccccagaucaucacgaccgacaacaccuucgugagcggcaacugcgacguggucaucgggaucgugaacaacaccguguacgacccgcuccagcccgagcuggacuccuucaaggaggagcuggacaaguacuucaagaaccacacgagccccgacgucgaccucggcgacaucuccgggaucaacgccagcguggugaacauccagaaggagaucgaccggcugaacgaggucgccaagaaccugaacgagucccucaucgaccugcaggagcugggcaaguacgagcaguacaucaaguggcccugguacaucuggcucggcuucaucgccgggcugaucgcgaucgugauggugaccaucaugcugugcugcaugaccagcugcugcuccugccucaagggcugcugcagcugcggguccugcugcaaguucgacgaggacgacagcgagccgguccugaagggcgugaagcugcacuacaccugaggacuagucccuguucccagagcccacuuuuuuuucuuuuuuugaaauaaaauagccugucuuucagaucuaaaaaaaaaaaaaaaaaaaaaaaaaaaaaaaaaaaaaaaaaaaaaaaaaaaaaaaaaaaaaaaaaaaaaaaaaaaaaaaaaaaaaaaaaaaaaaaaaaaa

SEQ ID NO: 24764 - RNA, 4070 nt, Artificial Sequence
  SARS-CoV-2/Wuhan/WIV05/2019__EPI_ISL_402128 spike protein mRNA gc (1-1273)(S13I_W152C_L452R_D614G)
aggagagucccgcagucggcguccagcggcucugcuuguucgugugugugucguugcaggccuuauucaagcuuaccauguucguguuccugguccuccugccccuggugagcauccagugcgugaaccucaccacccgcacgcagcugccgcccgccuacaccaacuccuucacccggggcgucuacuaccccgacaagguguuccgcagcuccgugcugcacagcacccaggaccucuuccugcccuucuucuccaacgucacgugguuccacgccauccacgugagcgggaccaacggcaccaagcgguucgacaacccggugcugcccuucaacgacggggucuacuucgcguccaccgagaaguccaacaucauccgcggcuggaucuucgggacgacccucgacagcaagacccagagccugcugaucgugaacaacgccaccaacguggucaucaaggugugcgaguuccaguucugcaacgaccccuuccucggcguguacuaccacaagaacaacaaguccugcauggagagcgaguuccgggucuacuccagcgccaacaacugcacguucgaguacgugucccagcccuuccugauggaccuggagggcaagcaggggaacuucaagaaccuccgcgaguucguguucaagaacaucgacggcuacuucaagaucuacagcaagcacaccccgaucaaccugguccgggaccugccccagggguucuccgcccucgagccccugguggaccugcccaucggcaucaacaucacccgcuuccagacccuccuggcccugcaccggagcuaccucacgccgggggacuccagcagcggcuggaccgcgggcgccgccgccuacuacgugggguaccugcagccccgcaccuuccugcucaaguacaacgagaacggcaccaucacggacgcggucgacugcgcccuggacccccuguccgagaccaagugcacccucaagagcuucaccguggagaaggggaucuaccagacguccaacuuccgggugcagcccaccgagagcaucguccgcuucccgaacaucaccaaccugugccccuucggcgagguguucaacgccacccgguucgccuccgucuacgccuggaaccgcaagcggaucagcaacugcguggcggacuacuccgugcuguacaacagcgccuccuucagcacguucaagugcuacggcgucucccccaccaagcucaacgaccugugcuucaccaacguguacgccgacagcuucgugauccgcggggacgagguccggcagaucgcccccggccagaccgggaagaucgccgacuacaacuacaagcugccggacgacuucacgggcugcgugaucgcguggaacuccaacaaccucgacagcaaggucgggggcaacuacaacuaccgcuaccggcuguuccgcaaguccaaccugaagcccuucgagcgggacaucagcaccgagaucuaccaggccggcuccacccccugcaacgggguggagggcuucaacugcuacuucccccuccagagcuacggguuccagccgaccaacggcgugggguaccagcccuaccgcguggucgugcuguccuucgagcugcuccacgcccccgccacggugugcggccccaagaaguccaccaaccuggucaagaacaagugcgugaacuucaacuucaacggccugaccgggaccggcgugcucaccgagagcaacaagaaguuccugccguuccagcaguucgggcgcgacaucgccgacacgaccgacgcgguccgggacccccagacccuggagauccuggacaucacccccugcagcuucggcggggugagcgugaucacgccgggcaccaacaccuccaaccaggucgccgugcucuaccagggcgugaacugcaccgagguccccguggccauccacgccgaccagcugacgcccaccuggcgcguguacagcaccggguccaacgucuuccagacccgggccggcugccugaucggggcggagcacgugaacaacagcuacgagugcgacauccccaucggcgccggcaucugcgccuccuaccagacgcagaccaacagcccgcgccgggcccgcuccguggcgagccaguccaucaucgccuacaccaugagccucggggccgagaacuccgucgccuacagcaacaacuccaucgccauccccaccaacuucacgaucagcgugaccaccgagauccugcccguguccaugaccaagacgagcgucgacugcaccauguacaucugcggcgacagcaccgagugcuccaaccugcuccugcaguacgggagcuucugcacccagcugaaccgggcgcucacgggcaucgccguggagcaggacaagaacacccaggagguguucgcccaggucaagcagaucuacaagacgcccccgaucaaggacuucgggggcuucaacuucucccagauccugcccgaccccagcaagcccuccaagcgcagcuucaucgaggaccuccuguucaacaaggugacccuggccgacgccggcuucaucaagcaguacggggacugccugggcgacaucgcggcccgggaccucaucugcgcccagaaguucaacgggcugaccgugcugccgccccuccugaccgacgagaugaucgcccaguacaccuccgcccugcucgcgggcaccaucacgagcggguggaccuucggcgccggcgccgcccugcagauccccuucgcgaugcagauggccuaccgcuucaacgggaucggcgucacccagaacgugcuguacgagaaccagaagcucaucgccaaccaguucaacuccgccaucgggaagauccaggacagccuguccagcaccgccuccgcgcugggcaagcuccaggacguggucaaccagaacgcccaggcccugaacacgcuggugaagcagcucagcuccaacuucggggccaucagcuccgugcugaacgacauccugagccggcucgacaaggucgaggccgaggugcagaucgaccgccugaucaccggccggcugcagucccuccagaccuacgugacccagcagcugauccgcgcggccgagauccgggccagcgccaaccuggccgcgaccaagaugagcgagugcguccucggccaguccaagcgcguggacuucugcgggaagggcuaccaccugaugagcuucccccaguccgccccgcacgggguggucuuccugcacgugacguacguccccgcccaggagaagaacuucaccaccgcccccgcgaucugccacgacggcaaggcccacuucccccgggaggggguguucgugagcaacggcacccacugguucgucacgcagcgcaacuucuacgagccgcagaucaucaccaccgacaacaccuucguguccggcaacugcgacguggucaucgggaucgugaacaacacgguguacgacccccuccagcccgagcuggacagcuucaaggaggagcuggacaaguacuucaagaaccacaccucccccgacgucgaccucggcgacaucagcgggaucaacgccuccguggugaacauccagaaggagaucgaccggcugaacgaggucgccaagaaccugaacgagagccucaucgaccugcaggagcugggcaaguacgagcaguacaucaaguggccgugguacaucuggcucggcuucaucgccgggcugaucgcgaucgugauggugaccaucaugcugugcugcaugaccuccugcugcagcugccucaagggcugcugcuccugcgggagcugcugcaaguucgacgaggacgacuccgagcccguccugaagggcgugaagcugcacuacacgugaggacuagucccuguucccagagcccacuuuuuuuucuuuuuuugaaauaaaauagccugucuuucagaucuaaaaaaaaaaaaaaaaaaaaaaaaaaaaaaaaaaaaaaaaaaaaaaaaaaaaaaaaaaaaaaaaaaaaaaaaaaaaaaaaaaaaaaaaaaaaaaaaaaaa

SEQ ID NO: 24765 - RNA, 4070 nt, Artificial Sequence
  SARS-CoV-2/Wuhan/WIV05/2019__EPI_ISL_402128 spike protein mRNA gc (1-1273)
aggagagucccgcagucggcguccagcggcucugcuuguucgugugugugucguugcaggccuuauucaagcuuaccauguucguguuccuggugcugcugccccuggugagcagccagugcgugaaccugaccacccggacccagcugccaccagccuacaccaacagcuucacccggggcgucuacuaccccgacaagguguuccggagcagcguccugcacagcacccaggaccuguuccugcccuucuucagcaacgugaccugguuccacgccauccacgugagcggcaccaacggcaccaagcgguucgacaaccccgugcugcccuucaacgacggcguguacuucgccagcaccgagaagagcaacaucauccggggcuggaucuucggcaccacccuggacagcaagacccagagccugcugaucgugaauaacgccaccaacguggugaucaaggugugcgaguuccaguucugcaacgaccccuuccugggcguguacuaccacaagaacaacaagagcuggauggagagcgaguuccggguguacagcagcgccaacaacugcaccuucgaguacgugagccagcccuuccugauggaccuggagggcaagcagggcaacuucaagaaccugcgggaguucguguucaagaacaucgacggcuacuucaagaucuacagcaagcacaccccaaucaaccuggugcgggaucugccccagggcuucucagcccuggagccccugguggaccugcccaucggcaucaacaucacccgguuccagacccugcuggcccugcaccggagcuaccugaccccaggcgacagcagcagcggguggacagcaggcgcggcugcuuacuacgugggcuaccugcagccccggaccuuccugcugaaguacaacgagaacggcaccaucaccgacgccguggacugcgcccuggacccucugagcgagaccaagugcacccugaagagcuucaccguggagaagggcaucuaccagaccagcaacuuccgggugcagcccaccgagagcaucgugcgguuccccaacaucaccaaccugugccccuucggcgagguguucaacgccacccgguucgccagcguguacgccuggaaccggaagcggaucagcaacugcguggccgacuacagcgugcuguacaacagcgccagcuucagcaccuucaagugcuacggcgugagccccaccaagcugaacgaccugugcuucaccaacguguacgccgacagcuucgugauccguggcgacgaggugcggcagaucgcacccggccagacaggcaagaucgccgacuacaacuacaagcugcccgacgacuucaccggcugcgugaucgccuggaacagcaacaaccucgacagcaaggugggcggcaacuacaacuaccuguaccggcuguuccggaagagcaaccugaagcccuucgagcgggacaucagcaccgagaucuaccaagccggcuccaccccuugcaacggcguggagggcuucaacugcuacuucccucugcagagcuacggcuuccagcccaccaacggcgugggcuaccagcccuaccgggugguggugcugagcuucgagcugcugcacgccccagccaccguguguggccccaagaagagcaccaaccuggugaagaacaagugcgugaacuucaacuucaacggccuuaccggcaccggcgugcugaccgagagcaacaagaaauuccugcccuuucagcaguucggccgggacaucgccgacaccaccgacgcugugcgggauccccagacccuggagauccuggacaucaccccuugcagcuucggcggcgugagcgugaucaccccaggcaccaacaccagcaaccagguggccgugcuguaccaggacgugaacugcaccgaggugcccguggccauccacgccgaccagcugacacccaccuggcgggucuacagcaccggcagcaacguguuccagacccgggccgguugccugaucggcgccgagcacgugaacaacagcuacgagugcgacauccccaucggcgccggcaucugugccagcuaccagacccagaccaauucaccccggagggcaaggagcguggccagccagagcaucaucgccuacaccaugagccugggcgccgagaacagcguggccuacagcaacaacagcaucgccauccccaccaacuucaccaucagcgugaccaccgagauucugcccgugagcaugaccaagaccagcguggacugcaccauguacaucugcggcgacagcaccgagugcagcaaccugcugcugcaguacggcagcuucugcacccagcugaaccgggcccugaccggcaucgccguggagcaggacaagaacacccaggagguguucgcccaggugaagcagaucuacaagaccccucccaucaaggacuucggcggcuucaacuucagccagauccugcccgaccccagcaagcccagcaagcggagcuucaucgaggaccugcuguucaacaaggugacccuagccgacgccggcuucaucaagcaguacggcgacugccucggcgacauagccgcccgggaccugaucugcgcccagaaguucaacggccugaccgugcugccuccccugcugaccgacgagaugaucgcccaguacaccagcgcccuguuagccggaaccaucaccagcggcuggacuuucggcgcuggagccgcucugcagauccccuucgccaugcagauggccuaccgguucaacggcaucggcgugacccagaacgugcuguacgagaaccagaagcugaucgccaaccaguucaacagcgccaucggcaagauccaggacagccugagcagcaccgcuagcgcccugggcaagcugcaggacguggugaaccagaacgcccaggcccugaacacccuggugaagcagcugagcagcaacuucggcgccaucagcagcgugcugaacgacauccugagccggcuggacaaggucgaggccgaggugcagaucgaccggcugaucacuggccggcugcagagccugcagaccuacgugacccagcagcugauccgggccgccgagauucgggccagcgccaaccuggccgccaccaagaugagcgagugcgugcugggccagagcaagcggguggacuucugcggcaagggcuaccaccugaugagcuuuccccagagcgcaccccacggagugguguuccugcacgugaccuacgugcccgcccaggagaagaacuucaccaccgccccagccaucugccacgacggcaaggcccacuuuccccgggagggcguguucgugagcaacggcacccacugguucgugacccagcggaacuucuacgagccccagaucaucaccaccgacaacaccuucgugagcggcaacugcgacguggugaucggcaucgugaacaacaccguguacgauccccugcagcccgagcuggacagcuucaaggaggagcuggacaaguacuucaagaaucacaccagccccgacguggaccugggcgacaucagcggcaucaacgccagcguggugaacauccagaaggagaucgaucggcugaacgagguggccaagaaccugaacgagagccugaucgaccugcaggagcugggcaaguacgagcaguacaucaaguggcccugguacaucuggcugggcuucaucgccggccugaucgccaucgugauggugaccaucaugcugugcugcaugaccagcugcugcagcugccugaagggcuguugcagcugcggcagcugcugcaaguucgacgaggacgacagcgagcccgugcugaagggcgugaagcugcacuacaccugaggacuagucccuguucccagagcccacuuuuuuuucuuuuuuugaaauaaaauagccugucuuucagaucuaaaaaaaaaaaaaaaaaaaaaaaaaaaaaaaaaaaaaaaaaaaaaaaaaaaaaaaaaaaaaaaaaaaaaaaaaaaaaaaaaaaaaaaaaaaaaaaaaaaa

SEQ ID NO: 24766 - RNA, 4070 nt, Artificial Sequence
  SARS-CoV-2/Wuhan/WIV05/2019__EPI_ISL_402128 spike protein mRNA gc (1-1273)(D614G)
aggagagucccgcagucggcguccagcggcucugcuuguucgugugugugucguugcaggccuuauucaagcuuaccauguucguguuccuggugcugcugccccuggugagcagccagugcgugaaccugaccacccggacccagcugccaccagccuacaccaacagcuucacccggggcgucuacuaccccgacaagguguuccggagcagcguccugcacagcacccaggaccuguuccugcccuucuucagcaacgugaccugguuccacgccauccacgugagcggcaccaacggcaccaagcgguucgacaaccccgugcugcccuucaacgacggcguguacuucgccagcaccgagaagagcaacaucauccggggcuggaucuucggcaccacccuggacagcaagacccagagccugcugaucgugaauaacgccaccaacguggugaucaaggugugcgaguuccaguucugcaacgaccccuuccugggcguguacuaccacaagaacaacaagagcuggauggagagcgaguuccggguguacagcagcgccaacaacugcaccuucgaguacgugagccagcccuuccugauggaccuggagggcaagcagggcaacuucaagaaccugcgggaguucguguucaagaacaucgacggcuacuucaagaucuacagcaagcacaccccaaucaaccuggugcgggaucugccccagggcuucucagcccuggagccccugguggaccugcccaucggcaucaacaucacccgguuccagacccugcuggcccugcaccggagcuaccugaccccaggcgacagcagcagcggguggacagcaggcgcggcugcuuacuacgugggcuaccugcagccccggaccuuccugcugaaguacaacgagaacggcaccaucaccgacgccguggacugcgcccuggacccucugagcgagaccaagugcacccugaagagcuucaccguggagaagggcaucuaccagaccagcaacuuccgggugcagcccaccgagagcaucgugcgguuccccaacaucaccaaccugugccccuucggcgagguguucaacgccacccgguucgccagcguguacgccuggaaccggaagcggaucagcaacugcguggccgacuacagcgugcuguacaacagcgccagcuucagcaccuucaagugcuacggcgugagccccaccaagcugaacgaccugugcuucaccaacguguacgccgacagcuucgugauccguggcgacgaggugcggcagaucgcacccggccagacaggcaagaucgccgacuacaacuacaagcugcccgacgacuucaccggcugcgugaucgccuggaacagcaacaaccucgacagcaaggugggcggcaacuacaacuaccuguaccggcuguuccggaagagcaaccugaagcccuucgagcgggacaucagcaccgagaucuaccaagccggcuccaccccuugcaacggcguggagggcuucaacugcuacuucccucugcagagcuacggcuuccagcccaccaacggcgugggcuaccagcccuaccgggugguggugcugagcuucgagcugcugcacgccccagccaccguguguggccccaagaagagcaccaaccuggugaagaacaagugcgugaacuucaacuucaacggccuuaccggcaccggcgugcugaccgagagcaacaagaaauuccugcccuuucagcaguucggccgggacaucgccgacaccaccgacgcugugcgggauccccagacccuggagauccuggacaucaccccuugcagcuucggcggcgugagcgugaucaccccaggcaccaacaccagcaaccagguggccgugcuguaccagggcgugaacugcaccgaggugcccguggccauccacgccgaccagcugacacccaccuggcgggucuacagcaccggcagcaacguguuccagacccgggccgguugccugaucggcgccgagcacgugaacaacagcuacgagugcgacauccccaucggcgccggcaucugugccagcuaccagacccagaccaauucaccccggagggcaaggagcguggccagccagagcaucaucgccuacaccaugagccugggcgccgagaacagcguggccuacagcaacaacagcaucgccauccccaccaacuucaccaucagcgugaccaccgagauucugcccgugagcaugaccaagaccagcguggacugcaccauguacaucugcggcgacagcaccgagugcagcaaccugcugcugcaguacggcagcuucugcacccagcugaaccgggcccugaccggcaucgccguggagcaggacaagaacacccaggagguguucgcccaggugaagcagaucuacaagaccccucccaucaaggacuucggcggcuucaacuucagccagauccugcccgaccccagcaagcccagcaagcggagcuucaucgaggaccugcuguucaacaaggugacccuagccgacgccggcuucaucaagcaguacggcgacugccucggcgacauagccgcccgggaccugaucugcgcccagaaguucaacggccugaccgugcugccuccccugcugaccgacgagaugaucgcccaguacaccagcgcccuguuagccggaaccaucaccagcggcuggacuuucggcgcuggagccgcucugcagauccccuucgccaugcagauggccuaccgguucaacggcaucggcgugacccagaacgugcuguacgagaaccagaagcugaucgccaaccaguucaacagcgccaucggcaagauccaggacagccugagcagcaccgcuagcgcccugggcaagcugcaggacguggugaaccagaacgcccaggcccugaacacccuggugaagcagcugagcagcaacuucggcgccaucagcagcgugcugaacgacauccugagccggcuggacaaggucgaggccgaggugcagaucgaccggcugaucacuggccggcugcagagccugcagaccuacgugacccagcagcugauccgggccgccgagauucgggccagcgccaaccuggccgccaccaagaugagcgagugcgugcugggccagagcaagcggguggacuucugcggcaagggcuaccaccugaugagcuuuccccagagcgcaccccacggagugguguuccugcacgugaccuacgugcccgcccaggagaagaacuucaccaccgccccagccaucugccacgacggcaaggcccacuuuccccgggagggcguguucgugagcaacggcacccacugguucgugacccagcggaacuucuacgagccccagaucaucaccaccgacaacaccuucgugagcggcaacugcgacguggugaucggcaucgugaacaacaccguguacgauccccugcagcccgagcuggacagcuucaaggaggagcuggacaaguacuucaagaaucacaccagccccgacguggaccugggcgacaucagcggcaucaacgccagcguggugaacauccagaaggagaucgaucggcugaacgagguggccaagaaccugaacgagagccugaucgaccugcaggagcugggcaaguacgagcaguacaucaaguggcccugguacaucuggcugggcuucaucgccggccugaucgccaucgugauggugaccaucaugcugugcugcaugaccagcugcugcagcugccugaagggcuguugcagcugcggcagcugcugcaaguucgacgaggacgacagcgagcccgugcugaagggcgugaagcugcacuacaccugaggacuagucccuguucccagagcccacuuuuuuuucuuuuuuugaaauaaaauagccugucuuucagaucuaaaaaaaaaaaaaaaaaaaaaaaaaaaaaaaaaaaaaaaaaaaaaaaaaaaaaaaaaaaaaaaaaaaaaaaaaaaaaaaaaaaaaaaaaaaaaaaaaaaa

SEQ ID NO: 24767 - RNA, 4070 nt, Artificial Sequence
  SARS-CoV-2/Wuhan/WIV05/2019__EPI_ISL_402128 spike protein mRNA gc (1-1273)(A222V_D614G)
aggagagucccgcagucggcguccagcggcucugcuuguucgugugugugucguugcaggccuuauucaagcuuaccauguucguguuccuggugcugcugccccuggugagcagccagugcgugaaccugaccacccggacccagcugccaccagccuacaccaacagcuucacccggggcgucuacuaccccgacaagguguuccggagcagcguccugcacagcacccaggaccuguuccugcccuucuucagcaacgugaccugguuccacgccauccacgugagcggcaccaacggcaccaagcgguucgacaaccccgugcugcccuucaacgacggcguguacuucgccagcaccgagaagagcaacaucauccggggcuggaucuucggcaccacccuggacagcaagacccagagccugcugaucgugaauaacgccaccaacguggugaucaaggugugcgaguuccaguucugcaacgaccccuuccugggcguguacuaccacaagaacaacaagagcuggauggagagcgaguuccggguguacagcagcgccaacaacugcaccuucgaguacgugagccagcccuuccugauggaccuggagggcaagcagggcaacuucaagaaccugcgggaguucguguucaagaacaucgacggcuacuucaagaucuacagcaagcacaccccaaucaaccuggugcgggaucugccccagggcuucucagugcuggagccccugguggaccugcccaucggcaucaacaucacccgguuccagacccugcuggcccugcaccggagcuaccugaccccaggcgacagcagcagcggguggacagcaggcgcggcugcuuacuacgugggcuaccugcagccccggaccuuccugcugaaguacaacgagaacggcaccaucaccgacgccguggacugcgcccuggacccucugagcgagaccaagugcacccugaagagcuucaccguggagaagggcaucuaccagaccagcaacuuccgggugcagcccaccgagagcaucgugcgguuccccaacaucaccaaccugugccccuucggcgagguguucaacgccacccgguucgccagcguguacgccuggaaccggaagcggaucagcaacugcguggccgacuacagcgugcuguacaacagcgccagcuucagcaccuucaagugcuacggcgugagccccaccaagcugaacgaccugugcuucaccaacguguacgccgacagcuucgugauccguggcgacgaggugcggcagaucgcacccggccagacaggcaagaucgccgacuacaacuacaagcugcccgacgacuucaccggcugcgugaucgccuggaacagcaacaaccucgacagcaaggugggcggcaacuacaacuaccuguaccggcuguuccggaagagcaaccugaagcccuucgagcgggacaucagcaccgagaucuaccaagccggcuccaccccuugcaacggcguggagggcuucaacugcuacuucccucugcagagcuacggcuuccagcccaccaacggcgugggcuaccagcccuaccgggugguggugcugagcuucgagcugcugcacgccccagccaccguguguggccccaagaagagcaccaaccuggugaagaacaagugcgugaacuucaacuucaacggccuuaccggcaccggcgugcugaccgagagcaacaagaaauuccugcccuuucagcaguucggccgggacaucgccgacaccaccgacgcugugcgggauccccagacccuggagauccuggacaucaccccuugcagcuucggcggcgugagcgugaucaccccaggcaccaacaccagcaaccagguggccgugcuguaccagggcgugaacugcaccgaggugcccguggccauccacgccgaccagcugacacccaccuggcgggucuacagcaccggcagcaacguguuccagacccgggccgguugccugaucggcgccgagcacgugaacaacagcuacgagugcgacauccccaucggcgccggcaucugugccagcuaccagacccagaccaauucaccccggagggcaaggagcguggccagccagagcaucaucgccuacaccaugagccugggcgccgagaacagcguggccuacagcaacaacagcaucgccauccccaccaacuucaccaucagcgugaccaccgagauucugcccgugagcaugaccaagaccagcguggacugcaccauguacaucugcggcgacagcaccgagugcagcaaccugcugcugcaguacggcagcuucugcacccagcugaaccgggcccugaccggcaucgccguggagcaggacaagaacacccaggagguguucgcccaggugaagcagaucuacaagaccccucccaucaaggacuucggcggcuucaacuucagccagauccugcccgaccccagcaagcccagcaagcggagcuucaucgaggaccugcuguucaacaaggugacccuagccgacgccggcuucaucaagcaguacggcgacugccucggcgacauagccgcccgggaccugaucugcgcccagaaguucaacggccugaccgugcugccuccccugcugaccgacgagaugaucgcccaguacaccagcgcccuguuagccggaaccaucaccagcggcuggacuuucggcgcuggagccgcucugcagauccccuucgccaugcagauggccuaccgguucaacggcaucggcgugacccagaacgugcuguacgagaaccagaagcugaucgccaaccaguucaacagcgccaucggcaagauccaggacagccugagcagcaccgcuagcgcccugggcaagcugcaggacguggugaaccagaacgcccaggcccugaacacccuggugaagcagcugagcagcaacuucggcgccaucagcagcgugcugaacgacauccugagccggcuggacaaggucgaggccgaggugcagaucgaccggcugaucacuggccggcugcagagccugcagaccuacgugacccagcagcugauccgggccgccgagauucgggccagcgccaaccuggccgccaccaagaugagcgagugcgugcugggccagagcaagcggguggacuucugcggcaagggcuaccaccugaugagcuuuccccagagcgcaccccacggagugguguuccugcacgugaccuacgugcccgcccaggagaagaacuucaccaccgccccagccaucugccacgacggcaaggcccacuuuccccgggagggcguguucgugagcaacggcacccacugguucgugacccagcggaacuucuacgagccccagaucaucaccaccgacaacaccuucgugagcggcaacugcgacguggugaucggcaucgugaacaacaccguguacgauccccugcagcccgagcuggacagcuucaaggaggagcuggacaaguacuucaagaaucacaccagccccgacguggaccugggcgacaucagcggcaucaacgccagcguggugaacauccagaaggagaucgaucggcugaacgagguggccaagaaccugaacgagagccugaucgaccugcaggagcugggcaaguacgagcaguacaucaaguggcccugguacaucuggcugggcuucaucgccggccugaucgccaucgugauggugaccaucaugcugugcugcaugaccagcugcugcagcugccugaagggcuguugcagcugcggcagcugcugcaaguucgacgaggacgacagcgagcccgugcugaagggcgugaagcugcacuacaccugaggacuagucccuguucccagagcccacuuuuuuuucuuuuuuugaaauaaaauagccugucuuucagaucuaaaaaaaaaaaaaaaaaaaaaaaaaaaaaaaaaaaaaaaaaaaaaaaaaaaaaaaaaaaaaaaaaaaaaaaaaaaaaaaaaaaaaaaaaaaaaaaaaaaa

SEQ ID NO: 24768 - RNA, 4070 nt, Artificial Sequence
  SARS-CoV-2/Wuhan/WIV05/2019__EPI_ISL_402128 spike protein mRNA gc (1-1273)(N439K_D614G)
aggagagucccgcagucggcguccagcggcucugcuuguucgugugugugucguugcaggccuuauucaagcuuaccauguucguguuccuggugcugcugccccuggugagcagccagugcgugaaccugaccacccggacccagcugccaccagccuacaccaacagcuucacccggggcgucuacuaccccgacaagguguuccggagcagcguccugcacagcacccaggaccuguuccugcccuucuucagcaacgugaccugguuccacgccauccacgugagcggcaccaacggcaccaagcgguucgacaaccccgugcugcccuucaacgacggcguguacuucgccagcaccgagaagagcaacaucauccggggcuggaucuucggcaccacccuggacagcaagacccagagccugcugaucgugaauaacgccaccaacguggugaucaaggugugcgaguuccaguucugcaacgaccccuuccugggcguguacuaccacaagaacaacaagagcuggauggagagcgaguuccggguguacagcagcgccaacaacugcaccuucgaguacgugagccagcccuuccugauggaccuggagggcaagcagggcaacuucaagaaccugcgggaguucguguucaagaacaucgacggcuacuucaagaucuacagcaagcacaccccaaucaaccuggugcgggaucugccccagggcuucucagcccuggagccccugguggaccugcccaucggcaucaacaucacccgguuccagacccugcuggcccugcaccggagcuaccugaccccaggcgacagcagcagcggguggacagcaggcgcggcugcuuacuacgugggcuaccugcagccccggaccuuccugcugaaguacaacgagaacggcaccaucaccgacgccguggacugcgcccuggacccucugagcgagaccaagugcacccugaagagcuucaccguggagaagggcaucuaccagaccagcaacuuccgggugcagcccaccgagagcaucgugcgguuccccaacaucaccaaccugugccccuucggcgagguguucaacgccacccgguucgccagcguguacgccuggaaccggaagcggaucagcaacugcguggccgacuacagcgugcuguacaacagcgccagcuucagcaccuucaagugcuacggcgugagccccaccaagcugaacgaccugugcuucaccaacguguacgccgacagcuucgugauccguggcgacgaggugcggcagaucgcacccggccagacaggcaagaucgccgacuacaacuacaagcugcccgacgacuucaccggcugcgugaucgccuggaacagcaagaaccucgacagcaaggugggcggcaacuacaacuaccuguaccggcuguuccggaagagcaaccugaagcccuucgagcgggacaucagcaccgagaucuaccaagccggcuccaccccuugcaacggcguggagggcuucaacugcuacuucccucugcagagcuacggcuuccagcccaccaacggcgugggcuaccagcccuaccgggugguggugcugagcuucgagcugcugcacgccccagccaccguguguggccccaagaagagcaccaaccuggugaagaacaagugcgugaacuucaacuucaacggccuuaccggcaccggcgugcugaccgagagcaacaagaaauuccugcccuuucagcaguucggccgggacaucgccgacaccaccgacgcugugcgggauccccagacccuggagauccuggacaucaccccuugcagcuucggcggcgugagcgugaucaccccaggcaccaacaccagcaaccagguggccgugcuguaccagggcgugaacugcaccgaggugcccguggccauccacgccgaccagcugacacccaccuggcgggucuacagcaccggcagcaacguguuccagacccgggccgguugccugaucggcgccgagcacgugaacaacagcuacgagugcgacauccccaucggcgccggcaucugugccagcuaccagacccagaccaauucaccccggagggcaaggagcguggccagccagagcaucaucgccuacaccaugagccugggcgccgagaacagcguggccuacagcaacaacagcaucgccauccccaccaacuucaccaucagcgugaccaccgagauucugcccgugagcaugaccaagaccagcguggacugcaccauguacaucugcggcgacagcaccgagugcagcaaccugcugcugcaguacggcagcuucugcacccagcugaaccgggcccugaccggcaucgccguggagcaggacaagaacacccaggagguguucgcccaggugaagcagaucuacaagaccccucccaucaaggacuucggcggcuucaacuucagccagauccugcccgaccccagcaagcccagcaagcggagcuucaucgaggaccugcuguucaacaaggugacccuagccgacgccggcuucaucaagcaguacggcgacugccucggcgacauagccgcccgggaccugaucugcgcccagaaguucaacggccugaccgugcugccuccccugcugaccgacgagaugaucgcccaguacaccagcgcccuguuagccggaaccaucaccagcggcuggacuuucggcgcuggagccgcucugcagauccccuucgccaugcagauggccuaccgguucaacggcaucggcgugacccagaacgugcuguacgagaaccagaagcugaucgccaaccaguucaacagcgccaucggcaagauccaggacagccugagcagcaccgcuagcgcccugggcaagcugcaggacguggugaaccagaacgcccaggcccugaacacccuggugaagcagcugagcagcaacuucggcgccaucagcagcgugcugaacgacauccugagccggcuggacaaggucgaggccgaggugcagaucgaccggcugaucacuggccggcugcagagccugcagaccuacgugacccagcagcugauccgggccgccgagauucgggccagcgccaaccuggccgccaccaagaugagcgagugcgugcugggccagagcaagcggguggacuucugcggcaagggcuaccaccugaugagcuuuccccagagcgcaccccacggagugguguuccugcacgugaccuacgugcccgcccaggagaagaacuucaccaccgccccagccaucugccacgacggcaaggcccacuuuccccgggagggcguguucgugagcaacggcacccacugguucgugacccagcggaacuucuacgagccccagaucaucaccaccgacaacaccuucgugagcggcaacugcgacguggugaucggcaucgugaacaacaccguguacgauccccugcagcccgagcuggacagcuucaaggaggagcuggacaaguacuucaagaaucacaccagccccgacguggaccugggcgacaucagcggcaucaacgccagcguggugaacauccagaaggagaucgaucggcugaacgagguggccaagaaccugaacgagagccugaucgaccugcaggagcugggcaaguacgagcaguacaucaaguggcccugguacaucuggcugggcuucaucgccggccugaucgccaucgugauggugaccaucaugcugugcugcaugaccagcugcugcagcugccugaagggcuguugcagcugcggcagcugcugcaaguucgacgaggacgacagcgagcccgugcugaagggcgugaagcugcacuacaccugaggacuagucccuguucccagagcccacuuuuuuuucuuuuuuugaaauaaaauagccugucuuucagaucuaaaaaaaaaaaaaaaaaaaaaaaaaaaaaaaaaaaaaaaaaaaaaaaaaaaaaaaaaaaaaaaaaaaaaaaaaaaaaaaaaaaaaaaaaaaaaaaaaaaa

SEQ ID NO: 24769 - RNA, 4070 nt, Artificial Sequence
  SARS-CoV-2/Wuhan/WIV05/2019__EPI_ISL_402128 spike protein mRNA gc (1-1273)(S477N_D614G)
aggagagucccgcagucggcguccagcggcucugcuuguucgugugugugucguugcaggccuuauucaagcuuaccauguucguguuccuggugcugcugccccuggugagcagccagugcgugaaccugaccacccggacccagcugccaccagccuacaccaacagcuucacccggggcgucuacuaccccgacaagguguuccggagcagcguccugcacagcacccaggaccuguuccugcccuucuucagcaacgugaccugguuccacgccauccacgugagcggcaccaacggcaccaagcgguucgacaaccccgugcugcccuucaacgacggcguguacuucgccagcaccgagaagagcaacaucauccggggcuggaucuucggcaccacccuggacagcaagacccagagccugcugaucgugaauaacgccaccaacguggugaucaaggugugcgaguuccaguucugcaacgaccccuuccugggcguguacuaccacaagaacaacaagagcuggauggagagcgaguuccggguguacagcagcgccaacaacugcaccuucgaguacgugagccagcccuuccugauggaccuggagggcaagcagggcaacuucaagaaccugcgggaguucguguucaagaacaucgacggcuacuucaagaucuacagcaagcacaccccaaucaaccuggugcgggaucugccccagggcuucucagcccuggagccccugguggaccugcccaucggcaucaacaucacccgguuccagacccugcuggcccugcaccggagcuaccugaccccaggcgacagcagcagcggguggacagcaggcgcggcugcuuacuacgugggcuaccugcagccccggaccuuccugcugaaguacaacgagaacggcaccaucaccgacgccguggacugcgcccuggacccucugagcgagaccaagugcacccugaagagcuucaccguggagaagggcaucuaccagaccagcaacuuccgggugcagcccaccgagagcaucgugcgguuccccaacaucaccaaccugugccccuucggcgagguguucaacgccacccgguucgccagcguguacgccuggaaccggaagcggaucagcaacugcguggccgacuacagcgugcuguacaacagcgccagcuucagcaccuucaagugcuacggcgugagccccaccaagcugaacgaccugugcuucaccaacguguacgccgacagcuucgugauccguggcgacgaggugcggcagaucgcacccggccagacaggcaagaucgccgacuacaacuacaagcugcccgacgacuucaccggcugcgugaucgccuggaacagcaacaaccucgacagcaaggugggcggcaacuacaacuaccuguaccggcuguuccggaagagcaaccugaagcccuucgagcgggacaucagcaccgagaucuaccaagccggcaacaccccuugcaacggcguggagggcuucaacugcuacuucccucugcagagcuacggcuuccagcccaccaacggcgugggcuaccagcccuaccgggugguggugcugagcuucgagcugcugcacgccccagccaccguguguggccccaagaagagcaccaaccuggugaagaacaagugcgugaacuucaacuucaacggccuuaccggcaccggcgugcugaccgagagcaacaagaaauuccugcccuuucagcaguucggccgggacaucgccgacaccaccgacgcugugcgggauccccagacccuggagauccuggacaucaccccuugcagcuucggcggcgugagcgugaucaccccaggcaccaacaccagcaaccagguggccgugcuguaccagggcgugaacugcaccgaggugcccguggccauccacgccgaccagcugacacccaccuggcgggucuacagcaccggcagcaacguguuccagacccgggccgguugccugaucggcgccgagcacgugaacaacagcuacgagugcgacauccccaucggcgccggcaucugugccagcuaccagacccagaccaauucaccccggagggcaaggagcguggccagccagagcaucaucgccuacaccaugagccugggcgccgagaacagcguggccuacagcaacaacagcaucgccauccccaccaacuucaccaucagcgugaccaccgagauucugcccgugagcaugaccaagaccagcguggacugcaccauguacaucugcggcgacagcaccgagugcagcaaccugcugcugcaguacggcagcuucugcacccagcugaaccgggcccugaccggcaucgccguggagcaggacaagaacacccaggagguguucgcccaggugaagcagaucuacaagaccccucccaucaaggacuucggcggcuucaacuucagccagauccugcccgaccccagcaagcccagcaagcggagcuucaucgaggaccugcuguucaacaaggugacccuagccgacgccggcuucaucaagcaguacggcgacugccucggcgacauagccgcccgggaccugaucugcgcccagaaguucaacggccugaccgugcugccuccccugcugaccgacgagaugaucgcccaguacaccagcgcccuguuagccggaaccaucaccagcggcuggacuuucggcgcuggagccgcucugcagauccccuucgccaugcagauggccuaccgguucaacggcaucggcgugacccagaacgugcuguacgagaaccagaagcugaucgccaaccaguucaacagcgccaucggcaagauccaggacagccugagcagcaccgcuagcgcccugggcaagcugcaggacguggugaaccagaacgcccaggcccugaacacccuggugaagcagcugagcagcaacuucggcgccaucagcagcgugcugaacgacauccugagccggcuggacaaggucgaggccgaggugcagaucgaccggcugaucacuggccggcugcagagccugcagaccuacgugacccagcagcugauccgggccgccgagauucgggccagcgccaaccuggccgccaccaagaugagcgagugcgugcugggccagagcaagcggguggacuucugcggcaagggcuaccaccugaugagcuuuccccagagcgcaccccacggagugguguuccugcacgugaccuacgugcccgcccaggagaagaacuucaccaccgccccagccaucugccacgacggcaaggcccacuuuccccgggagggcguguucgugagcaacggcacccacugguucgugacccagcggaacuucuacgagccccagaucaucaccaccgacaacaccuucgugagcggcaacugcgacguggugaucggcaucgugaacaacaccguguacgauccccugcagcccgagcuggacagcuucaaggaggagcuggacaaguacuucaagaaucacaccagccccgacguggaccugggcgacaucagcggcaucaacgccagcguggugaacauccagaaggagaucgaucggcugaacgagguggccaagaaccugaacgagagccugaucgaccugcaggagcugggcaaguacgagcaguacaucaaguggcccugguacaucuggcugggcuucaucgccggccugaucgccaucgugauggugaccaucaugcugugcugcaugaccagcugcugcagcugccugaagggcuguugcagcugcggcagcugcugcaaguucgacgaggacgacagcgagcccgugcugaagggcgugaagcugcacuacaccugaggacuagucccuguucccagagcccacuuuuuuuucuuuuuuugaaauaaaauagccugucuuucagaucuaaaaaaaaaaaaaaaaaaaaaaaaaaaaaaaaaaaaaaaaaaaaaaaaaaaaaaaaaaaaaaaaaaaaaaaaaaaaaaaaaaaaaaaaaaaaaaaaaaaa

SEQ ID NO: 24770 - RNA, 4070 nt, Artificial Sequence
  SARS-CoV-2/Wuhan/WIV05/2019__EPI_ISL_402128 spike protein mRNA gc (1-1273)(N501Y_D614G)
aggagagucccgcagucggcguccagcggcucugcuuguucgugugugugucguugcaggccuuauucaagcuuaccauguucguguuccuggugcugcugccccuggugagcagccagugcgugaaccugaccacccggacccagcugccaccagccuacaccaacagcuucacccggggcgucuacuaccccgacaagguguuccggagcagcguccugcacagcacccaggaccuguuccugcccuucuucagcaacgugaccugguuccacgccauccacgugagcggcaccaacggcaccaagcgguucgacaaccccgugcugcccuucaacgacggcguguacuucgccagcaccgagaagagcaacaucauccggggcuggaucuucggcaccacccuggacagcaagacccagagccugcugaucgugaauaacgccaccaacguggugaucaaggugugcgaguuccaguucugcaacgaccccuuccugggcguguacuaccacaagaacaacaagagcuggauggagagcgaguuccggguguacagcagcgccaacaacugcaccuucgaguacgugagccagcccuuccugauggaccuggagggcaagcagggcaacuucaagaaccugcgggaguucguguucaagaacaucgacggcuacuucaagaucuacagcaagcacaccccaaucaaccuggugcgggaucugccccagggcuucucagcccuggagccccugguggaccugcccaucggcaucaacaucacccgguuccagacccugcuggcccugcaccggagcuaccugaccccaggcgacagcagcagcggguggacagcaggcgcggcugcuuacuacgugggcuaccugcagccccggaccuuccugcugaaguacaacgagaacggcaccaucaccgacgccguggacugcgcccuggacccucugagcgagaccaagugcacccugaagagcuucaccguggagaagggcaucuaccagaccagcaacuuccgggugcagcccaccgagagcaucgugcgguuccccaacaucaccaaccugugccccuucggcgagguguucaacgccacccgguucgccagcguguacgccuggaaccggaagcggaucagcaacugcguggccgacuacagcgugcuguacaacagcgccagcuucagcaccuucaagugcuacggcgugagccccaccaagcugaacgaccugugcuucaccaacguguacgccgacagcuucgugauccguggcgacgaggugcggcagaucgcacccggccagacaggcaagaucgccgacuacaacuacaagcugcccgacgacuucaccggcugcgugaucgccuggaacagcaacaaccucgacagcaaggugggcggcaacuacaacuaccuguaccggcuguuccggaagagcaaccugaagcccuucgagcgggacaucagcaccgagaucuaccaagccggcuccaccccuugcaacggcguggagggcuucaacugcuacuucccucugcagagcuacggcuuccagcccaccuacggcgugggcuaccagcccuaccgggugguggugcugagcuucgagcugcugcacgccccagccaccguguguggccccaagaagagcaccaaccuggugaagaacaagugcgugaacuucaacuucaacggccuuaccggcaccggcgugcugaccgagagcaacaagaaauuccugcccuuucagcaguucggccgggacaucgccgacaccaccgacgcugugcgggauccccagacccuggagauccuggacaucaccccuugcagcuucggcggcgugagcgugaucaccccaggcaccaacaccagcaaccagguggccgugcuguaccagggcgugaacugcaccgaggugcccguggccauccacgccgaccagcugacacccaccuggcgggucuacagcaccggcagcaacguguuccagacccgggccgguugccugaucggcgccgagcacgugaacaacagcuacgagugcgacauccccaucggcgccggcaucugugccagcuaccagacccagaccaauucaccccggagggcaaggagcguggccagccagagcaucaucgccuacaccaugagccugggcgccgagaacagcguggccuacagcaacaacagcaucgccauccccaccaacuucaccaucagcgugaccaccgagauucugcccgugagcaugaccaagaccagcguggacugcaccauguacaucugcggcgacagcaccgagugcagcaaccugcugcugcaguacggcagcuucugcacccagcugaaccgggcccugaccggcaucgccguggagcaggacaagaacacccaggagguguucgcccaggugaagcagaucuacaagaccccucccaucaaggacuucggcggcuucaacuucagccagauccugcccgaccccagcaagcccagcaagcggagcuucaucgaggaccugcuguucaacaaggugacccuagccgacgccggcuucaucaagcaguacggcgacugccucggcgacauagccgcccgggaccugaucugcgcccagaaguucaacggccugaccgugcugccuccccugcugaccgacgagaugaucgcccaguacaccagcgcccuguuagccggaaccaucaccagcggcuggacuuucggcgcuggagccgcucugcagauccccuucgccaugcagauggccuaccgguucaacggcaucggcgugacccagaacgugcuguacgagaaccagaagcugaucgccaaccaguucaacagcgccaucggcaagauccaggacagccugagcagcaccgcuagcgcccugggcaagcugcaggacguggugaaccagaacgcccaggcccugaacacccuggugaagcagcugagcagcaacuucggcgccaucagcagcgugcugaacgacauccugagccggcuggacaaggucgaggccgaggugcagaucgaccggcugaucacuggccggcugcagagccugcagaccuacgugacccagcagcugauccgggccgccgagauucgggccagcgccaaccuggccgccaccaagaugagcgagugcgugcugggccagagcaagcggguggacuucugcggcaagggcuaccaccugaugagcuuuccccagagcgcaccccacggagugguguuccugcacgugaccuacgugcccgcccaggagaagaacuucaccaccgccccagccaucugccacgacggcaaggcccacuuuccccgggagggcguguucgugagcaacggcacccacugguucgugacccagcggaacuucuacgagccccagaucaucaccaccgacaacaccuucgugagcggcaacugcgacguggugaucggcaucgugaacaacaccguguacgauccccugcagcccgagcuggacagcuucaaggaggagcuggacaaguacuucaagaaucacaccagccccgacguggaccugggcgacaucagcggcaucaacgccagcguggugaacauccagaaggagaucgaucggcugaacgagguggccaagaaccugaacgagagccugaucgaccugcaggagcugggcaaguacgagcaguacaucaaguggcccugguacaucuggcugggcuucaucgccggccugaucgccaucgugauggugaccaucaugcugugcugcaugaccagcugcugcagcugccugaagggcuguugcagcugcggcagcugcugcaaguucgacgaggacgacagcgagcccgugcugaagggcgugaagcugcacuacaccugaggacuagucccuguucccagagcccacuuuuuuuucuuuuuuugaaauaaaauagccugucuuucagaucuaaaaaaaaaaaaaaaaaaaaaaaaaaaaaaaaaaaaaaaaaaaaaaaaaaaaaaaaaaaaaaaaaaaaaaaaaaaaaaaaaaaaaaaaaaaaaaaaaaaa

SEQ ID NO: 24771 - RNA, 4064 nt, Artificial Sequence
  SARS-CoV-2/Wuhan/WIV05/2019__EPI_ISL_402128 spike protein mRNA gc (1-1273)(H69del_V70del_D614G)
aggagagucccgcagucggcguccagcggcucugcuuguucgugugugugucguugcaggccuuauucaagcuuaccauguucguguuccuggugcugcugccccuggugagcagccagugcgugaaccugaccacccggacccagcugccaccagccuacaccaacagcuucacccggggcgucuacuaccccgacaagguguuccggagcagcguccugcacagcacccaggaccuguuccugcccuucuucagcaacgugaccugguuccacgccaucagcggcaccaacggcaccaagcgguucgacaaccccgugcugcccuucaacgacggcguguacuucgccagcaccgagaagagcaacaucauccggggcuggaucuucggcaccacccuggacagcaagacccagagccugcugaucgugaauaacgccaccaacguggugaucaaggugugcgaguuccaguucugcaacgaccccuuccugggcguguacuaccacaagaacaacaagagcuggauggagagcgaguuccggguguacagcagcgccaacaacugcaccuucgaguacgugagccagcccuuccugauggaccuggagggcaagcagggcaacuucaagaaccugcgggaguucguguucaagaacaucgacggcuacuucaagaucuacagcaagcacaccccaaucaaccuggugcgggaucugccccagggcuucucagcccuggagccccugguggaccugcccaucggcaucaacaucacccgguuccagacccugcuggcccugcaccggagcuaccugaccccaggcgacagcagcagcggguggacagcaggcgcggcugcuuacuacgugggcuaccugcagccccggaccuuccugcugaaguacaacgagaacggcaccaucaccgacgccguggacugcgcccuggacccucugagcgagaccaagugcacccugaagagcuucaccguggagaagggcaucuaccagaccagcaacuuccgggugcagcccaccgagagcaucgugcgguuccccaacaucaccaaccugugccccuucggcgagguguucaacgccacccgguucgccagcguguacgccuggaaccggaagcggaucagcaacugcguggccgacuacagcgugcuguacaacagcgccagcuucagcaccuucaagugcuacggcgugagccccaccaagcugaacgaccugugcuucaccaacguguacgccgacagcuucgugauccguggcgacgaggugcggcagaucgcacccggccagacaggcaagaucgccgacuacaacuacaagcugcccgacgacuucaccggcugcgugaucgccuggaacagcaacaaccucgacagcaaggugggcggcaacuacaacuaccuguaccggcuguuccggaagagcaaccugaagcccuucgagcgggacaucagcaccgagaucuaccaagccggcuccaccccuugcaacggcguggagggcuucaacugcuacuucccucugcagagcuacggcuuccagcccaccaacggcgugggcuaccagcccuaccgggugguggugcugagcuucgagcugcugcacgccccagccaccguguguggccccaagaagagcaccaaccuggugaagaacaagugcgugaacuucaacuucaacggccuuaccggcaccggcgugcugaccgagagcaacaagaaauuccugcccuuucagcaguucggccgggacaucgccgacaccaccgacgcugugcgggauccccagacccuggagauccuggacaucaccccuugcagcuucggcggcgugagcgugaucaccccaggcaccaacaccagcaaccagguggccgugcuguaccagggcgugaacugcaccgaggugcccguggccauccacgccgaccagcugacacccaccuggcgggucuacagcaccggcagcaacguguuccagacccgggccgguugccugaucggcgccgagcacgugaacaacagcuacgagugcgacauccccaucggcgccggcaucugugccagcuaccagacccagaccaauucaccccggagggcaaggagcguggccagccagagcaucaucgccuacaccaugagccugggcgccgagaacagcguggccuacagcaacaacagcaucgccauccccaccaacuucaccaucagcgugaccaccgagauucugcccgugagcaugaccaagaccagcguggacugcaccauguacaucugcggcgacagcaccgagugcagcaaccugcugcugcaguacggcagcuucugcacccagcugaaccgggcccugaccggcaucgccguggagcaggacaagaacacccaggagguguucgcccaggugaagcagaucuacaagaccccucccaucaaggacuucggcggcuucaacuucagccagauccugcccgaccccagcaagcccagcaagcggagcuucaucgaggaccugcuguucaacaaggugacccuagccgacgccggcuucaucaagcaguacggcgacugccucggcgacauagccgcccgggaccugaucugcgcccagaaguucaacggccugaccgugcugccuccccugcugaccgacgagaugaucgcccaguacaccagcgcccuguuagccggaaccaucaccagcggcuggacuuucggcgcuggagccgcucugcagauccccuucgccaugcagauggccuaccgguucaacggcaucggcgugacccagaacgugcuguacgagaaccagaagcugaucgccaaccaguucaacagcgccaucggcaagauccaggacagccugagcagcaccgcuagcgcccugggcaagcugcaggacguggugaaccagaacgcccaggcccugaacacccuggugaagcagcugagcagcaacuucggcgccaucagcagcgugcugaacgacauccugagccggcuggacaaggucgaggccgaggugcagaucgaccggcugaucacuggccggcugcagagccugcagaccuacgugacccagcagcugauccgggccgccgagauucgggccagcgccaaccuggccgccaccaagaugagcgagugcgugcugggccagagcaagcggguggacuucugcggcaagggcuaccaccugaugagcuuuccccagagcgcaccccacggagugguguuccugcacgugaccuacgugcccgcccaggagaagaacuucaccaccgccccagccaucugccacgacggcaaggcccacuuuccccgggagggcguguucgugagcaacggcacccacugguucgugacccagcggaacuucuacgagccccagaucaucaccaccgacaacaccuucgugagcggcaacugcgacguggugaucggcaucgugaacaacaccguguacgauccccugcagcccgagcuggacagcuucaaggaggagcuggacaaguacuucaagaaucacaccagccccgacguggaccugggcgacaucagcggcaucaacgccagcguggugaacauccagaaggagaucgaucggcugaacgagguggccaagaaccugaacgagagccugaucgaccugcaggagcugggcaaguacgagcaguacaucaaguggcccugguacaucuggcugggcuucaucgccggccugaucgccaucgugauggugaccaucaugcugugcugcaugaccagcugcugcagcugccugaagggcuguugcagcugcggcagcugcugcaaguucgacgaggacgacagcgagcccgugcugaagggcgugaagcugcacuacaccugaggacuagucccuguucccagagcccacuuuuuuuucuuuuuuugaaauaaaauagccugucuuucagaucuaaaaaaaaaaaaaaaaaaaaaaaaaaaaaaaaaaaaaaaaaaaaaaaaaaaaaaaaaaaaaaaaaaaaaaaaaaaaaaaaaaaaaaaaaaaaaaaaaaaa

SEQ ID NO: 24772 - RNA, 4070 nt, Artificial Sequence
  SARS-CoV-2/Wuhan/WIV05/2019__EPI_ISL_402128 spike protein mRNA gc (1-1273)(Y453F_D614G)
aggagagucccgcagucggcguccagcggcucugcuuguucgugugugugucguugcaggccuuauucaagcuuaccauguucguguuccuggugcugcugccccuggugagcagccagugcgugaaccugaccacccggacccagcugccaccagccuacaccaacagcuucacccggggcgucuacuaccccgacaagguguuccggagcagcguccugcacagcacccaggaccuguuccugcccuucuucagcaacgugaccugguuccacgccauccacgugagcggcaccaacggcaccaagcgguucgacaaccccgugcugcccuucaacgacggcguguacuucgccagcaccgagaagagcaacaucauccggggcuggaucuucggcaccacccuggacagcaagacccagagccugcugaucgugaauaacgccaccaacguggugaucaaggugugcgaguuccaguucugcaacgaccccuuccugggcguguacuaccacaagaacaacaagagcuggauggagagcgaguuccggguguacagcagcgccaacaacugcaccuucgaguacgugagccagcccuuccugauggaccuggagggcaagcagggcaacuucaagaaccugcgggaguucguguucaagaacaucgacggcuacuucaagaucuacagcaagcacaccccaaucaaccuggugcgggaucugccccagggcuucucagcccuggagccccugguggaccugcccaucggcaucaacaucacccgguuccagacccugcuggcccugcaccggagcuaccugaccccaggcgacagcagcagcggguggacagcaggcgcggcugcuuacuacgugggcuaccugcagccccggaccuuccugcugaaguacaacgagaacggcaccaucaccgacgccguggacugcgcccuggacccucugagcgagaccaagugcacccugaagagcuucaccguggagaagggcaucuaccagaccagcaacuuccgggugcagcccaccgagagcaucgugcgguuccccaacaucaccaaccugugccccuucggcgagguguucaacgccacccgguucgccagcguguacgccuggaaccggaagcggaucagcaacugcguggccgacuacagcgugcuguacaacagcgccagcuucagcaccuucaagugcuacggcgugagccccaccaagcugaacgaccugugcuucaccaacguguacgccgacagcuucgugauccguggcgacgaggugcggcagaucgcacccggccagacaggcaagaucgccgacuacaacuacaagcugcccgacgacuucaccggcugcgugaucgccuggaacagcaacaaccucgacagcaaggugggcggcaacuacaacuaccuguuccggcuguuccggaagagcaaccugaagcccuucgagcgggacaucagcaccgagaucuaccaagccggcuccaccccuugcaacggcguggagggcuucaacugcuacuucccucugcagagcuacggcuuccagcccaccaacggcgugggcuaccagcccuaccgggugguggugcugagcuucgagcugcugcacgccccagccaccguguguggccccaagaagagcaccaaccuggugaagaacaagugcgugaacuucaacuucaacggccuuaccggcaccggcgugcugaccgagagcaacaagaaauuccugcccuuucagcaguucggccgggacaucgccgacaccaccgacgcugugcgggauccccagacccuggagauccuggacaucaccccuugcagcuucggcggcgugagcgugaucaccccaggcaccaacaccagcaaccagguggccgugcuguaccagggcgugaacugcaccgaggugcccguggccauccacgccgaccagcugacacccaccuggcgggucuacagcaccggcagcaacguguuccagacccgggccgguugccugaucggcgccgagcacgugaacaacagcuacgagugcgacauccccaucggcgccggcaucugugccagcuaccagacccagaccaauucaccccggagggcaaggagcguggccagccagagcaucaucgccuacaccaugagccugggcgccgagaacagcguggccuacagcaacaacagcaucgccauccccaccaacuucaccaucagcgugaccaccgagauucugcccgugagcaugaccaagaccagcguggacugcaccauguacaucugcggcgacagcaccgagugcagcaaccugcugcugcaguacggcagcuucugcacccagcugaaccgggcccugaccggcaucgccguggagcaggacaagaacacccaggagguguucgcccaggugaagcagaucuacaagaccccucccaucaaggacuucggcggcuucaacuucagccagauccugcccgaccccagcaagcccagcaagcggagcuucaucgaggaccugcuguucaacaaggugacccuagccgacgccggcuucaucaagcaguacggcgacugccucggcgacauagccgcccgggaccugaucugcgcccagaaguucaacggccugaccgugcugccuccccugcugaccgacgagaugaucgcccaguacaccagcgcccuguuagccggaaccaucaccagcggcuggacuuucggcgcuggagccgcucugcagauccccuucgccaugcagauggccuaccgguucaacggcaucggcgugacccagaacgugcuguacgagaaccagaagcugaucgccaaccaguucaacagcgccaucggcaagauccaggacagccugagcagcaccgcuagcgcccugggcaagcugcaggacguggugaaccagaacgcccaggcccugaacacccuggugaagcagcugagcagcaacuucggcgccaucagcagcgugcugaacgacauccugagccggcuggacaaggucgaggccgaggugcagaucgaccggcugaucacuggccggcugcagagccugcagaccuacgugacccagcagcugauccgggccgccgagauucgggccagcgccaaccuggccgccaccaagaugagcgagugcgugcugggccagagcaagcggguggacuucugcggcaagggcuaccaccugaugagcuuuccccagagcgcaccccacggagugguguuccugcacgugaccuacgugcccgcccaggagaagaacuucaccaccgccccagccaucugccacgacggcaaggcccacuuuccccgggagggcguguucgugagcaacggcacccacugguucgugacccagcggaacuucuacgagccccagaucaucaccaccgacaacaccuucgugagcggcaacugcgacguggugaucggcaucgugaacaacaccguguacgauccccugcagcccgagcuggacagcuucaaggaggagcuggacaaguacuucaagaaucacaccagccccgacguggaccugggcgacaucagcggcaucaacgccagcguggugaacauccagaaggagaucgaucggcugaacgagguggccaagaaccugaacgagagccugaucgaccugcaggagcugggcaaguacgagcaguacaucaaguggcccugguacaucuggcugggcuucaucgccggccugaucgccaucgugauggugaccaucaugcugugcugcaugaccagcugcugcagcugccugaagggcuguugcagcugcggcagcugcugcaaguucgacgaggacgacagcgagcccgugcugaagggcgugaagcugcacuacaccugaggacuagucccuguucccagagcccacuuuuuuuucuuuuuuugaaauaaaauagccugucuuucagaucuaaaaaaaaaaaaaaaaaaaaaaaaaaaaaaaaaaaaaaaaaaaaaaaaaaaaaaaaaaaaaaaaaaaaaaaaaaaaaaaaaaaaaaaaaaaaaaaaaaaa

SEQ ID NO: 24773 - RNA, 4070 nt, Artificial Sequence
  SARS-CoV-2/Wuhan/WIV05/2019__EPI_ISL_402128 spike protein mRNA gc (1-1273)(D614G_I692V)
aggagagucccgcagucggcguccagcggcucugcuuguucgugugugugucguugcaggccuuauucaagcuuaccauguucguguuccuggugcugcugccccuggugagcagccagugcgugaaccugaccacccggacccagcugccaccagccuacaccaacagcuucacccggggcgucuacuaccccgacaagguguuccggagcagcguccugcacagcacccaggaccuguuccugcccuucuucagcaacgugaccugguuccacgccauccacgugagcggcaccaacggcaccaagcgguucgacaaccccgugcugcccuucaacgacggcguguacuucgccagcaccgagaagagcaacaucauccggggcuggaucuucggcaccacccuggacagcaagacccagagccugcugaucgugaauaacgccaccaacguggugaucaaggugugcgaguuccaguucugcaacgaccccuuccugggcguguacuaccacaagaacaacaagagcuggauggagagcgaguuccggguguacagcagcgccaacaacugcaccuucgaguacgugagccagcccuuccugauggaccuggagggcaagcagggcaacuucaagaaccugcgggaguucguguucaagaacaucgacggcuacuucaagaucuacagcaagcacaccccaaucaaccuggugcgggaucugccccagggcuucucagcccuggagccccugguggaccugcccaucggcaucaacaucacccgguuccagacccugcuggcccugcaccggagcuaccugaccccaggcgacagcagcagcggguggacagcaggcgcggcugcuuacuacgugggcuaccugcagccccggaccuuccugcugaaguacaacgagaacggcaccaucaccgacgccguggacugcgcccuggacccucugagcgagaccaagugcacccugaagagcuucaccguggagaagggcaucuaccagaccagcaacuuccgggugcagcccaccgagagcaucgugcgguuccccaacaucaccaaccugugccccuucggcgagguguucaacgccacccgguucgccagcguguacgccuggaaccggaagcggaucagcaacugcguggccgacuacagcgugcuguacaacagcgccagcuucagcaccuucaagugcuacggcgugagccccaccaagcugaacgaccugugcuucaccaacguguacgccgacagcuucgugauccguggcgacgaggugcggcagaucgcacccggccagacaggcaagaucgccgacuacaacuacaagcugcccgacgacuucaccggcugcgugaucgccuggaacagcaacaaccucgacagcaaggugggcggcaacuacaacuaccuguaccggcuguuccggaagagcaaccugaagcccuucgagcgggacaucagcaccgagaucuaccaagccggcuccaccccuugcaacggcguggagggcuucaacugcuacuucccucugcagagcuacggcuuccagcccaccaacggcgugggcuaccagcccuaccgggugguggugcugagcuucgagcugcugcacgccccagccaccguguguggccccaagaagagcaccaaccuggugaagaacaagugcgugaacuucaacuucaacggccuuaccggcaccggcgugcugaccgagagcaacaagaaauuccugcccuuucagcaguucggccgggacaucgccgacaccaccgacgcugugcgggauccccagacccuggagauccuggacaucaccccuugcagcuucggcggcgugagcgugaucaccccaggcaccaacaccagcaaccagguggccgugcuguaccagggcgugaacugcaccgaggugcccguggccauccacgccgaccagcugacacccaccuggcgggucuacagcaccggcagcaacguguuccagacccgggccgguugccugaucggcgccgagcacgugaacaacagcuacgagugcgacauccccaucggcgccggcaucugugccagcuaccagacccagaccaauucaccccggagggcaaggagcguggccagccagagcgugaucgccuacaccaugagccugggcgccgagaacagcguggccuacagcaacaacagcaucgccauccccaccaacuucaccaucagcgugaccaccgagauucugcccgugagcaugaccaagaccagcguggacugcaccauguacaucugcggcgacagcaccgagugcagcaaccugcugcugcaguacggcagcuucugcacccagcugaaccgggcccugaccggcaucgccguggagcaggacaagaacacccaggagguguucgcccaggugaagcagaucuacaagaccccucccaucaaggacuucggcggcuucaacuucagccagauccugcccgaccccagcaagcccagcaagcggagcuucaucgaggaccugcuguucaacaaggugacccuagccgacgccggcuucaucaagcaguacggcgacugccucggcgacauagccgcccgggaccugaucugcgcccagaaguucaacggccugaccgugcugccuccccugcugaccgacgagaugaucgcccaguacaccagcgcccuguuagccggaaccaucaccagcggcuggacuuucggcgcuggagccgcucugcagauccccuucgccaugcagauggccuaccgguucaacggcaucggcgugacccagaacgugcuguacgagaaccagaagcugaucgccaaccaguucaacagcgccaucggcaagauccaggacagccugagcagcaccgcuagcgcccugggcaagcugcaggacguggugaaccagaacgcccaggcccugaacacccuggugaagcagcugagcagcaacuucggcgccaucagcagcgugcugaacgacauccugagccggcuggacaaggucgaggccgaggugcagaucgaccggcugaucacuggccggcugcagagccugcagaccuacgugacccagcagcugauccgggccgccgagauucgggccagcgccaaccuggccgccaccaagaugagcgagugcgugcugggccagagcaagcggguggacuucugcggcaagggcuaccaccugaugagcuuuccccagagcgcaccccacggagugguguuccugcacgugaccuacgugcccgcccaggagaagaacuucaccaccgccccagccaucugccacgacggcaaggcccacuuuccccgggagggcguguucgugagcaacggcacccacugguucgugacccagcggaacuucuacgagccccagaucaucaccaccgacaacaccuucgugagcggcaacugcgacguggugaucggcaucgugaacaacaccguguacgauccccugcagcccgagcuggacagcuucaaggaggagcuggacaaguacuucaagaaucacaccagccccgacguggaccugggcgacaucagcggcaucaacgccagcguggugaacauccagaaggagaucgaucggcugaacgagguggccaagaaccugaacgagagccugaucgaccugcaggagcugggcaaguacgagcaguacaucaaguggcccugguacaucuggcugggcuucaucgccggccugaucgccaucgugauggugaccaucaugcugugcugcaugaccagcugcugcagcugccugaagggcuguugcagcugcggcagcugcugcaaguucgacgaggacgacagcgagcccgugcugaagggcgugaagcugcacuacaccugaggacuagucccuguucccagagcccacuuuuuuuucuuuuuuugaaauaaaauagccugucuuucagaucuaaaaaaaaaaaaaaaaaaaaaaaaaaaaaaaaaaaaaaaaaaaaaaaaaaaaaaaaaaaaaaaaaaaaaaaaaaaaaaaaaaaaaaaaaaaaaaaaaaaa

SEQ ID NO: 24774 - RNA, 4070 nt, Artificial Sequence
  SARS-CoV-2/Wuhan/WIV05/2019__EPI_ISL_402128 spike protein mRNA gc (1-1273)(D614G_M1229I)
aggagagucccgcagucggcguccagcggcucugcuuguucgugugugugucguugcaggccuuauucaagcuuaccauguucguguuccuggugcugcugccccuggugagcagccagugcgugaaccugaccacccggacccagcugccaccagccuacaccaacagcuucacccggggcgucuacuaccccgacaagguguuccggagcagcguccugcacagcacccaggaccuguuccugcccuucuucagcaacgugaccugguuccacgccauccacgugagcggcaccaacggcaccaagcgguucgacaaccccgugcugcccuucaacgacggcguguacuucgccagcaccgagaagagcaacaucauccggggcuggaucuucggcaccacccuggacagcaagacccagagccugcugaucgugaauaacgccaccaacguggugaucaaggugugcgaguuccaguucugcaacgaccccuuccugggcguguacuaccacaagaacaacaagagcuggauggagagcgaguuccggguguacagcagcgccaacaacugcaccuucgaguacgugagccagcccuuccugauggaccuggagggcaagcagggcaacuucaagaaccugcgggaguucguguucaagaacaucgacggcuacuucaagaucuacagcaagcacaccccaaucaaccuggugcgggaucugccccagggcuucucagcccuggagccccugguggaccugcccaucggcaucaacaucacccgguuccagacccugcuggcccugcaccggagcuaccugaccccaggcgacagcagcagcggguggacagcaggcgcggcugcuuacuacgugggcuaccugcagccccggaccuuccugcugaaguacaacgagaacggcaccaucaccgacgccguggacugcgcccuggacccucugagcgagaccaagugcacccugaagagcuucaccguggagaagggcaucuaccagaccagcaacuuccgggugcagcccaccgagagcaucgugcgguuccccaacaucaccaaccugugccccuucggcgagguguucaacgccacccgguucgccagcguguacgccuggaaccggaagcggaucagcaacugcguggccgacuacagcgugcuguacaacagcgccagcuucagcaccuucaagugcuacggcgugagccccaccaagcugaacgaccugugcuucaccaacguguacgccgacagcuucgugauccguggcgacgaggugcggcagaucgcacccggccagacaggcaagaucgccgacuacaacuacaagcugcccgacgacuucaccggcugcgugaucgccuggaacagcaacaaccucgacagcaaggugggcggcaacuacaacuaccuguaccggcuguuccggaagagcaaccugaagcccuucgagcgggacaucagcaccgagaucuaccaagccggcuccaccccuugcaacggcguggagggcuucaacugcuacuucccucugcagagcuacggcuuccagcccaccaacggcgugggcuaccagcccuaccgggugguggugcugagcuucgagcugcugcacgccccagccaccguguguggccccaagaagagcaccaaccuggugaagaacaagugcgugaacuucaacuucaacggccuuaccggcaccggcgugcugaccgagagcaacaagaaauuccugcccuuucagcaguucggccgggacaucgccgacaccaccgacgcugugcgggauccccagacccuggagauccuggacaucaccccuugcagcuucggcggcgugagcgugaucaccccaggcaccaacaccagcaaccagguggccgugcuguaccagggcgugaacugcaccgaggugcccguggccauccacgccgaccagcugacacccaccuggcgggucuacagcaccggcagcaacguguuccagacccgggccgguugccugaucggcgccgagcacgugaacaacagcuacgagugcgacauccccaucggcgccggcaucugugccagcuaccagacccagaccaauucaccccggagggcaaggagcguggccagccagagcaucaucgccuacaccaugagccugggcgccgagaacagcguggccuacagcaacaacagcaucgccauccccaccaacuucaccaucagcgugaccaccgagauucugcccgugagcaugaccaagaccagcguggacugcaccauguacaucugcggcgacagcaccgagugcagcaaccugcugcugcaguacggcagcuucugcacccagcugaaccgggcccugaccggcaucgccguggagcaggacaagaacacccaggagguguucgcccaggugaagcagaucuacaagaccccucccaucaaggacuucggcggcuucaacuucagccagauccugcccgaccccagcaagcccagcaagcggagcuucaucgaggaccugcuguucaacaaggugacccuagccgacgccggcuucaucaagcaguacggcgacugccucggcgacauagccgcccgggaccugaucugcgcccagaaguucaacggccugaccgugcugccuccccugcugaccgacgagaugaucgcccaguacaccagcgcccuguuagccggaaccaucaccagcggcuggacuuucggcgcuggagccgcucugcagauccccuucgccaugcagauggccuaccgguucaacggcaucggcgugacccagaacgugcuguacgagaaccagaagcugaucgccaaccaguucaacagcgccaucggcaagauccaggacagccugagcagcaccgcuagcgcccugggcaagcugcaggacguggugaaccagaacgcccaggcccugaacacccuggugaagcagcugagcagcaacuucggcgccaucagcagcgugcugaacgacauccugagccggcuggacaaggucgaggccgaggugcagaucgaccggcugaucacuggccggcugcagagccugcagaccuacgugacccagcagcugauccgggccgccgagauucgggccagcgccaaccuggccgccaccaagaugagcgagugcgugcugggccagagcaagcggguggacuucugcggcaagggcuaccaccugaugagcuuuccccagagcgcaccccacggagugguguuccugcacgugaccuacgugcccgcccaggagaagaacuucaccaccgccccagccaucugccacgacggcaaggcccacuuuccccgggagggcguguucgugagcaacggcacccacugguucgugacccagcggaacuucuacgagccccagaucaucaccaccgacaacaccuucgugagcggcaacugcgacguggugaucggcaucgugaacaacaccguguacgauccccugcagcccgagcuggacagcuucaaggaggagcuggacaaguacuucaagaaucacaccagccccgacguggaccugggcgacaucagcggcaucaacgccagcguggugaacauccagaaggagaucgaucggcugaacgagguggccaagaaccugaacgagagccugaucgaccugcaggagcugggcaaguacgagcaguacaucaaguggcccugguacaucuggcugggcuucaucgccggccugaucgccaucgugaucgugaccaucaugcugugcugcaugaccagcugcugcagcugccugaagggcuguugcagcugcggcagcugcugcaaguucgacgaggacgacagcgagcccgugcugaagggcgugaagcugcacuacaccugaggacuagucccuguucccagagcccacuuuuuuuucuuuuuuugaaauaaaauagccugucuuucagaucuaaaaaaaaaaaaaaaaaaaaaaaaaaaaaaaaaaaaaaaaaaaaaaaaaaaaaaaaaaaaaaaaaaaaaaaaaaaaaaaaaaaaaaaaaaaaaaaaaaaa

SEQ ID NO: 24775 - RNA, 4064 nt, Artificial Sequence
  SARS-CoV-2/Wuhan/WIV05/2019__EPI_ISL_402128 spike protein mRNA gc (1-1273)(H69del_V70del_A222V_Y453F_S477N_D614G_I692V)
aggagagucccgcagucggcguccagcggcucugcuuguucgugugugugucguugcaggccuuauucaagcuuaccauguucguguuccuggugcugcugccccuggugagcagccagugcgugaaccugaccacccggacccagcugccaccagccuacaccaacagcuucacccggggcgucuacuaccccgacaagguguuccggagcagcguccugcacagcacccaggaccuguuccugcccuucuucagcaacgugaccugguuccacgccaucagcggcaccaacggcaccaagcgguucgacaaccccgugcugcccuucaacgacggcguguacuucgccagcaccgagaagagcaacaucauccggggcuggaucuucggcaccacccuggacagcaagacccagagccugcugaucgugaauaacgccaccaacguggugaucaaggugugcgaguuccaguucugcaacgaccccuuccugggcguguacuaccacaagaacaacaagagcuggauggagagcgaguuccggguguacagcagcgccaacaacugcaccuucgaguacgugagccagcccuuccugauggaccuggagggcaagcagggcaacuucaagaaccugcgggaguucguguucaagaacaucgacggcuacuucaagaucuacagcaagcacaccccaaucaaccuggugcgggaucugccccagggcuucucagugcuggagccccugguggaccugcccaucggcaucaacaucacccgguuccagacccugcuggcccugcaccggagcuaccugaccccaggcgacagcagcagcggguggacagcaggcgcggcugcuuacuacgugggcuaccugcagccccggaccuuccugcugaaguacaacgagaacggcaccaucaccgacgccguggacugcgcccuggacccucugagcgagaccaagugcacccugaagagcuucaccguggagaagggcaucuaccagaccagcaacuuccgggugcagcccaccgagagcaucgugcgguuccccaacaucaccaaccugugccccuucggcgagguguucaacgccacccgguucgccagcguguacgccuggaaccggaagcggaucagcaacugcguggccgacuacagcgugcuguacaacagcgccagcuucagcaccuucaagugcuacggcgugagccccaccaagcugaacgaccugugcuucaccaacguguacgccgacagcuucgugauccguggcgacgaggugcggcagaucgcacccggccagacaggcaagaucgccgacuacaacuacaagcugcccgacgacuucaccggcugcgugaucgccuggaacagcaacaaccucgacagcaaggugggcggcaacuacaacuaccuguuccggcuguuccggaagagcaaccugaagcccuucgagcgggacaucagcaccgagaucuaccaagccggcaacaccccuugcaacggcguggagggcuucaacugcuacuucccucugcagagcuacggcuuccagcccaccaacggcgugggcuaccagcccuaccgggugguggugcugagcuucgagcugcugcacgccccagccaccguguguggccccaagaagagcaccaaccuggugaagaacaagugcgugaacuucaacuucaacggccuuaccggcaccggcgugcugaccgagagcaacaagaaauuccugcccuuucagcaguucggccgggacaucgccgacaccaccgacgcugugcgggauccccagacccuggagauccuggacaucaccccuugcagcuucggcggcgugagcgugaucaccccaggcaccaacaccagcaaccagguggccgugcuguaccagggcgugaacugcaccgaggugcccguggccauccacgccgaccagcugacacccaccuggcgggucuacagcaccggcagcaacguguuccagacccgggccgguugccugaucggcgccgagcacgugaacaacagcuacgagugcgacauccccaucggcgccggcaucugugccagcuaccagacccagaccaauucaccccggagggcaaggagcguggccagccagagcgugaucgccuacaccaugagccugggcgccgagaacagcguggccuacagcaacaacagcaucgccauccccaccaacuucaccaucagcgugaccaccgagauucugcccgugagcaugaccaagaccagcguggacugcaccauguacaucugcggcgacagcaccgagugcagcaaccugcugcugcaguacggcagcuucugcacccagcugaaccgggcccugaccggcaucgccguggagcaggacaagaacacccaggagguguucgcccaggugaagcagaucuacaagaccccucccaucaaggacuucggcggcuucaacuucagccagauccugcccgaccccagcaagcccagcaagcggagcuucaucgaggaccugcuguucaacaaggugacccuagccgacgccggcuucaucaagcaguacggcgacugccucggcgacauagccgcccgggaccugaucugcgcccagaaguucaacggccugaccgugcugccuccccugcugaccgacgagaugaucgcccaguacaccagcgcccuguuagccggaaccaucaccagcggcuggacuuucggcgcuggagccgcucugcagauccccuucgccaugcagauggccuaccgguucaacggcaucggcgugacccagaacgugcuguacgagaaccagaagcugaucgccaaccaguucaacagcgccaucggcaagauccaggacagccugagcagcaccgcuagcgcccugggcaagcugcaggacguggugaaccagaacgcccaggcccugaacacccuggugaagcagcugagcagcaacuucggcgccaucagcagcgugcugaacgacauccugagccggcuggacaaggucgaggccgaggugcagaucgaccggcugaucacuggccggcugcagagccugcagaccuacgugacccagcagcugauccgggccgccgagauucgggccagcgccaaccuggccgccaccaagaugagcgagugcgugcugggccagagcaagcggguggacuucugcggcaagggcuaccaccugaugagcuuuccccagagcgcaccccacggagugguguuccugcacgugaccuacgugcccgcccaggagaagaacuucaccaccgccccagccaucugccacgacggcaaggcccacuuuccccgggagggcguguucgugagcaacggcacccacugguucgugacccagcggaacuucuacgagccccagaucaucaccaccgacaacaccuucgugagcggcaacugcgacguggugaucggcaucgugaacaacaccguguacgauccccugcagcccgagcuggacagcuucaaggaggagcuggacaaguacuucaagaaucacaccagccccgacguggaccugggcgacaucagcggcaucaacgccagcguggugaacauccagaaggagaucgaucggcugaacgagguggccaagaaccugaacgagagccugaucgaccugcaggagcugggcaaguacgagcaguacaucaaguggcccugguacaucuggcugggcuucaucgccggccugaucgccaucgugauggugaccaucaugcugugcugcaugaccagcugcugcagcugccugaagggcuguugcagcugcggcagcugcugcaaguucgacgaggacgacagcgagcccgugcugaagggcgugaagcugcacuacaccugaggacuagucccuguucccagagcccacuuuuuuuucuuuuuuugaaauaaaauagccugucuuucagaucuaaaaaaaaaaaaaaaaaaaaaaaaaaaaaaaaaaaaaaaaaaaaaaaaaaaaaaaaaaaaaaaaaaaaaaaaaaaaaaaaaaaaaaaaaaaaaaaaaaaa

SEQ ID NO: 24776 - RNA, 4064 nt, Artificial Sequence
  SARS-CoV-2/Wuhan/WIV05/2019__EPI_ISL_402128 spike protein mRNA gc (1-1273)(H69del_V70del_Y453F_D614G_I692V_M1229I)
aggagagucccgcagucggcguccagcggcucugcuuguucgugugugugucguugcaggccuuauucaagcuuaccauguucguguuccuggugcugcugccccuggugagcagccagugcgugaaccugaccacccggacccagcugccaccagccuacaccaacagcuucacccggggcgucuacuaccccgacaagguguuccggagcagcguccugcacagcacccaggaccuguuccugcccuucuucagcaacgugaccugguuccacgccaucagcggcaccaacggcaccaagcgguucgacaaccccgugcugcccuucaacgacggcguguacuucgccagcaccgagaagagcaacaucauccggggcuggaucuucggcaccacccuggacagcaagacccagagccugcugaucgugaauaacgccaccaacguggugaucaaggugugcgaguuccaguucugcaacgaccccuuccugggcguguacuaccacaagaacaacaagagcuggauggagagcgaguuccggguguacagcagcgccaacaacugcaccuucgaguacgugagccagcccuuccugauggaccuggagggcaagcagggcaacuucaagaaccugcgggaguucguguucaagaacaucgacggcuacuucaagaucuacagcaagcacaccccaaucaaccuggugcgggaucugccccagggcuucucagcccuggagccccugguggaccugcccaucggcaucaacaucacccgguuccagacccugcuggcccugcaccggagcuaccugaccccaggcgacagcagcagcggguggacagcaggcgcggcugcuuacuacgugggcuaccugcagccccggaccuuccugcugaaguacaacgagaacggcaccaucaccgacgccguggacugcgcccuggacccucugagcgagaccaagugcacccugaagagcuucaccguggagaagggcaucuaccagaccagcaacuuccgggugcagcccaccgagagcaucgugcgguuccccaacaucaccaaccugugccccuucggcgagguguucaacgccacccgguucgccagcguguacgccuggaaccggaagcggaucagcaacugcguggccgacuacagcgugcuguacaacagcgccagcuucagcaccuucaagugcuacggcgugagccccaccaagcugaacgaccugugcuucaccaacguguacgccgacagcuucgugauccguggcgacgaggugcggcagaucgcacccggccagacaggcaagaucgccgacuacaacuacaagcugcccgacgacuucaccggcugcgugaucgccuggaacagcaacaaccucgacagcaaggugggcggcaacuacaacuaccuguuccggcuguuccggaagagcaaccugaagcccuucgagcgggacaucagcaccgagaucuaccaagccggcuccaccccuugcaacggcguggagggcuucaacugcuacuucccucugcagagcuacggcuuccagcccaccaacggcgugggcuaccagcccuaccgggugguggugcugagcuucgagcugcugcacgccccagccaccguguguggccccaagaagagcaccaaccuggugaagaacaagugcgugaacuucaacuucaacggccuuaccggcaccggcgugcugaccgagagcaacaagaaauuccugcccuuucagcaguucggccgggacaucgccgacaccaccgacgcugugcgggauccccagacccuggagauccuggacaucaccccuugcagcuucggcggcgugagcgugaucaccccaggcaccaacaccagcaaccagguggccgugcuguaccagggcgugaacugcaccgaggugcccguggccauccacgccgaccagcugacacccaccuggcgggucuacagcaccggcagcaacguguuccagacccgggccgguugccugaucggcgccgagcacgugaacaacagcuacgagugcgacauccccaucggcgccggcaucugugccagcuaccagacccagaccaauucaccccggagggcaaggagcguggccagccagagcgugaucgccuacaccaugagccugggcgccgagaacagcguggccuacagcaacaacagcaucgccauccccaccaacuucaccaucagcgugaccaccgagauucugcccgugagcaugaccaagaccagcguggacugcaccauguacaucugcggcgacagcaccgagugcagcaaccugcugcugcaguacggcagcuucugcacccagcugaaccgggcccugaccggcaucgccguggagcaggacaagaacacccaggagguguucgcccaggugaagcagaucuacaagaccccucccaucaaggacuucggcggcuucaacuucagccagauccugcccgaccccagcaagcccagcaagcggagcuucaucgaggaccugcuguucaacaaggugacccuagccgacgccggcuucaucaagcaguacggcgacugccucggcgacauagccgcccgggaccugaucugcgcccagaaguucaacggccugaccgugcugccuccccugcugaccgacgagaugaucgcccaguacaccagcgcccuguuagccggaaccaucaccagcggcuggacuuucggcgcuggagccgcucugcagauccccuucgccaugcagauggccuaccgguucaacggcaucggcgugacccagaacgugcuguacgagaaccagaagcugaucgccaaccaguucaacagcgccaucggcaagauccaggacagccugagcagcaccgcuagcgcccugggcaagcugcaggacguggugaaccagaacgcccaggcccugaacacccuggugaagcagcugagcagcaacuucggcgccaucagcagcgugcugaacgacauccugagccggcuggacaaggucgaggccgaggugcagaucgaccggcugaucacuggccggcugcagagccugcagaccuacgugacccagcagcugauccgggccgccgagauucgggccagcgccaaccuggccgccaccaagaugagcgagugcgugcugggccagagcaagcggguggacuucugcggcaagggcuaccaccugaugagcuuuccccagagcgcaccccacggagugguguuccugcacgugaccuacgugcccgcccaggagaagaacuucaccaccgccccagccaucugccacgacggcaaggcccacuuuccccgggagggcguguucgugagcaacggcacccacugguucgugacccagcggaacuucuacgagccccagaucaucaccaccgacaacaccuucgugagcggcaacugcgacguggugaucggcaucgugaacaacaccguguacgauccccugcagcccgagcuggacagcuucaaggaggagcuggacaaguacuucaagaaucacaccagccccgacguggaccugggcgacaucagcggcaucaacgccagcguggugaacauccagaaggagaucgaucggcugaacgagguggccaagaaccugaacgagagccugaucgaccugcaggagcugggcaaguacgagcaguacaucaaguggcccugguacaucuggcugggcuucaucgccggccugaucgccaucgugaucgugaccaucaugcugugcugcaugaccagcugcugcagcugccugaagggcuguugcagcugcggcagcugcugcaaguucgacgaggacgacagcgagcccgugcugaagggcgugaagcugcacuacaccugaggacuagucccuguucccagagcccacuuuuuuuucuuuuuuugaaauaaaauagccugucuuucagaucuaaaaaaaaaaaaaaaaaaaaaaaaaaaaaaaaaaaaaaaaaaaaaaaaaaaaaaaaaaaaaaaaaaaaaaaaaaaaaaaaaaaaaaaaaaaaaaaaaaaa

SEQ ID NO: 24777 - RNA, 4061 nt, Artificial Sequence
  SARS-CoV-2/Wuhan/WIV05/2019__EPI_ISL_402128 spike protein mRNA gc (1-1273)(H69del_V70del_Y144del_N501Y_A570D_D614G_P681H_T716I_S982 A_D1118H)
aggagagucccgcagucggcguccagcggcucugcuuguucgugugugugucguugcaggccuuauucaagcuuaccauguucguguuccuggugcugcugccccuggugagcagccagugcgugaaccugaccacccggacccagcugccaccagccuacaccaacagcuucacccggggcgucuacuaccccgacaagguguuccggagcagcguccugcacagcacccaggaccuguuccugcccuucuucagcaacgugaccugguuccacgccaucagcggcaccaacggcaccaagcgguucgacaaccccgugcugcccuucaacgacggcguguacuucgccagcaccgagaagagcaacaucauccggggcuggaucuucggcaccacccuggacagcaagacccagagccugcugaucgugaauaacgccaccaacguggugaucaaggugugcgaguuccaguucugcaacgaccccuuccugggcguguaccacaagaacaacaagagcuggauggagagcgaguuccggguguacagcagcgccaacaacugcaccuucgaguacgugagccagcccuuccugauggaccuggagggcaagcagggcaacuucaagaaccugcgggaguucguguucaagaacaucgacggcuacuucaagaucuacagcaagcacaccccaaucaaccuggugcgggaucugccccagggcuucucagcccuggagccccugguggaccugcccaucggcaucaacaucacccgguuccagacccugcuggcccugcaccggagcuaccugaccccaggcgacagcagcagcggguggacagcaggcgcggcugcuuacuacgugggcuaccugcagccccggaccuuccugcugaaguacaacgagaacggcaccaucaccgacgccguggacugcgcccuggacccucugagcgagaccaagugcacccugaagagcuucaccguggagaagggcaucuaccagaccagcaacuuccgggugcagcccaccgagagcaucgugcgguuccccaacaucaccaaccugugccccuucggcgagguguucaacgccacccgguucgccagcguguacgccuggaaccggaagcggaucagcaacugcguggccgacuacagcgugcuguacaacagcgccagcuucagcaccuucaagugcuacggcgugagccccaccaagcugaacgaccugugcuucaccaacguguacgccgacagcuucgugauccguggcgacgaggugcggcagaucgcacccggccagacaggcaagaucgccgacuacaacuacaagcugcccgacgacuucaccggcugcgugaucgccuggaacagcaacaaccucgacagcaaggugggcggcaacuacaacuaccuguaccggcuguuccggaagagcaaccugaagcccuucgagcgggacaucagcaccgagaucuaccaagccggcuccaccccuugcaacggcguggagggcuucaacugcuacuucccucugcagagcuacggcuuccagcccaccuacggcgugggcuaccagcccuaccgggugguggugcugagcuucgagcugcugcacgccccagccaccguguguggccccaagaagagcaccaaccuggugaagaacaagugcgugaacuucaacuucaacggccuuaccggcaccggcgugcugaccgagagcaacaagaaauuccugcccuuucagcaguucggccgggacaucgacgacaccaccgacgcugugcgggauccccagacccuggagauccuggacaucaccccuugcagcuucggcggcgugagcgugaucaccccaggcaccaacaccagcaaccagguggccgugcuguaccagggcgugaacugcaccgaggugcccguggccauccacgccgaccagcugacacccaccuggcgggucuacagcaccggcagcaacguguuccagacccgggccgguugccugaucggcgccgagcacgugaacaacagcuacgagugcgacauccccaucggcgccggcaucugugccagcuaccagacccagaccaauucacaccggagggcaaggagcguggccagccagagcaucaucgccuacaccaugagccugggcgccgagaacagcguggccuacagcaacaacagcaucgccauccccaucaacuucaccaucagcgugaccaccgagauucugcccgugagcaugaccaagaccagcguggacugcaccauguacaucugcggcgacagcaccgagugcagcaaccugcugcugcaguacggcagcuucugcacccagcugaaccgggcccugaccggcaucgccguggagcaggacaagaacacccaggagguguucgcccaggugaagcagaucuacaagaccccucccaucaaggacuucggcggcuucaacuucagccagauccugcccgaccccagcaagcccagcaagcggagcuucaucgaggaccugcuguucaacaaggugacccuagccgacgccggcuucaucaagcaguacggcgacugccucggcgacauagccgcccgggaccugaucugcgcccagaaguucaacggccugaccgugcugccuccccugcugaccgacgagaugaucgcccaguacaccagcgcccuguuagccggaaccaucaccagcggcuggacuuucggcgcuggagccgcucugcagauccccuucgccaugcagauggccuaccgguucaacggcaucggcgugacccagaacgugcuguacgagaaccagaagcugaucgccaaccaguucaacagcgccaucggcaagauccaggacagccugagcagcaccgcuagcgcccugggcaagcugcaggacguggugaaccagaacgcccaggcccugaacacccuggugaagcagcugagcagcaacuucggcgccaucagcagcgugcugaacgacauccuggcccggcuggacaaggucgaggccgaggugcagaucgaccggcugaucacuggccggcugcagagccugcagaccuacgugacccagcagcugauccgggccgccgagauucgggccagcgccaaccuggccgccaccaagaugagcgagugcgugcugggccagagcaagcggguggacuucugcggcaagggcuaccaccugaugagcuuuccccagagcgcaccccacggagugguguuccugcacgugaccuacgugcccgcccaggagaagaacuucaccaccgccccagccaucugccacgacggcaaggcccacuuuccccgggagggcguguucgugagcaacggcacccacugguucgugacccagcggaacuucuacgagccccagaucaucaccacccacaacaccuucgugagcggcaacugcgacguggugaucggcaucgugaacaacaccguguacgauccccugcagcccgagcuggacagcuucaaggaggagcuggacaaguacuucaagaaucacaccagccccgacguggaccugggcgacaucagcggcaucaacgccagcguggugaacauccagaaggagaucgaucggcugaacgagguggccaagaaccugaacgagagccugaucgaccugcaggagcugggcaaguacgagcaguacaucaaguggcccugguacaucuggcugggcuucaucgccggccugaucgccaucgugauggugaccaucaugcugugcugcaugaccagcugcugcagcugccugaagggcuguugcagcugcggcagcugcugcaaguucgacgaggacgacagcgagcccgugcugaagggcgugaagcugcacuacaccugaggacuagucccuguucccagagcccacuuuuuuuucuuuuuuugaaauaaaauagccugucuuucagaucuaaaaaaaaaaaaaaaaaaaaaaaaaaaaaaaaaaaaaaaaaaaaaaaaaaaaaaaaaaaaaaaaaaaaaaaaaaaaaaaaaaaaaaaaaaaaaaaaaaaa

SEQ ID NO: 24778 - RNA, 4070 nt, Artificial Sequence
  SARS-CoV-2/Wuhan/WIV05/2019__EPI_ISL_402128 spike protein mRNA gc (1-1273)(K417N_E484K_N501Y_D614G)
aggagagucccgcagucggcguccagcggcucugcuuguucgugugugugucguugcaggccuuauucaagcuuaccauguucguguuccuggugcugcugccccuggugagcagccagugcgugaaccugaccacccggacccagcugccaccagccuacaccaacagcuucacccggggcgucuacuaccccgacaagguguuccggagcagcguccugcacagcacccaggaccuguuccugcccuucuucagcaacgugaccugguuccacgccauccacgugagcggcaccaacggcaccaagcgguucgacaaccccgugcugcccuucaacgacggcguguacuucgccagcaccgagaagagcaacaucauccggggcuggaucuucggcaccacccuggacagcaagacccagagccugcugaucgugaauaacgccaccaacguggugaucaaggugugcgaguuccaguucugcaacgaccccuuccugggcguguacuaccacaagaacaacaagagcuggauggagagcgaguuccggguguacagcagcgccaacaacugcaccuucgaguacgugagccagcccuuccugauggaccuggagggcaagcagggcaacuucaagaaccugcgggaguucguguucaagaacaucgacggcuacuucaagaucuacagcaagcacaccccaaucaaccuggugcgggaucugccccagggcuucucagcccuggagccccugguggaccugcccaucggcaucaacaucacccgguuccagacccugcuggcccugcaccggagcuaccugaccccaggcgacagcagcagcggguggacagcaggcgcggcugcuuacuacgugggcuaccugcagccccggaccuuccugcugaaguacaacgagaacggcaccaucaccgacgccguggacugcgcccuggacccucugagcgagaccaagugcacccugaagagcuucaccguggagaagggcaucuaccagaccagcaacuuccgggugcagcccaccgagagcaucgugcgguuccccaacaucaccaaccugugccccuucggcgagguguucaacgccacccgguucgccagcguguacgccuggaaccggaagcggaucagcaacugcguggccgacuacagcgugcuguacaacagcgccagcuucagcaccuucaagugcuacggcgugagccccaccaagcugaacgaccugugcuucaccaacguguacgccgacagcuucgugauccguggcgacgaggugcggcagaucgcacccggccagacaggcaacaucgccgacuacaacuacaagcugcccgacgacuucaccggcugcgugaucgccuggaacagcaacaaccucgacagcaaggugggcggcaacuacaacuaccuguaccggcuguuccggaagagcaaccugaagcccuucgagcgggacaucagcaccgagaucuaccaagccggcuccaccccuugcaacggcgugaagggcuucaacugcuacuucccucugcagagcuacggcuuccagcccaccuacggcgugggcuaccagcccuaccgggugguggugcugagcuucgagcugcugcacgccccagccaccguguguggccccaagaagagcaccaaccuggugaagaacaagugcgugaacuucaacuucaacggccuuaccggcaccggcgugcugaccgagagcaacaagaaauuccugcccuuucagcaguucggccgggacaucgccgacaccaccgacgcugugcgggauccccagacccuggagauccuggacaucaccccuugcagcuucggcggcgugagcgugaucaccccaggcaccaacaccagcaaccagguggccgugcuguaccagggcgugaacugcaccgaggugcccguggccauccacgccgaccagcugacacccaccuggcgggucuacagcaccggcagcaacguguuccagacccgggccgguugccugaucggcgccgagcacgugaacaacagcuacgagugcgacauccccaucggcgccggcaucugugccagcuaccagacccagaccaauucaccccggagggcaaggagcguggccagccagagcaucaucgccuacaccaugagccugggcgccgagaacagcguggccuacagcaacaacagcaucgccauccccaccaacuucaccaucagcgugaccaccgagauucugcccgugagcaugaccaagaccagcguggacugcaccauguacaucugcggcgacagcaccgagugcagcaaccugcugcugcaguacggcagcuucugcacccagcugaaccgggcccugaccggcaucgccguggagcaggacaagaacacccaggagguguucgcccaggugaagcagaucuacaagaccccucccaucaaggacuucggcggcuucaacuucagccagauccugcccgaccccagcaagcccagcaagcggagcuucaucgaggaccugcuguucaacaaggugacccuagccgacgccggcuucaucaagcaguacggcgacugccucggcgacauagccgcccgggaccugaucugcgcccagaaguucaacggccugaccgugcugccuccccugcugaccgacgagaugaucgcccaguacaccagcgcccuguuagccggaaccaucaccagcggcuggacuuucggcgcuggagccgcucugcagauccccuucgccaugcagauggccuaccgguucaacggcaucggcgugacccagaacgugcuguacgagaaccagaagcugaucgccaaccaguucaacagcgccaucggcaagauccaggacagccugagcagcaccgcuagcgcccugggcaagcugcaggacguggugaaccagaacgcccaggcccugaacacccuggugaagcagcugagcagcaacuucggcgccaucagcagcgugcugaacgacauccugagccggcuggacaaggucgaggccgaggugcagaucgaccggcugaucacuggccggcugcagagccugcagaccuacgugacccagcagcugauccgggccgccgagauucgggccagcgccaaccuggccgccaccaagaugagcgagugcgugcugggccagagcaagcggguggacuucugcggcaagggcuaccaccugaugagcuuuccccagagcgcaccccacggagugguguuccugcacgugaccuacgugcccgcccaggagaagaacuucaccaccgccccagccaucugccacgacggcaaggcccacuuuccccgggagggcguguucgugagcaacggcacccacugguucgugacccagcggaacuucuacgagccccagaucaucaccaccgacaacaccuucgugagcggcaacugcgacguggugaucggcaucgugaacaacaccguguacgauccccugcagcccgagcuggacagcuucaaggaggagcuggacaaguacuucaagaaucacaccagccccgacguggaccugggcgacaucagcggcaucaacgccagcguggugaacauccagaaggagaucgaucggcugaacgagguggccaagaaccugaacgagagccugaucgaccugcaggagcugggcaaguacgagcaguacaucaaguggcccugguacaucuggcugggcuucaucgccggccugaucgccaucgugauggugaccaucaugcugugcugcaugaccagcugcugcagcugccugaagggcuguugcagcugcggcagcugcugcaaguucgacgaggacgacagcgagcccgugcugaagggcgugaagcugcacuacaccugaggacuagucccuguucccagagcccacuuuuuuuucuuuuuuugaaauaaaauagccugucuuucagaucuaaaaaaaaaaaaaaaaaaaaaaaaaaaaaaaaaaaaaaaaaaaaaaaaaaaaaaaaaaaaaaaaaaaaaaaaaaaaaaaaaaaaaaaaaaaaaaaaaaaa

SEQ ID NO: 24779 - RNA, 4061 nt, Artificial Sequence
  SARS-CoV-2/Wuhan/WIV05/2019__EPI_ISL_402128 spike protein mRNA gc (1-1273)(L18F_D80A_D215G_L242del_A243del_L244del_R246I_K417N_E484 K_N501Y_D614G_A701V)
aggagagucccgcagucggcguccagcggcucugcuuguucgugugugugucguugcaggccuuauucaagcuuaccauguucguguuccuggugcugcugccccuggugagcagccagugcgugaacuucaccacccggacccagcugccaccagccuacaccaacagcuucacccggggcgucuacuaccccgacaagguguuccggagcagcguccugcacagcacccaggaccuguuccugcccuucuucagcaacgugaccugguuccacgccauccacgugagcggcaccaacggcaccaagcgguucgccaaccccgugcugcccuucaacgacggcguguacuucgccagcaccgagaagagcaacaucauccggggcuggaucuucggcaccacccuggacagcaagacccagagccugcugaucgugaauaacgccaccaacguggugaucaaggugugcgaguuccaguucugcaacgaccccuuccugggcguguacuaccacaagaacaacaagagcuggauggagagcgaguuccggguguacagcagcgccaacaacugcaccuucgaguacgugagccagcccuuccugauggaccuggagggcaagcagggcaacuucaagaaccugcgggaguucguguucaagaacaucgacggcuacuucaagaucuacagcaagcacaccccaaucaaccuggugcggggccugccccagggcuucucagcccuggagccccugguggaccugcccaucggcaucaacaucacccgguuccagacccugcacaucagcuaccugaccccaggcgacagcagcagcggguggacagcaggcgcggcugcuuacuacgugggcuaccugcagccccggaccuuccugcugaaguacaacgagaacggcaccaucaccgacgccguggacugcgcccuggacccucugagcgagaccaagugcacccugaagagcuucaccguggagaagggcaucuaccagaccagcaacuuccgggugcagcccaccgagagcaucgugcgguuccccaacaucaccaaccugugccccuucggcgagguguucaacgccacccgguucgccagcguguacgccuggaaccggaagcggaucagcaacugcguggccgacuacagcgugcuguacaacagcgccagcuucagcaccuucaagugcuacggcgugagccccaccaagcugaacgaccugugcuucaccaacguguacgccgacagcuucgugauccguggcgacgaggugcggcagaucgcacccggccagacaggcaacaucgccgacuacaacuacaagcugcccgacgacuucaccggcugcgugaucgccuggaacagcaacaaccucgacagcaaggugggcggcaacuacaacuaccuguaccggcuguuccggaagagcaaccugaagcccuucgagcgggacaucagcaccgagaucuaccaagccggcuccaccccuugcaacggcgugaagggcuucaacugcuacuucccucugcagagcuacggcuuccagcccaccuacggcgugggcuaccagcccuaccgggugguggugcugagcuucgagcugcugcacgccccagccaccguguguggccccaagaagagcaccaaccuggugaagaacaagugcgugaacuucaacuucaacggccuuaccggcaccggcgugcugaccgagagcaacaagaaauuccugcccuuucagcaguucggccgggacaucgccgacaccaccgacgcugugcgggauccccagacccuggagauccuggacaucaccccuugcagcuucggcggcgugagcgugaucaccccaggcaccaacaccagcaaccagguggccgugcuguaccagggcgugaacugcaccgaggugcccguggccauccacgccgaccagcugacacccaccuggcgggucuacagcaccggcagcaacguguuccagacccgggccgguugccugaucggcgccgagcacgugaacaacagcuacgagugcgacauccccaucggcgccggcaucugugccagcuaccagacccagaccaauucaccccggagggcaaggagcguggccagccagagcaucaucgccuacaccaugagccugggcguggagaacagcguggccuacagcaacaacagcaucgccauccccaccaacuucaccaucagcgugaccaccgagauucugcccgugagcaugaccaagaccagcguggacugcaccauguacaucugcggcgacagcaccgagugcagcaaccugcugcugcaguacggcagcuucugcacccagcugaaccgggcccugaccggcaucgccguggagcaggacaagaacacccaggagguguucgcccaggugaagcagaucuacaagaccccucccaucaaggacuucggcggcuucaacuucagccagauccugcccgaccccagcaagcccagcaagcggagcuucaucgaggaccugcuguucaacaaggugacccuagccgacgccggcuucaucaagcaguacggcgacugccucggcgacauagccgcccgggaccugaucugcgcccagaaguucaacggccugaccgugcugccuccccugcugaccgacgagaugaucgcccaguacaccagcgcccuguuagccggaaccaucaccagcggcuggacuuucggcgcuggagccgcucugcagauccccuucgccaugcagauggccuaccgguucaacggcaucggcgugacccagaacgugcuguacgagaaccagaagcugaucgccaaccaguucaacagcgccaucggcaagauccaggacagccugagcagcaccgcuagcgcccugggcaagcugcaggacguggugaaccagaacgcccaggcccugaacacccuggugaagcagcugagcagcaacuucggcgccaucagcagcgugcugaacgacauccugagccggcuggacaaggucgaggccgaggugcagaucgaccggcugaucacuggccggcugcagagccugcagaccuacgugacccagcagcugauccgggccgccgagauucgggccagcgccaaccuggccgccaccaagaugagcgagugcgugcugggccagagcaagcggguggacuucugcggcaagggcuaccaccugaugagcuuuccccagagcgcaccccacggagugguguuccugcacgugaccuacgugcccgcccaggagaagaacuucaccaccgccccagccaucugccacgacggcaaggcccacuuuccccgggagggcguguucgugagcaacggcacccacugguucgugacccagcggaacuucuacgagccccagaucaucaccaccgacaacaccuucgugagcggcaacugcgacguggugaucggcaucgugaacaacaccguguacgauccccugcagcccgagcuggacagcuucaaggaggagcuggacaaguacuucaagaaucacaccagccccgacguggaccugggcgacaucagcggcaucaacgccagcguggugaacauccagaaggagaucgaucggcugaacgagguggccaagaaccugaacgagagccugaucgaccugcaggagcugggcaaguacgagcaguacaucaaguggcccugguacaucuggcugggcuucaucgccggccugaucgccaucgugauggugaccaucaugcugugcugcaugaccagcugcugcagcugccugaagggcuguugcagcugcggcagcugcugcaaguucgacgaggacgacagcgagcccgugcugaagggcgugaagcugcacuacaccugaggacuagucccuguucccagagcccacuuuuuuuucuuuuuuugaaauaaaauagccugucuuucagaucuaaaaaaaaaaaaaaaaaaaaaaaaaaaaaaaaaaaaaaaaaaaaaaaaaaaaaaaaaaaaaaaaaaaaaaaaaaaaaaaaaaaaaaaaaaaaaaaaaaaa

SEQ ID NO: 24780 - RNA, 4070 nt, Artificial Sequence
  SARS-CoV-2/Wuhan/WIV05/2019__EPI_ISL_402128 spike protein mRNA gc (1-1273)(E484K_D614G)
aggagagucccgcagucggcguccagcggcucugcuuguucgugugugugucguugcaggccuuauucaagcuuaccauguucguguuccuggugcugcugccccuggugagcagccagugcgugaaccugaccacccggacccagcugccaccagccuacaccaacagcuucacccggggcgucuacuaccccgacaagguguuccggagcagcguccugcacagcacccaggaccuguuccugcccuucuucagcaacgugaccugguuccacgccauccacgugagcggcaccaacggcaccaagcgguucgacaaccccgugcugcccuucaacgacggcguguacuucgccagcaccgagaagagcaacaucauccggggcuggaucuucggcaccacccuggacagcaagacccagagccugcugaucgugaauaacgccaccaacguggugaucaaggugugcgaguuccaguucugcaacgaccccuuccugggcguguacuaccacaagaacaacaagagcuggauggagagcgaguuccggguguacagcagcgccaacaacugcaccuucgaguacgugagccagcccuuccugauggaccuggagggcaagcagggcaacuucaagaaccugcgggaguucguguucaagaacaucgacggcuacuucaagaucuacagcaagcacaccccaaucaaccuggugcgggaucugccccagggcuucucagcccuggagccccugguggaccugcccaucggcaucaacaucacccgguuccagacccugcuggcccugcaccggagcuaccugaccccaggcgacagcagcagcggguggacagcaggcgcggcugcuuacuacgugggcuaccugcagccccggaccuuccugcugaaguacaacgagaacggcaccaucaccgacgccguggacugcgcccuggacccucugagcgagaccaagugcacccugaagagcuucaccguggagaagggcaucuaccagaccagcaacuuccgggugcagcccaccgagagcaucgugcgguuccccaacaucaccaaccugugccccuucggcgagguguucaacgccacccgguucgccagcguguacgccuggaaccggaagcggaucagcaacugcguggccgacuacagcgugcuguacaacagcgccagcuucagcaccuucaagugcuacggcgugagccccaccaagcugaacgaccugugcuucaccaacguguacgccgacagcuucgugauccguggcgacgaggugcggcagaucgcacccggccagacaggcaagaucgccgacuacaacuacaagcugcccgacgacuucaccggcugcgugaucgccuggaacagcaacaaccucgacagcaaggugggcggcaacuacaacuaccuguaccggcuguuccggaagagcaaccugaagcccuucgagcgggacaucagcaccgagaucuaccaagccggcuccaccccuugcaacggcgugaagggcuucaacugcuacuucccucugcagagcuacggcuuccagcccaccaacggcgugggcuaccagcccuaccgggugguggugcugagcuucgagcugcugcacgccccagccaccguguguggccccaagaagagcaccaaccuggugaagaacaagugcgugaacuucaacuucaacggccuuaccggcaccggcgugcugaccgagagcaacaagaaauuccugcccuuucagcaguucggccgggacaucgccgacaccaccgacgcugugcgggauccccagacccuggagauccuggacaucaccccuugcagcuucggcggcgugagcgugaucaccccaggcaccaacaccagcaaccagguggccgugcuguaccagggcgugaacugcaccgaggugcccguggccauccacgccgaccagcugacacccaccuggcgggucuacagcaccggcagcaacguguuccagacccgggccgguugccugaucggcgccgagcacgugaacaacagcuacgagugcgacauccccaucggcgccggcaucugugccagcuaccagacccagaccaauucaccccggagggcaaggagcguggccagccagagcaucaucgccuacaccaugagccugggcgccgagaacagcguggccuacagcaacaacagcaucgccauccccaccaacuucaccaucagcgugaccaccgagauucugcccgugagcaugaccaagaccagcguggacugcaccauguacaucugcggcgacagcaccgagugcagcaaccugcugcugcaguacggcagcuucugcacccagcugaaccgggcccugaccggcaucgccguggagcaggacaagaacacccaggagguguucgcccaggugaagcagaucuacaagaccccucccaucaaggacuucggcggcuucaacuucagccagauccugcccgaccccagcaagcccagcaagcggagcuucaucgaggaccugcuguucaacaaggugacccuagccgacgccggcuucaucaagcaguacggcgacugccucggcgacauagccgcccgggaccugaucugcgcccagaaguucaacggccugaccgugcugccuccccugcugaccgacgagaugaucgcccaguacaccagcgcccuguuagccggaaccaucaccagcggcuggacuuucggcgcuggagccgcucugcagauccccuucgccaugcagauggccuaccgguucaacggcaucggcgugacccagaacgugcuguacgagaaccagaagcugaucgccaaccaguucaacagcgccaucggcaagauccaggacagccugagcagcaccgcuagcgcccugggcaagcugcaggacguggugaaccagaacgcccaggcccugaacacccuggugaagcagcugagcagcaacuucggcgccaucagcagcgugcugaacgacauccugagccggcuggacaaggucgaggccgaggugcagaucgaccggcugaucacuggccggcugcagagccugcagaccuacgugacccagcagcugauccgggccgccgagauucgggccagcgccaaccuggccgccaccaagaugagcgagugcgugcugggccagagcaagcggguggacuucugcggcaagggcuaccaccugaugagcuuuccccagagcgcaccccacggagugguguuccugcacgugaccuacgugcccgcccaggagaagaacuucaccaccgccccagccaucugccacgacggcaaggcccacuuuccccgggagggcguguucgugagcaacggcacccacugguucgugacccagcggaacuucuacgagccccagaucaucaccaccgacaacaccuucgugagcggcaacugcgacguggugaucggcaucgugaacaacaccguguacgauccccugcagcccgagcuggacagcuucaaggaggagcuggacaaguacuucaagaaucacaccagccccgacguggaccugggcgacaucagcggcaucaacgccagcguggugaacauccagaaggagaucgaucggcugaacgagguggccaagaaccugaacgagagccugaucgaccugcaggagcugggcaaguacgagcaguacaucaaguggcccugguacaucuggcugggcuucaucgccggccugaucgccaucgugauggugaccaucaugcugugcugcaugaccagcugcugcagcugccugaagggcuguugcagcugcggcagcugcugcaaguucgacgaggacgacagcgagcccgugcugaagggcgugaagcugcacuacaccugaggacuagucccuguucccagagcccacuuuuuuuucuuuuuuugaaauaaaauagccugucuuucagaucuaaaaaaaaaaaaaaaaaaaaaaaaaaaaaaaaaaaaaaaaaaaaaaaaaaaaaaaaaaaaaaaaaaaaaaaaaaaaaaaaaaaaaaaaaaaaaaaaaaaa

SEQ ID NO: 24781 - RNA, 4070 nt, Artificial Sequence
  SARS-CoV-2/Wuhan/WIV05/2019__EPI_ISL_402128 spike protein mRNA gc (1-1273)(L18F_T20N_P26S_D138Y_R190S_K417T_E484K_N501Y_D614G_H655Y _T1027I)
aggagagucccgcagucggcguccagcggcucugcuuguucgugugugugucguugcaggccuuauucaagcuuaccauguucguguuccuggugcugcugccccuggugagcagccagugcgugaacuucaccaaccggacccagcugccaagcgccuacaccaacagcuucacccggggcgucuacuaccccgacaagguguuccggagcagcguccugcacagcacccaggaccuguuccugcccuucuucagcaacgugaccugguuccacgccauccacgugagcggcaccaacggcaccaagcgguucgacaaccccgugcugcccuucaacgacggcguguacuucgccagcaccgagaagagcaacaucauccggggcuggaucuucggcaccacccuggacagcaagacccagagccugcugaucgugaauaacgccaccaacguggugaucaaggugugcgaguuccaguucugcaacuaccccuuccugggcguguacuaccacaagaacaacaagagcuggauggagagcgaguuccggguguacagcagcgccaacaacugcaccuucgaguacgugagccagcccuuccugauggaccuggagggcaagcagggcaacuucaagaaccugagcgaguucguguucaagaacaucgacggcuacuucaagaucuacagcaagcacaccccaaucaaccuggugcgggaucugccccagggcuucucagcccuggagccccugguggaccugcccaucggcaucaacaucacccgguuccagacccugcuggcccugcaccggagcuaccugaccccaggcgacagcagcagcggguggacagcaggcgcggcugcuuacuacgugggcuaccugcagccccggaccuuccugcugaaguacaacgagaacggcaccaucaccgacgccguggacugcgcccuggacccucugagcgagaccaagugcacccugaagagcuucaccguggagaagggcaucuaccagaccagcaacuuccgggugcagcccaccgagagcaucgugcgguuccccaacaucaccaaccugugccccuucggcgagguguucaacgccacccgguucgccagcguguacgccuggaaccggaagcggaucagcaacugcguggccgacuacagcgugcuguacaacagcgccagcuucagcaccuucaagugcuacggcgugagccccaccaagcugaacgaccugugcuucaccaacguguacgccgacagcuucgugauccguggcgacgaggugcggcagaucgcacccggccagacaggcaccaucgccgacuacaacuacaagcugcccgacgacuucaccggcugcgugaucgccuggaacagcaacaaccucgacagcaaggugggcggcaacuacaacuaccuguaccggcuguuccggaagagcaaccugaagcccuucgagcgggacaucagcaccgagaucuaccaagccggcuccaccccuugcaacggcgugaagggcuucaacugcuacuucccucugcagagcuacggcuuccagcccaccuacggcgugggcuaccagcccuaccgggugguggugcugagcuucgagcugcugcacgccccagccaccguguguggccccaagaagagcaccaaccuggugaagaacaagugcgugaacuucaacuucaacggccuuaccggcaccggcgugcugaccgagagcaacaagaaauuccugcccuuucagcaguucggccgggacaucgccgacaccaccgacgcugugcgggauccccagacccuggagauccuggacaucaccccuugcagcuucggcggcgugagcgugaucaccccaggcaccaacaccagcaaccagguggccgugcuguaccagggcgugaacugcaccgaggugcccguggccauccacgccgaccagcugacacccaccuggcgggucuacagcaccggcagcaacguguuccagacccgggccgguugccugaucggcgccgaguacgugaacaacagcuacgagugcgacauccccaucggcgccggcaucugugccagcuaccagacccagaccaauucaccccggagggcaaggagcguggccagccagagcaucaucgccuacaccaugagccugggcgccgagaacagcguggccuacagcaacaacagcaucgccauccccaccaacuucaccaucagcgugaccaccgagauucugcccgugagcaugaccaagaccagcguggacugcaccauguacaucugcggcgacagcaccgagugcagcaaccugcugcugcaguacggcagcuucugcacccagcugaaccgggcccugaccggcaucgccguggagcaggacaagaacacccaggagguguucgcccaggugaagcagaucuacaagaccccucccaucaaggacuucggcggcuucaacuucagccagauccugcccgaccccagcaagcccagcaagcggagcuucaucgaggaccugcuguucaacaaggugacccuagccgacgccggcuucaucaagcaguacggcgacugccucggcgacauagccgcccgggaccugaucugcgcccagaaguucaacggccugaccgugcugccuccccugcugaccgacgagaugaucgcccaguacaccagcgcccuguuagccggaaccaucaccagcggcuggacuuucggcgcuggagccgcucugcagauccccuucgccaugcagauggccuaccgguucaacggcaucggcgugacccagaacgugcuguacgagaaccagaagcugaucgccaaccaguucaacagcgccaucggcaagauccaggacagccugagcagcaccgcuagcgcccugggcaagcugcaggacguggugaaccagaacgcccaggcccugaacacccuggugaagcagcugagcagcaacuucggcgccaucagcagcgugcugaacgacauccugagccggcuggacaaggucgaggccgaggugcagaucgaccggcugaucacuggccggcugcagagccugcagaccuacgugacccagcagcugauccgggccgccgagauucgggccagcgccaaccuggccgccaucaagaugagcgagugcgugcugggccagagcaagcggguggacuucugcggcaagggcuaccaccugaugagcuuuccccagagcgcaccccacggagugguguuccugcacgugaccuacgugcccgcccaggagaagaacuucaccaccgccccagccaucugccacgacggcaaggcccacuuuccccgggagggcguguucgugagcaacggcacccacugguucgugacccagcggaacuucuacgagccccagaucaucaccaccgacaacaccuucgugagcggcaacugcgacguggugaucggcaucgugaacaacaccguguacgauccccugcagcccgagcuggacagcuucaaggaggagcuggacaaguacuucaagaaucacaccagccccgacguggaccugggcgacaucagcggcaucaacgccagcguggugaacauccagaaggagaucgaucggcugaacgagguggccaagaaccugaacgagagccugaucgaccugcaggagcugggcaaguacgagcaguacaucaaguggcccugguacaucuggcugggcuucaucgccggccugaucgccaucgugauggugaccaucaugcugugcugcaugaccagcugcugcagcugccugaagggcuguugcagcugcggcagcugcugcaaguucgacgaggacgacagcgagcccgugcugaagggcgugaagcugcacuacaccugaggacuagucccuguucccagagcccacuuuuuuuucuuuuuuugaaauaaaauagccugucuuucagaucuaaaaaaaaaaaaaaaaaaaaaaaaaaaaaaaaaaaaaaaaaaaaaaaaaaaaaaaaaaaaaaaaaaaaaaaaaaaaaaaaaaaaaaaaaaaaaaaaaaaa

SEQ ID NO: 24782 - RNA, 4070 nt, Artificial Sequence
  SARS-CoV-2/Wuhan/WIV05/2019__EPI_ISL_402128 spike protein mRNA gc (1-1273)(S13I_W152C_L452R_D614G)
aggagagucccgcagucggcguccagcggcucugcuuguucgugugugugucguugcaggccuuauucaagcuuaccauguucguguuccuggugcugcugccccuggugagcauccagugcgugaaccugaccacccggacccagcugccaccagccuacaccaacagcuucacccggggcgucuacuaccccgacaagguguuccggagcagcguccugcacagcacccaggaccuguuccugcccuucuucagcaacgugaccugguuccacgccauccacgugagcggcaccaacggcaccaagcgguucgacaaccccgugcugcccuucaacgacggcguguacuucgccagcaccgagaagagcaacaucauccggggcuggaucuucggcaccacccuggacagcaagacccagagccugcugaucgugaauaacgccaccaacguggugaucaaggugugcgaguuccaguucugcaacgaccccuuccugggcguguacuaccacaagaacaacaagagcugcauggagagcgaguuccggguguacagcagcgccaacaacugcaccuucgaguacgugagccagcccuuccugauggaccuggagggcaagcagggcaacuucaagaaccugcgggaguucguguucaagaacaucgacggcuacuucaagaucuacagcaagcacaccccaaucaaccuggugcgggaucugccccagggcuucucagcccuggagccccugguggaccugcccaucggcaucaacaucacccgguuccagacccugcuggcccugcaccggagcuaccugaccccaggcgacagcagcagcggguggacagcaggcgcggcugcuuacuacgugggcuaccugcagccccggaccuuccugcugaaguacaacgagaacggcaccaucaccgacgccguggacugcgcccuggacccucugagcgagaccaagugcacccugaagagcuucaccguggagaagggcaucuaccagaccagcaacuuccgggugcagcccaccgagagcaucgugcgguuccccaacaucaccaaccugugccccuucggcgagguguucaacgccacccgguucgccagcguguacgccuggaaccggaagcggaucagcaacugcguggccgacuacagcgugcuguacaacagcgccagcuucagcaccuucaagugcuacggcgugagccccaccaagcugaacgaccugugcuucaccaacguguacgccgacagcuucgugauccguggcgacgaggugcggcagaucgcacccggccagacaggcaagaucgccgacuacaacuacaagcugcccgacgacuucaccggcugcgugaucgccuggaacagcaacaaccucgacagcaaggugggcggcaacuacaacuaccgcuaccggcuguuccggaagagcaaccugaagcccuucgagcgggacaucagcaccgagaucuaccaagccggcuccaccccuugcaacggcguggagggcuucaacugcuacuucccucugcagagcuacggcuuccagcccaccaacggcgugggcuaccagcccuaccgggugguggugcugagcuucgagcugcugcacgccccagccaccguguguggccccaagaagagcaccaaccuggugaagaacaagugcgugaacuucaacuucaacggccuuaccggcaccggcgugcugaccgagagcaacaagaaauuccugcccuuucagcaguucggccgggacaucgccgacaccaccgacgcugugcgggauccccagacccuggagauccuggacaucaccccuugcagcuucggcggcgugagcgugaucaccccaggcaccaacaccagcaaccagguggccgugcuguaccagggcgugaacugcaccgaggugcccguggccauccacgccgaccagcugacacccaccuggcgggucuacagcaccggcagcaacguguuccagacccgggccgguugccugaucggcgccgagcacgugaacaacagcuacgagugcgacauccccaucggcgccggcaucugugccagcuaccagacccagaccaauucaccccggagggcaaggagcguggccagccagagcaucaucgccuacaccaugagccugggcgccgagaacagcguggccuacagcaacaacagcaucgccauccccaccaacuucaccaucagcgugaccaccgagauucugcccgugagcaugaccaagaccagcguggacugcaccauguacaucugcggcgacagcaccgagugcagcaaccugcugcugcaguacggcagcuucugcacccagcugaaccgggcccugaccggcaucgccguggagcaggacaagaacacccaggagguguucgcccaggugaagcagaucuacaagaccccucccaucaaggacuucggcggcuucaacuucagccagauccugcccgaccccagcaagcccagcaagcggagcuucaucgaggaccugcuguucaacaaggugacccuagccgacgccggcuucaucaagcaguacggcgacugccucggcgacauagccgcccgggaccugaucugcgcccagaaguucaacggccugaccgugcugccuccccugcugaccgacgagaugaucgcccaguacaccagcgcccuguuagccggaaccaucaccagcggcuggacuuucggcgcuggagccgcucugcagauccccuucgccaugcagauggccuaccgguucaacggcaucggcgugacccagaacgugcuguacgagaaccagaagcugaucgccaaccaguucaacagcgccaucggcaagauccaggacagccugagcagcaccgcuagcgcccugggcaagcugcaggacguggugaaccagaacgcccaggcccugaacacccuggugaagcagcugagcagcaacuucggcgccaucagcagcgugcugaacgacauccugagccggcuggacaaggucgaggccgaggugcagaucgaccggcugaucacuggccggcugcagagccugcagaccuacgugacccagcagcugauccgggccgccgagauucgggccagcgccaaccuggccgccaccaagaugagcgagugcgugcugggccagagcaagcggguggacuucugcggcaagggcuaccaccugaugagcuuuccccagagcgcaccccacggagugguguuccugcacgugaccuacgugcccgcccaggagaagaacuucaccaccgccccagccaucugccacgacggcaaggcccacuuuccccgggagggcguguucgugagcaacggcacccacugguucgugacccagcggaacuucuacgagccccagaucaucaccaccgacaacaccuucgugagcggcaacugcgacguggugaucggcaucgugaacaacaccguguacgauccccugcagcccgagcuggacagcuucaaggaggagcuggacaaguacuucaagaaucacaccagccccgacguggaccugggcgacaucagcggcaucaacgccagcguggugaacauccagaaggagaucgaucggcugaacgagguggccaagaaccugaacgagagccugaucgaccugcaggagcugggcaaguacgagcaguacaucaaguggcccugguacaucuggcugggcuucaucgccggccugaucgccaucgugauggugaccaucaugcugugcugcaugaccagcugcugcagcugccugaagggcuguugcagcugcggcagcugcugcaaguucgacgaggacgacagcgagcccgugcugaagggcgugaagcugcacuacaccugaggacuagucccuguucccagagcccacuuuuuuuucuuuuuuugaaauaaaauagccugucuuucagaucuaaaaaaaaaaaaaaaaaaaaaaaaaaaaaaaaaaaaaaaaaaaaaaaaaaaaaaaaaaaaaaaaaaaaaaaaaaaaaaaaaaaaaaaaaaaaaaaaaaaa

SEQ ID NO: 24783 - RNA, 4070 nt, Artificial Sequence
  SARS-CoV-2/Wuhan/WIV05/2019__EPI_ISL_402128 spike protein mRNA gc (1-1273)
aggagagucccgcagucggcguccagcggcucugcuuguucgugugugugucguugcaggccuuauucaagcuuaccauguucguguuccuggugcugcugccccuggugagcagccagugcgugaaccugaccacccggacccagcugcccccugccuacaccaacagcuucacccggggcguguacuaccccgacaagguguuccggagcagcgugcugcacagcacccaggaccuguuccugcccuucuucagcaacgugaccugguuccacgccauccacgugagcggcaccaacggcaccaagcgguucgacaacccagugcugcccuucaacgacggcguguacuucgccagcaccgagaagucaaacaucauccggggcuggaucuucggcaccacccuggacagcaagacacagagccugcugaucgugaacaacgccaccaacguggugaucaaggugugcgaguuucaguucugcaacgaccccuuccugggcguguacuaccacaagaacaacaagagcuggauggagagcgaguuccgggucuacagcagcgcuaacaauugcaccuucgaguacgugagccagcccuuccugauggaccucgagggcaagcagggcaacuucaagaaccugcgggaguucguguucaagaacaucgauggcuacuucaagaucuacagcaagcacacccccaucaaccuggugcgggaccugccccagggauucagcgcccuggagccucugguggaccugcccaucggcaucaacaucaccagguuccagacccugcuggcccugcaccggagcuaccugacccccggcgacagcagcagcggcuggaccgccggcgccgccgcauacuacgugggcuaccugcagccacggaccuuccugcugaaguacaacgagaacggcaccaucaccgacgccguggacugcgcccuggacccccugagcgagaccaagugcacccuaaagagcuucaccguggagaagggcaucuaccagaccagcaacuuccgggugcagcccacugagagcaucgugcgguuccccaacauuaccaaccugugucccuucggcgagguguucaacgccacccgguucgccagcguguacgccuggaaccggaagcggaucagcaacugcguggccgacuacagcgugcuguacaacagcgccagcuucagcaccuucaagugcuacggcgugagcccuaccaagcugaacgaccugugcuucaccaacguguacgcugacagcuucgugauccggggcgacgaggugcggcagaucgcccccggccagaccggcaagaucgccgacuacaacuacaagcugcccgacgacuucaccggcugcgugaucgccuggaacagcaacaaccuggacagcaaggugggcggcaacuacaacuaccuguaccggcuguuccguaagagcaaccugaagccauucgagcgggacaucagcaccgagaucuaccaggccggcagcacccccugcaacgguguggagggcuuuaacugcuacuucccccugcagagcuacggcuuccagcccaccaacggcgugggcuaccagcccuaccgggugguggugcugagcuucgagcugcugcacgcccccgccaccgugugcggcccuaaaaagagcaccaaccuggugaagaacaagugcgugaacuucaauuucaacggccugaccggcaccggcgugcugaccgagagcaacaagaaguuccugcccuuccagcaguucggccgggauaucgccgacaccaccgacgcagugcgggacccccagacccuggagauccuggacaucaccccaugcagcuucggcggcgugagcgucaucacccccggcacaaacaccagcaaccagguggccgugcuguaccaggacgugaacugcaccgaggugcccguggccauccacgccgaccagcugacccccaccuggcggguguacagcaccggaagcaacguguuccagacccgggccggcugccugaucggcgccgagcacgugaacaacuccuacgagugcgacauccccaucggcgcuggcaucugcgccagcuaccagacccagaccaacagcccccggcgggcccggagcguggccagccagagcaucaucgccuacaccaugagcuuaggcgccgagaacagcguggccuacagcaacaacagcaucgcgaucccuaccaacuucaccaucagcgugaccaccgagauacugcccgugagcaugaccaagaccagcguggacuguaccauguacaucugcggcgacagcaccgagugcagcaaccugcugcugcaguacggcagcuucugcacccagcugaaccgggcccugaccggcaucgccguggagcaggacaagaacacccaagagguguucgcccaggugaagcagaucuacaagacucccccaaucaaggacuucggcggcuucaacuucagccagauccugcccgaccccagcaagcccagcaagcggagcuucaucgaggaccugcuguucaacaaggugacccuggccgacgccggcuucaucaagcaguacggcgauugccugggcgacaucgccgcucgggaccugaucugcgcccagaaguucaacgggcugaccgugcugcccccucugcugaccgacgagaugaucgcccaguacaccagcgcccugcuugccggcaccaucaccagcggcuggaccuucggcgccggcgcagcccugcagauccccuucgccaugcagauggccuaccgguucaacggcaucggcgugacccagaacgugcuguacgagaaccagaagcugaucgccaaccaguucaacagcgccaucggcaagauccaggacagccugagcagcaccgccagcgcccugggcaagcugcaggacguggugaaccagaacgcucaggcccugaacacccuggugaagcagcugagcagcaacuucggcgccaucagcucagugcugaaugacauccugagcaggcuggacaagguggaggccgaggugcagaucgaccggcugaucaccggccggcugcagagccugcagaccuacgugacccagcagcugauccgggccgccgagauccgggccagcgccaaccuggcagccaccaagaugagcgagugcgugcugggccagagcaagcggguggacuuuugcggcaagggcuaccaccugaugagcuucccccagagcgccccacacggcgugguguuccuccacgucacauacgugcccgcccaggagaagaacuucaccaccgcccccgccauuugccacgacggcaaggcucacuucccccgggagggcguguucgugagcaacggaacccacugguucgugacccagcggaacuucuacgagccccagaucaucaccaccgacaacaccuucgugagcggcaacugcgacguggugaucggcaucgugaacaacaccguguacgacccccugcagccugagcuggacagcuucaaggaggagcuggacaaguacuucaagaaccacaccagccccgauguggaccugggcgacaucagcggcaucaacgccagcguggugaacauccagaaggagaucgaccggcugaacgagguggccaagaaccugaacgagagccugaucgaccugcaggagcugggcaaguacgagcaguacaucaaguggcccugguacaucuggcugggcuucaucgccggccugaucgccaucgugauggugaccaucaugcugugcugcaugaccagcugcuguagcugccugaagggcugcugcagcugcggcagcugcugcaaguucgacgaggacgacagcgagccagugcugaagggcgugaagcugcacuacaccugaggacuagucccuguucccagagcccacuuuuuuuucuuuuuuugaaauaaaauagccugucuuucagaucuaaaaaaaaaaaaaaaaaaaaaaaaaaaaaaaaaaaaaaaaaaaaaaaaaaaaaaaaaaaaaaaaaaaaaaaaaaaaaaaaaaaaaaaaaaaaaaaaaaaa

SEQ ID NO: 24784 - RNA, 4070 nt, Artificial Sequence
  SARS-CoV-2/Wuhan/WIV05/2019__EPI_ISL_402128 spike protein mRNA gc (1-1273)(D614G)
aggagagucccgcagucggcguccagcggcucugcuuguucgugugugugucguugcaggccuuauucaagcuuaccauguucguguuccuggugcugcugccccuggugagcagccagugcgugaaccugaccacccggacccagcugcccccugccuacaccaacagcuucacccggggcguguacuaccccgacaagguguuccggagcagcgugcugcacagcacccaggaccuguuccugcccuucuucagcaacgugaccugguuccacgccauccacgugagcggcaccaacggcaccaagcgguucgacaacccagugcugcccuucaacgacggcguguacuucgccagcaccgagaagucaaacaucauccggggcuggaucuucggcaccacccuggacagcaagacacagagccugcugaucgugaacaacgccaccaacguggugaucaaggugugcgaguuucaguucugcaacgaccccuuccugggcguguacuaccacaagaacaacaagagcuggauggagagcgaguuccgggucuacagcagcgcuaacaauugcaccuucgaguacgugagccagcccuuccugauggaccucgagggcaagcagggcaacuucaagaaccugcgggaguucguguucaagaacaucgauggcuacuucaagaucuacagcaagcacacccccaucaaccuggugcgggaccugccccagggauucagcgcccuggagccucugguggaccugcccaucggcaucaacaucaccagguuccagacccugcuggcccugcaccggagcuaccugacccccggcgacagcagcagcggcuggaccgccggcgccgccgcauacuacgugggcuaccugcagccacggaccuuccugcugaaguacaacgagaacggcaccaucaccgacgccguggacugcgcccuggacccccugagcgagaccaagugcacccuaaagagcuucaccguggagaagggcaucuaccagaccagcaacuuccgggugcagcccacugagagcaucgugcgguuccccaacauuaccaaccugugucccuucggcgagguguucaacgccacccgguucgccagcguguacgccuggaaccggaagcggaucagcaacugcguggccgacuacagcgugcuguacaacagcgccagcuucagcaccuucaagugcuacggcgugagcccuaccaagcugaacgaccugugcuucaccaacguguacgcugacagcuucgugauccggggcgacgaggugcggcagaucgcccccggccagaccggcaagaucgccgacuacaacuacaagcugcccgacgacuucaccggcugcgugaucgccuggaacagcaacaaccuggacagcaaggugggcggcaacuacaacuaccuguaccggcuguuccguaagagcaaccugaagccauucgagcgggacaucagcaccgagaucuaccaggccggcagcacccccugcaacgguguggagggcuuuaacugcuacuucccccugcagagcuacggcuuccagcccaccaacggcgugggcuaccagcccuaccgggugguggugcugagcuucgagcugcugcacgcccccgccaccgugugcggcccuaaaaagagcaccaaccuggugaagaacaagugcgugaacuucaauuucaacggccugaccggcaccggcgugcugaccgagagcaacaagaaguuccugcccuuccagcaguucggccgggauaucgccgacaccaccgacgcagugcgggacccccagacccuggagauccuggacaucaccccaugcagcuucggcggcgugagcgucaucacccccggcacaaacaccagcaaccagguggccgugcuguaccagggagugaacugcaccgaggugcccguggccauccacgccgaccagcugacccccaccuggcggguguacagcaccggcagcaacguguuccagacccgggccggcugccugaucggcgccgagcacgugaacaacuccuacgagugcgacauccccaucggcgcuggcaucugcgccagcuaccagacccagaccaacagcccccggcgggcccggagcguggccagccagagcaucaucgccuacaccaugagcuuaggcgccgagaacagcguggccuacagcaacaacagcaucgcgaucccuaccaacuucaccaucagcgugaccaccgagauacugcccgugagcaugaccaagaccagcguggacuguaccauguacaucugcggcgacagcaccgagugcagcaaccugcugcugcaguacggcagcuucugcacccagcugaaccgggcccugaccggcaucgccguggagcaggacaagaacacccaagagguguucgcccaggugaagcagaucuacaagacucccccaaucaaggacuucggcggcuucaacuucagccagauccugcccgaccccagcaagcccagcaagcggagcuucaucgaggaccugcuguucaacaaggugacccuggccgacgccggcuucaucaagcaguacggcgacugccugggggauaucgccgcucgggaccugaucugcgcccagaaguucaacggccugaccgugcugcccccucugcugaccgacgagaugaucgcccaguacaccagcgcccugcuugccggcaccaucaccagcggcuggaccuucggcgccggcgcagcccugcagauccccuucgccaugcagauggccuaccgguucaacggcaucggcgugacccagaacgugcuguacgagaaccagaagcugaucgccaaccaguucaacagcgccaucggcaagauccaggacagccugagcagcaccgccagcgcccugggcaagcugcaggacguggugaaccagaacgcucaggcccugaacacccuggugaagcagcugagcagcaacuucggcgccaucagcucagugcugaaugacauccugagcaggcuggacaagguggaggccgaggugcagaucgaccggcugaucaccggccggcugcagagccugcagaccuacgugacccagcagcugauccgggccgccgagauccgggccagcgccaaccuggcagccaccaagaugagcgagugcgugcugggccagagcaagcggguggacuuuugcggcaagggcuaccaccugaugagcuucccccagagcgccccacacggcgugguguuccuccacgucacauacgugcccgcccaggagaagaacuucaccaccgcccccgccauuugccacgacggcaaggcucacuucccccgggagggaguguucgugagcaacggcacccacugguucgugacccagcggaacuucuacgagccccagaucaucaccaccgacaacaccuucgugagcggcaacugcgacguggugaucggcaucgugaacaacaccguguacgacccccugcagccugagcuggacagcuucaaggaggagcuggacaaguacuucaagaaccacaccagccccgacguggaucugggcgacaucagcggcaucaacgccagcguggugaacauccagaaggagaucgaccggcugaacgagguggccaagaaccugaacgagagccugaucgaccugcaggagcugggcaaguacgagcaguacaucaaguggcccugguacaucuggcugggcuucaucgccggccugaucgccaucgugauggugaccaucaugcugugcugcaugaccagcugcuguagcugccugaagggcugcugcagcugcggcagcugcugcaaguucgacgaggacgacagcgagccagugcugaagggcgugaagcugcacuacaccugaggacuagucccuguucccagagcccacuuuuuuuucuuuuuuugaaauaaaauagccugucuuucagaucuaaaaaaaaaaaaaaaaaaaaaaaaaaaaaaaaaaaaaaaaaaaaaaaaaaaaaaaaaaaaaaaaaaaaaaaaaaaaaaaaaaaaaaaaaaaaaaaaaaaa

SEQ ID NO: 24785 - RNA, 4070 nt, Artificial Sequence
  SARS-CoV-2/Wuhan/WIV05/2019__EPI_ISL_402128 spike protein mRNA gc (1-1273)(A222V_D614G)
aggagagucccgcagucggcguccagcggcucugcuuguucgugugugugucguugcaggccuuauucaagcuuaccauguucguguuccuggugcugcugccccuggugagcagccagugcgugaaccugaccacccggacccagcugcccccugccuacaccaacagcuucacccggggcguguacuaccccgacaagguguuccggagcagcgugcugcacagcacccaggaccuguuccugcccuucuucagcaacgugaccugguuccacgccauccacgugagcggcaccaacggcaccaagcgguucgacaacccagugcugcccuucaacgacggcguguacuucgccagcaccgagaagucaaacaucauccggggcuggaucuucggcaccacccuggacagcaagacacagagccugcugaucgugaacaacgccaccaacguggugaucaaggugugcgaguuucaguucugcaacgaccccuuccugggcguguacuaccacaagaacaacaagagcuggauggagagcgaguuccgggucuacagcagcgcuaacaauugcaccuucgaguacgugagccagcccuuccugauggaccucgagggcaagcagggcaacuucaagaaccugcgggaguucguguucaagaacaucgauggcuacuucaagaucuacagcaagcacacccccaucaaccuggugcgggaccugccccagggauucagcgugcuggagccucugguggaccugcccaucggcaucaacaucaccagguuccagacccugcuggcccugcaccggagcuaccugacccccggcgacagcagcagcggcuggaccgccggcgccgccgccuacuacgugggcuaccugcagccacggaccuuccugcugaaguacaacgagaacggcaccaucaccgacgcaguggacugcgcccuggacccccugagcgagaccaagugcacccuaaagagcuucaccguggagaagggcaucuaccagaccagcaacuuccgggugcagcccacugagagcaucgugcgguuccccaacauuaccaaccugugucccuucggcgagguguucaacgccacccgguucgccagcguguacgccuggaaccggaagcggaucagcaacugcguggccgacuacagcgugcuguacaacagcgccagcuucagcaccuucaagugcuacggcgugagcccuaccaagcugaacgaccugugcuucaccaacguguacgccgacagcuucgugauccggggcgacgaggugcggcagaucgcucccggccagaccggcaagaucgccgacuacaacuacaagcugcccgacgacuucaccggcugcgugaucgccuggaacagcaacaaccuggacagcaaggugggcggcaacuacaacuaccuguaccggcuguuccguaagagcaaccugaagccauucgagcgggacaucagcaccgagaucuaccaggccggcagcacccccugcaacgguguggagggcuuuaacugcuacuucccccugcagagcuacggcuuccagcccaccaacggcgugggcuaccagcccuaccgggugguggugcugagcuucgagcugcugcacgcccccgccaccgugugcggcccuaaaaagagcaccaaccuggugaagaacaagugcgugaacuucaauuucaacggccugaccggcaccggcgugcugaccgagagcaacaagaaguuccugcccuuccagcaguucggccgggauaucgccgacaccaccgacgccgugcgggacccccagacccuggagauccuggacaucaccccaugcagcuucggcggcgucagcgugaucacccccggcacaaacaccagcaaccagguggcagugcuguaccagggagugaacugcaccgaggugcccguggccauccacgccgaccagcugacccccaccuggcggguguacagcaccggcagcaacguguuccagacccgggccggcugccugaucggcgccgagcacgugaacaacuccuacgagugcgacauccccaucggcgccggcaucugcgcuagcuaccagacccagaccaacagcccccggcgggcccggagcguggccagccagagcaucaucgccuacaccaugagcuuaggcgccgagaacagcguggccuacagcaacaacagcaucgccaucccuaccaacuucaccaucagcgugaccaccgagauacugcccgugagcaugaccaagaccagcguggacuguaccauguacaucugcggcgacagcaccgagugcagcaaccugcugcugcaguacggcagcuucugcacccagcugaaccgggcgcugaccggcaucgccguggagcaggacaagaacacccaagagguguucgcccaggugaagcagaucuacaagacucccccaaucaaggacuucggcggcuucaacuucagccagauccugcccgaccccagcaagcccagcaagcggagcuucaucgaggaccugcuguucaacaaggugacccuggccgacgccggcuucaucaagcaguacggcgacugccugggggauaucgccgcccgggaccugaucugcgcucagaaguucaacggccugaccgugcugcccccucugcugaccgacgagaugaucgcccaguacaccagcgcccugcuugccggcaccaucaccagcggcuggaccuucggcgccggcgccgcacugcagauccccuucgccaugcagauggccuaccgguucaacggcaucggcgugacccagaacgugcuguacgagaaccagaagcugaucgccaaccaguucaacagcgccaucggcaagauccaggacagccugagcagcaccgccagcgcccugggcaagcugcaggacguggugaaccagaacgcccaggcucugaacacccuggugaagcagcugagcagcaacuucggcgccaucagcucagugcugaaugacauccugagcaggcuggacaagguggaggccgaggugcagaucgaccggcugaucaccggccggcugcagagccugcagaccuacgugacccagcagcugauccgggccgccgagauccgggccagcgccaaccuggccgcaaccaagaugagcgagugcgugcugggccagagcaagcggguggacuuuugcggcaagggcuaccaccugaugagcuucccccagagcgccccacacggcguggucuuccuccacgugacauacgugcccgcccaggagaagaacuucaccaccgcccccgccauuugccacgacggcaaggcccacuucccccgggagggaguguucgugagcaacggcacccacugguucgugacccagcggaacuucuacgagccccagaucaucaccaccgacaacaccuucgugagcggcaacugcgacguggugaucggcaucgugaacaacaccguguacgacccccugcagccugagcuggacagcuucaaggaggagcuggacaaguacuucaagaaccacaccagccccgacguggaucugggcgacaucagcggcaucaacgcuagcguggugaacauccagaaggagaucgaccggcugaacgagguggccaagaaccugaacgagagccugaucgaccugcaggagcugggcaaguacgagcaguacaucaaguggcccugguacaucuggcugggcuucaucgccggccugaucgccaucgugauggugaccaucaugcugugcugcaugaccagcugcuguagcugccugaagggcugcugcagcugcggcagcugcugcaaguucgacgaggacgacagcgagccagugcugaagggcgugaagcugcacuacaccugaggacuagucccuguucccagagcccacuuuuuuuucuuuuuuugaaauaaaauagccugucuuucagaucuaaaaaaaaaaaaaaaaaaaaaaaaaaaaaaaaaaaaaaaaaaaaaaaaaaaaaaaaaaaaaaaaaaaaaaaaaaaaaaaaaaaaaaaaaaaaaaaaaaaa

SEQ ID NO: 24786 - RNA, 4070 nt, Artificial Sequence
  SARS-CoV-2/Wuhan/WIV05/2019__EPI_ISL_402128 spike protein mRNA gc (1-1273)(N439K_D614G)
aggagagucccgcagucggcguccagcggcucugcuuguucgugugugugucguugcaggccuuauucaagcuuaccauguucguguuccuggugcugcugccccuggugagcagccagugcgugaaccugaccacccggacccagcugcccccugccuacaccaacagcuucacccggggcguguacuaccccgacaagguguuccggagcagcgugcugcacagcacccaggaccuguuccugcccuucuucagcaacgugaccugguuccacgccauccacgugagcggcaccaacggcaccaagcgguucgacaacccagugcugcccuucaacgacggcguguacuucgccagcaccgagaagucaaacaucauccggggcuggaucuucggcaccacccuggacagcaagacacagagccugcugaucgugaacaacgccaccaacguggugaucaaggugugcgaguuucaguucugcaacgaccccuuccugggcguguacuaccacaagaacaacaagagcuggauggagagcgaguuccgggucuacagcagcgcuaacaauugcaccuucgaguacgugagccagcccuuccugauggaccucgagggcaagcagggcaacuucaagaaccugcgggaguucguguucaagaacaucgauggcuacuucaagaucuacagcaagcacacccccaucaaccuggugcgggaccugccccagggauucagcgcccuggagccucugguggaccugcccaucggcaucaacaucaccagguuccagacccugcuggcccugcaccggagcuaccugacccccggcgacagcagcagcggcuggaccgccggcgccgccgcauacuacgugggcuaccugcagccacggaccuuccugcugaaguacaacgagaacggcaccaucaccgacgccguggacugcgcccuggacccccugagcgagaccaagugcacccuaaagagcuucaccguggagaagggcaucuaccagaccagcaacuuccgggugcagcccacugagagcaucgugcgguuccccaacauuaccaaccugugucccuucggcgagguguucaacgccacccgguucgccagcguguacgccuggaaccggaagcggaucagcaacugcguggccgacuacagcgugcuguacaacagcgccagcuucagcaccuucaagugcuacggcgugagcccuaccaagcugaacgaccugugcuucaccaacguguacgcugacagcuucgugauccggggcgacgaggugcggcagaucgcccccggccagaccggcaagaucgccgacuacaacuacaagcugcccgacgacuucaccggcugcgugaucgccuggaacagcaagaaccuggacagcaaggugggcggcaacuacaacuaccuguaccggcuguuccguaagagcaaccugaagccauucgagcgggacaucagcaccgagaucuaccaggccggcagcacccccugcaacgguguggagggcuuuaacugcuacuucccccugcagagcuacggcuuccagcccaccaacggcgugggcuaccagcccuaccgggugguggugcugagcuucgagcugcugcacgcccccgccaccgugugcggcccuaaaaagagcaccaaccuggugaagaacaagugcgugaacuucaacuucaauggccugaccggcaccggcgugcugaccgagagcaacaagaaguuccugcccuuccagcaguucggccgggauaucgccgacaccaccgacgcagugcgggacccccagacccuggagauccuggacaucaccccaugcagcuucggcggcgugagcgucaucacccccggcacaaacaccagcaaccagguggccgugcuguaccagggagugaacugcaccgaggugcccguggccauccacgccgaccagcugacccccaccuggcggguguacagcaccggcagcaacguguuccagacccgggccggcugccugaucggcgccgagcacgugaacaacuccuacgagugcgacauccccaucggcgcuggcaucugcgccagcuaccagacccagaccaacagcccccggcgggcccggagcguggccagccagagcaucaucgccuacaccaugagcuuaggcgccgagaacagcguggccuacagcaacaacagcaucgcgaucccuaccaacuucaccaucagcgugaccaccgagauacugcccgugagcaugaccaagaccagcguggacuguaccauguacaucugcggcgacagcaccgagugcagcaaccugcugcugcaguacggcagcuucugcacccagcugaaccgggcccugaccggcaucgccguggagcaggacaagaacacccaagagguguucgcccaggugaagcagaucuacaagacucccccaaucaaggacuucggcggcuucaacuucagccagauccugcccgaccccagcaagcccagcaagcggagcuucaucgaggaccugcuguucaacaaggugacccuggccgacgccggcuucaucaagcaguacggcgacugccugggggauaucgccgcucgggaccugaucugcgcccagaaguucaacggccugaccgugcugcccccucugcugaccgacgagaugaucgcccaguacaccagcgcccugcuugccggcaccaucaccagcggcuggaccuucggcgccggcgcagcccugcagauccccuucgccaugcagauggccuaccgguucaacggcaucggcgugacccagaacgugcuguacgagaaccagaagcugaucgccaaccaguucaacagcgccaucggcaagauccaggacagccugagcagcaccgccagcgcccugggcaagcugcaggacguggugaaccagaacgcucaggcccugaacacccuggugaagcagcugagcagcaacuucggcgccaucagcucagugcugaacgacauccugagcaggcuggacaagguggaggccgaggugcagaucgaccggcugaucaccggccggcugcagagccugcagaccuacgugacccagcagcugauccgggccgccgagauccgggccagcgccaaucuggcagccaccaagaugagcgagugcgugcugggccagagcaagcggguggacuuuugcggcaagggcuaccaccugaugagcuucccccagagcgccccacacggcgugguguuccuccacgucacauacgugcccgcccaggagaagaacuucaccaccgcccccgccauuugccacgacggcaaggcucacuucccccgggagggaguguucgugagcaacggcacccacugguucgugacccagcggaacuucuacgagccccagaucaucaccaccgacaacaccuucgugagcggcaacugcgacguggugaucggcaucgugaacaacaccguguacgacccccugcagccugagcuggacagcuucaaggaggagcuggacaaguacuucaagaaccacaccagccccgacguggaucugggcgacaucagcggcaucaacgccagcguggugaacauccagaaggagaucgaccggcugaacgagguggccaagaaccugaacgagagccugaucgaccugcaggagcugggcaaguacgagcaguacaucaaguggcccugguacaucuggcugggcuucaucgccggccugaucgccaucgugauggugaccaucaugcugugcugcaugaccagcugcuguagcugccugaagggcugcugcagcugcggcagcugcugcaaguucgacgaggacgacagcgagccagugcugaagggcgugaagcugcacuacaccugaggacuagucccuguucccagagcccacuuuuuuuucuuuuuuugaaauaaaauagccugucuuucagaucuaaaaaaaaaaaaaaaaaaaaaaaaaaaaaaaaaaaaaaaaaaaaaaaaaaaaaaaaaaaaaaaaaaaaaaaaaaaaaaaaaaaaaaaaaaaaaaaaaaaa

SEQ ID NO: 24787 - RNA, 4070 nt, Artificial Sequence
  SARS-CoV-2/Wuhan/WIV05/2019__EPI_ISL_402128 spike protein mRNA gc (1-1273)(S477N_D614G)
aggagagucccgcagucggcguccagcggcucugcuuguucgugugugugucguugcaggccuuauucaagcuuaccauguucguguuccuggugcugcugccccuggugagcagccagugcgugaaccugaccacccggacccagcugcccccugccuacaccaacagcuucacccggggcguguacuaccccgacaagguguuccggagcagcgugcugcacagcacccaggaccuguuccugcccuucuucagcaacgugaccugguuccacgccauccacgugagcggcaccaacggcaccaagcgguucgacaacccagugcugcccuucaacgacggcguguacuucgccagcaccgagaagucaaacaucauccggggcuggaucuucggcaccacccuggacagcaagacacagagccugcugaucgugaacaacgccaccaacguggugaucaaggugugcgaguuucaguucugcaacgaccccuuccugggcguguacuaccacaagaacaacaagagcuggauggagagcgaguuccgggucuacagcagcgcuaacaauugcaccuucgaguacgugagccagcccuuccugauggaccucgagggcaagcagggcaacuucaagaaccugcgggaguucguguucaagaacaucgauggcuacuucaagaucuacagcaagcacacccccaucaaccuggugcgggaccugccccagggauucagcgcccuggagccucugguggaccugcccaucggcaucaacaucaccagguuccagacccugcuggcccugcaccggagcuaccugacccccggcgacagcagcagcggcuggaccgccggcgccgccgcauacuacgugggcuaccugcagccacggaccuuccugcugaaguacaacgagaacggcaccaucaccgacgccguggacugcgcccuggacccccugagcgagaccaagugcacccuaaagagcuucaccguggagaagggcaucuaccagaccagcaacuuccgggugcagcccacugagagcaucgugcgguuccccaacauuaccaaccugugucccuucggcgagguguucaacgccacccgguucgccagcguguacgccuggaaccggaagcggaucagcaacugcguggccgacuacagcgugcuguacaacagcgccagcuucagcaccuucaagugcuacggcgugagcccuaccaagcugaacgaccugugcuucaccaacguguacgcugacagcuucgugauccggggcgacgaggugcggcagaucgcccccggccagaccggcaagaucgccgacuacaacuacaagcugcccgacgacuucaccggcugcgugaucgccuggaacagcaacaaccuggacagcaaggugggcggcaacuacaacuaccuguaccggcuguuccguaagagcaaccugaagccauucgagcgggacaucagcaccgagaucuaccaggccggcaacacccccugcaacgguguggagggcuuuaacugcuacuucccccugcagagcuacggcuuccagcccaccaacggcgugggcuaccagcccuaccgggugguggugcugagcuucgagcugcugcacgcccccgccaccgugugcggcccuaaaaagagcaccaaccuggugaagaacaagugcgugaauuucaacuucaacggccugaccggcaccggcgugcugaccgagagcaacaagaaguuccugcccuuccagcaguucggccgggauaucgccgacaccaccgacgcagugcgggacccccagacccuggagauccuggacaucaccccaugcagcuucggcggcgugagcgucaucacccccggcacaaacaccagcaaccagguggccgugcuguaccagggagugaacugcaccgaggugcccguggccauccacgccgaccagcugacccccaccuggcggguguacagcaccggcagcaacguguuccagacccgggccggcugccugaucggcgccgagcacgugaacaacagcuacgagugcgacauccccaucggcgcuggcaucugcgccuccuaccagacccagaccaacagcccccggcgggcccggagcguggccagccagagcaucaucgccuacaccaugagcuuaggcgccgagaacagcguggccuacagcaacaacagcaucgcgaucccuaccaacuucaccaucagcgugaccaccgagauacugcccgugagcaugaccaagaccagcguggacuguaccauguacaucugcggcgacagcaccgagugcagcaaccugcugcugcaguacggcagcuucugcacccagcugaaccgggcccugaccggcaucgccguggagcaggacaagaacacccaagagguguucgcccaggugaagcagaucuacaagacucccccaaucaaggacuucggcggcuucaacuucagccagauccugcccgaccccagcaagcccagcaagcggagcuucaucgaggaccugcuguucaacaaggugacccuggccgacgccggcuucaucaagcaguacggcgacugccugggggauaucgccgcucgggaccugaucugcgcccagaaguucaacggccugaccgugcugcccccucugcugaccgacgagaugaucgcccaguacaccagcgcccugcuugccggcaccaucaccagcggcuggaccuucggcgccggcgcagcccugcagauccccuucgccaugcagauggccuaccgguucaacggcaucggcgugacccagaacgugcuguacgagaaccagaagcugaucgccaaccaguucaacagcgccaucggcaagauccaggacagccugagcagcaccgccagcgcccugggcaagcugcaggacguggugaaccagaacgcucaggcccugaacacccuggugaagcagcugagcagcaauuucggcgccaucagcagcgugcugaacgacauccugucaaggcuggacaagguggaggccgaggugcagaucgaccggcugaucaccggccggcugcagagccugcagaccuacgugacccagcagcugauccgggccgccgagauccgggccagcgccaaccuggcagccaccaagaugagcgagugcgugcugggccagagcaagcggguggacuuuugcggcaagggcuaccaccugaugagcuucccccagagcgccccacacggcgugguguuccuccacgucacauacgugcccgcccaggagaagaacuucaccaccgcccccgccauuugccacgacggcaaggcucacuucccccgggagggaguguucgugagcaacggcacccacugguucgugacccagcggaacuucuacgagccccagaucaucaccaccgacaacaccuucgugagcggcaacugcgacguggugaucggcaucgugaacaacaccguguacgacccccugcagccugagcuggacagcuucaaggaggagcuggacaaguacuucaagaaccacaccagccccgacguggaucugggcgacaucagcggcaucaacgccagcguggugaacauccagaaggagaucgaccggcugaacgagguggccaagaaccugaacgagagccugaucgaccugcaggagcugggcaaguacgagcaguacaucaaguggcccugguacaucuggcugggcuucaucgccggccugaucgccaucgugauggugaccaucaugcugugcugcaugaccagcugcuguagcugccugaagggcugcugcagcugcggcagcugcugcaaguucgacgaggacgacagcgagccagugcugaagggcgugaagcugcacuacaccugaggacuagucccuguucccagagcccacuuuuuuuucuuuuuuugaaauaaaauagccugucuuucagaucuaaaaaaaaaaaaaaaaaaaaaaaaaaaaaaaaaaaaaaaaaaaaaaaaaaaaaaaaaaaaaaaaaaaaaaaaaaaaaaaaaaaaaaaaaaaaaaaaaaaa

SEQ ID NO: 24788 - RNA, 4070 nt, Artificial Sequence
  SARS-CoV-2/Wuhan/WIV05/2019__EPI_ISL_402128 spike protein mRNA gc (1-1273)(N501Y_D614G)
aggagagucccgcagucggcguccagcggcucugcuuguucgugugugugucguugcaggccuuauucaagcuuaccauguucguguuccuggugcugcugccccuggugagcagccagugcgugaaccugaccacccggacccagcugcccccugccuacaccaacagcuucacccggggcguguacuaccccgacaagguguuccggagcagcgugcugcacagcacccaggaccuguuccugcccuucuucagcaacgugaccugguuccacgccauccacgugagcggcaccaacggcaccaagcgguucgacaacccagugcugcccuucaacgacggcguguacuucgccagcaccgagaagucaaacaucauccggggcuggaucuucggcaccacccuggacagcaagacacagagccugcugaucgugaacaacgccaccaacguggugaucaaggugugcgaguuucaguucugcaacgaccccuuccugggcguguacuaccacaagaacaacaagagcuggauggagagcgaguuccgggucuacagcagcgcuaacaauugcaccuucgaguacgugagccagcccuuccugauggaccucgagggcaagcagggcaacuucaagaaccugcgggaguucguguucaagaacaucgauggcuacuucaagaucuacagcaagcacacccccaucaaccuggugcgggaccugccccagggauucagcgcccuggagccucugguggaccugcccaucggcaucaacaucaccagguuccagacccugcuggcccugcaccggagcuaccugacccccggcgacagcagcagcggcuggaccgccggcgccgccgcauacuacgugggcuaccugcagccacggaccuuccugcugaaguacaacgagaacggcaccaucaccgacgccguggacugcgcccuggacccccugagcgagaccaagugcacccuaaagagcuucaccguggagaagggcaucuaccagaccagcaacuuccgggugcagcccacugagagcaucgugcgguuccccaacauuaccaaccugugucccuucggcgagguguucaacgccacccgguucgccagcguguacgccuggaaccggaagcggaucagcaacugcguggccgacuacagcgugcuguacaacagcgccagcuucagcaccuucaagugcuacggcgugagcccuaccaagcugaacgaccugugcuucaccaacguguacgcugacagcuucgugauccggggcgacgaggugcggcagaucgcccccggccagaccggcaagaucgccgacuacaacuacaagcugcccgacgacuucaccggcugcgugaucgccuggaacagcaacaaccuggacagcaaggugggcggcaacuacaacuaccuguaccggcuguuccguaagagcaaccugaagccauucgagcgggacaucagcaccgagaucuaccaggccggcagcacccccugcaacgguguggagggcuuuaacugcuacuucccccugcagagcuacggcuuccagcccaccuacggcgugggcuaccagcccuaccgggugguggugcugagcuucgagcugcugcacgcccccgccaccgugugcggcccuaaaaagagcaccaaccuggugaagaacaagugcgugaacuucaacuucaauggccugaccggcaccggcgugcugaccgagagcaacaagaaguuccugcccuuccagcaguucggccgggauaucgccgacaccaccgacgcagugcgggacccccagacccuggagauccuggacaucaccccaugcagcuucggcggcgugagcgucaucacccccggcacaaacaccagcaaccagguggccgugcuguaccagggagugaacugcaccgaggugcccguggccauccacgccgaccagcugacccccaccuggcggguguacagcaccggcagcaacguguuccagacccgggccggcugccugaucggcgccgagcacgugaacaacuccuacgagugcgacauccccaucggcgcuggcaucugcgccagcuaccagacccagaccaacagcccccggcgggcccggagcguggccagccagagcaucaucgccuacaccaugagcuuaggcgccgagaacagcguggccuacagcaacaacagcaucgcgaucccuaccaacuucaccaucagcgugaccaccgagauacugcccgugagcaugaccaagaccagcguggacuguaccauguacaucugcggcgacagcaccgagugcagcaaccugcugcugcaguacggcagcuucugcacccagcugaaccgggcccugaccggcaucgccguggagcaggacaagaacacccaagagguguucgcccaggugaagcagaucuacaagacucccccaaucaaggacuucggcggcuucaacuucagccagauccugcccgaccccagcaagcccagcaagcggagcuucaucgaggaccugcuguucaacaaggugacccuggccgacgccggcuucaucaagcaguacggcgacugccugggggauaucgccgcucgggaccugaucugcgcccagaaguucaacggccugaccgugcugcccccucugcugaccgacgagaugaucgcccaguacaccagcgcccugcuugccggcaccaucaccagcggcuggaccuucggcgccggcgcagcccugcagauccccuucgccaugcagauggccuaccgguucaacggcaucggcgugacccagaacgugcuguacgagaaccagaagcugaucgccaaccaguucaacagcgccaucggcaagauccaggacagccugagcagcaccgccagcgcccugggcaagcugcaggacguggugaaccagaacgcucaggcccugaacacccuggugaagcagcugagcagcaacuucggcgccaucagcucagugcugaacgacauccugagcaggcuggacaagguggaggccgaggugcagaucgaccggcugaucaccggccggcugcagagccugcagaccuacgugacccagcagcugauccgggccgccgagauccgggccagcgccaaucuggcagccaccaagaugagcgagugcgugcugggccagagcaagcggguggacuuuugcggcaagggcuaccaccugaugagcuucccccagagcgccccacacggcgugguguuccuccacgucacauacgugcccgcccaggagaagaacuucaccaccgcccccgccauuugccacgacggcaaggcucacuucccccgggagggaguguucgugagcaacggcacccacugguucgugacccagcggaacuucuacgagccccagaucaucaccaccgacaacaccuucgugagcggcaacugcgacguggugaucggcaucgugaacaacaccguguacgacccccugcagccugagcuggacagcuucaaggaggagcuggacaaguacuucaagaaccacaccagccccgacguggaucugggcgacaucagcggcaucaacgccagcguggugaacauccagaaggagaucgaccggcugaacgagguggccaagaaccugaacgagagccugaucgaccugcaggagcugggcaaguacgagcaguacaucaaguggcccugguacaucuggcugggcuucaucgccggccugaucgccaucgugauggugaccaucaugcugugcugcaugaccagcugcuguagcugccugaagggcugcugcagcugcggcagcugcugcaaguucgacgaggacgacagcgagccagugcugaagggcgugaagcugcacuacaccugaggacuagucccuguucccagagcccacuuuuuuuucuuuuuuugaaauaaaauagccugucuuucagaucuaaaaaaaaaaaaaaaaaaaaaaaaaaaaaaaaaaaaaaaaaaaaaaaaaaaaaaaaaaaaaaaaaaaaaaaaaaaaaaaaaaaaaaaaaaaaaaaaaaaa

SEQ ID NO: 24789 - RNA, 4064 nt, Artificial Sequence
  SARS-CoV-2/Wuhan/WIV05/2019__EPI_ISL_402128 spike protein mRNA gc (1-1273)(H69del_V70del_D614G)
aggagagucccgcagucggcguccagcggcucugcuuguucgugugugugucguugcaggccuuauucaagcuuaccauguucguguuccuggugcugcugccccuggugagcagccagugcgugaaccugaccacccggacccagcugcccccugccuacaccaacagcuucacccggggcguguacuaccccgacaagguguuccggagcagcgugcugcacagcacccaggaccuguuccugcccuucuucagcaacgugaccugguuccacgccaucagcggcaccaacggcaccaagcgguucgacaacccagugcugcccuucaacgacggcguguacuucgccagcaccgagaagucaaacaucauccggggcuggaucuucggcaccacccuggacagcaagacacagagccugcugaucgugaacaacgccaccaacguggugaucaaggugugcgaguuucaguucugcaacgaccccuuccugggcguguacuaccacaagaacaacaagagcuggauggagagcgaguuccggguguacagcagcgcuaacaauugcaccuucgaguacgucagccagcccuuccugauggaccucgagggcaagcagggcaacuucaagaaccugcgggaguucguguucaagaacaucgauggcuacuucaagaucuacagcaagcacacccccaucaaccuggugcgggaccugccccagggauucagcgcccuggagccucugguggaccugcccaucggcaucaacaucaccagguuccagacccugcuggcccugcaccggagcuaccugacccccggcgacagcagcagcggcuggaccgccggcgccgccgcauacuacgugggcuaccugcagccacggaccuuccugcugaaguacaacgagaacggcaccaucaccgacgccguggacugcgcccuggacccccugagcgagaccaagugcacccuaaagagcuucaccguggagaagggcaucuaccagaccagcaacuuccgggugcagcccacugagagcaucgugcgguuccccaacauuaccaaccugugucccuucggcgagguguucaacgccacccgguucgccagcguguacgccuggaaccggaagcggaucagcaacugcguggccgacuacagcgugcuguacaacagcgccagcuucagcaccuucaagugcuacggcgugagcccuaccaagcugaacgaccugugcuucaccaacguguacgcugacagcuucgugauccggggcgacgaggugcggcagaucgcccccggccagaccggcaagaucgccgacuacaacuacaagcugcccgacgacuucaccggcugcgugaucgccuggaacagcaacaaccuggacagcaaggugggcggcaacuacaacuaccuguaccggcuguuccguaagagcaaccugaagccauucgagcgggacaucagcaccgagaucuaccaggccggcagcacccccugcaacgguguggagggcuuuaacugcuacuucccccugcagagcuacggcuuccagcccaccaacggcgugggcuaccagcccuaccgggugguggugcugagcuucgagcugcugcacgcccccgccaccgugugcggcccuaaaaagagcaccaaccuggugaagaacaagugcgugaacuucaauuucaacggccugaccggcaccggcgugcugaccgagagcaacaagaaguuccugcccuuccagcaguucggccgggauaucgccgacaccaccgacgcagugcgggacccccagacccuggagauccuggacaucaccccaugcagcuucggcggcgugagcgugaucacccccggcacaaacaccagcaaccaggucgccgugcuguaccagggagugaacugcaccgaggugcccguggccauccacgccgaccagcugacccccaccuggcggguguacagcaccggcagcaacguguuccagacccgggccggcugccugaucggcgccgagcacgugaacaacuccuacgagugcgacauccccaucggcgcuggcaucugcgccagcuaccagacccagaccaacagcccccggcgggcccggagcguggccagccagagcaucaucgccuacaccaugagcuuaggcgccgagaacagcguggccuacagcaacaacagcaucgcgaucccuaccaacuucaccaucagcgugaccaccgagauacugcccgugagcaugaccaagaccagcguggacuguaccauguacaucugcggcgacagcaccgagugcagcaaccugcugcugcaguacggcagcuucugcacccagcugaaccgggcccugaccggcaucgccguggagcaggacaagaacacccaagagguguucgcccaggugaagcagaucuacaagacucccccaaucaaggacuucggcggcuucaacuucagccagauccugcccgaccccagcaagcccagcaagcggagcuucaucgaggaccugcuguucaacaaggugacccuggccgacgccggcuucaucaagcaguacggcgacugccugggggauaucgccgcucgggaccugaucugcgcccagaaguucaacggccugaccgugcugcccccucugcugaccgacgagaugaucgcccaguacaccagcgcccugcuugccggcaccaucaccagcggcuggaccuucggcgccggcgcagcccugcagauccccuucgccaugcagauggccuaccgguucaacggcaucggcgugacccagaacgugcuguacgagaaccagaagcugaucgccaaccaguucaacagcgccaucggcaagauccaggacagccugagcagcaccgccagcgcccugggcaagcugcaggacguggugaaccagaacgcucaggcccugaacacccuggugaagcagcugagcagcaacuucggcgccaucagcucagugcugaaugacauccugagcaggcuggacaagguggaggccgaggugcagaucgaccggcugaucaccggccggcugcagagccugcagaccuacgugacccagcagcugauccgggccgccgagauccgggccagcgccaaccuggcagccaccaagaugagcgagugcgugcugggccagagcaagcggguggacuuuugcggcaagggcuaccaccugaugagcuucccccagagcgccccacacggcgugguguuccuccacgugacauacguccccgcccaggagaagaacuucaccaccgcccccgccauuugccacgacggcaaggcucacuucccccgggagggaguguucgugagcaacggcacccacugguucgugacccagcggaacuucuacgagccccagaucaucaccaccgacaacaccuucgugagcggcaacugcgacguggugaucggcaucgugaacaacaccguguacgacccccugcagccugagcuggacagcuucaaggaggagcuggacaaguacuucaagaaccacaccagccccgacguggaucugggcgacaucagcggcaucaacgccagcguggugaacauccagaaggagaucgaccggcugaacgagguggccaagaaccugaacgagagccugaucgaccugcaggagcugggcaaguacgagcaguacaucaaguggcccugguacaucuggcugggcuucaucgccggccugaucgccaucgugauggugaccaucaugcugugcugcaugaccagcugcuguagcugccugaagggcugcugcagcugcggcagcugcugcaaguucgacgaggacgacagcgagccagugcugaagggcgugaagcugcacuacaccugaggacuagucccuguucccagagcccacuuuuuuuucuuuuuuugaaauaaaauagccugucuuucagaucuaaaaaaaaaaaaaaaaaaaaaaaaaaaaaaaaaaaaaaaaaaaaaaaaaaaaaaaaaaaaaaaaaaaaaaaaaaaaaaaaaaaaaaaaaaaaaaaaaaaa

SEQ ID NO: 24790 - RNA, 4070 nt, Artificial Sequence
  SARS-CoV-2/Wuhan/WIV05/2019__EPI_ISL_402128 spike protein mRNA gc (1-1273)(Y453F_D614G)
aggagagucccgcagucggcguccagcggcucugcuuguucgugugugugucguugcaggccuuauucaagcuuaccauguucguguuccuggugcugcugccccuggugagcagccagugcgugaaccugaccacccggacccagcugcccccugccuacaccaacagcuucacccggggcguguacuaccccgacaagguguuccggagcagcgugcugcacagcacccaggaccuguuccugcccuucuucagcaacgugaccugguuccacgccauccacgugagcggcaccaacggcaccaagcgguucgacaacccagugcugcccuucaacgacggcguguacuucgccagcaccgagaagucaaacaucauccggggcuggaucuucggcaccacccuggacagcaagacacagagccugcugaucgugaacaacgccaccaacguggugaucaaggugugcgaguuucaguucugcaacgaccccuuccugggcguguacuaccacaagaacaacaagagcuggauggagagcgaguuccgggucuacagcagcgcuaacaauugcaccuucgaguacgugagccagcccuuccugauggaccucgagggcaagcagggcaacuucaagaaccugcgggaguucguguucaagaacaucgauggcuacuucaagaucuacagcaagcacacccccaucaaccuggugcgggaccugccccagggauucagcgcccuggagccucugguggaccugcccaucggcaucaacaucaccagguuccagacccugcuggcccugcaccggagcuaccugacccccggcgacagcagcagcggcuggaccgccggcgccgccgcauacuacgugggcuaccugcagccacggaccuuccugcugaaguacaacgagaacggcaccaucaccgacgccguggacugcgcccuggacccccugagcgagaccaagugcacccuaaagagcuucaccguggagaagggcaucuaccagaccagcaacuuccgggugcagcccacugagagcaucgugcgguuccccaacauuaccaaccugugucccuucggcgagguguucaacgccacccgguucgccagcguguacgccuggaaccggaagcggaucagcaacugcguggccgacuacagcgugcuguacaacagcgccagcuucagcaccuucaagugcuacggcgugagcccuaccaagcugaacgaccugugcuucaccaacguguacgcugacagcuucgugauccggggcgacgaggugcggcagaucgcccccggccagaccggcaagaucgccgacuacaacuacaagcugcccgacgacuucaccggcugcgugaucgccuggaacagcaacaaccuggacagcaaggugggcggcaacuacaacuaccuguuccggcuguuccguaagagcaaccugaagccauuugagcgggacaucagcaccgagaucuaccaggccggcagcacccccugcaacgguguggagggcuucaacugcuacuucccccugcagagcuacggcuuccagcccaccaacggcgugggcuaccagcccuaccgggugguggugcugagcuucgagcugcugcacgcccccgccaccgugugcggcccuaaaaagagcaccaaccuggugaagaacaagugcgugaacuucaauuucaacggccugaccggcaccggcgugcugaccgagagcaacaagaaguuccugcccuuccagcaguucggccgggauaucgccgacaccaccgacgcagugcgggacccccagacccuggagauccuggacaucaccccaugcagcuucggcggcgugagcgucaucacccccggcacaaacaccagcaaccagguggccgugcuguaccagggagugaacugcaccgaggugcccguggccauccacgccgaccagcugacccccaccuggcggguguacagcaccggcagcaacguguuccagacccgggccggcugccugaucggcgccgagcacgugaacaacuccuacgagugcgacauccccaucggcgcuggcaucugcgccagcuaccagacccagaccaacagcccccggcgggcccggagcguggccagccagagcaucaucgccuacaccaugagcuuaggcgccgagaacagcguggccuacagcaacaacagcaucgcgaucccuaccaacuucaccaucagcgugaccaccgagauacugcccgugagcaugaccaagaccagcguggacuguaccauguacaucugcggcgacagcaccgagugcagcaaccugcugcugcaguacggcagcuucugcacccagcugaaccgggcccugaccggcaucgccguggagcaggacaagaacacccaagagguguucgcccaggugaagcagaucuacaagacucccccaaucaaggacuucggcggcuucaacuucagccagauccugcccgaccccagcaagcccagcaagcggagcuucaucgaggaccugcuguucaacaaggugacccuggccgacgccggcuucaucaagcaguacggcgacugccugggggauaucgccgcucgggaccugaucugcgcccagaaguucaacggccugaccgugcugcccccucugcugaccgacgagaugaucgcccaguacaccagcgcccugcuugccggcaccaucaccagcggcuggaccuucggcgccggcgcagcccugcagauccccuucgccaugcagauggccuaccgguucaacggcaucggcgugacccagaacgugcuguacgagaaccagaagcugaucgccaaccaguucaacagcgccaucggcaagauccaggacagccugagcagcaccgccagcgcccugggcaagcugcaggacguggugaaccagaacgcucaggcccugaacacccuggugaagcagcugagcagcaacuuuggcgccaucagcucagugcugaaugacauccugagcaggcuggacaagguggaggccgaggugcagaucgaccggcugaucaccggccggcugcagagccugcagaccuacgugacccagcagcugauccgggccgccgagauccgggccagcgccaaccuggcagccaccaagaugagcgagugcgugcugggccagagcaagcggguggacuucugcggcaagggcuaccaccugaugagcuucccccagagcgccccacacggcgugguguuccuccacgucacauacgugcccgcccaggagaagaacuucaccaccgcccccgccauuugccacgacggcaaggcucacuucccccgggagggaguguucgugagcaacggcacccacugguucgugacccagcggaacuucuacgagccccagaucaucaccaccgacaacaccuucgugagcggcaacugcgacguggugaucggcaucgugaacaacaccguguacgacccccugcagccugagcuggacagcuucaaggaggagcuggacaaguacuucaagaaccacaccagccccgacguggaucugggcgacaucagcggcaucaacgccagcguggugaacauccagaaggagaucgaccggcugaacgagguggccaagaaccugaacgagagccugaucgaccugcaggagcugggcaaguacgagcaguacaucaaguggcccugguacaucuggcugggcuucaucgccggccugaucgccaucgugauggugaccaucaugcugugcugcaugaccagcugcuguagcugccugaagggcugcugcagcugcggcagcugcugcaaguucgacgaggacgacagcgagccagugcugaagggcgugaagcugcacuacaccugaggacuagucccuguucccagagcccacuuuuuuuucuuuuuuugaaauaaaauagccugucuuucagaucuaaaaaaaaaaaaaaaaaaaaaaaaaaaaaaaaaaaaaaaaaaaaaaaaaaaaaaaaaaaaaaaaaaaaaaaaaaaaaaaaaaaaaaaaaaaaaaaaaaaa

SEQ ID NO: 24791 - RNA, 4070 nt, Artificial Sequence
  SARS-CoV-2/Wuhan/WIV05/2019__EPI_ISL_402128 spike protein mRNA gc (1-1273)(D614G_I692V)
aggagagucccgcagucggcguccagcggcucugcuuguucgugugugugucguugcaggccuuauucaagcuuaccauguucguguuccuggugcugcugccccuggugagcagccagugcgugaaccugaccacccggacccagcugcccccugccuacaccaacagcuucacccggggcguguacuaccccgacaagguguuccggagcagcgugcugcacagcacccaggaccuguuccugcccuucuucagcaacgugaccugguuccacgccauccacgugagcggcaccaacggcaccaagcgguucgacaacccagugcugcccuucaacgacggcguguacuucgccagcaccgagaagucaaacaucauccggggcuggaucuucggcaccacccuggacagcaagacacagagccugcugaucgugaacaacgccaccaacguggugaucaaggugugcgaguuucaguucugcaacgaccccuuccugggcguguacuaccacaagaacaacaagagcuggauggagagcgaguuccgggucuacagcagcgcuaacaauugcaccuucgaguacgugagccagcccuuccugauggaccucgagggcaagcagggcaacuucaagaaccugcgggaguucguguucaagaacaucgauggcuacuucaagaucuacagcaagcacacccccaucaaccuggugcgggaccugccccagggauucagcgcccuggagccucugguggaccugcccaucggcaucaacaucaccagguuccagacccugcuggcccugcaccggagcuaccugacccccggcgacagcagcagcggcuggaccgccggcgccgccgcauacuacgugggcuaccugcagccacggaccuuccugcugaaguacaacgagaacggcaccaucaccgacgccguggacugcgcccuggacccccugagcgagaccaagugcacccuaaagagcuucaccguggagaagggcaucuaccagaccagcaacuuccgggugcagcccacugagagcaucgugcgguuccccaacauuaccaaccugugucccuucggcgagguguucaacgccacccgguucgccagcguguacgccuggaaccggaagcggaucagcaacugcguggccgacuacagcgugcuguacaacagcgccagcuucagcaccuucaagugcuacggcgugagcccuaccaagcugaacgaccugugcuucaccaacguguacgcugacagcuucgugauccggggcgacgaggugcggcagaucgcccccggccagaccggcaagaucgccgacuacaacuacaagcugcccgacgacuucaccggcugcgugaucgccuggaacagcaacaaccuggacagcaaggugggcggcaacuacaacuaccuguaccggcuguuccguaagagcaaccugaagccauucgagcgggacaucagcaccgagaucuaccaggccggcagcacccccugcaacgguguggagggcuuuaacugcuacuucccccugcagagcuacggcuuccagcccaccaacggcgugggcuaccagcccuaccgggugguggugcugagcuucgagcugcugcacgcccccgccaccgugugcggcccuaaaaagagcaccaaccuggugaagaacaagugcgugaacuucaauuucaacggccugaccggcaccggcgugcugaccgagagcaacaagaaguuccugcccuuccagcaguucggccgggauaucgccgacaccaccgacgcagugcgggacccccagacccuggagauccuggacaucaccccaugcagcuucggcggcgugagcgucaucacccccggcacaaacaccagcaaccagguggccgugcuguaccagggagugaacugcaccgaggugcccguggccauccacgccgaccagcugacccccaccuggcggguguacagcaccggcagcaacguguuccagacccgggccggcugccugaucggcgccgagcacgugaacaacuccuacgagugcgacauccccaucggcgcuggcaucugcgccagcuaccagacccagaccaacagcccccggcgggcccggagcguggccagccagagcgugaucgccuacaccaugagcuuaggcgccgagaacagcguggccuacagcaacaacagcaucgcgaucccuaccaacuucaccaucagcgugaccaccgagauccugcccgugagcaugaccaagaccagcguggacuguaccauguacauaugcggcgacagcaccgagugcagcaaccugcugcugcaguacggcagcuucugcacccagcugaaccgggcccugaccggcaucgccguggagcaggacaagaacacccaagagguguucgcccaggugaagcagaucuacaagacucccccaaucaaggacuucggcggcuucaacuucagccagauccugcccgaccccagcaagcccagcaagcggagcuucaucgaggaccugcuguucaacaaggugacccuggccgacgccggcuucaucaagcaguacggcgacugccugggggauaucgccgcucgggaccugaucugcgcccagaaguucaacggccugaccgugcugcccccucugcugaccgacgagaugaucgcccaguacaccagcgcccugcuugccggcaccaucaccagcggcuggaccuucggcgccggcgcagcccugcagauccccuucgccaugcagauggccuaccgguucaacggcaucggcgugacccagaacgugcuguacgagaaccagaagcugaucgccaaccaguucaacagcgccaucggcaagauccaggacagccugagcagcaccgccagcgcccugggcaagcugcaggacguggugaaccagaacgcucaggcccugaacacccuggugaagcagcugagcagcaacuucggcgccaucagcucagugcugaaugacauccugagcaggcuggacaagguggaggccgaggugcagaucgaccggcugaucaccggccggcugcagagccugcagaccuacgugacccagcagcugauccgggccgccgagauccgggccagcgccaaccuggcagccaccaagaugagcgagugcgugcugggccagagcaagcggguggacuuuugcggcaagggcuaccaccugaugagcuucccccagagcgccccacacggcguggucuuccuccacgugacauacgugcccgcccaggagaagaacuucaccaccgcccccgccaucugccacgacggcaaggcucacuucccccgggagggaguguucgugagcaacggcacccacugguucgugacccagcggaacuucuacgagccccagauuaucaccaccgacaacaccuucgugagcggcaacugcgacguggugaucggcaucgugaacaacaccguguacgacccccugcagccugagcuggacagcuucaaggaggagcuggacaaguacuucaagaaccacaccagccccgacguggaucugggcgacaucagcggcaucaacgccagcguggugaacauccagaaggagaucgaccggcugaacgagguggccaagaaccugaacgagagccugaucgaccugcaggagcugggcaaguacgagcaguacaucaaguggcccugguacaucuggcugggcuucaucgccggccugaucgccaucgugauggugaccaucaugcugugcugcaugaccagcugcuguagcugccugaagggcugcugcagcugcggcagcugcugcaaguucgacgaggacgacagcgagccagugcugaagggcgugaagcugcacuacaccugaggacuagucccuguucccagagcccacuuuuuuuucuuuuuuugaaauaaaauagccugucuuucagaucuaaaaaaaaaaaaaaaaaaaaaaaaaaaaaaaaaaaaaaaaaaaaaaaaaaaaaaaaaaaaaaaaaaaaaaaaaaaaaaaaaaaaaaaaaaaaaaaaaaaa

SEQ ID NO: 24792 - RNA, 4070 nt, Artificial Sequence
  SARS-CoV-2/Wuhan/WIV05/2019__EPI_ISL_402128 spike protein mRNA gc (1-1273)(D614G_M1229I)
aggagagucccgcagucggcguccagcggcucugcuuguucgugugugugucguugcaggccuuauucaagcuuaccauguucguguuccuggugcugcugccccuggugagcagccagugcgugaaccugaccacccggacccagcugcccccugccuacaccaacagcuucacccggggcguguacuaccccgacaagguguuccggagcagcgugcugcacagcacccaggaccuguuccugcccuucuucagcaacgugaccugguuccacgccauccacgugagcggcaccaacggcaccaagcgguucgacaacccagugcugcccuucaacgacggcguguacuucgccagcaccgagaagucaaacaucauccggggcuggaucuucggcaccacccuggacagcaagacacagagccugcugaucgugaacaacgccaccaacguggugaucaaggugugcgaguuucaguucugcaacgaccccuuccugggcguguacuaccacaagaacaacaagagcuggauggagagcgaguuccgggucuacagcagcgcuaacaauugcaccuucgaguacgugagccagcccuuccugauggaccucgagggcaagcagggcaacuucaagaaccugcgggaguucguguucaagaacaucgauggcuacuucaagaucuacagcaagcacacccccaucaaccuggugcgggaccugccccagggauucagcgcccuggagccucugguggaccugcccaucggcaucaacaucaccagguuccagacccugcuggcccugcaccggagcuaccugacccccggcgacagcagcagcggcuggaccgccggcgccgccgcauacuacgugggcuaccugcagccacggaccuuccugcugaaguacaacgagaacggcaccaucaccgacgccguggacugcgcccuggacccccugagcgagaccaagugcacccuaaagagcuucaccguggagaagggcaucuaccagaccagcaacuuccgggugcagcccacugagagcaucgugcgguuccccaacauuaccaaccugugucccuucggcgagguguucaacgccacccgguucgccagcguguacgccuggaaccggaagcggaucagcaacugcguggccgacuacagcgugcuguacaacagcgccagcuucagcaccuucaagugcuacggcgugagcccuaccaagcugaacgaccugugcuucaccaacguguacgcugacagcuucgugauccggggcgacgaggugcggcagaucgcccccggccagaccggcaagaucgccgacuacaacuacaagcugcccgacgacuucaccggcugcgugaucgccuggaacagcaacaaccuggacagcaaggugggcggcaacuacaacuaccuguaccggcuguuccguaagagcaaccugaagccauucgagcgggacaucagcaccgagaucuaccaggccggcagcacccccugcaacgguguggagggcuuuaacugcuacuucccccugcagagcuacggcuuccagcccaccaacggcgugggcuaccagcccuaccgggugguggugcugagcuucgagcugcugcacgcccccgccaccgugugcggcccuaaaaagagcaccaaccuggugaagaacaagugcgugaacuucaauuucaacggccugaccggcaccggcgugcugaccgagagcaacaagaaguuccugcccuuccagcaguucggccgggauaucgccgacaccaccgacgcagugcgggacccccagacccuggagauccuggacaucaccccaugcagcuucggcggcgugagcgucaucacccccggcacaaacaccagcaaccagguggccgugcuguaccagggagugaacugcaccgaggugcccguggccauccacgccgaccagcugacccccaccuggcggguguacagcaccggcagcaacguguuccagacccgggccggcugccugaucggcgccgagcacgugaacaacuccuacgagugcgacauccccaucggcgcuggcaucugcgccagcuaccagacccagaccaacagcccccggcgggcccggagcguggccagccagagcaucaucgccuacaccaugagcuuaggcgccgagaacagcguggccuacagcaacaacagcaucgcgaucccuaccaacuucaccaucagcgugaccaccgagauacugcccgugagcaugaccaagaccagcguggacuguaccauguacaucugcggcgacagcaccgagugcagcaaccugcugcugcaguacggcagcuucugcacccagcugaaccgggcccugaccggcaucgccguggagcaggacaagaacacccaagagguguucgcccaggugaagcagaucuacaagacucccccaaucaaggacuucggcggcuucaacuucagccagauccugcccgaccccagcaagcccagcaagcggagcuucaucgaggaccugcuguucaacaaggugacccuggccgacgccggcuucaucaagcaguacggcgacugccugggggauaucgccgcucgggaccugaucugcgcccagaaguucaacggccugaccgugcugcccccucugcugaccgacgagaugaucgcccaguacaccagcgcccugcuugccggcaccaucaccagcggcuggaccuucggcgccggcgcagcccugcagauccccuucgccaugcagauggccuaccgguucaacggcaucggcgugacccagaacgugcuguacgagaaccagaagcugaucgccaaccaguucaacagcgccaucggcaagauccaggacagccugagcagcaccgccagcgcccugggcaagcugcaggacguggugaaccagaacgcucaggcccugaacacccuggugaagcagcugagcagcaacuucggcgccaucagcucagugcugaaugacauccugagcaggcuggacaagguggaggccgaggugcagaucgaccggcugaucaccggccggcugcagagccugcagaccuacgugacccagcagcugauccgggccgccgagauccgggccagcgccaaccuggcagccaccaagaugagcgagugcgugcugggccagagcaagcggguggacuuuugcggcaagggcuaccaccugaugagcuucccccagagcgccccacacggcgugguguuccuccacgucacauacgugcccgcccaggagaagaacuucaccaccgcccccgccauuugccacgacggcaaggcucacuucccccgggagggaguguucgugagcaacggcacccacugguucgugacccagcggaacuucuacgagccccagaucaucaccaccgacaacaccuucgugagcggcaacugcgacguggugaucggcaucgugaacaacaccguguacgacccccugcagccugagcuggacagcuucaaggaggagcuggacaaguacuucaagaaccacaccagccccgacguggaucugggcgacaucagcggcaucaacgccagcguggugaacauccagaaggagaucgaccggcugaacgagguggccaagaaccugaacgagagccugaucgaccugcaggagcugggcaaguacgagcaguacaucaaguggcccugguacaucuggcugggcuucaucgccggccugaucgccaucgugaucgugaccaucaugcugugcugcaugaccagcugcuguagcugccugaagggcugcugcagcugcggcagcugcugcaaguucgacgaggacgacagcgagccagugcugaagggcgugaagcugcacuacaccugaggacuagucccuguucccagagcccacuuuuuuuucuuuuuuugaaauaaaauagccugucuuucagaucuaaaaaaaaaaaaaaaaaaaaaaaaaaaaaaaaaaaaaaaaaaaaaaaaaaaaaaaaaaaaaaaaaaaaaaaaaaaaaaaaaaaaaaaaaaaaaaaaaaaa

SEQ ID NO: 24793 - RNA, 4064 nt, Artificial Sequence
  SARS-CoV-2/Wuhan/WIV05/2019__EPI_ISL_402128 spike protein mRNA gc (1-1273)(H69del_V70del_A222V_Y453F_S477N_D614G_I692V)
aggagagucccgcagucggcguccagcggcucugcuuguucgugugugugucguugcaggccuuauucaagcuuaccauguucguguuccuggugcugcugccccuggugagcagccagugcgugaaccugaccacccggacccagcugcccccugccuacaccaacagcuucacccggggcguguacuaccccgacaagguguuccggagcagcgugcugcacagcacccaggaccuguuccugcccuucuucagcaacgugaccugguuccacgccaucagcggcaccaacggcaccaagcgguucgacaacccagugcugcccuucaacgacggcguguacuucgccagcaccgagaagucaaacaucauccggggcuggaucuucggcaccacccuggacagcaagacacagagccugcugaucgugaacaacgccaccaacguggugaucaaggugugcgaguuucaguucugcaacgaccccuuccugggcguguacuaccacaagaacaacaagagcuggauggagagcgaguuccggguguacagcagcgcuaacaauugcaccuucgaguacgucagccagcccuuccugauggaccucgagggcaagcagggcaacuucaagaaccugcgggaguucguguucaagaacaucgauggcuacuucaagaucuacagcaagcacacccccaucaaccuggugcgggaccugccccagggauucagcgugcuggagccucugguggaccugcccaucggcaucaacaucaccagguuccagacccugcuggcccugcaccggagcuaccugacccccggcgacagcagcagcggcuggaccgccggcgccgccgccuacuacgugggcuaccugcagccacggaccuuccugcugaaguacaacgagaacggcaccaucaccgacgcaguggacugcgcccuggacccccugagcgagaccaagugcacccuaaagagcuucaccguggagaagggcaucuaccagaccagcaacuuccgggugcagcccacugagagcaucgugcgguuccccaacauuaccaaccugugucccuucggcgagguguucaacgccacccgguucgccagcguguacgccuggaaccggaagcggaucagcaacugcguggccgacuacagcgugcuguacaacagcgccagcuucagcaccuucaagugcuacggcgugagcccuaccaagcugaacgaccugugcuucaccaacguguacgccgacagcuucgugauccggggcgacgaggugcggcagaucgcucccggccagaccggcaagaucgccgacuacaacuacaagcugcccgacgacuucaccggcugcgugaucgccuggaacagcaacaaccuggacagcaaggugggcggcaacuacaacuaccuguuccggcuguuccguaagagcaaccugaagccauuugagcgggacaucagcaccgagaucuaccaggccggcaacacccccugcaacgguguggagggcuucaacugcuacuucccccugcagagcuacggcuuccagcccaccaacggcgugggcuaccagcccuaccgggugguggugcugagcuucgagcugcugcacgcccccgccaccgugugcggcccuaaaaagagcaccaaccuggugaagaacaagugcgugaauuucaacuucaacggccugaccggcaccggcgugcugaccgagagcaacaagaaguuccugcccuuccagcaguucggccgggauaucgccgacaccaccgacgccgugcgggacccccagacccuggagauccuggacaucaccccaugcagcuucggcggcgugagcgucaucacccccggcacaaacaccagcaaccagguggcagugcuguaccagggagugaacugcaccgaggugcccguggccauccacgccgaccagcugacccccaccuggcggguguacagcaccggcagcaacguguuccagacccgggccggcugccugaucggcgccgagcacgugaacaacagcuacgagugcgacauccccaucggcgccggcaucugcgcuuccuaccagacccagaccaacagcccccggcgggcccggagcguggccagccagagcgugaucgccuacaccaugagcuuaggcgccgagaacagcguggccuacagcaacaacagcaucgccaucccuaccaacuucaccaucagcgugaccaccgagauccugcccgugagcaugaccaagaccagcguggacuguaccauguacauaugcggcgacagcaccgagugcagcaaccugcugcugcaguacggcagcuucugcacccagcugaaccgggcgcugaccggcaucgccguggagcaggacaagaacacccaagagguguucgcccaggugaagcagaucuacaagacucccccaaucaaggacuucggcggcuucaacuucagccagauccugcccgaccccagcaagcccagcaagcggagcuucaucgaggaccugcuguucaacaaggugacccuggccgacgccggcuucaucaagcaguacggcgacugccugggggauaucgccgcccgggaccugaucugcgcucagaaguucaacggccugaccgugcugcccccucugcugaccgacgagaugaucgcccaguacaccagcgcccugcuugccggcaccaucaccagcggcuggaccuucggcgccggcgccgcacugcagauccccuucgccaugcagauggccuaccgguucaacggcaucggcgugacccagaacgugcuguacgagaaccagaagcugaucgccaaccaguucaacagcgccaucggcaagauccaggacagccugagcagcaccgccagcgcccugggcaagcugcaggacguggugaaccagaacgcccaggcucugaacacccuggugaagcagcugagcagcaauuuuggcgccaucagcagcgugcugaacgacauccugucaaggcuggacaagguggaggccgaggugcagaucgaccggcugaucaccggccggcugcagagccugcagaccuacgugacccagcagcugauccgggccgccgagauccgggccagcgccaaccuggccgcaaccaagaugagcgagugcgugcugggccagagcaagcggguggacuucugcggcaagggcuaccaccugaugagcuucccccagagcgccccacacggcguggucuuccuccacgugacauacgugcccgcccaggagaagaacuucaccaccgcccccgccaucugccacgacggcaaggcccacuucccccgggagggaguguucgugagcaacggcacccacugguucgugacccagcggaacuucuacgagccccagauuaucaccaccgacaacaccuucgugagcggcaacugcgacguggugaucggcaucgugaacaacaccguguacgacccccugcagccugagcuggacagcuucaaggaggagcuggacaaguacuucaagaaccacaccagccccgacguggaucugggcgacaucagcggcaucaacgcuagcguggugaacauccagaaggagaucgaccggcugaacgagguggccaagaaccugaacgagagccugaucgaccugcaggagcugggcaaguacgagcaguacaucaaguggcccugguacaucuggcugggcuucaucgccggccugaucgccaucgugauggugaccaucaugcugugcugcaugaccagcugcuguagcugccugaagggcugcugcagcugcggcagcugcugcaaguucgacgaggacgacagcgagccagugcugaagggcgugaagcugcacuacaccugaggacuagucccuguucccagagcccacuuuuuuuucuuuuuuugaaauaaaauagccugucuuucagaucuaaaaaaaaaaaaaaaaaaaaaaaaaaaaaaaaaaaaaaaaaaaaaaaaaaaaaaaaaaaaaaaaaaaaaaaaaaaaaaaaaaaaaaaaaaaaaaaaaaaa

SEQ ID NO: 24794 - RNA, 4064 nt, Artificial Sequence
  SARS-CoV-2/Wuhan/WIV05/2019__EPI_ISL_402128 spike protein mRNA gc (1-1273)(H69del_V70del_Y453F_D614G_I692V_M1229I)
aggagagucccgcagucggcguccagcggcucugcuuguucgugugugugucguugcaggccuuauucaagcuuaccauguucguguuccuggugcugcugccccuggugagcagccagugcgugaaccugaccacccggacccagcugcccccugccuacaccaacagcuucacccggggcguguacuaccccgacaagguguuccggagcagcgugcugcacagcacccaggaccuguuccugcccuucuucagcaacgugaccugguuccacgccaucagcggcaccaacggcaccaagcgguucgacaacccagugcugcccuucaacgacggcguguacuucgccagcaccgagaagucaaacaucauccggggcuggaucuucggcaccacccuggacagcaagacacagagccugcugaucgugaacaacgccaccaacguggugaucaaggugugcgaguuucaguucugcaacgaccccuuccugggcguguacuaccacaagaacaacaagagcuggauggagagcgaguuccggguguacagcagcgcuaacaauugcaccuucgaguacgucagccagcccuuccugauggaccucgagggcaagcagggcaacuucaagaaccugcgggaguucguguucaagaacaucgauggcuacuucaagaucuacagcaagcacacccccaucaaccuggugcgggaccugccccagggauucagcgcccuggagccucugguggaccugcccaucggcaucaacaucaccagguuccagacccugcuggcccugcaccggagcuaccugacccccggcgacagcagcagcggcuggaccgccggcgccgccgcauacuacgugggcuaccugcagccacggaccuuccugcugaaguacaacgagaacggcaccaucaccgacgccguggacugcgcccuggacccccugagcgagaccaagugcacccuaaagagcuucaccguggagaagggcaucuaccagaccagcaacuuccgggugcagcccacugagagcaucgugcgguuccccaacauuaccaaccugugucccuucggcgagguguucaacgccacccgguucgccagcguguacgccuggaaccggaagcggaucagcaacugcguggccgacuacagcgugcuguacaacagcgccagcuucagcaccuucaagugcuacggcgugagcccuaccaagcugaacgaccugugcuucaccaacguguacgcugacagcuucgugauccggggcgacgaggugcggcagaucgcccccggccagaccggcaagaucgccgacuacaacuacaagcugcccgacgacuucaccggcugcgugaucgccuggaacagcaacaaccuggacagcaaggugggcggcaacuacaacuaccuguuccggcuguuccguaagagcaaccugaagccauuugagcgggacaucagcaccgagaucuaccaggccggcagcacccccugcaacgguguggagggcuucaacugcuacuucccccugcagagcuacggcuuccagcccaccaacggcgugggcuaccagcccuaccgggugguggugcugagcuucgagcugcugcacgcccccgccaccgugugcggcccuaaaaagagcaccaaccuggugaagaacaagugcgugaacuucaauuucaacggccugaccggcaccggcgugcugaccgagagcaacaagaaguuccugcccuuccagcaguucggccgggauaucgccgacaccaccgacgcagugcgggacccccagacccuggagauccuggacaucaccccaugcagcuucggcggcgugagcgugaucacccccggcacaaacaccagcaaccaggucgccgugcuguaccagggagugaacugcaccgaggugcccguggccauccacgccgaccagcugacccccaccuggcggguguacagcaccggcagcaacguguuccagacccgggccggcugccugaucggcgccgagcacgugaacaacuccuacgagugcgacauccccaucggcgcuggcaucugcgccagcuaccagacccagaccaacagcccccggcgggcccggagcguggccagccagagcgugaucgccuacaccaugagcuuaggcgccgagaacagcguggccuacagcaacaacagcaucgcgaucccuaccaacuucaccaucagcgugaccaccgagauccugcccgugagcaugaccaagaccagcguggacuguaccauguacauaugcggcgacagcaccgagugcagcaaccugcugcugcaguacggcagcuucugcacccagcugaaccgggcccugaccggcaucgccguggagcaggacaagaacacccaagagguguucgcccaggugaagcagaucuacaagacucccccaaucaaggacuucggcggcuucaacuucagccagauccugcccgaccccagcaagcccagcaagcggagcuucaucgaggaccugcuguucaacaaggugacccuggccgacgccggcuucaucaagcaguacggcgacugccugggggauaucgccgcucgggaccugaucugcgcccagaaguucaacggccugaccgugcugcccccucugcugaccgacgagaugaucgcccaguacaccagcgcccugcuugccggcaccaucaccagcggcuggaccuucggcgccggcgcagcccugcagauccccuucgccaugcagauggccuaccgguucaacggcaucggcgugacccagaacgugcuguacgagaaccagaagcugaucgccaaccaguucaacagcgccaucggcaagauccaggacagccugagcagcaccgccagcgcccugggcaagcugcaggacguggugaaccagaacgcucaggcccugaacacccuggugaagcagcugagcagcaacuuuggcgccaucagcucagugcugaaugacauccugagcaggcuggacaagguggaggccgaggugcagaucgaccggcugaucaccggccggcugcagagccugcagaccuacgugacccagcagcugauccgggccgccgagauccgggccagcgccaaccuggcagccaccaagaugagcgagugcgugcugggccagagcaagcggguggacuucugcggcaagggcuaccaccugaugagcuucccccagagcgccccacacggcgugguguuccuccacgucacauacgugcccgcccaggagaagaacuucaccaccgcccccgccaucugccacgacggcaaggcucacuucccccgggagggaguguucgugagcaacggcacccacugguucgugacccagcggaacuucuacgagccccagauuaucaccaccgacaacaccuucgugagcggcaacugcgacguggugaucggcaucgugaacaacaccguguacgacccccugcagccugagcuggacagcuucaaggaggagcuggacaaguacuucaagaaccacaccagccccgacguggaucugggcgacaucagcggcaucaacgccagcguggugaacauccagaaggagaucgaccggcugaacgagguggccaagaaccugaacgagagccugaucgaccugcaggagcugggcaaguacgagcaguacaucaaguggcccugguacaucuggcugggcuucaucgccggccugaucgccaucgugaucgugaccaucaugcugugcugcaugaccagcugcuguagcugccugaagggcugcugcagcugcggcagcugcugcaaguucgacgaggacgacagcgagccagugcugaagggcgugaagcugcacuacaccugaggacuagucccuguucccagagcccacuuuuuuuucuuuuuuugaaauaaaauagccugucuuucagaucuaaaaaaaaaaaaaaaaaaaaaaaaaaaaaaaaaaaaaaaaaaaaaaaaaaaaaaaaaaaaaaaaaaaaaaaaaaaaaaaaaaaaaaaaaaaaaaaaaaaa

SEQ ID NO: 24795 - RNA, 4061 nt, Artificial Sequence
  SARS-CoV-2/Wuhan/WIV05/2019__EPI_ISL_402128 spike protein mRNA gc (1-1273)(H69del_V70del_Y144del_N501Y_A570D_D614G_P681H_T716I_S982 A_D1118H)
aggagagucccgcagucggcguccagcggcucugcuuguucgugugugugucguugcaggccuuauucaagcuuaccauguucguguuccuggugcugcugccccuggugagcagccagugcgugaaccugaccacccggacccagcugcccccugccuacaccaacagcuucacccggggcguguacuaccccgacaagguguuccggagcagcgugcugcacagcacccaggaccuguuccugcccuucuucagcaacgugaccugguuccacgccaucagcggcaccaacggcaccaagcgguucgacaacccagugcugcccuucaacgacggcguguacuucgccagcaccgagaagucaaacaucauccggggcuggaucuucggcaccacccuggacagcaagacacagagccugcugaucgugaacaacgccaccaacguggugaucaaggugugcgaguuucaguucugcaacgaccccuuccugggcguguaccacaagaacaacaagagcuggauggagagcgaguuccggguguacagcagcgcuaacaauugcaccuucgaguacgucagccagcccuuccugauggaccucgagggcaagcagggcaacuucaagaaccugcgggaguucguguucaagaacaucgauggcuacuucaagaucuacagcaagcacacccccaucaaccuggugcgggaccugccccagggauucagcgcccuggagccucugguggaccugcccaucggcaucaacaucaccagguuccagacccugcuggcccugcaccggagcuaccugacccccggcgacagcagcagcggcuggaccgccggcgccgccgcauacuacgugggcuaccugcagccacggaccuuccugcugaaguacaacgagaacggcaccaucaccgacgccguggacugcgcccuggacccccugagcgagaccaagugcacccuaaagagcuucaccguggagaagggcaucuaccagaccagcaacuuccgggugcagcccacugagagcaucgugcgguuccccaacauuaccaaccugugucccuucggcgagguguucaacgccacccgguucgccagcguguacgccuggaaccggaagcggaucagcaacugcguggccgacuacagcgugcuguacaacagcgccagcuucagcaccuucaagugcuacggcgugagcccuaccaagcugaacgaccugugcuucaccaacguguacgcugacagcuucgugauccggggcgacgaggugcggcagaucgcccccggccagaccggcaagaucgccgacuacaacuacaagcugcccgacgacuucaccggcugcgugaucgccuggaacagcaacaaccuggacagcaaggugggcggcaacuacaacuaccuguaccggcuguuccguaagagcaaccugaagccauucgagcgggacaucagcaccgagaucuaccaggccggcagcacccccugcaacgguguggagggcuuuaacugcuacuucccccugcagagcuacggcuuccagcccaccuacggcgugggcuaccagcccuaccgggugguggugcugagcuucgagcugcugcacgcccccgccaccgugugcggcccuaaaaagagcaccaaccuggugaagaacaagugcgugaacuucaacuucaauggccugaccggcaccggcgugcugaccgagagcaacaagaaguuccugcccuuccagcaguucggccgggauaucgacgacaccaccgacgccgugcgggacccccagacccuggagauccuggacaucaccccaugcagcuucggcggcgugagcgugaucacccccggcacaaacaccagcaaccaggucgcagugcuguaccagggagugaacugcaccgaggugcccguggccauccacgccgaccagcugacccccaccuggcggguguacagcaccggcagcaacguguuccagacccgggccggcugccugaucggcgccgagcacgugaacaacuccuacgagugcgacauccccaucggcgccggcaucugcgcuagcuaccagacccagaccaacagccaccggcgggcccggagcguggccagccagagcaucaucgccuacaccaugagcuuaggcgccgagaacagcguggccuacagcaacaacagcaucgccauccccaucaacuucaccauaagcgugaccaccgagauccugccugugagcaugaccaagaccagcguggacuguaccauguacaucugcggcgacagcaccgagugcagcaaccugcugcugcaguacggcagcuucugcacccagcugaaccgggcgcugaccggcaucgccguggagcaggacaagaacacccaagagguguucgcccaggugaagcagaucuacaagaccccacccaucaaggacuucggcggcuucaacuucagccagauccugcccgaccccagcaagcccagcaagcggagcuucaucgaggaccugcuguucaacaaggugacucuggccgacgccggcuucaucaagcaguacggcgauugccugggggacaucgccgcccgggaccugaucugcgcucagaaguucaacggccugaccgugcugccuccccugcugaccgacgagaugaucgcccaguacaccagcgcccugcuugccggcaccaucaccagcggcuggaccuucggcgccggcgccgcacugcagauccccuucgccaugcagauggccuaccgguucaacggcaucggcgugacccagaacgugcuguacgagaaccagaagcugaucgccaaccaguucaacagcgccaucggcaagauccaggacagccugagcagcaccgccagcgcccugggcaagcugcaggacguggugaaccagaacgcccaggcucugaacacccuggugaagcagcugagcagcaacuucggcgccaucagcucagugcugaacgacauccuggccaggcuggacaagguggaggccgaggugcagaucgaccggcugaucaccggccggcugcagagccugcagaccuacgugacccagcagcugauccgggccgccgagauucgggccagcgccaaucuggcagccaccaagaugagcgagugcgugcugggccagagcaagcggguggacuuuugcggcaagggcuaccaccugaugagcuucccccagagcgcuccccacggcgugguguuccuccacgugaccuacgucccagcccaggagaagaacuucacaaccgcccccgccaucugccacgacggcaaggcccacuucccccgggagggaguguucgugagcaacggcacccacugguucgugacccagcggaacuucuacgagccccagaucaucaccacccacaacaccuucgugagcggcaacugcgacguggugaucggcaucgugaacaacaccguguacgacccccugcagcccgagcuggacagcuucaaggaggagcuggacaaguacuucaagaaccacaccagcccugacguggaucugggcgacaucagcggcaucaacgccagcguggugaacauccagaaggagaucgaccggcugaacgagguggccaagaaccugaacgagagccugaucgaccugcaggagcugggcaaguacgagcaguacaucaaguggcccugguacaucuggcugggcuucaucgccggccugaucgccaucgugauggugaccaucaugcugugcugcaugaccagcugcuguagcugccugaagggcugcugcagcugcggcagcugcugcaaguucgacgaggacgacagcgagcccgugcugaagggcgugaagcugcacuacaccugaggacuagucccuguucccagagcccacuuuuuuuucuuuuuuugaaauaaaauagccugucuuucagaucuaaaaaaaaaaaaaaaaaaaaaaaaaaaaaaaaaaaaaaaaaaaaaaaaaaaaaaaaaaaaaaaaaaaaaaaaaaaaaaaaaaaaaaaaaaaaaaaaaaaa

SEQ ID NO: 24796 - RNA, 4070 nt, Artificial Sequence
  SARS-CoV-2/Wuhan/WIV05/2019__EPI_ISL_402128 spike protein mRNA gc (1-1273)(K417N_E484K_N501Y_D614G)
aggagagucccgcagucggcguccagcggcucugcuuguucgugugugugucguugcaggccuuauucaagcuuaccauguucguguuccuggugcugcugccccuggugagcagccagugcgugaaccugaccacccggacccagcugcccccugccuacaccaacagcuucacccggggcguguacuaccccgacaagguguuccggagcagcgugcugcacagcacccaggaccuguuccugcccuucuucagcaacgugaccugguuccacgccauccacgugagcggcaccaacggcaccaagcgguucgacaacccagugcugcccuucaacgacggcguguacuucgccagcaccgagaagucaaacaucauccggggcuggaucuucggcaccacccuggacagcaagacacagagccugcugaucgugaacaacgccaccaacguggugaucaaggugugcgaguuucaguucugcaacgaccccuuccugggcguguacuaccacaagaacaacaagagcuggauggagagcgaguuccgggucuacagcagcgcuaacaauugcaccuucgaguacgugagccagcccuuccugauggaccucgagggcaagcagggcaacuucaagaaccugcgggaguucguguucaagaacaucgauggcuacuucaagaucuacagcaagcacacccccaucaaccuggugcgggaccugccccagggauucagcgcccuggagccucugguggaccugcccaucggcaucaacaucaccagguuccagacccugcuggcccugcaccggagcuaccugacccccggcgacagcagcagcggcuggaccgccggcgccgccgcauacuacgugggcuaccugcagccacggaccuuccugcugaaguacaacgagaacggcaccaucaccgacgccguggacugcgcccuggacccccugagcgagaccaagugcacccuaaagagcuucaccguggagaagggcaucuaccagaccagcaacuuccgggugcagcccacugagagcaucgugcgguuccccaacauuaccaaccugugucccuucggcgagguguucaacgccacccgguucgccagcguguacgccuggaaccggaagcggaucagcaacugcguggccgacuacagcgugcuguacaacagcgccagcuucagcaccuucaagugcuacggcgugagcccuaccaagcugaacgaccugugcuucaccaacguguacgcugacagcuucgugauccggggcgacgaggugcggcagaucgcccccggccagaccggcaacaucgccgacuacaacuacaagcugcccgacgacuucaccggcugcgugaucgccuggaacagcaacaaccuggacagcaaggugggcggcaacuacaacuaccuguaccggcuguuccguaagagcaaccugaagccauucgagcgggacaucagcaccgagaucuaccaggccggcagcacccccugcaacggugugaagggcuuuaacugcuacuucccccugcagagcuacggcuuccagcccaccuacggcgugggcuaccagcccuaccgggugguggugcugagcuucgagcugcugcacgcccccgccaccgugugcggcccuaaaaagagcaccaaccuggugaagaacaagugcgugaacuucaauuucaacggccugaccggcaccggcgugcugaccgagagcaacaagaaguuccugcccuuccagcaguucggccgggauaucgccgacaccaccgacgcagugcgggacccccagacccuggagauccuggacaucaccccaugcagcuucggcggcgugagcgucaucacccccggcacaaacaccagcaaccagguggccgugcuguaccagggagugaacugcaccgaggugcccguggccauccacgccgaccagcugacccccaccuggcggguguacagcaccggcagcaacguguuccagacccgggccggcugccugaucggcgccgagcacgugaacaacuccuacgagugcgacauccccaucggcgcuggcaucugcgccagcuaccagacccagaccaacagcccccggcgggcccggagcguggccagccagagcaucaucgccuacaccaugagcuuaggcgccgagaacagcguggccuacagcaacaacagcaucgcgaucccuaccaacuucaccaucagcgugaccaccgagauacugcccgugagcaugaccaagaccagcguggacuguaccauguacaucugcggcgacagcaccgagugcagcaaccugcugcugcaguacggcagcuucugcacccagcugaaccgggcccugaccggcaucgccguggagcaggacaagaacacccaagagguguucgcccaggugaagcagaucuacaagacucccccaaucaaggacuucggcggcuucaacuucagccagauccugcccgaccccagcaagcccagcaagcggagcuucaucgaggaccugcuguucaacaaggugacccuggccgacgccggcuucaucaagcaguacggcgacugccugggggauaucgccgcucgggaccugaucugcgcccagaaguucaacggccugaccgugcugcccccucugcugaccgacgagaugaucgcccaguacaccagcgcccugcuugccggcaccaucaccagcggcuggaccuucggcgccggcgcagcccugcagauccccuucgccaugcagauggccuaccgguucaacggcaucggcgugacccagaacgugcuguacgagaaccagaagcugaucgccaaccaguucaacagcgccaucggcaagauccaggacagccugagcagcaccgccagcgcccugggcaagcugcaggacguggugaaccagaacgcucaggcccugaacacccuggugaagcagcugagcagcaacuucggcgccaucagcucagugcugaaugacauccugagcaggcuggacaagguggaggccgaggugcagaucgaccggcugaucaccggccggcugcagagccugcagaccuacgugacccagcagcugauccgggccgccgagauccgggccagcgccaaccuggcagccaccaagaugagcgagugcgugcugggccagagcaagcggguggacuuuugcggcaagggcuaccaccugaugagcuucccccagagcgccccacacggcgugguguuccuccacgucacauacgugcccgcccaggagaagaacuucaccaccgcccccgccauuugccacgacggcaaggcucacuucccccgggagggaguguucgugagcaacggcacccacugguucgugacccagcggaacuucuacgagccccagaucaucaccaccgacaacaccuucgugagcggcaacugcgacguggugaucggcaucgugaacaacaccguguacgacccccugcagccugagcuggacagcuucaaggaggagcuggacaaguacuucaagaaccacaccagccccgacguggaucugggcgacaucagcggcaucaacgccagcguggugaacauccagaaggagaucgaccggcugaacgagguggccaagaaccugaacgagagccugaucgaccugcaggagcugggcaaguacgagcaguacaucaaguggcccugguacaucuggcugggcuucaucgccggccugaucgccaucgugauggugaccaucaugcugugcugcaugaccagcugcuguagcugccugaagggcugcugcagcugcggcagcugcugcaaguucgacgaggacgacagcgagccagugcugaagggcgugaagcugcacuacaccugaggacuagucccuguucccagagcccacuuuuuuuucuuuuuuugaaauaaaauagccugucuuucagaucuaaaaaaaaaaaaaaaaaaaaaaaaaaaaaaaaaaaaaaaaaaaaaaaaaaaaaaaaaaaaaaaaaaaaaaaaaaaaaaaaaaaaaaaaaaaaaaaaaaaa

SEQ ID NO: 24797 - RNA, 4061 nt, Artificial Sequence
  SARS-CoV-2/Wuhan/WIV05/2019__EPI_ISL_402128 spike protein mRNA gc (1-1273)(L18F_D80A_D215G_L242del_A243del_L244del_R246I_K417N_E484 K_N501Y_D614G_A701V)
aggagagucccgcagucggcguccagcggcucugcuuguucgugugugugucguugcaggccuuauucaagcuuaccauguucguguuccuggugcugcugccccuggugagcagccagugcgugaacuucaccacccggacccagcugcccccugccuacaccaacagcuucacccggggcguguacuaccccgacaagguguuccggagcagcgugcugcacagcacccaggaccuguuccugcccuucuucagcaacgugaccugguuccacgccauccacgugagcggcaccaacggcaccaagcgguucgccaacccagugcugcccuucaacgacggcguguacuucgccagcaccgagaagucaaacaucauccggggcuggaucuuuggcaccacccuggacagcaagacacagagccugcugaucgugaacaacgcuaccaacguggugaucaaggugugcgaguuccaguucugcaacgaccccuuccugggcguguacuaccacaagaacaacaagagcuggauggagagcgaguuccgggucuacagcagcgccaacaauugcaccuucgaguacgugagccagcccuuccugauggaccuggagggcaagcagggcaacuucaagaaccuccgggaguucguguucaagaacaucgacggcuacuucaagaucuacagcaagcacacccccaucaaccuggugcggggacugccccagggcuucagcgcccuggagccucugguggaucugcccaucggcaucaacaucaccagguuccagacccugcacaucagcuaccugacccccggcgacagcagcagcggcuggaccgccggcgccgccgcauacuacgugggcuaccugcagccacggaccuuccugcugaaguacaacgagaacggcaccaucaccgacgccguggacugcgcccuggacccccugagcgagaccaagugcacccuuaagagcuucaccguggagaagggcaucuaccagaccagcaacuuccgggugcagcccacugagagcauugugcgguuccccaacaucaccaaccugugucccuucggcgagguguucaacgccacccgguucgccagcguguacgccuggaaccggaagcggaucagcaacugcguggccgacuacagcgugcuguacaacagcgccagcuucagcaccuucaagugcuacggcgugagcccuaccaagcugaacgaccugugcuucaccaacguguacgcugacagcuucgugauccggggcgacgaggugcggcagaucgcccccggccagaccggcaacaucgccgacuacaacuacaagcugcccgacgacuucaccggcugcgugaucgccuggaacagcaacaaccuggacagcaaggugggcggcaacuacaacuaccuguaccggcuauuccguaagagcaaccugaagccauuugagcgggacaucagcaccgagaucuaccaggccgguagcacccccugcaacggcgugaagggcuucaacugcuacuucccccugcagagcuacggcuuccagcccaccuacggcgugggcuaccagcccuaccgggugguggugcugagcuucgagcugcugcacgcccccgccaccgugugcggcccuaaaaagagcaccaaccuggugaagaacaagugcgugaacuucaauuucaacggccugaccggcaccggcgugcugaccgagagcaacaagaaguuccugcccuuccagcaguucggccgggacaucgccgacaccaccgaugcagugcgggacccccagacccuggagauccuggacaucaccccaugcagcuucggcggcgugagcgucaucacccccggaacaaacaccagcaaccagguggccgugcuguaccagggcgugaacugcaccgaggugcccguggccauccacgccgaccagcugacccccaccuggcggguguacagcaccggcagcaacguguuccagacccgggccggcugccugaucggcgccgagcacgugaacaacuccuacgagugcgacauccccaucggcgcuggcaucugcgccagcuaccagacccagaccaacagcccccggcgggcccggagcguggccagccagagcaucaucgccuacaccaugagccugggcguggagaacagcguggccuacagcaacaacagcaucgccaucccuaccaacuucaccauaagcgugaccaccgagauccugcccgugagcaugaccaagaccagcguggacuguaccauguacaucugcggcgacagcaccgagugcagcaaccuguuacugcaguacggcagcuucugcacccagcugaaccgggcgcugaccggcaucgccguggagcaggacaagaacacccaagagguguucgcccaggugaagcagaucuacaagacucccccaaucaaggacuucggcggcuucaacuucagccagauccugcccgaccccagcaagcccagcaagcggagcuucaucgaggaccugcuguucaacaaggugacccuggccgacgccggcuucaucaagcaguacggggacugccugggcgacaucgccgcccgggaccugaucugcgcucagaaguucaacggccugaccgugcugcccccucugcugaccgaugagaugaucgcccaguacaccagcgcccugcuggccggcaccaucaccagcggcuggaccuucggcgccggcgccgcacugcagauccccuucgccaugcagauggccuaccgguucaacggcaucggcgugacccagaacgugcuguacgagaaccagaagcugaucgccaaccaguucaacagcgccaucggcaagauccaggacagccugagcagcaccgccagcgcccugggcaagcugcaggacguggugaaccagaacgcccaggcucugaacacccuggugaagcagcugagcagcaacuuuggcgccaucagcucagugcugaaugacauccugagccggcuggacaagguggaggccgaggugcagaucgacaggcugaucaccggccggcugcagagccugcagaccuacgugacccagcagcugauccgggccgccgagauucgggccagcgccaaccuggccgcaaccaagaugagcgagugcgugcugggccagagcaagcggguggacuucugcggcaagggcuaccaccugaugagcuucccccagagcgccccacacggcguggucuuccugcacgugacauacgugcccgcccaggagaagaacuucaccaccgcccccgccaucugccacgacggaaaggcccacuucccccgggagggcguguucgugagcaacggcacccacugguucgugacccagcggaacuucuacgagccccagaucaucaccaccgacaacaccuucgugagcggcaacugcgacguggugaucggcaucgugaacaacaccguguacgacccccugcagccugagcuggacagcuucaaggaggagcucgacaaguacuucaagaaccacaccagccccgacguggaccugggcgacaucagcggcaucaacgcuagcguggugaacauccagaaggagaucgaucggcugaacgagguggccaagaaccugaacgagagccugaucgaccugcaggagcugggcaaguacgagcaguacaucaaguggcccugguacaucuggcugggcuucaucgccggccugaucgccaucgugauggugaccaucaugcugugcugcaugaccagcugcuguagcugccugaagggcugcugcagcugcggcagcugcugcaaguucgacgaggacgacagcgagccagugcugaagggcgugaagcugcacuacaccugaggacuagucccuguucccagagcccacuuuuuuuucuuuuuuugaaauaaaauagccugucuuucagaucuaaaaaaaaaaaaaaaaaaaaaaaaaaaaaaaaaaaaaaaaaaaaaaaaaaaaaaaaaaaaaaaaaaaaaaaaaaaaaaaaaaaaaaaaaaaaaaaaaaaa

SEQ ID NO: 24798 - RNA, 4070 nt, Artificial Sequence
  SARS-CoV-2/Wuhan/WIV05/2019__EPI_ISL_402128 spike protein mRNA gc (1-1273)(E484K_D614G)
aggagagucccgcagucggcguccagcggcucugcuuguucgugugugugucguugcaggccuuauucaagcuuaccauguucguguuccuggugcugcugccccuggugagcagccagugcgugaaccugaccacccggacccagcugcccccugccuacaccaacagcuucacccggggcguguacuaccccgacaagguguuccggagcagcgugcugcacagcacccaggaccuguuccugcccuucuucagcaacgugaccugguuccacgccauccacgugagcggcaccaacggcaccaagcgguucgacaacccagugcugcccuucaacgacggcguguacuucgccagcaccgagaagucaaacaucauccggggcuggaucuucggcaccacccuggacagcaagacacagagccugcugaucgugaacaacgccaccaacguggugaucaaggugugcgaguuucaguucugcaacgaccccuuccugggcguguacuaccacaagaacaacaagagcuggauggagagcgaguuccgggucuacagcagcgcuaacaauugcaccuucgaguacgugagccagcccuuccugauggaccucgagggcaagcagggcaacuucaagaaccugcgggaguucguguucaagaacaucgauggcuacuucaagaucuacagcaagcacacccccaucaaccuggugcgggaccugccccagggauucagcgcccuggagccucugguggaccugcccaucggcaucaacaucaccagguuccagacccugcuggcccugcaccggagcuaccugacccccggcgacagcagcagcggcuggaccgccggcgccgccgcauacuacgugggcuaccugcagccacggaccuuccugcugaaguacaacgagaacggcaccaucaccgacgccguggacugcgcccuggacccccugagcgagaccaagugcacccuaaagagcuucaccguggagaagggcaucuaccagaccagcaacuuccgggugcagcccacugagagcaucgugcgguuccccaacauuaccaaccugugucccuucggcgagguguucaacgccacccgguucgccagcguguacgccuggaaccggaagcggaucagcaacugcguggccgacuacagcgugcuguacaacagcgccagcuucagcaccuucaagugcuacggcgugagcccuaccaagcugaacgaccugugcuucaccaacguguacgcugacagcuucgugauccggggcgacgaggugcggcagaucgcccccggccagaccggcaagaucgccgacuacaacuacaagcugcccgacgacuucaccggcugcgugaucgccuggaacagcaacaaccuggacagcaaggugggcggcaacuacaacuaccuguaccggcuguuccguaagagcaaccugaagccauucgagcgggacaucagcaccgagaucuaccaggccggcagcacccccugcaacggugugaagggcuuuaacugcuacuucccccugcagagcuacggcuuccagcccaccaacggcgugggcuaccagcccuaccgggugguggugcugagcuucgagcugcugcacgcccccgccaccgugugcggcccuaaaaagagcaccaaccuggugaagaacaagugcgugaacuucaauuucaacggccugaccggcaccggcgugcugaccgagagcaacaagaaguuccugcccuuccagcaguucggccgggauaucgccgacaccaccgacgcagugcgggacccccagacccuggagauccuggacaucaccccaugcagcuucggcggcgugagcgucaucacccccggcacaaacaccagcaaccagguggccgugcuguaccagggagugaacugcaccgaggugcccguggccauccacgccgaccagcugacccccaccuggcggguguacagcaccggcagcaacguguuccagacccgggccggcugccugaucggcgccgagcacgugaacaacuccuacgagugcgacauccccaucggcgcuggcaucugcgccagcuaccagacccagaccaacagcccccggcgggcccggagcguggccagccagagcaucaucgccuacaccaugagcuuaggcgccgagaacagcguggccuacagcaacaacagcaucgcgaucccuaccaacuucaccaucagcgugaccaccgagauacugcccgugagcaugaccaagaccagcguggacuguaccauguacaucugcggcgacagcaccgagugcagcaaccugcugcugcaguacggcagcuucugcacccagcugaaccgggcccugaccggcaucgccguggagcaggacaagaacacccaagagguguucgcccaggugaagcagaucuacaagacucccccaaucaaggacuucggcggcuucaacuucagccagauccugcccgaccccagcaagcccagcaagcggagcuucaucgaggaccugcuguucaacaaggugacccuggccgacgccggcuucaucaagcaguacggcgacugccugggggauaucgccgcucgggaccugaucugcgcccagaaguucaacggccugaccgugcugcccccucugcugaccgacgagaugaucgcccaguacaccagcgcccugcuugccggcaccaucaccagcggcuggaccuucggcgccggcgcagcccugcagauccccuucgccaugcagauggccuaccgguucaacggcaucggcgugacccagaacgugcuguacgagaaccagaagcugaucgccaaccaguucaacagcgccaucggcaagauccaggacagccugagcagcaccgccagcgcccugggcaagcugcaggacguggugaaccagaacgcucaggcccugaacacccuggugaagcagcugagcagcaacuucggcgccaucagcucagugcugaaugacauccugagcaggcuggacaagguggaggccgaggugcagaucgaccggcugaucaccggccggcugcagagccugcagaccuacgugacccagcagcugauccgggccgccgagauccgggccagcgccaaccuggcagccaccaagaugagcgagugcgugcugggccagagcaagcggguggacuuuugcggcaagggcuaccaccugaugagcuucccccagagcgccccacacggcgugguguuccuccacgucacauacgugcccgcccaggagaagaacuucaccaccgcccccgccauuugccacgacggcaaggcucacuucccccgggagggaguguucgugagcaacggcacccacugguucgugacccagcggaacuucuacgagccccagaucaucaccaccgacaacaccuucgugagcggcaacugcgacguggugaucggcaucgugaacaacaccguguacgacccccugcagccugagcuggacagcuucaaggaggagcuggacaaguacuucaagaaccacaccagccccgacguggaucugggcgacaucagcggcaucaacgccagcguggugaacauccagaaggagaucgaccggcugaacgagguggccaagaaccugaacgagagccugaucgaccugcaggagcugggcaaguacgagcaguacaucaaguggcccugguacaucuggcugggcuucaucgccggccugaucgccaucgugauggugaccaucaugcugugcugcaugaccagcugcuguagcugccugaagggcugcugcagcugcggcagcugcugcaaguucgacgaggacgacagcgagccagugcugaagggcgugaagcugcacuacaccugaggacuagucccuguucccagagcccacuuuuuuuucuuuuuuugaaauaaaauagccugucuuucagaucuaaaaaaaaaaaaaaaaaaaaaaaaaaaaaaaaaaaaaaaaaaaaaaaaaaaaaaaaaaaaaaaaaaaaaaaaaaaaaaaaaaaaaaaaaaaaaaaaaaaa

SEQ ID NO: 24799 - RNA, 4070 nt, Artificial Sequence
  SARS-CoV-2/Wuhan/WIV05/2019__EPI_ISL_402128 spike protein mRNA gc (1-1273)(L18F_T20N_P26S_D138Y_R190S_K417T_E484K_N501Y_D614G_H655Y _T1027I)
aggagagucccgcagucggcguccagcggcucugcuuguucgugugugugucguugcaggccuuauucaagcuuaccauguucguguuccuggugcugcugccccuggugagcagccagugcgugaacuucaccaaccggacccagcugcccagcgccuacaccaacagcuucacccggggcguguacuacccugacaagguguuccggagcagcgugcugcacagcacccaggaccuguuccugcccuucuucagcaacgugaccugguuccacgccauccacgugagcggcaccaacggcaccaagcgguucgacaaccccgugcugccauucaacgacggcguguacuucgccagcaccgagaagucaaacaucauccggggcuggaucuuuggcaccacccuggacagcaagacccagagccugcugaucgugaacaacgccacaaacguggugaucaaggugugcgaguuccaguucugcaacuaccccuuccugggcguguacuaccacaagaacaacaagagcuggauggagagcgaguuccgggucuacagcagcgcuaauaacugcaccuucgaguacgugagccagcccuuccugauggaccuggagggcaagcagggcaacuucaagaaccucagcgaguucguguucaagaacaucgacggcuacuucaagaucuacagcaagcacacccccaucaaccuggugcgggaucugccccagggauucagcgcccuggagccccugguggaccugccuaucggcaucaacaucacccgguuccagacccugcuggcccugcacaggagcuaccugacccccggcgacagcagcagcggcuggaccgccggcgccgccgcauacuacgugggcuaccugcagccccggaccuuccugcugaaguacaacgagaacggcaccaucaccgacgccguggacugcgcccuggacccacugagcgagaccaagugcacccuaaagagcuucaccguggagaagggcaucuaccagaccagcaacuuccgggugcagcccaccgagagcaucgugcgguuccccaacauuacuaaccugugucccuucggcgagguguucaacgccacccgguucgccagcguguacgccuggaaccggaagcggaucagcaacugcguggccgacuacagcgugcuguacaacagcgccagcuucagcaccuucaagugcuacggcgugagccccaccaagcugaacgaccugugcuucaccaacguguacgcugacagcuucgugauccggggcgacgaggugcggcagaucgccccuggccagaccggcaccaucgccgacuacaacuacaagcugcccgacgacuucaccggcugcgugaucgccuggaacagcaacaaccuggacagcaaggugggcggcaacuacaacuaccuguaccggcuguuccguaagagcaaccugaagcccuuugagcgggacaucagcaccgagaucuaccaggccggcagcaccccaugcaacggugugaagggcuucaacugcuacuucccccugcagagcuacggcuuccagcccaccuacggcgugggcuaccagcccuaccgggugguggugcugagcuucgagcugcugcacgcccccgccaccgugugcggccccaaaaagagcaccaaccuggugaagaacaagugcgugaacuucaauuucaacggccugaccggcaccggcgugcugaccgagagcaacaagaaguuccugccuuuccagcaguucggccgggacaucgccgauaccaccgacgcagugcgggacccccagacccuggagauccuggacaucacccccugcagcuucggcggcgugagcgucaucaccccaggcacaaacaccagcaaccagguggccgugcuguaccagggagugaacugcaccgaggugcccguggccauccacgccgaccagcugacccccaccuggcggguguacuccaccggcagcaacguguuccagacccgggccggcugccugaucggcgccgaguacgugaacaacagcuacgagugcgacauccccaucggcgcuggcaucugcgccagcuaccagacccagaccaacagcccccggcgggcccggagcguggccagccagagcaucaucgccuacaccaugagccugggcgccgagaacagcguggccuacagcaacaacagcaucgcgauccccaccaacuucaccaucagcgugaccaccgagauauuaccugugagcaugaccaagaccagcguggacuguaccauguacaucugcggcgacagcaccgagugcagcaaccugcugcugcaguacggcagcuucugcacccagcugaaccgggcccugaccggcaucgccguggagcaggacaagaacacccaagagguguucgcccaggugaagcagaucuacaagacuccacccaucaaggacuucggcggcuucaacuucagccagauccugcccgaccccagcaagcccagcaagcggagcuucaucgaggaccugcuguucaacaaggugacccuggccgacgccggcuucaucaagcaguacggcgacugccugggggacaucgccgcucgggaucugaucugcgcccagaaguucaacggccugaccgugcugccuccccugcugaccgacgagaugaucgcccaguacaccagcgcccugcuggccggcaccaucaccagcggcuggaccuucggcgccggcgcagcccuucagauccccuucgccaugcagauggccuaccgguucaacggcaucggcgugacccagaacgugcuguacgagaaccagaagcugaucgccaaccaguucaacagcgccaucggcaagauccaggacagccugagcagcaccgccagcgcccugggcaagcugcaggacguggugaaccagaacgcucaggcccugaacacccuggugaagcagcugagcucaaacuuuggcgccaucagcagcgugcugaaugacauccugagccggcuggacaagguggaggccgaggugcagaucgacaggcugaucaccggccggcugcagagccugcagaccuacgugacccagcagcugauccgggccgccgagauccgggccagcgccaaccuggcagccauuaagaugagcgagugcgugcugggccagagcaagcggguggacuucugcggcaagggcuaccaccugaugagcuucccccagagcgcuccccacggcgugguguuccugcacgucaccuacgugccagcccaggagaagaacuucacaaccgcccccgccaucugccacgacggcaaggcccacuucccccgggagggaguguucgugagcaacggcacccacugguucgugacccagcggaacuucuacgagccccagaucaucaccaccgacaacaccuucgugagcggcaacugcgacguggugaucggcaucgugaacaacaccguguacgacccccuccagcccgagcuggacagcuucaaggaggagcuggacaaguacuucaagaaccacaccagcccugacguggaccugggcgauaucagcggcaucaacgccagcguggugaacauccagaaggagaucgaccggcugaacgagguggccaagaaccugaacgagagccugaucgaccugcaggagcugggcaaguacgagcaguacaucaaguggcccugguacaucuggcugggcuucaucgccggccugaucgccaucgugauggugaccaucaugcugugcugcaugaccagcugcuguagcugccugaagggcugcugcagcugcggcagcugcugcaaguucgacgaggacgacagcgagcccgugcugaagggcgugaagcugcacuacaccugaggacuagucccuguucccagagcccacuuuuuuuucuuuuuuugaaauaaaauagccugucuuucagaucuaaaaaaaaaaaaaaaaaaaaaaaaaaaaaaaaaaaaaaaaaaaaaaaaaaaaaaaaaaaaaaaaaaaaaaaaaaaaaaaaaaaaaaaaaaaaaaaaaaaa

SEQ ID NO: 24800 - RNA, 4070 nt, Artificial Sequence
  SARS-CoV-2/Wuhan/WIV05/2019__EPI_ISL_402128 spike protein mRNA gc (1-1273)(S13I_W152C_L452R_D614G)
aggagagucccgcagucggcguccagcggcucugcuuguucgugugugugucguugcaggccuuauucaagcuuaccauguucguguuccuggugcugcugccccuggugagcauccagugcgugaaccugaccacccggacccagcugcccccugccuacaccaacagcuucacccggggcguguacuaccccgacaagguguuccggagcagcgugcugcacagcacccaggaccuguuccugcccuucuucagcaacgugaccugguuccacgccauccacgugagcggcaccaacggcaccaagcgguucgacaacccagugcugcccuucaacgacggcguguacuucgccagcaccgagaagucaaacaucauccggggcuggaucuucggcaccacccuggacagcaagacacagagccugcugaucgugaacaacgccaccaacguggugaucaaggugugcgaguuucaguucugcaacgaccccuuccugggcguguacuaccacaagaacaacaagagcugcauggagagcgaguuccgggucuacagcagcgcuaacaauugcaccuucgaguacgugagccagcccuuccugauggaccucgagggcaagcagggcaacuucaagaaccugcgggaguucguguucaagaacaucgauggcuacuucaagaucuacagcaagcacacccccaucaaccuggugcgggaccugccccagggauucagcgcccuggagccucugguggaccugcccaucggcaucaacaucaccagguuccagacccugcuggcccugcaccggagcuaccugacccccggcgacagcagcagcggcuggaccgccggcgccgccgcauacuacgugggcuaccugcagccacggaccuuccugcugaaguacaacgagaacggcaccaucaccgacgccguggacugcgcccuggacccccugagcgagaccaaguguacccuaaagagcuucaccguggagaagggcaucuaccagaccagcaacuuccgggugcagcccacugagagcauugugcgguuccccaacaucaccaaccugugccccuucggcgagguguucaacgccacccgguucgccagcguguacgccuggaaccggaagcggaucagcaacugcguggccgacuacagcgugcuguacaacagcgccagcuucagcaccuucaagugcuacggcgugagcccuaccaagcugaacgaccugugcuucaccaacguguacgcugacagcuucgugauccggggcgacgaggugcggcagaucgcccccggccagaccggcaagaucgccgacuacaacuacaagcugcccgacgacuucaccggcugcgugaucgccuggaacagcaacaaccuggacagcaaggugggcggcaacuacaacuaccgguaccggcuguuccguaagagcaaccugaagccauucgagcgggacaucagcaccgagaucuaccaggccggcagcacccccugcaacgguguggagggcuuuaacugcuacuucccccugcagagcuacggcuuccagcccaccaacggcgugggcuaccagcccuaccgggugguggugcugagcuucgagcugcugcacgcccccgccaccgugugcggcccuaaaaagagcaccaaccuggugaagaacaagugcgugaacuucaauuucaacggccugaccggcaccggcgugcugaccgagagcaacaagaaguuccugcccuuccagcaguucggccgggauaucgccgacaccaccgacgcagugcgggacccccagacccuggagauccuggacaucaccccaugcagcuucggcggcgugagcgucaucacccccggcacaaacaccagcaaccagguggccgugcuguaccagggagugaacugcaccgaggugcccguggccauccacgccgaccagcugacccccaccuggcggguguacagcaccggcagcaacguguuccagacccgggccggcugccugaucggcgccgagcacgugaacaacagcuacgagugcgacauccccaucggcgcuggcaucugugccuccuaccagacccagaccaacagcccccggcgggcccggagcguggccagccagagcaucaucgccuacaccaugagccugggcgccgagaacagcguggccuacagcaacaacagcaucgcgaucccuaccaacuucaccauaagcgugaccaccgagaucuuacccgugagcaugaccaagaccagcguggacugcaccauguacaucugcggcgacagcaccgagugcagcaaccugcugcugcaguacggcagcuucugcacccagcugaaccgggcccugaccggcaucgccguggagcaggacaagaacacccaagagguguucgcccaggugaagcagaucuacaagacucccccaaucaaggacuucggcggcuucaacuucagccagauccugcccgaccccagcaagcccagcaagcggagcuucaucgaggaccugcuguucaacaaggugacccuggccgacgccggcuucaucaagcaguacggcgacugccugggggauaucgccgcucgggaccugaucugcgcccagaaguucaacggccugaccgugcugcccccucugcugaccgacgagaugaucgcccaguacaccagcgcccugcuggccggcaccaucaccagcggcuggaccuucggcgccggcgcagcccuucagauccccuucgccaugcagauggccuacagguucaacggcaucggcgugacccagaacgugcuguacgagaaccagaagcugaucgccaaccaguucaacagcgccaucggcaagauccaggacagccugagcagcaccgccagcgcccugggcaagcugcaggacguggugaaccagaacgcucaggcccugaacacccuggugaagcagcugagcagcaacuucggcgccaucagcagcgugcugaaugacauccugucacggcuggacaagguggaggccgaggugcagaucgaccggcugaucaccggccggcugcagagccugcagaccuacgugacccagcagcugauccgggccgccgagauucgggccagcgccaaccuggcagccaccaagaugagcgagugcgugcugggccagagcaagcggguggacuuuugcggcaagggcuaccaccugaugagcuucccccagagcgccccacacggcgugguguuccugcacgucacauacgugcccgcccaggagaagaacuucaccaccgcccccgccaucugccacgacggcaaggcucacuucccccgggagggaguguucgugagcaacggcacccacugguucgugacccagcggaacuucuacgagccccagaucaucaccaccgacaacaccuucgugagcggcaacugcgacguggugaucggcaucgugaacaacaccguguacgacccccuccagccugagcuggacagcuucaaggaggagcuggacaaguacuucaagaaccacaccagccccgacguggaucugggcgacaucagcggcaucaacgccagcguggugaacauccagaaggagaucgaccggcugaacgagguggccaagaaccugaacgagagccugaucgaccugcaggagcugggcaaguacgagcaguacaucaaguggcccugguacaucuggcugggcuucaucgccggccugaucgccaucgugauggugaccaucaugcugugcugcaugaccagcuguugcagcugccugaagggcugcugcagcugcggcagcugcugcaaguucgacgaggacgacagcgagccagugcugaagggcgugaagcugcacuacaccugaggacuagucccuguucccagagcccacuuuuuuuucuuuuuuugaaauaaaauagccugucuuucagaucuaaaaaaaaaaaaaaaaaaaaaaaaaaaaaaaaaaaaaaaaaaaaaaaaaaaaaaaaaaaaaaaaaaaaaaaaaaaaaaaaaaaaaaaaaaaaaaaaaaaa

SEQ ID NO: 24801 - RNA, 4070 nt, Artificial Sequence
  SARS-CoV-2/Wuhan/WIV05/2019__EPI_ISL_402128 spike protein mRNA gc mod (1-1273)
aggagagucccgcagucggcguccagcggcucugcuuguucgugugugugucguugcaggccuuauucaagcuuaccauguucguguuucuggugcugcugccccugguguccagccagugugugaaccugaccaccagaacacagcugccuccagccuacaccaacagcuucaccagaggcguguacuaccccgacaagguguucagauccagcgugcugcacucuacccaggaccuguuccugccuuucuucagcaacgugaccugguuccacgccauccacguguccggcaccaauggcaccaagagauucgacaaccccgugcugcccuucaacgacgggguguacuuugccagcaccgagaaguccaacaucaucagaggcuggaucuucggcaccacacuggacagcaagacccagagccugcugaucgugaacaacgccaccaacguggucaucaaagugugcgaguuccaguucugcaacgaccccuuccugggcgucuacuaccacaagaacaacaagagcuggauggaaagcgaguuccggguguacagcagcgccaacaacugcaccuucgaguacgugucccagccuuuccugauggaccuggaaggcaagcagggcaacuucaagaaccugcgcgaguucguguucaagaacaucgacggcuacuucaaaaucuacagcaagcacaccccuaucaaccucgugcgggaucugccucagggcuucucugcucuggaaccccugguggaucugcccaucggcaucaacaucacccgguuucagacacugcuggcccugcacagaagcuaccugacaccuggcgauagcagcagcggauggacagcuggugccgccgcuuacuaugugggcuaccugcagccuagaaccuuccugcugaaguacaacgagaacggcaccaucaccgacgccguggauugugcucuggauccucugagcgagacaaagugcacccugaaguccuucaccguggaaaagggcaucuaccagaccagcaacuuccgggugcagcccaccgaauccaucgugcgguuccccaauaucaccaaucugugccccuucggcgagguguucaaugccaccagauucgccucuguguacgccuggaaccggaagcggaucagcaauugcguggccgacuacuccgugcuguacaacuccgccagcuucagcaccuucaagugcuacggcguguccccuaccaagcugaacgaccugugcuucacaaacguguacgccgacagcuucgugauccggggagaugaagugcggcagauugccccuggacagacaggcaagaucgccgacuacaacuacaagcugcccgacgacuucaccggcugugugauugccuggaacagcaacaaccuggacuccaaagucggcggcaacuacaauuaccuguaccggcuguuccggaaguccaaucugaagcccuucgagcgggacaucagcaccgaaaucuaucaggccggcagcaccccuugcaacggcguggaaggcuucaacugcuacuucccacugcaguccuacggcuuucagcccacaaauggcgugggcuaucagcccuacagagugguggugcugagcuucgaacugcugcaugcuccugccacagugugcggcccuaagaaaagcaccaaucucgugaagaacaaaugcgugaacuucaacuucaacggccugaccggcaccggcgugcugacagagagcaacaagaaguuccugccauuccagcaguuuggccgggauaucgccgauaccacagacgccguuagagauccccagacacuggaaauccuggacaucaccccaugcagcuucggcggagugucugugaucaccccuggcaccaacaccagcaaucagguggcagugcuguaccaggacgugaacuguaccgaagugcccguggccauucacgccgaucagcugacaccuacauggcggguguacuccaccggcagcaauguguuucagaccagagccggcugucugaucggagccgagcacgugaacaauagcuacgagugcgacauccccaucggcgcuggcaucugugccagcuaccagacacagacaaacagccccagacgggcuagaagcguggccagccagagcaucauugccuacacaaugucucugggcgccgagaacagcguggccuacuccaacaacucuaucgcuauccccaccaacuucaccaucagcgugaccaccgagauccugccuguguccaugaccaagaccagcguggacugcaccauguacaucugcggcgauuccaccgagugcuccaaccugcugcugcaguacggcagcuucugcacccagcugaauagagcccugacagggaucgccguggaacaggacaagaacacccaagagguguucgcccaagugaagcaaaucuacaagaccccuccuaucaaggacuucggcggcuucaauuucagccagauucugcccgauccuagcaagcccagcaagcggagcuucaucgaggaccugcuguucaacaaagugacacuggccgacgccggcuucaucaagcaguauggcgauugucugggcgacauugccgccagggaucugauuugcgcccagaaguuuaacggacugacagugcugccuccucugcugaccgaugagaugaucgcccaguacacaucugcccugcuggccggcacaaucacaagcggcuggacauuuggagcuggcgccgcucugcagauccccuuugcuaugcagauggccuaccgguucaacggcaucggagugacccagaaugugcuguacgagaaccagaagcugaucgccaaccaguucaacagcgccaucggcaagauccaggacagccugagcagcacagcaagcgcccugggaaagcugcaggacguggucaaccagaaugcccaggcacugaacacccuggucaagcagcuguccuccaacuucggcgccaucagcucugugcugaacgauauccugagcagacuggacaaggucgaggccgaggugcagaucgacagacugaucacaggcagacugcagagccuccagacauacgugacccagcagcugaucagagccgccgagauuagagccucugccaaucuggccgccaccaagaugucugagugugugcugggccagagcaagagaguggacuuuugcggcaagggcuaccaccugaugagcuucccucagucugccccucacggcgugguguuucugcacgugacauaugugcccgcucaagagaagaauuucaccaccgcuccagccaucugccacgacggcaaagcccacuuuccuagagaaggcguguucguguccaacggcacccauugguucgugacacagcggaacuucuacgagccccagaucaucaccaccgacaacaccuucgugucuggcaacugcgacguugugaucggcauugugaacaauaccguguacgacccucugcagcccgagcuggacagcuucaaagaggaacuggacaaguacuuuaagaaccacacaagccccgacguggaccugggcgauaucagcggaaucaaugccagcgucgugaacauccagaaagagaucgaccggcugaacgagguggccaagaaucugaacgagagccugaucgaccugcaagaacuggggaaguacgagcaguacaucaaguggcccugguacaucuggcugggcuuuaucgccggacugauugccaucgugauggucacaaucaugcuguguugcaugaccagcugcuguagcugccugaagggcuguuguagcuguggcagcugcugcaaguucgacgaggacgauucugagcccgugcugaagggcgugaaacugcacuacaccugaggacuagucccuguucccagagcccacuuuuuuuucuuuuuuugaaauaaaauagccugucuuucagaucuaaaaaaaaaaaaaaaaaaaaaaaaaaaaaaaaaaaaaaaaaaaaaaaaaaaaaaaaaaaaaaaaaaaaaaaaaaaaaaaaaaaaaaaaaaaaaaaaaaaa

SEQ ID NO: 24802 - RNA, 4070 nt, Artificial Sequence
  SARS-CoV-2/Wuhan/WIV05/2019__EPI_ISL_402128 spike protein mRNA gc mod (1-1273)(D614G)
aggagagucccgcagucggcguccagcggcucugcuuguucgugugugugucguugcaggccuuauucaagcuuaccauguucguguuucuggugcugcugccccugguguccagccagugugugaaccugaccaccagaacacagcugccuccagccuacaccaacagcuucaccagaggcguguacuaccccgacaagguguucagauccagcgugcugcacucuacccaggaccuguuccugccuuucuucagcaacgugaccugguuccacgccauccacguguccggcaccaauggcaccaagagauucgacaaccccgugcugcccuucaacgacgggguguacuuugccagcaccgagaaguccaacaucaucagaggcuggaucuucggcaccacacuggacagcaagacccagagccugcugaucgugaacaacgccaccaacguggucaucaaagugugcgaguuccaguucugcaacgaccccuuccugggcgucuacuaccacaagaacaacaagagcuggauggaaagcgaguuccggguguacagcagcgccaacaacugcaccuucgaguacgugucccagccuuuccugauggaccuggaaggcaagcagggcaacuucaagaaccugcgcgaguucguguucaagaacaucgacggcuacuucaaaaucuacagcaagcacaccccuaucaaccucgugcgggaucugccucagggcuucucugcucuggaaccccugguggaucugcccaucggcaucaacaucacccgguuucagacacugcuggcccugcacagaagcuaccugacaccuggcgauagcagcagcggauggacagcuggugccgccgcuuacuaugugggcuaccugcagccuagaaccuuccugcugaaguacaacgagaacggcaccaucaccgacgccguggauugugcucuggauccucugagcgagacaaagugcacccugaaguccuucaccguggaaaagggcaucuaccagaccagcaacuuccgggugcagcccaccgaauccaucgugcgguuccccaauaucaccaaucugugccccuucggcgagguguucaaugccaccagauucgccucuguguacgccuggaaccggaagcggaucagcaauugcguggccgacuacuccgugcuguacaacuccgccagcuucagcaccuucaagugcuacggcguguccccuaccaagcugaacgaccugugcuucacaaacguguacgccgacagcuucgugauccggggagaugaagugcggcagauugccccuggacagacaggcaagaucgccgacuacaacuacaagcugcccgacgacuucaccggcugugugauugccuggaacagcaacaaccuggacuccaaagucggcggcaacuacaauuaccuguaccggcuguuccggaaguccaaucugaagcccuucgagcgggacaucagcaccgaaaucuaucaggccggcagcaccccuugcaacggcguggaaggcuucaacugcuacuucccacugcaguccuacggcuuucagcccacaaauggcgugggcuaucagcccuacagagugguggugcugagcuucgaacugcugcaugcuccugccacagugugcggcccuaagaaaagcaccaaucucgugaagaacaaaugcgugaacuucaacuucaacggccugaccggcaccggcgugcugacagagagcaacaagaaguuccugccauuccagcaguuuggccgggauaucgccgauaccacagacgccguuagagauccccagacacuggaaauccuggacaucaccccaugcagcuucggcggagugucugugaucaccccuggcaccaacaccagcaaucagguggcagugcuguaccagggcgugaacuguaccgaagugcccguggccauucacgccgaucagcugacaccuacauggcggguguacuccaccggcagcaauguguuucagaccagagccggcugucugaucggagccgagcacgugaacaauagcuacgagugcgacauccccaucggcgcuggcaucugugccagcuaccagacacagacaaacagccccagacgggcuagaagcguggccagccagagcaucauugccuacacaaugucucugggcgccgagaacagcguggccuacuccaacaacucuaucgcuauccccaccaacuucaccaucagcgugaccaccgagauccugccuguguccaugaccaagaccagcguggacugcaccauguacaucugcggcgauuccaccgagugcuccaaccugcugcugcaguacggcagcuucugcacccagcugaauagagcccugacagggaucgccguggaacaggacaagaacacccaagagguguucgcccaagugaagcaaaucuacaagaccccuccuaucaaggacuucggcggcuucaauuucagccagauucugcccgauccuagcaagcccagcaagcggagcuucaucgaggaccugcuguucaacaaagugacacuggccgacgccggcuucaucaagcaguauggcgauugucugggcgacauugccgccagggaucugauuugcgcccagaaguuuaacggacugacagugcugccuccucugcugaccgaugagaugaucgcccaguacacaucugcccugcuggccggcacaaucacaagcggcuggacauuuggagcuggcgccgcucugcagauccccuuugcuaugcagauggccuaccgguucaacggcaucggagugacccagaaugugcuguacgagaaccagaagcugaucgccaaccaguucaacagcgccaucggcaagauccaggacagccugagcagcacagcaagcgcccugggaaagcugcaggacguggucaaccagaaugcccaggcacugaacacccuggucaagcagcuguccuccaacuucggcgccaucagcucugugcugaacgauauccugagcagacuggacaaggucgaggccgaggugcagaucgacagacugaucacaggcagacugcagagccuccagacauacgugacccagcagcugaucagagccgccgagauuagagccucugccaaucuggccgccaccaagaugucugagugugugcugggccagagcaagagaguggacuuuugcggcaagggcuaccaccugaugagcuucccucagucugccccucacggcgugguguuucugcacgugacauaugugcccgcucaagagaagaauuucaccaccgcuccagccaucugccacgacggcaaagcccacuuuccuagagaaggcguguucguguccaacggcacccauugguucgugacacagcggaacuucuacgagccccagaucaucaccaccgacaacaccuucgugucuggcaacugcgacguugugaucggcauugugaacaauaccguguacgacccucugcagcccgagcuggacagcuucaaagaggaacuggacaaguacuuuaagaaccacacaagccccgacguggaccugggcgauaucagcggaaucaaugccagcgucgugaacauccagaaagagaucgaccggcugaacgagguggccaagaaucugaacgagagccugaucgaccugcaagaacuggggaaguacgagcaguacaucaaguggcccugguacaucuggcugggcuuuaucgccggacugauugccaucgugauggucacaaucaugcuguguugcaugaccagcugcuguagcugccugaagggcuguuguagcuguggcagcugcugcaaguucgacgaggacgauucugagcccgugcugaagggcgugaaacugcacuacaccugaggacuagucccuguucccagagcccacuuuuuuuucuuuuuuugaaauaaaauagccugucuuucagaucuaaaaaaaaaaaaaaaaaaaaaaaaaaaaaaaaaaaaaaaaaaaaaaaaaaaaaaaaaaaaaaaaaaaaaaaaaaaaaaaaaaaaaaaaaaaaaaaaaaaa

SEQ ID NO: 24803 - RNA, 4070 nt, Artificial Sequence
  SARS-CoV-2/Wuhan/WIV05/2019__EPI_ISL_402128 spike protein mRNA gc mod (1-1273)(A222V_D614G)
aggagagucccgcagucggcguccagcggcucugcuuguucgugugugugucguugcaggccuuauucaagcuuaccauguucguguuucuggugcugcugccccugguguccagccagugugugaaccugaccaccagaacacagcugccuccagccuacaccaacagcuucaccagaggcguguacuaccccgacaagguguucagauccagcgugcugcacucuacccaggaccuguuccugccuuucuucagcaacgugaccugguuccacgccauccacguguccggcaccaauggcaccaagagauucgacaaccccgugcugcccuucaacgacgggguguacuuugccagcaccgagaaguccaacaucaucagaggcuggaucuucggcaccacacuggacagcaagacccagagccugcugaucgugaacaacgccaccaacguggucaucaaagugugcgaguuccaguucugcaacgaccccuuccugggcgucuacuaccacaagaacaacaagagcuggauggaaagcgaguuccggguguacagcagcgccaacaacugcaccuucgaguacgugucccagccuuuccugauggaccuggaaggcaagcagggcaacuucaagaaccugcgcgaguucguguucaagaacaucgacggcuacuucaaaaucuacagcaagcacaccccuaucaaccucgugcgggaucugccucagggcuucucugugcuggaaccccugguggaucugcccaucggcaucaacaucacccgguuucagacacugcuggcccugcacagaagcuaccugacaccuggcgauagcagcagcggauggacagcuggugccgccgcuuacuaugugggcuaccugcagccuagaaccuuccugcugaaguacaacgagaacggcaccaucaccgacgccguggauugugcucuggauccucugagcgagacaaagugcacccugaaguccuucaccguggaaaagggcaucuaccagaccagcaacuuccgggugcagcccaccgaauccaucgugcgguuccccaauaucaccaaucugugccccuucggcgagguguucaaugccaccagauucgccucuguguacgccuggaaccggaagcggaucagcaauugcguggccgacuacuccgugcuguacaacuccgccagcuucagcaccuucaagugcuacggcguguccccuaccaagcugaacgaccugugcuucacaaacguguacgccgacagcuucgugauccggggagaugaagugcggcagauugccccuggacagacaggcaagaucgccgacuacaacuacaagcugcccgacgacuucaccggcugugugauugccuggaacagcaacaaccuggacuccaaagucggcggcaacuacaauuaccuguaccggcuguuccggaaguccaaucugaagcccuucgagcgggacaucagcaccgaaaucuaucaggccggcagcaccccuugcaacggcguggaaggcuucaacugcuacuucccacugcaguccuacggcuuucagcccacaaauggcgugggcuaucagcccuacagagugguggugcugagcuucgaacugcugcaugcuccugccacagugugcggcccuaagaaaagcaccaaucucgugaagaacaaaugcgugaacuucaacuucaacggccugaccggcaccggcgugcugacagagagcaacaagaaguuccugccauuccagcaguuuggccgggauaucgccgauaccacagacgccguuagagauccccagacacuggaaauccuggacaucaccccaugcagcuucggcggagugucugugaucaccccuggcaccaacaccagcaaucagguggcagugcuguaccagggcgugaacuguaccgaagugcccguggccauucacgccgaucagcugacaccuacauggcggguguacuccaccggcagcaauguguuucagaccagagccggcugucugaucggagccgagcacgugaacaauagcuacgagugcgacauccccaucggcgcuggcaucugugccagcuaccagacacagacaaacagccccagacgggcuagaagcguggccagccagagcaucauugccuacacaaugucucugggcgccgagaacagcguggccuacuccaacaacucuaucgcuauccccaccaacuucaccaucagcgugaccaccgagauccugccuguguccaugaccaagaccagcguggacugcaccauguacaucugcggcgauuccaccgagugcuccaaccugcugcugcaguacggcagcuucugcacccagcugaauagagcccugacagggaucgccguggaacaggacaagaacacccaagagguguucgcccaagugaagcaaaucuacaagaccccuccuaucaaggacuucggcggcuucaauuucagccagauucugcccgauccuagcaagcccagcaagcggagcuucaucgaggaccugcuguucaacaaagugacacuggccgacgccggcuucaucaagcaguauggcgauugucugggcgacauugccgccagggaucugauuugcgcccagaaguuuaacggacugacagugcugccuccucugcugaccgaugagaugaucgcccaguacacaucugcccugcuggccggcacaaucacaagcggcuggacauuuggagcuggcgccgcucugcagauccccuuugcuaugcagauggccuaccgguucaacggcaucggagugacccagaaugugcuguacgagaaccagaagcugaucgccaaccaguucaacagcgccaucggcaagauccaggacagccugagcagcacagcaagcgcccugggaaagcugcaggacguggucaaccagaaugcccaggcacugaacacccuggucaagcagcuguccuccaacuucggcgccaucagcucugugcugaacgauauccugagcagacuggacaaggucgaggccgaggugcagaucgacagacugaucacaggcagacugcagagccuccagacauacgugacccagcagcugaucagagccgccgagauuagagccucugccaaucuggccgccaccaagaugucugagugugugcugggccagagcaagagaguggacuuuugcggcaagggcuaccaccugaugagcuucccucagucugccccucacggcgugguguuucugcacgugacauaugugcccgcucaagagaagaauuucaccaccgcuccagccaucugccacgacggcaaagcccacuuuccuagagaaggcguguucguguccaacggcacccauugguucgugacacagcggaacuucuacgagccccagaucaucaccaccgacaacaccuucgugucuggcaacugcgacguugugaucggcauugugaacaauaccguguacgacccucugcagcccgagcuggacagcuucaaagaggaacuggacaaguacuuuaagaaccacacaagccccgacguggaccugggcgauaucagcggaaucaaugccagcgucgugaacauccagaaagagaucgaccggcugaacgagguggccaagaaucugaacgagagccugaucgaccugcaagaacuggggaaguacgagcaguacaucaaguggcccugguacaucuggcugggcuuuaucgccggacugauugccaucgugauggucacaaucaugcuguguugcaugaccagcugcuguagcugccugaagggcuguuguagcuguggcagcugcugcaaguucgacgaggacgauucugagcccgugcugaagggcgugaaacugcacuacaccugaggacuagucccuguucccagagcccacuuuuuuuucuuuuuuugaaauaaaauagccugucuuucagaucuaaaaaaaaaaaaaaaaaaaaaaaaaaaaaaaaaaaaaaaaaaaaaaaaaaaaaaaaaaaaaaaaaaaaaaaaaaaaaaaaaaaaaaaaaaaaaaaaaaaa

SEQ ID NO: 24804 - RNA, 4070 nt, Artificial Sequence
  SARS-CoV-2/Wuhan/WIV05/2019__EPI_ISL_402128 spike protein mRNA gc mod (1-1273)(N439K_D614G)
aggagagucccgcagucggcguccagcggcucugcuuguucgugugugugucguugcaggccuuauucaagcuuaccauguucguguuucuggugcugcugccccugguguccagccagugugugaaccugaccaccagaacacagcugccuccagccuacaccaacagcuucaccagaggcguguacuaccccgacaagguguucagauccagcgugcugcacucuacccaggaccuguuccugccuuucuucagcaacgugaccugguuccacgccauccacguguccggcaccaauggcaccaagagauucgacaaccccgugcugcccuucaacgacgggguguacuuugccagcaccgagaaguccaacaucaucagaggcuggaucuucggcaccacacuggacagcaagacccagagccugcugaucgugaacaacgccaccaacguggucaucaaagugugcgaguuccaguucugcaacgaccccuuccugggcgucuacuaccacaagaacaacaagagcuggauggaaagcgaguuccggguguacagcagcgccaacaacugcaccuucgaguacgugucccagccuuuccugauggaccuggaaggcaagcagggcaacuucaagaaccugcgcgaguucguguucaagaacaucgacggcuacuucaaaaucuacagcaagcacaccccuaucaaccucgugcgggaucugccucagggcuucucugcucuggaaccccugguggaucugcccaucggcaucaacaucacccgguuucagacacugcuggcccugcacagaagcuaccugacaccuggcgauagcagcagcggauggacagcuggugccgccgcuuacuaugugggcuaccugcagccuagaaccuuccugcugaaguacaacgagaacggcaccaucaccgacgccguggauugugcucuggauccucugagcgagacaaagugcacccugaaguccuucaccguggaaaagggcaucuaccagaccagcaacuuccgggugcagcccaccgaauccaucgugcgguuccccaauaucaccaaucugugccccuucggcgagguguucaaugccaccagauucgccucuguguacgccuggaaccggaagcggaucagcaauugcguggccgacuacuccgugcuguacaacuccgccagcuucagcaccuucaagugcuacggcguguccccuaccaagcugaacgaccugugcuucacaaacguguacgccgacagcuucgugauccggggagaugaagugcggcagauugccccuggacagacaggcaagaucgccgacuacaacuacaagcugcccgacgacuucaccggcugugugauugccuggaacagcaagaaccuggacuccaaagucggcggcaacuacaauuaccuguaccggcuguuccggaaguccaaucugaagcccuucgagcgggacaucagcaccgaaaucuaucaggccggcagcaccccuugcaacggcguggaaggcuucaacugcuacuucccacugcaguccuacggcuuucagcccacaaauggcgugggcuaucagcccuacagagugguggugcugagcuucgaacugcugcaugcuccugccacagugugcggcccuaagaaaagcaccaaucucgugaagaacaaaugcgugaacuucaacuucaacggccugaccggcaccggcgugcugacagagagcaacaagaaguuccugccauuccagcaguuuggccgggauaucgccgauaccacagacgccguuagagauccccagacacuggaaauccuggacaucaccccaugcagcuucggcggagugucugugaucaccccuggcaccaacaccagcaaucagguggcagugcuguaccagggcgugaacuguaccgaagugcccguggccauucacgccgaucagcugacaccuacauggcggguguacuccaccggcagcaauguguuucagaccagagccggcugucugaucggagccgagcacgugaacaauagcuacgagugcgacauccccaucggcgcuggcaucugugccagcuaccagacacagacaaacagccccagacgggcuagaagcguggccagccagagcaucauugccuacacaaugucucugggcgccgagaacagcguggccuacuccaacaacucuaucgcuauccccaccaacuucaccaucagcgugaccaccgagauccugccuguguccaugaccaagaccagcguggacugcaccauguacaucugcggcgauuccaccgagugcuccaaccugcugcugcaguacggcagcuucugcacccagcugaauagagcccugacagggaucgccguggaacaggacaagaacacccaagagguguucgcccaagugaagcaaaucuacaagaccccuccuaucaaggacuucggcggcuucaauuucagccagauucugcccgauccuagcaagcccagcaagcggagcuucaucgaggaccugcuguucaacaaagugacacuggccgacgccggcuucaucaagcaguauggcgauugucugggcgacauugccgccagggaucugauuugcgcccagaaguuuaacggacugacagugcugccuccucugcugaccgaugagaugaucgcccaguacacaucugcccugcuggccggcacaaucacaagcggcuggacauuuggagcuggcgccgcucugcagauccccuuugcuaugcagauggccuaccgguucaacggcaucggagugacccagaaugugcuguacgagaaccagaagcugaucgccaaccaguucaacagcgccaucggcaagauccaggacagccugagcagcacagcaagcgcccugggaaagcugcaggacguggucaaccagaaugcccaggcacugaacacccuggucaagcagcuguccuccaacuucggcgccaucagcucugugcugaacgauauccugagcagacuggacaaggucgaggccgaggugcagaucgacagacugaucacaggcagacugcagagccuccagacauacgugacccagcagcugaucagagccgccgagauuagagccucugccaaucuggccgccaccaagaugucugagugugugcugggccagagcaagagaguggacuuuugcggcaagggcuaccaccugaugagcuucccucagucugccccucacggcgugguguuucugcacgugacauaugugcccgcucaagagaagaauuucaccaccgcuccagccaucugccacgacggcaaagcccacuuuccuagagaaggcguguucguguccaacggcacccauugguucgugacacagcggaacuucuacgagccccagaucaucaccaccgacaacaccuucgugucuggcaacugcgacguugugaucggcauugugaacaauaccguguacgacccucugcagcccgagcuggacagcuucaaagaggaacuggacaaguacuuuaagaaccacacaagccccgacguggaccugggcgauaucagcggaaucaaugccagcgucgugaacauccagaaagagaucgaccggcugaacgagguggccaagaaucugaacgagagccugaucgaccugcaagaacuggggaaguacgagcaguacaucaaguggcccugguacaucuggcugggcuuuaucgccggacugauugccaucgugauggucacaaucaugcuguguugcaugaccagcugcuguagcugccugaagggcuguuguagcuguggcagcugcugcaaguucgacgaggacgauucugagcccgugcugaagggcgugaaacugcacuacaccugaggacuagucccuguucccagagcccacuuuuuuuucuuuuuuugaaauaaaauagccugucuuucagaucuaaaaaaaaaaaaaaaaaaaaaaaaaaaaaaaaaaaaaaaaaaaaaaaaaaaaaaaaaaaaaaaaaaaaaaaaaaaaaaaaaaaaaaaaaaaaaaaaaaaa

SEQ ID NO: 24805 - RNA, 4070 nt, Artificial Sequence
  SARS-CoV-2/Wuhan/WIV05/2019__EPI_ISL_402128 spike protein mRNA gc mod (1-1273)(S477N_D614G)
aggagagucccgcagucggcguccagcggcucugcuuguucgugugugugucguugcaggccuuauucaagcuuaccauguucguguuucuggugcugcugccccugguguccagccagugugugaaccugaccaccagaacacagcugccuccagccuacaccaacagcuucaccagaggcguguacuaccccgacaagguguucagauccagcgugcugcacucuacccaggaccuguuccugccuuucuucagcaacgugaccugguuccacgccauccacguguccggcaccaauggcaccaagagauucgacaaccccgugcugcccuucaacgacgggguguacuuugccagcaccgagaaguccaacaucaucagaggcuggaucuucggcaccacacuggacagcaagacccagagccugcugaucgugaacaacgccaccaacguggucaucaaagugugcgaguuccaguucugcaacgaccccuuccugggcgucuacuaccacaagaacaacaagagcuggauggaaagcgaguuccggguguacagcagcgccaacaacugcaccuucgaguacgugucccagccuuuccugauggaccuggaaggcaagcagggcaacuucaagaaccugcgcgaguucguguucaagaacaucgacggcuacuucaaaaucuacagcaagcacaccccuaucaaccucgugcgggaucugccucagggcuucucugcucuggaaccccugguggaucugcccaucggcaucaacaucacccgguuucagacacugcuggcccugcacagaagcuaccugacaccuggcgauagcagcagcggauggacagcuggugccgccgcuuacuaugugggcuaccugcagccuagaaccuuccugcugaaguacaacgagaacggcaccaucaccgacgccguggauugugcucuggauccucugagcgagacaaagugcacccugaaguccuucaccguggaaaagggcaucuaccagaccagcaacuuccgggugcagcccaccgaauccaucgugcgguuccccaauaucaccaaucugugccccuucggcgagguguucaaugccaccagauucgccucuguguacgccuggaaccggaagcggaucagcaauugcguggccgacuacuccgugcuguacaacuccgccagcuucagcaccuucaagugcuacggcguguccccuaccaagcugaacgaccugugcuucacaaacguguacgccgacagcuucgugauccggggagaugaagugcggcagauugccccuggacagacaggcaagaucgccgacuacaacuacaagcugcccgacgacuucaccggcugugugauugccuggaacagcaacaaccuggacuccaaagucggcggcaacuacaauuaccuguaccggcuguuccggaaguccaaucugaagcccuucgagcgggacaucagcaccgaaaucuaucaggccggcaacaccccuugcaacggcguggaaggcuucaacugcuacuucccacugcaguccuacggcuuucagcccacaaauggcgugggcuaucagcccuacagagugguggugcugagcuucgaacugcugcaugcuccugccacagugugcggcccuaagaaaagcaccaaucucgugaagaacaaaugcgugaacuucaacuucaacggccugaccggcaccggcgugcugacagagagcaacaagaaguuccugccauuccagcaguuuggccgggauaucgccgauaccacagacgccguuagagauccccagacacuggaaauccuggacaucaccccaugcagcuucggcggagugucugugaucaccccuggcaccaacaccagcaaucagguggcagugcuguaccagggcgugaacuguaccgaagugcccguggccauucacgccgaucagcugacaccuacauggcggguguacuccaccggcagcaauguguuucagaccagagccggcugucugaucggagccgagcacgugaacaauagcuacgagugcgacauccccaucggcgcuggcaucugugccagcuaccagacacagacaaacagccccagacgggcuagaagcguggccagccagagcaucauugccuacacaaugucucugggcgccgagaacagcguggccuacuccaacaacucuaucgcuauccccaccaacuucaccaucagcgugaccaccgagauccugccuguguccaugaccaagaccagcguggacugcaccauguacaucugcggcgauuccaccgagugcuccaaccugcugcugcaguacggcagcuucugcacccagcugaauagagcccugacagggaucgccguggaacaggacaagaacacccaagagguguucgcccaagugaagcaaaucuacaagaccccuccuaucaaggacuucggcggcuucaauuucagccagauucugcccgauccuagcaagcccagcaagcggagcuucaucgaggaccugcuguucaacaaagugacacuggccgacgccggcuucaucaagcaguauggcgauugucugggcgacauugccgccagggaucugauuugcgcccagaaguuuaacggacugacagugcugccuccucugcugaccgaugagaugaucgcccaguacacaucugcccugcuggccggcacaaucacaagcggcuggacauuuggagcuggcgccgcucugcagauccccuuugcuaugcagauggccuaccgguucaacggcaucggagugacccagaaugugcuguacgagaaccagaagcugaucgccaaccaguucaacagcgccaucggcaagauccaggacagccugagcagcacagcaagcgcccugggaaagcugcaggacguggucaaccagaaugcccaggcacugaacacccuggucaagcagcuguccuccaacuucggcgccaucagcucugugcugaacgauauccugagcagacuggacaaggucgaggccgaggugcagaucgacagacugaucacaggcagacugcagagccuccagacauacgugacccagcagcugaucagagccgccgagauuagagccucugccaaucuggccgccaccaagaugucugagugugugcugggccagagcaagagaguggacuuuugcggcaagggcuaccaccugaugagcuucccucagucugccccucacggcgugguguuucugcacgugacauaugugcccgcucaagagaagaauuucaccaccgcuccagccaucugccacgacggcaaagcccacuuuccuagagaaggcguguucguguccaacggcacccauugguucgugacacagcggaacuucuacgagccccagaucaucaccaccgacaacaccuucgugucuggcaacugcgacguugugaucggcauugugaacaauaccguguacgacccucugcagcccgagcuggacagcuucaaagaggaacuggacaaguacuuuaagaaccacacaagccccgacguggaccugggcgauaucagcggaaucaaugccagcgucgugaacauccagaaagagaucgaccggcugaacgagguggccaagaaucugaacgagagccugaucgaccugcaagaacuggggaaguacgagcaguacaucaaguggcccugguacaucuggcugggcuuuaucgccggacugauugccaucgugauggucacaaucaugcuguguugcaugaccagcugcuguagcugccugaagggcuguuguagcuguggcagcugcugcaaguucgacgaggacgauucugagcccgugcugaagggcgugaaacugcacuacaccugaggacuagucccuguucccagagcccacuuuuuuuucuuuuuuugaaauaaaauagccugucuuucagaucuaaaaaaaaaaaaaaaaaaaaaaaaaaaaaaaaaaaaaaaaaaaaaaaaaaaaaaaaaaaaaaaaaaaaaaaaaaaaaaaaaaaaaaaaaaaaaaaaaaaa

SEQ ID NO: 24806 - RNA, 4070 nt, Artificial Sequence
  SARS-CoV-2/Wuhan/WIV05/2019__EPI_ISL_402128 spike protein mRNA gc mod (1-1273)(N501Y_D614G)
aggagagucccgcagucggcguccagcggcucugcuuguucgugugugugucguugcaggccuuauucaagcuuaccauguucguguuucuggugcugcugccccugguguccagccagugugugaaccugaccaccagaacacagcugccuccagccuacaccaacagcuucaccagaggcguguacuaccccgacaagguguucagauccagcgugcugcacucuacccaggaccuguuccugccuuucuucagcaacgugaccugguuccacgccauccacguguccggcaccaauggcaccaagagauucgacaaccccgugcugcccuucaacgacgggguguacuuugccagcaccgagaaguccaacaucaucagaggcuggaucuucggcaccacacuggacagcaagacccagagccugcugaucgugaacaacgccaccaacguggucaucaaagugugcgaguuccaguucugcaacgaccccuuccugggcgucuacuaccacaagaacaacaagagcuggauggaaagcgaguuccggguguacagcagcgccaacaacugcaccuucgaguacgugucccagccuuuccugauggaccuggaaggcaagcagggcaacuucaagaaccugcgcgaguucguguucaagaacaucgacggcuacuucaaaaucuacagcaagcacaccccuaucaaccucgugcgggaucugccucagggcuucucugcucuggaaccccugguggaucugcccaucggcaucaacaucacccgguuucagacacugcuggcccugcacagaagcuaccugacaccuggcgauagcagcagcggauggacagcuggugccgccgcuuacuaugugggcuaccugcagccuagaaccuuccugcugaaguacaacgagaacggcaccaucaccgacgccguggauugugcucuggauccucugagcgagacaaagugcacccugaaguccuucaccguggaaaagggcaucuaccagaccagcaacuuccgggugcagcccaccgaauccaucgugcgguuccccaauaucaccaaucugugccccuucggcgagguguucaaugccaccagauucgccucuguguacgccuggaaccggaagcggaucagcaauugcguggccgacuacuccgugcuguacaacuccgccagcuucagcaccuucaagugcuacggcguguccccuaccaagcugaacgaccugugcuucacaaacguguacgccgacagcuucgugauccggggagaugaagugcggcagauugccccuggacagacaggcaagaucgccgacuacaacuacaagcugcccgacgacuucaccggcugugugauugccuggaacagcaacaaccuggacuccaaagucggcggcaacuacaauuaccuguaccggcuguuccggaaguccaaucugaagcccuucgagcgggacaucagcaccgaaaucuaucaggccggcagcaccccuugcaacggcguggaaggcuucaacugcuacuucccacugcaguccuacggcuuucagcccacauacggcgugggcuaucagcccuacagagugguggugcugagcuucgaacugcugcaugcuccugccacagugugcggcccuaagaaaagcaccaaucucgugaagaacaaaugcgugaacuucaacuucaacggccugaccggcaccggcgugcugacagagagcaacaagaaguuccugccauuccagcaguuuggccgggauaucgccgauaccacagacgccguuagagauccccagacacuggaaauccuggacaucaccccaugcagcuucggcggagugucugugaucaccccuggcaccaacaccagcaaucagguggcagugcuguaccagggcgugaacuguaccgaagugcccguggccauucacgccgaucagcugacaccuacauggcggguguacuccaccggcagcaauguguuucagaccagagccggcugucugaucggagccgagcacgugaacaauagcuacgagugcgacauccccaucggcgcuggcaucugugccagcuaccagacacagacaaacagccccagacgggcuagaagcguggccagccagagcaucauugccuacacaaugucucugggcgccgagaacagcguggccuacuccaacaacucuaucgcuauccccaccaacuucaccaucagcgugaccaccgagauccugccuguguccaugaccaagaccagcguggacugcaccauguacaucugcggcgauuccaccgagugcuccaaccugcugcugcaguacggcagcuucugcacccagcugaauagagcccugacagggaucgccguggaacaggacaagaacacccaagagguguucgcccaagugaagcaaaucuacaagaccccuccuaucaaggacuucggcggcuucaauuucagccagauucugcccgauccuagcaagcccagcaagcggagcuucaucgaggaccugcuguucaacaaagugacacuggccgacgccggcuucaucaagcaguauggcgauugucugggcgacauugccgccagggaucugauuugcgcccagaaguuuaacggacugacagugcugccuccucugcugaccgaugagaugaucgcccaguacacaucugcccugcuggccggcacaaucacaagcggcuggacauuuggagcuggcgccgcucugcagauccccuuugcuaugcagauggccuaccgguucaacggcaucggagugacccagaaugugcuguacgagaaccagaagcugaucgccaaccaguucaacagcgccaucggcaagauccaggacagccugagcagcacagcaagcgcccugggaaagcugcaggacguggucaaccagaaugcccaggcacugaacacccuggucaagcagcuguccuccaacuucggcgccaucagcucugugcugaacgauauccugagcagacuggacaaggucgaggccgaggugcagaucgacagacugaucacaggcagacugcagagccuccagacauacgugacccagcagcugaucagagccgccgagauuagagccucugccaaucuggccgccaccaagaugucugagugugugcugggccagagcaagagaguggacuuuugcggcaagggcuaccaccugaugagcuucccucagucugccccucacggcgugguguuucugcacgugacauaugugcccgcucaagagaagaauuucaccaccgcuccagccaucugccacgacggcaaagcccacuuuccuagagaaggcguguucguguccaacggcacccauugguucgugacacagcggaacuucuacgagccccagaucaucaccaccgacaacaccuucgugucuggcaacugcgacguugugaucggcauugugaacaauaccguguacgacccucugcagcccgagcuggacagcuucaaagaggaacuggacaaguacuuuaagaaccacacaagccccgacguggaccugggcgauaucagcggaaucaaugccagcgucgugaacauccagaaagagaucgaccggcugaacgagguggccaagaaucugaacgagagccugaucgaccugcaagaacuggggaaguacgagcaguacaucaaguggcccugguacaucuggcugggcuuuaucgccggacugauugccaucgugauggucacaaucaugcuguguugcaugaccagcugcuguagcugccugaagggcuguuguagcuguggcagcugcugcaaguucgacgaggacgauucugagcccgugcugaagggcgugaaacugcacuacaccugaggacuagucccuguucccagagcccacuuuuuuuucuuuuuuugaaauaaaauagccugucuuucagaucuaaaaaaaaaaaaaaaaaaaaaaaaaaaaaaaaaaaaaaaaaaaaaaaaaaaaaaaaaaaaaaaaaaaaaaaaaaaaaaaaaaaaaaaaaaaaaaaaaaaa

SEQ ID NO: 24807 - RNA, 4064 nt, Artificial Sequence
  SARS-CoV-2/Wuhan/WIV05/2019__EPI_ISL_402128 spike protein mRNA gc mod (1-1273)(H69del_V70del_D614G)
aggagagucccgcagucggcguccagcggcucugcuuguucgugugugugucguugcaggccuuauucaagcuuaccauguucguguuucuggugcugcugccccugguguccagccagugugugaaccugaccaccagaacacagcugccuccagccuacaccaacagcuucaccagaggcguguacuaccccgacaagguguucagauccagcgugcugcacucuacccaggaccuguuccugccuuucuucagcaacgugaccugguuccacgccaucuccggcaccaauggcaccaagagauucgacaaccccgugcugcccuucaacgacgggguguacuuugccagcaccgagaaguccaacaucaucagaggcuggaucuucggcaccacacuggacagcaagacccagagccugcugaucgugaacaacgccaccaacguggucaucaaagugugcgaguuccaguucugcaacgaccccuuccugggcgucuacuaccacaagaacaacaagagcuggauggaaagcgaguuccggguguacagcagcgccaacaacugcaccuucgaguacgugucccagccuuuccugauggaccuggaaggcaagcagggcaacuucaagaaccugcgcgaguucguguucaagaacaucgacggcuacuucaaaaucuacagcaagcacaccccuaucaaccucgugcgggaucugccucagggcuucucugcucuggaaccccugguggaucugcccaucggcaucaacaucacccgguuucagacacugcuggcccugcacagaagcuaccugacaccuggcgauagcagcagcggauggacagcuggugccgccgcuuacuaugugggcuaccugcagccuagaaccuuccugcugaaguacaacgagaacggcaccaucaccgacgccguggauugugcucuggauccucugagcgagacaaagugcacccugaaguccuucaccguggaaaagggcaucuaccagaccagcaacuuccgggugcagcccaccgaauccaucgugcgguuccccaauaucaccaaucugugccccuucggcgagguguucaaugccaccagauucgccucuguguacgccuggaaccggaagcggaucagcaauugcguggccgacuacuccgugcuguacaacuccgccagcuucagcaccuucaagugcuacggcguguccccuaccaagcugaacgaccugugcuucacaaacguguacgccgacagcuucgugauccggggagaugaagugcggcagauugccccuggacagacaggcaagaucgccgacuacaacuacaagcugcccgacgacuucaccggcugugugauugccuggaacagcaacaaccuggacuccaaagucggcggcaacuacaauuaccuguaccggcuguuccggaaguccaaucugaagcccuucgagcgggacaucagcaccgaaaucuaucaggccggcagcaccccuugcaacggcguggaaggcuucaacugcuacuucccacugcaguccuacggcuuucagcccacaaauggcgugggcuaucagcccuacagagugguggugcugagcuucgaacugcugcaugcuccugccacagugugcggcccuaagaaaagcaccaaucucgugaagaacaaaugcgugaacuucaacuucaacggccugaccggcaccggcgugcugacagagagcaacaagaaguuccugccauuccagcaguuuggccgggauaucgccgauaccacagacgccguuagagauccccagacacuggaaauccuggacaucaccccaugcagcuucggcggagugucugugaucaccccuggcaccaacaccagcaaucagguggcagugcuguaccagggcgugaacuguaccgaagugcccguggccauucacgccgaucagcugacaccuacauggcggguguacuccaccggcagcaauguguuucagaccagagccggcugucugaucggagccgagcacgugaacaauagcuacgagugcgacauccccaucggcgcuggcaucugugccagcuaccagacacagacaaacagccccagacgggcuagaagcguggccagccagagcaucauugccuacacaaugucucugggcgccgagaacagcguggccuacuccaacaacucuaucgcuauccccaccaacuucaccaucagcgugaccaccgagauccugccuguguccaugaccaagaccagcguggacugcaccauguacaucugcggcgauuccaccgagugcuccaaccugcugcugcaguacggcagcuucugcacccagcugaauagagcccugacagggaucgccguggaacaggacaagaacacccaagagguguucgcccaagugaagcaaaucuacaagaccccuccuaucaaggacuucggcggcuucaauuucagccagauucugcccgauccuagcaagcccagcaagcggagcuucaucgaggaccugcuguucaacaaagugacacuggccgacgccggcuucaucaagcaguauggcgauugucugggcgacauugccgccagggaucugauuugcgcccagaaguuuaacggacugacagugcugccuccucugcugaccgaugagaugaucgcccaguacacaucugcccugcuggccggcacaaucacaagcggcuggacauuuggagcuggcgccgcucugcagauccccuuugcuaugcagauggccuaccgguucaacggcaucggagugacccagaaugugcuguacgagaaccagaagcugaucgccaaccaguucaacagcgccaucggcaagauccaggacagccugagcagcacagcaagcgcccugggaaagcugcaggacguggucaaccagaaugcccaggcacugaacacccuggucaagcagcuguccuccaacuucggcgccaucagcucugugcugaacgauauccugagcagacuggacaaggucgaggccgaggugcagaucgacagacugaucacaggcagacugcagagccuccagacauacgugacccagcagcugaucagagccgccgagauuagagccucugccaaucuggccgccaccaagaugucugagugugugcugggccagagcaagagaguggacuuuugcggcaagggcuaccaccugaugagcuucccucagucugccccucacggcgugguguuucugcacgugacauaugugcccgcucaagagaagaauuucaccaccgcuccagccaucugccacgacggcaaagcccacuuuccuagagaaggcguguucguguccaacggcacccauugguucgugacacagcggaacuucuacgagccccagaucaucaccaccgacaacaccuucgugucuggcaacugcgacguugugaucggcauugugaacaauaccguguacgacccucugcagcccgagcuggacagcuucaaagaggaacuggacaaguacuuuaagaaccacacaagccccgacguggaccugggcgauaucagcggaaucaaugccagcgucgugaacauccagaaagagaucgaccggcugaacgagguggccaagaaucugaacgagagccugaucgaccugcaagaacuggggaaguacgagcaguacaucaaguggcccugguacaucuggcugggcuuuaucgccggacugauugccaucgugauggucacaaucaugcuguguugcaugaccagcugcuguagcugccugaagggcuguuguagcuguggcagcugcugcaaguucgacgaggacgauucugagcccgugcugaagggcgugaaacugcacuacaccugaggacuagucccuguucccagagcccacuuuuuuuucuuuuuuugaaauaaaauagccugucuuucagaucuaaaaaaaaaaaaaaaaaaaaaaaaaaaaaaaaaaaaaaaaaaaaaaaaaaaaaaaaaaaaaaaaaaaaaaaaaaaaaaaaaaaaaaaaaaaaaaaaaaaa

SEQ ID NO: 24808 - RNA, 4070 nt, Artificial Sequence
  SARS-CoV-2/Wuhan/WIV05/2019__EPI_ISL_402128 spike protein mRNA gc mod (1-1273)(Y453F_D614G)
aggagagucccgcagucggcguccagcggcucugcuuguucgugugugugucguugcaggccuuauucaagcuuaccauguucguguuucuggugcugcugccccugguguccagccagugugugaaccugaccaccagaacacagcugccuccagccuacaccaacagcuucaccagaggcguguacuaccccgacaagguguucagauccagcgugcugcacucuacccaggaccuguuccugccuuucuucagcaacgugaccugguuccacgccauccacguguccggcaccaauggcaccaagagauucgacaaccccgugcugcccuucaacgacgggguguacuuugccagcaccgagaaguccaacaucaucagaggcuggaucuucggcaccacacuggacagcaagacccagagccugcugaucgugaacaacgccaccaacguggucaucaaagugugcgaguuccaguucugcaacgaccccuuccugggcgucuacuaccacaagaacaacaagagcuggauggaaagcgaguuccggguguacagcagcgccaacaacugcaccuucgaguacgugucccagccuuuccugauggaccuggaaggcaagcagggcaacuucaagaaccugcgcgaguucguguucaagaacaucgacggcuacuucaaaaucuacagcaagcacaccccuaucaaccucgugcgggaucugccucagggcuucucugcucuggaaccccugguggaucugcccaucggcaucaacaucacccgguuucagacacugcuggcccugcacagaagcuaccugacaccuggcgauagcagcagcggauggacagcuggugccgccgcuuacuaugugggcuaccugcagccuagaaccuuccugcugaaguacaacgagaacggcaccaucaccgacgccguggauugugcucuggauccucugagcgagacaaagugcacccugaaguccuucaccguggaaaagggcaucuaccagaccagcaacuuccgggugcagcccaccgaauccaucgugcgguuccccaauaucaccaaucugugccccuucggcgagguguucaaugccaccagauucgccucuguguacgccuggaaccggaagcggaucagcaauugcguggccgacuacuccgugcuguacaacuccgccagcuucagcaccuucaagugcuacggcguguccccuaccaagcugaacgaccugugcuucacaaacguguacgccgacagcuucgugauccggggagaugaagugcggcagauugccccuggacagacaggcaagaucgccgacuacaacuacaagcugcccgacgacuucaccggcugugugauugccuggaacagcaacaaccuggacuccaaagucggcggcaacuacaauuaccuguuccggcuguuccggaaguccaaucugaagcccuucgagcgggacaucagcaccgaaaucuaucaggccggcagcaccccuugcaacggcguggaaggcuucaacugcuacuucccacugcaguccuacggcuuucagcccacaaauggcgugggcuaucagcccuacagagugguggugcugagcuucgaacugcugcaugcuccugccacagugugcggcccuaagaaaagcaccaaucucgugaagaacaaaugcgugaacuucaacuucaacggccugaccggcaccggcgugcugacagagagcaacaagaaguuccugccauuccagcaguuuggccgggauaucgccgauaccacagacgccguuagagauccccagacacuggaaauccuggacaucaccccaugcagcuucggcggagugucugugaucaccccuggcaccaacaccagcaaucagguggcagugcuguaccagggcgugaacuguaccgaagugcccguggccauucacgccgaucagcugacaccuacauggcggguguacuccaccggcagcaauguguuucagaccagagccggcugucugaucggagccgagcacgugaacaauagcuacgagugcgacauccccaucggcgcuggcaucugugccagcuaccagacacagacaaacagccccagacgggcuagaagcguggccagccagagcaucauugccuacacaaugucucugggcgccgagaacagcguggccuacuccaacaacucuaucgcuauccccaccaacuucaccaucagcgugaccaccgagauccugccuguguccaugaccaagaccagcguggacugcaccauguacaucugcggcgauuccaccgagugcuccaaccugcugcugcaguacggcagcuucugcacccagcugaauagagcccugacagggaucgccguggaacaggacaagaacacccaagagguguucgcccaagugaagcaaaucuacaagaccccuccuaucaaggacuucggcggcuucaauuucagccagauucugcccgauccuagcaagcccagcaagcggagcuucaucgaggaccugcuguucaacaaagugacacuggccgacgccggcuucaucaagcaguauggcgauugucugggcgacauugccgccagggaucugauuugcgcccagaaguuuaacggacugacagugcugccuccucugcugaccgaugagaugaucgcccaguacacaucugcccugcuggccggcacaaucacaagcggcuggacauuuggagcuggcgccgcucugcagauccccuuugcuaugcagauggccuaccgguucaacggcaucggagugacccagaaugugcuguacgagaaccagaagcugaucgccaaccaguucaacagcgccaucggcaagauccaggacagccugagcagcacagcaagcgcccugggaaagcugcaggacguggucaaccagaaugcccaggcacugaacacccuggucaagcagcuguccuccaacuucggcgccaucagcucugugcugaacgauauccugagcagacuggacaaggucgaggccgaggugcagaucgacagacugaucacaggcagacugcagagccuccagacauacgugacccagcagcugaucagagccgccgagauuagagccucugccaaucuggccgccaccaagaugucugagugugugcugggccagagcaagagaguggacuuuugcggcaagggcuaccaccugaugagcuucccucagucugccccucacggcgugguguuucugcacgugacauaugugcccgcucaagagaagaauuucaccaccgcuccagccaucugccacgacggcaaagcccacuuuccuagagaaggcguguucguguccaacggcacccauugguucgugacacagcggaacuucuacgagccccagaucaucaccaccgacaacaccuucgugucuggcaacugcgacguugugaucggcauugugaacaauaccguguacgacccucugcagcccgagcuggacagcuucaaagaggaacuggacaaguacuuuaagaaccacacaagccccgacguggaccugggcgauaucagcggaaucaaugccagcgucgugaacauccagaaagagaucgaccggcugaacgagguggccaagaaucugaacgagagccugaucgaccugcaagaacuggggaaguacgagcaguacaucaaguggcccugguacaucuggcugggcuuuaucgccggacugauugccaucgugauggucacaaucaugcuguguugcaugaccagcugcuguagcugccugaagggcuguuguagcuguggcagcugcugcaaguucgacgaggacgauucugagcccgugcugaagggcgugaaacugcacuacaccugaggacuagucccuguucccagagcccacuuuuuuuucuuuuuuugaaauaaaauagccugucuuucagaucuaaaaaaaaaaaaaaaaaaaaaaaaaaaaaaaaaaaaaaaaaaaaaaaaaaaaaaaaaaaaaaaaaaaaaaaaaaaaaaaaaaaaaaaaaaaaaaaaaaaa

SEQ ID NO: 24809 - RNA, 4070 nt, Artificial Sequence
  SARS-CoV-2/Wuhan/WIV05/2019__EPI_ISL_402128 spike protein mRNA gc mod (1-1273)(D614G_I692V)
aggagagucccgcagucggcguccagcggcucugcuuguucgugugugugucguugcaggccuuauucaagcuuaccauguucguguuucuggugcugcugccccugguguccagccagugugugaaccugaccaccagaacacagcugccuccagccuacaccaacagcuucaccagaggcguguacuaccccgacaagguguucagauccagcgugcugcacucuacccaggaccuguuccugccuuucuucagcaacgugaccugguuccacgccauccacguguccggcaccaauggcaccaagagauucgacaaccccgugcugcccuucaacgacgggguguacuuugccagcaccgagaaguccaacaucaucagaggcuggaucuucggcaccacacuggacagcaagacccagagccugcugaucgugaacaacgccaccaacguggucaucaaagugugcgaguuccaguucugcaacgaccccuuccugggcgucuacuaccacaagaacaacaagagcuggauggaaagcgaguuccggguguacagcagcgccaacaacugcaccuucgaguacgugucccagccuuuccugauggaccuggaaggcaagcagggcaacuucaagaaccugcgcgaguucguguucaagaacaucgacggcuacuucaaaaucuacagcaagcacaccccuaucaaccucgugcgggaucugccucagggcuucucugcucuggaaccccugguggaucugcccaucggcaucaacaucacccgguuucagacacugcuggcccugcacagaagcuaccugacaccuggcgauagcagcagcggauggacagcuggugccgccgcuuacuaugugggcuaccugcagccuagaaccuuccugcugaaguacaacgagaacggcaccaucaccgacgccguggauugugcucuggauccucugagcgagacaaagugcacccugaaguccuucaccguggaaaagggcaucuaccagaccagcaacuuccgggugcagcccaccgaauccaucgugcgguuccccaauaucaccaaucugugccccuucggcgagguguucaaugccaccagauucgccucuguguacgccuggaaccggaagcggaucagcaauugcguggccgacuacuccgugcuguacaacuccgccagcuucagcaccuucaagugcuacggcguguccccuaccaagcugaacgaccugugcuucacaaacguguacgccgacagcuucgugauccggggagaugaagugcggcagauugccccuggacagacaggcaagaucgccgacuacaacuacaagcugcccgacgacuucaccggcugugugauugccuggaacagcaacaaccuggacuccaaagucggcggcaacuacaauuaccuguaccggcuguuccggaaguccaaucugaagcccuucgagcgggacaucagcaccgaaaucuaucaggccggcagcaccccuugcaacggcguggaaggcuucaacugcuacuucccacugcaguccuacggcuuucagcccacaaauggcgugggcuaucagcccuacagagugguggugcugagcuucgaacugcugcaugcuccugccacagugugcggcccuaagaaaagcaccaaucucgugaagaacaaaugcgugaacuucaacuucaacggccugaccggcaccggcgugcugacagagagcaacaagaaguuccugccauuccagcaguuuggccgggauaucgccgauaccacagacgccguuagagauccccagacacuggaaauccuggacaucaccccaugcagcuucggcggagugucugugaucaccccuggcaccaacaccagcaaucagguggcagugcuguaccagggcgugaacuguaccgaagugcccguggccauucacgccgaucagcugacaccuacauggcggguguacuccaccggcagcaauguguuucagaccagagccggcugucugaucggagccgagcacgugaacaauagcuacgagugcgacauccccaucggcgcuggcaucugugccagcuaccagacacagacaaacagccccagacgggcuagaagcguggccagccagagcgugauugccuacacaaugucucugggcgccgagaacagcguggccuacuccaacaacucuaucgcuauccccaccaacuucaccaucagcgugaccaccgagauccugccuguguccaugaccaagaccagcguggacugcaccauguacaucugcggcgauuccaccgagugcuccaaccugcugcugcaguacggcagcuucugcacccagcugaauagagcccugacagggaucgccguggaacaggacaagaacacccaagagguguucgcccaagugaagcaaaucuacaagaccccuccuaucaaggacuucggcggcuucaauuucagccagauucugcccgauccuagcaagcccagcaagcggagcuucaucgaggaccugcuguucaacaaagugacacuggccgacgccggcuucaucaagcaguauggcgauugucugggcgacauugccgccagggaucugauuugcgcccagaaguuuaacggacugacagugcugccuccucugcugaccgaugagaugaucgcccaguacacaucugcccugcuggccggcacaaucacaagcggcuggacauuuggagcuggcgccgcucugcagauccccuuugcuaugcagauggccuaccgguucaacggcaucggagugacccagaaugugcuguacgagaaccagaagcugaucgccaaccaguucaacagcgccaucggcaagauccaggacagccugagcagcacagcaagcgcccugggaaagcugcaggacguggucaaccagaaugcccaggcacugaacacccuggucaagcagcuguccuccaacuucggcgccaucagcucugugcugaacgauauccugagcagacuggacaaggucgaggccgaggugcagaucgacagacugaucacaggcagacugcagagccuccagacauacgugacccagcagcugaucagagccgccgagauuagagccucugccaaucuggccgccaccaagaugucugagugugugcugggccagagcaagagaguggacuuuugcggcaagggcuaccaccugaugagcuucccucagucugccccucacggcgugguguuucugcacgugacauaugugcccgcucaagagaagaauuucaccaccgcuccagccaucugccacgacggcaaagcccacuuuccuagagaaggcguguucguguccaacggcacccauugguucgugacacagcggaacuucuacgagccccagaucaucaccaccgacaacaccuucgugucuggcaacugcgacguugugaucggcauugugaacaauaccguguacgacccucugcagcccgagcuggacagcuucaaagaggaacuggacaaguacuuuaagaaccacacaagccccgacguggaccugggcgauaucagcggaaucaaugccagcgucgugaacauccagaaagagaucgaccggcugaacgagguggccaagaaucugaacgagagccugaucgaccugcaagaacuggggaaguacgagcaguacaucaaguggcccugguacaucuggcugggcuuuaucgccggacugauugccaucgugauggucacaaucaugcuguguugcaugaccagcugcuguagcugccugaagggcuguuguagcuguggcagcugcugcaaguucgacgaggacgauucugagcccgugcugaagggcgugaaacugcacuacaccugaggacuagucccuguucccagagcccacuuuuuuuucuuuuuuugaaauaaaauagccugucuuucagaucuaaaaaaaaaaaaaaaaaaaaaaaaaaaaaaaaaaaaaaaaaaaaaaaaaaaaaaaaaaaaaaaaaaaaaaaaaaaaaaaaaaaaaaaaaaaaaaaaaaaa

SEQ ID NO: 24810 - RNA, 4070 nt, Artificial Sequence
  SARS-CoV-2/Wuhan/WIV05/2019__EPI_ISL_402128 spike protein mRNA gc mod (1-1273)(D614G_M1229I)
aggagagucccgcagucggcguccagcggcucugcuuguucgugugugugucguugcaggccuuauucaagcuuaccauguucguguuucuggugcugcugccccugguguccagccagugugugaaccugaccaccagaacacagcugccuccagccuacaccaacagcuucaccagaggcguguacuaccccgacaagguguucagauccagcgugcugcacucuacccaggaccuguuccugccuuucuucagcaacgugaccugguuccacgccauccacguguccggcaccaauggcaccaagagauucgacaaccccgugcugcccuucaacgacgggguguacuuugccagcaccgagaaguccaacaucaucagaggcuggaucuucggcaccacacuggacagcaagacccagagccugcugaucgugaacaacgccaccaacguggucaucaaagugugcgaguuccaguucugcaacgaccccuuccugggcgucuacuaccacaagaacaacaagagcuggauggaaagcgaguuccggguguacagcagcgccaacaacugcaccuucgaguacgugucccagccuuuccugauggaccuggaaggcaagcagggcaacuucaagaaccugcgcgaguucguguucaagaacaucgacggcuacuucaaaaucuacagcaagcacaccccuaucaaccucgugcgggaucugccucagggcuucucugcucuggaaccccugguggaucugcccaucggcaucaacaucacccgguuucagacacugcuggcccugcacagaagcuaccugacaccuggcgauagcagcagcggauggacagcuggugccgccgcuuacuaugugggcuaccugcagccuagaaccuuccugcugaaguacaacgagaacggcaccaucaccgacgccguggauugugcucuggauccucugagcgagacaaagugcacccugaaguccuucaccguggaaaagggcaucuaccagaccagcaacuuccgggugcagcccaccgaauccaucgugcgguuccccaauaucaccaaucugugccccuucggcgagguguucaaugccaccagauucgccucuguguacgccuggaaccggaagcggaucagcaauugcguggccgacuacuccgugcuguacaacuccgccagcuucagcaccuucaagugcuacggcguguccccuaccaagcugaacgaccugugcuucacaaacguguacgccgacagcuucgugauccggggagaugaagugcggcagauugccccuggacagacaggcaagaucgccgacuacaacuacaagcugcccgacgacuucaccggcugugugauugccuggaacagcaacaaccuggacuccaaagucggcggcaacuacaauuaccuguaccggcuguuccggaaguccaaucugaagcccuucgagcgggacaucagcaccgaaaucuaucaggccggcagcaccccuugcaacggcguggaaggcuucaacugcuacuucccacugcaguccuacggcuuucagcccacaaauggcgugggcuaucagcccuacagagugguggugcugagcuucgaacugcugcaugcuccugccacagugugcggcccuaagaaaagcaccaaucucgugaagaacaaaugcgugaacuucaacuucaacggccugaccggcaccggcgugcugacagagagcaacaagaaguuccugccauuccagcaguuuggccgggauaucgccgauaccacagacgccguuagagauccccagacacuggaaauccuggacaucaccccaugcagcuucggcggagugucugugaucaccccuggcaccaacaccagcaaucagguggcagugcuguaccagggcgugaacuguaccgaagugcccguggccauucacgccgaucagcugacaccuacauggcggguguacuccaccggcagcaauguguuucagaccagagccggcugucugaucggagccgagcacgugaacaauagcuacgagugcgacauccccaucggcgcuggcaucugugccagcuaccagacacagacaaacagccccagacgggcuagaagcguggccagccagagcaucauugccuacacaaugucucugggcgccgagaacagcguggccuacuccaacaacucuaucgcuauccccaccaacuucaccaucagcgugaccaccgagauccugccuguguccaugaccaagaccagcguggacugcaccauguacaucugcggcgauuccaccgagugcuccaaccugcugcugcaguacggcagcuucugcacccagcugaauagagcccugacagggaucgccguggaacaggacaagaacacccaagagguguucgcccaagugaagcaaaucuacaagaccccuccuaucaaggacuucggcggcuucaauuucagccagauucugcccgauccuagcaagcccagcaagcggagcuucaucgaggaccugcuguucaacaaagugacacuggccgacgccggcuucaucaagcaguauggcgauugucugggcgacauugccgccagggaucugauuugcgcccagaaguuuaacggacugacagugcugccuccucugcugaccgaugagaugaucgcccaguacacaucugcccugcuggccggcacaaucacaagcggcuggacauuuggagcuggcgccgcucugcagauccccuuugcuaugcagauggccuaccgguucaacggcaucggagugacccagaaugugcuguacgagaaccagaagcugaucgccaaccaguucaacagcgccaucggcaagauccaggacagccugagcagcacagcaagcgcccugggaaagcugcaggacguggucaaccagaaugcccaggcacugaacacccuggucaagcagcuguccuccaacuucggcgccaucagcucugugcugaacgauauccugagcagacuggacaaggucgaggccgaggugcagaucgacagacugaucacaggcagacugcagagccuccagacauacgugacccagcagcugaucagagccgccgagauuagagccucugccaaucuggccgccaccaagaugucugagugugugcugggccagagcaagagaguggacuuuugcggcaagggcuaccaccugaugagcuucccucagucugccccucacggcgugguguuucugcacgugacauaugugcccgcucaagagaagaauuucaccaccgcuccagccaucugccacgacggcaaagcccacuuuccuagagaaggcguguucguguccaacggcacccauugguucgugacacagcggaacuucuacgagccccagaucaucaccaccgacaacaccuucgugucuggcaacugcgacguugugaucggcauugugaacaauaccguguacgacccucugcagcccgagcuggacagcuucaaagaggaacuggacaaguacuuuaagaaccacacaagccccgacguggaccugggcgauaucagcggaaucaaugccagcgucgugaacauccagaaagagaucgaccggcugaacgagguggccaagaaucugaacgagagccugaucgaccugcaagaacuggggaaguacgagcaguacaucaaguggcccugguacaucuggcugggcuuuaucgccggacugauugccaucgugaucgucacaaucaugcuguguugcaugaccagcugcuguagcugccugaagggcuguuguagcuguggcagcugcugcaaguucgacgaggacgauucugagcccgugcugaagggcgugaaacugcacuacaccugaggacuagucccuguucccagagcccacuuuuuuuucuuuuuuugaaauaaaauagccugucuuucagaucuaaaaaaaaaaaaaaaaaaaaaaaaaaaaaaaaaaaaaaaaaaaaaaaaaaaaaaaaaaaaaaaaaaaaaaaaaaaaaaaaaaaaaaaaaaaaaaaaaaaa

SEQ ID NO: 24811 - RNA, 4064 nt, Artificial Sequence
  SARS-CoV-2/Wuhan/WIV05/2019__EPI_ISL_402128 spike protein mRNA gc mod (1-1273)(H69del_V70del_A222V_Y453F_S477N_D614G_I692V)
aggagagucccgcagucggcguccagcggcucugcuuguucgugugugugucguugcaggccuuauucaagcuuaccauguucguguuucuggugcugcugccccugguguccagccagugugugaaccugaccaccagaacacagcugccuccagccuacaccaacagcuucaccagaggcguguacuaccccgacaagguguucagauccagcgugcugcacucuacccaggaccuguuccugccuuucuucagcaacgugaccugguuccacgccaucuccggcaccaauggcaccaagagauucgacaaccccgugcugcccuucaacgacgggguguacuuugccagcaccgagaaguccaacaucaucagaggcuggaucuucggcaccacacuggacagcaagacccagagccugcugaucgugaacaacgccaccaacguggucaucaaagugugcgaguuccaguucugcaacgaccccuuccugggcgucuacuaccacaagaacaacaagagcuggauggaaagcgaguuccggguguacagcagcgccaacaacugcaccuucgaguacgugucccagccuuuccugauggaccuggaaggcaagcagggcaacuucaagaaccugcgcgaguucguguucaagaacaucgacggcuacuucaaaaucuacagcaagcacaccccuaucaaccucgugcgggaucugccucagggcuucucugugcuggaaccccugguggaucugcccaucggcaucaacaucacccgguuucagacacugcuggcccugcacagaagcuaccugacaccuggcgauagcagcagcggauggacagcuggugccgccgcuuacuaugugggcuaccugcagccuagaaccuuccugcugaaguacaacgagaacggcaccaucaccgacgccguggauugugcucuggauccucugagcgagacaaagugcacccugaaguccuucaccguggaaaagggcaucuaccagaccagcaacuuccgggugcagcccaccgaauccaucgugcgguuccccaauaucaccaaucugugccccuucggcgagguguucaaugccaccagauucgccucuguguacgccuggaaccggaagcggaucagcaauugcguggccgacuacuccgugcuguacaacuccgccagcuucagcaccuucaagugcuacggcguguccccuaccaagcugaacgaccugugcuucacaaacguguacgccgacagcuucgugauccggggagaugaagugcggcagauugccccuggacagacaggcaagaucgccgacuacaacuacaagcugcccgacgacuucaccggcugugugauugccuggaacagcaacaaccuggacuccaaagucggcggcaacuacaauuaccuguuccggcuguuccggaaguccaaucugaagcccuucgagcgggacaucagcaccgaaaucuaucaggccggcaacaccccuugcaacggcguggaaggcuucaacugcuacuucccacugcaguccuacggcuuucagcccacaaauggcgugggcuaucagcccuacagagugguggugcugagcuucgaacugcugcaugcuccugccacagugugcggcccuaagaaaagcaccaaucucgugaagaacaaaugcgugaacuucaacuucaacggccugaccggcaccggcgugcugacagagagcaacaagaaguuccugccauuccagcaguuuggccgggauaucgccgauaccacagacgccguuagagauccccagacacuggaaauccuggacaucaccccaugcagcuucggcggagugucugugaucaccccuggcaccaacaccagcaaucagguggcagugcuguaccagggcgugaacuguaccgaagugcccguggccauucacgccgaucagcugacaccuacauggcggguguacuccaccggcagcaauguguuucagaccagagccggcugucugaucggagccgagcacgugaacaauagcuacgagugcgacauccccaucggcgcuggcaucugugccagcuaccagacacagacaaacagccccagacgggcuagaagcguggccagccagagcgugauugccuacacaaugucucugggcgccgagaacagcguggccuacuccaacaacucuaucgcuauccccaccaacuucaccaucagcgugaccaccgagauccugccuguguccaugaccaagaccagcguggacugcaccauguacaucugcggcgauuccaccgagugcuccaaccugcugcugcaguacggcagcuucugcacccagcugaauagagcccugacagggaucgccguggaacaggacaagaacacccaagagguguucgcccaagugaagcaaaucuacaagaccccuccuaucaaggacuucggcggcuucaauuucagccagauucugcccgauccuagcaagcccagcaagcggagcuucaucgaggaccugcuguucaacaaagugacacuggccgacgccggcuucaucaagcaguauggcgauugucugggcgacauugccgccagggaucugauuugcgcccagaaguuuaacggacugacagugcugccuccucugcugaccgaugagaugaucgcccaguacacaucugcccugcuggccggcacaaucacaagcggcuggacauuuggagcuggcgccgcucugcagauccccuuugcuaugcagauggccuaccgguucaacggcaucggagugacccagaaugugcuguacgagaaccagaagcugaucgccaaccaguucaacagcgccaucggcaagauccaggacagccugagcagcacagcaagcgcccugggaaagcugcaggacguggucaaccagaaugcccaggcacugaacacccuggucaagcagcuguccuccaacuucggcgccaucagcucugugcugaacgauauccugagcagacuggacaaggucgaggccgaggugcagaucgacagacugaucacaggcagacugcagagccuccagacauacgugacccagcagcugaucagagccgccgagauuagagccucugccaaucuggccgccaccaagaugucugagugugugcugggccagagcaagagaguggacuuuugcggcaagggcuaccaccugaugagcuucccucagucugccccucacggcgugguguuucugcacgugacauaugugcccgcucaagagaagaauuucaccaccgcuccagccaucugccacgacggcaaagcccacuuuccuagagaaggcguguucguguccaacggcacccauugguucgugacacagcggaacuucuacgagccccagaucaucaccaccgacaacaccuucgugucuggcaacugcgacguugugaucggcauugugaacaauaccguguacgacccucugcagcccgagcuggacagcuucaaagaggaacuggacaaguacuuuaagaaccacacaagccccgacguggaccugggcgauaucagcggaaucaaugccagcgucgugaacauccagaaagagaucgaccggcugaacgagguggccaagaaucugaacgagagccugaucgaccugcaagaacuggggaaguacgagcaguacaucaaguggcccugguacaucuggcugggcuuuaucgccggacugauugccaucgugauggucacaaucaugcuguguugcaugaccagcugcuguagcugccugaagggcuguuguagcuguggcagcugcugcaaguucgacgaggacgauucugagcccgugcugaagggcgugaaacugcacuacaccugaggacuagucccuguucccagagcccacuuuuuuuucuuuuuuugaaauaaaauagccugucuuucagaucuaaaaaaaaaaaaaaaaaaaaaaaaaaaaaaaaaaaaaaaaaaaaaaaaaaaaaaaaaaaaaaaaaaaaaaaaaaaaaaaaaaaaaaaaaaaaaaaaaaaa

SEQ ID NO: 24812 - RNA, 4064 nt, Artificial Sequence
  SARS-CoV-2/Wuhan/WIV05/2019__EPI_ISL_402128 spike protein mRNA gc mod (1-1273)(H69del_V70del_Y453F_D614G_I692V_M1229I)
aggagagucccgcagucggcguccagcggcucugcuuguucgugugugugucguugcaggccuuauucaagcuuaccauguucguguuucuggugcugcugccccugguguccagccagugugugaaccugaccaccagaacacagcugccuccagccuacaccaacagcuucaccagaggcguguacuaccccgacaagguguucagauccagcgugcugcacucuacccaggaccuguuccugccuuucuucagcaacgugaccugguuccacgccaucuccggcaccaauggcaccaagagauucgacaaccccgugcugcccuucaacgacgggguguacuuugccagcaccgagaaguccaacaucaucagaggcuggaucuucggcaccacacuggacagcaagacccagagccugcugaucgugaacaacgccaccaacguggucaucaaagugugcgaguuccaguucugcaacgaccccuuccugggcgucuacuaccacaagaacaacaagagcuggauggaaagcgaguuccggguguacagcagcgccaacaacugcaccuucgaguacgugucccagccuuuccugauggaccuggaaggcaagcagggcaacuucaagaaccugcgcgaguucguguucaagaacaucgacggcuacuucaaaaucuacagcaagcacaccccuaucaaccucgugcgggaucugccucagggcuucucugcucuggaaccccugguggaucugcccaucggcaucaacaucacccgguuucagacacugcuggcccugcacagaagcuaccugacaccuggcgauagcagcagcggauggacagcuggugccgccgcuuacuaugugggcuaccugcagccuagaaccuuccugcugaaguacaacgagaacggcaccaucaccgacgccguggauugugcucuggauccucugagcgagacaaagugcacccugaaguccuucaccguggaaaagggcaucuaccagaccagcaacuuccgggugcagcccaccgaauccaucgugcgguuccccaauaucaccaaucugugccccuucggcgagguguucaaugccaccagauucgccucuguguacgccuggaaccggaagcggaucagcaauugcguggccgacuacuccgugcuguacaacuccgccagcuucagcaccuucaagugcuacggcguguccccuaccaagcugaacgaccugugcuucacaaacguguacgccgacagcuucgugauccggggagaugaagugcggcagauugccccuggacagacaggcaagaucgccgacuacaacuacaagcugcccgacgacuucaccggcugugugauugccuggaacagcaacaaccuggacuccaaagucggcggcaacuacaauuaccuguuccggcuguuccggaaguccaaucugaagcccuucgagcgggacaucagcaccgaaaucuaucaggccggcagcaccccuugcaacggcguggaaggcuucaacugcuacuucccacugcaguccuacggcuuucagcccacaaauggcgugggcuaucagcccuacagagugguggugcugagcuucgaacugcugcaugcuccugccacagugugcggcccuaagaaaagcaccaaucucgugaagaacaaaugcgugaacuucaacuucaacggccugaccggcaccggcgugcugacagagagcaacaagaaguuccugccauuccagcaguuuggccgggauaucgccgauaccacagacgccguuagagauccccagacacuggaaauccuggacaucaccccaugcagcuucggcggagugucugugaucaccccuggcaccaacaccagcaaucagguggcagugcuguaccagggcgugaacuguaccgaagugcccguggccauucacgccgaucagcugacaccuacauggcggguguacuccaccggcagcaauguguuucagaccagagccggcugucugaucggagccgagcacgugaacaauagcuacgagugcgacauccccaucggcgcuggcaucugugccagcuaccagacacagacaaacagccccagacgggcuagaagcguggccagccagagcgugauugccuacacaaugucucugggcgccgagaacagcguggccuacuccaacaacucuaucgcuauccccaccaacuucaccaucagcgugaccaccgagauccugccuguguccaugaccaagaccagcguggacugcaccauguacaucugcggcgauuccaccgagugcuccaaccugcugcugcaguacggcagcuucugcacccagcugaauagagcccugacagggaucgccguggaacaggacaagaacacccaagagguguucgcccaagugaagcaaaucuacaagaccccuccuaucaaggacuucggcggcuucaauuucagccagauucugcccgauccuagcaagcccagcaagcggagcuucaucgaggaccugcuguucaacaaagugacacuggccgacgccggcuucaucaagcaguauggcgauugucugggcgacauugccgccagggaucugauuugcgcccagaaguuuaacggacugacagugcugccuccucugcugaccgaugagaugaucgcccaguacacaucugcccugcuggccggcacaaucacaagcggcuggacauuuggagcuggcgccgcucugcagauccccuuugcuaugcagauggccuaccgguucaacggcaucggagugacccagaaugugcuguacgagaaccagaagcugaucgccaaccaguucaacagcgccaucggcaagauccaggacagccugagcagcacagcaagcgcccugggaaagcugcaggacguggucaaccagaaugcccaggcacugaacacccuggucaagcagcuguccuccaacuucggcgccaucagcucugugcugaacgauauccugagcagacuggacaaggucgaggccgaggugcagaucgacagacugaucacaggcagacugcagagccuccagacauacgugacccagcagcugaucagagccgccgagauuagagccucugccaaucuggccgccaccaagaugucugagugugugcugggccagagcaagagaguggacuuuugcggcaagggcuaccaccugaugagcuucccucagucugccccucacggcgugguguuucugcacgugacauaugugcccgcucaagagaagaauuucaccaccgcuccagccaucugccacgacggcaaagcccacuuuccuagagaaggcguguucguguccaacggcacccauugguucgugacacagcggaacuucuacgagccccagaucaucaccaccgacaacaccuucgugucuggcaacugcgacguugugaucggcauugugaacaauaccguguacgacccucugcagcccgagcuggacagcuucaaagaggaacuggacaaguacuuuaagaaccacacaagccccgacguggaccugggcgauaucagcggaaucaaugccagcgucgugaacauccagaaagagaucgaccggcugaacgagguggccaagaaucugaacgagagccugaucgaccugcaagaacuggggaaguacgagcaguacaucaaguggcccugguacaucuggcugggcuuuaucgccggacugauugccaucgugaucgucacaaucaugcuguguugcaugaccagcugcuguagcugccugaagggcuguuguagcuguggcagcugcugcaaguucgacgaggacgauucugagcccgugcugaagggcgugaaacugcacuacaccugaggacuagucccuguucccagagcccacuuuuuuuucuuuuuuugaaauaaaauagccugucuuucagaucuaaaaaaaaaaaaaaaaaaaaaaaaaaaaaaaaaaaaaaaaaaaaaaaaaaaaaaaaaaaaaaaaaaaaaaaaaaaaaaaaaaaaaaaaaaaaaaaaaaaa

SEQ ID NO: 24813 - RNA, 4061 nt, Artificial Sequence
  SARS-CoV-2/Wuhan/WIV05/2019__EPI_ISL_402128 spike protein mRNA gc mod (1-1273)(H69del_V70del_Y144del_N501Y_A570D_D614G_P681H_T716I_S982 A_D1118H)
aggagagucccgcagucggcguccagcggcucugcuuguucgugugugugucguugcaggccuuauucaagcuuaccauguucguguuucuggugcugcugccccugguguccagccagugugugaaccugaccaccagaacacagcugccuccagccuacaccaacagcuucaccagaggcguguacuaccccgacaagguguucagauccagcgugcugcacucuacccaggaccuguuccugccuuucuucagcaacgugaccugguuccacgccaucuccggcaccaauggcaccaagagauucgacaaccccgugcugcccuucaacgacgggguguacuuugccagcaccgagaaguccaacaucaucagaggcuggaucuucggcaccacacuggacagcaagacccagagccugcugaucgugaacaacgccaccaacguggucaucaaagugugcgaguuccaguucugcaacgaccccuuccugggcgucuaccacaagaacaacaagagcuggauggaaagcgaguuccggguguacagcagcgccaacaacugcaccuucgaguacgugucccagccuuuccugauggaccuggaaggcaagcagggcaacuucaagaaccugcgcgaguucguguucaagaacaucgacggcuacuucaaaaucuacagcaagcacaccccuaucaaccucgugcgggaucugccucagggcuucucugcucuggaaccccugguggaucugcccaucggcaucaacaucacccgguuucagacacugcuggcccugcacagaagcuaccugacaccuggcgauagcagcagcggauggacagcuggugccgccgcuuacuaugugggcuaccugcagccuagaaccuuccugcugaaguacaacgagaacggcaccaucaccgacgccguggauugugcucuggauccucugagcgagacaaagugcacccugaaguccuucaccguggaaaagggcaucuaccagaccagcaacuuccgggugcagcccaccgaauccaucgugcgguuccccaauaucaccaaucugugccccuucggcgagguguucaaugccaccagauucgccucuguguacgccuggaaccggaagcggaucagcaauugcguggccgacuacuccgugcuguacaacuccgccagcuucagcaccuucaagugcuacggcguguccccuaccaagcugaacgaccugugcuucacaaacguguacgccgacagcuucgugauccggggagaugaagugcggcagauugccccuggacagacaggcaagaucgccgacuacaacuacaagcugcccgacgacuucaccggcugugugauugccuggaacagcaacaaccuggacuccaaagucggcggcaacuacaauuaccuguaccggcuguuccggaaguccaaucugaagcccuucgagcgggacaucagcaccgaaaucuaucaggccggcagcaccccuugcaacggcguggaaggcuucaacugcuacuucccacugcaguccuacggcuuucagcccacauacggcgugggcuaucagcccuacagagugguggugcugagcuucgaacugcugcaugcuccugccacagugugcggcccuaagaaaagcaccaaucucgugaagaacaaaugcgugaacuucaacuucaacggccugaccggcaccggcgugcugacagagagcaacaagaaguuccugccauuccagcaguuuggccgggauaucgacgauaccacagacgccguuagagauccccagacacuggaaauccuggacaucaccccaugcagcuucggcggagugucugugaucaccccuggcaccaacaccagcaaucagguggcagugcuguaccagggcgugaacuguaccgaagugcccguggccauucacgccgaucagcugacaccuacauggcggguguacuccaccggcagcaauguguuucagaccagagccggcugucugaucggagccgagcacgugaacaauagcuacgagugcgacauccccaucggcgcuggcaucugugccagcuaccagacacagacaaacagccacagacgggcuagaagcguggccagccagagcaucauugccuacacaaugucucugggcgccgagaacagcguggccuacuccaacaacucuaucgcuauccccaucaacuucaccaucagcgugaccaccgagauccugccuguguccaugaccaagaccagcguggacugcaccauguacaucugcggcgauuccaccgagugcuccaaccugcugcugcaguacggcagcuucugcacccagcugaauagagcccugacagggaucgccguggaacaggacaagaacacccaagagguguucgcccaagugaagcaaaucuacaagaccccuccuaucaaggacuucggcggcuucaauuucagccagauucugcccgauccuagcaagcccagcaagcggagcuucaucgaggaccugcuguucaacaaagugacacuggccgacgccggcuucaucaagcaguauggcgauugucugggcgacauugccgccagggaucugauuugcgcccagaaguuuaacggacugacagugcugccuccucugcugaccgaugagaugaucgcccaguacacaucugcccugcuggccggcacaaucacaagcggcuggacauuuggagcuggcgccgcucugcagauccccuuugcuaugcagauggccuaccgguucaacggcaucggagugacccagaaugugcuguacgagaaccagaagcugaucgccaaccaguucaacagcgccaucggcaagauccaggacagccugagcagcacagcaagcgcccugggaaagcugcaggacguggucaaccagaaugcccaggcacugaacacccuggucaagcagcuguccuccaacuucggcgccaucagcucugugcugaacgauauccuggccagacuggacaaggucgaggccgaggugcagaucgacagacugaucacaggcagacugcagagccuccagacauacgugacccagcagcugaucagagccgccgagauuagagccucugccaaucuggccgccaccaagaugucugagugugugcugggccagagcaagagaguggacuuuugcggcaagggcuaccaccugaugagcuucccucagucugccccucacggcgugguguuucugcacgugacauaugugcccgcucaagagaagaauuucaccaccgcuccagccaucugccacgacggcaaagcccacuuuccuagagaaggcguguucguguccaacggcacccauugguucgugacacagcggaacuucuacgagccccagaucaucaccacccacaacaccuucgugucuggcaacugcgacguugugaucggcauugugaacaauaccguguacgacccucugcagcccgagcuggacagcuucaaagaggaacuggacaaguacuuuaagaaccacacaagccccgacguggaccugggcgauaucagcggaaucaaugccagcgucgugaacauccagaaagagaucgaccggcugaacgagguggccaagaaucugaacgagagccugaucgaccugcaagaacuggggaaguacgagcaguacaucaaguggcccugguacaucuggcugggcuuuaucgccggacugauugccaucgugauggucacaaucaugcuguguugcaugaccagcugcuguagcugccugaagggcuguuguagcuguggcagcugcugcaaguucgacgaggacgauucugagcccgugcugaagggcgugaaacugcacuacaccugaggacuagucccuguucccagagcccacuuuuuuuucuuuuuuugaaauaaaauagccugucuuucagaucuaaaaaaaaaaaaaaaaaaaaaaaaaaaaaaaaaaaaaaaaaaaaaaaaaaaaaaaaaaaaaaaaaaaaaaaaaaaaaaaaaaaaaaaaaaaaaaaaaaaa

SEQ ID NO: 24814 - RNA, 4070 nt, Artificial Sequence
  SARS-CoV-2/Wuhan/WIV05/2019__EPI_ISL_402128 spike protein mRNA gc mod (1-1273)(K417N_E484K_N501Y_D614G)
aggagagucccgcagucggcguccagcggcucugcuuguucgugugugugucguugcaggccuuauucaagcuuaccauguucguguuucuggugcugcugccccugguguccagccagugugugaaccugaccaccagaacacagcugccuccagccuacaccaacagcuucaccagaggcguguacuaccccgacaagguguucagauccagcgugcugcacucuacccaggaccuguuccugccuuucuucagcaacgugaccugguuccacgccauccacguguccggcaccaauggcaccaagagauucgacaaccccgugcugcccuucaacgacgggguguacuuugccagcaccgagaaguccaacaucaucagaggcuggaucuucggcaccacacuggacagcaagacccagagccugcugaucgugaacaacgccaccaacguggucaucaaagugugcgaguuccaguucugcaacgaccccuuccugggcgucuacuaccacaagaacaacaagagcuggauggaaagcgaguuccggguguacagcagcgccaacaacugcaccuucgaguacgugucccagccuuuccugauggaccuggaaggcaagcagggcaacuucaagaaccugcgcgaguucguguucaagaacaucgacggcuacuucaaaaucuacagcaagcacaccccuaucaaccucgugcgggaucugccucagggcuucucugcucuggaaccccugguggaucugcccaucggcaucaacaucacccgguuucagacacugcuggcccugcacagaagcuaccugacaccuggcgauagcagcagcggauggacagcuggugccgccgcuuacuaugugggcuaccugcagccuagaaccuuccugcugaaguacaacgagaacggcaccaucaccgacgccguggauugugcucuggauccucugagcgagacaaagugcacccugaaguccuucaccguggaaaagggcaucuaccagaccagcaacuuccgggugcagcccaccgaauccaucgugcgguuccccaauaucaccaaucugugccccuucggcgagguguucaaugccaccagauucgccucuguguacgccuggaaccggaagcggaucagcaauugcguggccgacuacuccgugcuguacaacuccgccagcuucagcaccuucaagugcuacggcguguccccuaccaagcugaacgaccugugcuucacaaacguguacgccgacagcuucgugauccggggagaugaagugcggcagauugccccuggacagacaggcaacaucgccgacuacaacuacaagcugcccgacgacuucaccggcugugugauugccuggaacagcaacaaccuggacuccaaagucggcggcaacuacaauuaccuguaccggcuguuccggaaguccaaucugaagcccuucgagcgggacaucagcaccgaaaucuaucaggccggcagcaccccuugcaacggcgugaagggcuucaacugcuacuucccacugcaguccuacggcuuucagcccacauacggcgugggcuaucagcccuacagagugguggugcugagcuucgaacugcugcaugcuccugccacagugugcggcccuaagaaaagcaccaaucucgugaagaacaaaugcgugaacuucaacuucaacggccugaccggcaccggcgugcugacagagagcaacaagaaguuccugccauuccagcaguuuggccgggauaucgccgauaccacagacgccguuagagauccccagacacuggaaauccuggacaucaccccaugcagcuucggcggagugucugugaucaccccuggcaccaacaccagcaaucagguggcagugcuguaccagggcgugaacuguaccgaagugcccguggccauucacgccgaucagcugacaccuacauggcggguguacuccaccggcagcaauguguuucagaccagagccggcugucugaucggagccgagcacgugaacaauagcuacgagugcgacauccccaucggcgcuggcaucugugccagcuaccagacacagacaaacagccccagacgggcuagaagcguggccagccagagcaucauugccuacacaaugucucugggcgccgagaacagcguggccuacuccaacaacucuaucgcuauccccaccaacuucaccaucagcgugaccaccgagauccugccuguguccaugaccaagaccagcguggacugcaccauguacaucugcggcgauuccaccgagugcuccaaccugcugcugcaguacggcagcuucugcacccagcugaauagagcccugacagggaucgccguggaacaggacaagaacacccaagagguguucgcccaagugaagcaaaucuacaagaccccuccuaucaaggacuucggcggcuucaauuucagccagauucugcccgauccuagcaagcccagcaagcggagcuucaucgaggaccugcuguucaacaaagugacacuggccgacgccggcuucaucaagcaguauggcgauugucugggcgacauugccgccagggaucugauuugcgcccagaaguuuaacggacugacagugcugccuccucugcugaccgaugagaugaucgcccaguacacaucugcccugcuggccggcacaaucacaagcggcuggacauuuggagcuggcgccgcucugcagauccccuuugcuaugcagauggccuaccgguucaacggcaucggagugacccagaaugugcuguacgagaaccagaagcugaucgccaaccaguucaacagcgccaucggcaagauccaggacagccugagcagcacagcaagcgcccugggaaagcugcaggacguggucaaccagaaugcccaggcacugaacacccuggucaagcagcuguccuccaacuucggcgccaucagcucugugcugaacgauauccugagcagacuggacaaggucgaggccgaggugcagaucgacagacugaucacaggcagacugcagagccuccagacauacgugacccagcagcugaucagagccgccgagauuagagccucugccaaucuggccgccaccaagaugucugagugugugcugggccagagcaagagaguggacuuuugcggcaagggcuaccaccugaugagcuucccucagucugccccucacggcgugguguuucugcacgugacauaugugcccgcucaagagaagaauuucaccaccgcuccagccaucugccacgacggcaaagcccacuuuccuagagaaggcguguucguguccaacggcacccauugguucgugacacagcggaacuucuacgagccccagaucaucaccaccgacaacaccuucgugucuggcaacugcgacguugugaucggcauugugaacaauaccguguacgacccucugcagcccgagcuggacagcuucaaagaggaacuggacaaguacuuuaagaaccacacaagccccgacguggaccugggcgauaucagcggaaucaaugccagcgucgugaacauccagaaagagaucgaccggcugaacgagguggccaagaaucugaacgagagccugaucgaccugcaagaacuggggaaguacgagcaguacaucaaguggcccugguacaucuggcugggcuuuaucgccggacugauugccaucgugauggucacaaucaugcuguguugcaugaccagcugcuguagcugccugaagggcuguuguagcuguggcagcugcugcaaguucgacgaggacgauucugagcccgugcugaagggcgugaaacugcacuacaccugaggacuagucccuguucccagagcccacuuuuuuuucuuuuuuugaaauaaaauagccugucuuucagaucuaaaaaaaaaaaaaaaaaaaaaaaaaaaaaaaaaaaaaaaaaaaaaaaaaaaaaaaaaaaaaaaaaaaaaaaaaaaaaaaaaaaaaaaaaaaaaaaaaaaa

SEQ ID NO: 24815 - RNA, 4061 nt, Artificial Sequence
  SARS-CoV-2/Wuhan/WIV05/2019__EPI_ISL_402128 spike protein mRNA gc mod (1-1273)(L18F_D80A_D215G_L242del_A243del_L244del_R246I_K417N_E484 K_N501Y_D614G_A701V)
aggagagucccgcagucggcguccagcggcucugcuuguucgugugugugucguugcaggccuuauucaagcuuaccauguucguguuucuggugcugcugccccugguguccagccagugugugaacuucaccaccagaacacagcugccuccagccuacaccaacagcuucaccagaggcguguacuaccccgacaagguguucagauccagcgugcugcacucuacccaggaccuguuccugccuuucuucagcaacgugaccugguuccacgccauccacguguccggcaccaauggcaccaagagauucgccaaccccgugcugcccuucaacgacgggguguacuuugccagcaccgagaaguccaacaucaucagaggcuggaucuucggcaccacacuggacagcaagacccagagccugcugaucgugaacaacgccaccaacguggucaucaaagugugcgaguuccaguucugcaacgaccccuuccugggcgucuacuaccacaagaacaacaagagcuggauggaaagcgaguuccggguguacagcagcgccaacaacugcaccuucgaguacgugucccagccuuuccugauggaccuggaaggcaagcagggcaacuucaagaaccugcgcgaguucguguucaagaacaucgacggcuacuucaaaaucuacagcaagcacaccccuaucaaccucgugcggggccugccucagggcuucucugcucuggaaccccugguggaucugcccaucggcaucaacaucacccgguuucagacacugcacaucagcuaccugacaccuggcgauagcagcagcggauggacagcuggugccgccgcuuacuaugugggcuaccugcagccuagaaccuuccugcugaaguacaacgagaacggcaccaucaccgacgccguggauugugcucuggauccucugagcgagacaaagugcacccugaaguccuucaccguggaaaagggcaucuaccagaccagcaacuuccgggugcagcccaccgaauccaucgugcgguuccccaauaucaccaaucugugccccuucggcgagguguucaaugccaccagauucgccucuguguacgccuggaaccggaagcggaucagcaauugcguggccgacuacuccgugcuguacaacuccgccagcuucagcaccuucaagugcuacggcguguccccuaccaagcugaacgaccugugcuucacaaacguguacgccgacagcuucgugauccggggagaugaagugcggcagauugccccuggacagacaggcaacaucgccgacuacaacuacaagcugcccgacgacuucaccggcugugugauugccuggaacagcaacaaccuggacuccaaagucggcggcaacuacaauuaccuguaccggcuguuccggaaguccaaucugaagcccuucgagcgggacaucagcaccgaaaucuaucaggccggcagcaccccuugcaacggcgugaagggcuucaacugcuacuucccacugcaguccuacggcuuucagcccacauacggcgugggcuaucagcccuacagagugguggugcugagcuucgaacugcugcaugcuccugccacagugugcggcccuaagaaaagcaccaaucucgugaagaacaaaugcgugaacuucaacuucaacggccugaccggcaccggcgugcugacagagagcaacaagaaguuccugccauuccagcaguuuggccgggauaucgccgauaccacagacgccguuagagauccccagacacuggaaauccuggacaucaccccaugcagcuucggcggagugucugugaucaccccuggcaccaacaccagcaaucagguggcagugcuguaccagggcgugaacuguaccgaagugcccguggccauucacgccgaucagcugacaccuacauggcggguguacuccaccggcagcaauguguuucagaccagagccggcugucugaucggagccgagcacgugaacaauagcuacgagugcgacauccccaucggcgcuggcaucugugccagcuaccagacacagacaaacagccccagacgggcuagaagcguggccagccagagcaucauugccuacacaaugucucugggcguggagaacagcguggccuacuccaacaacucuaucgcuauccccaccaacuucaccaucagcgugaccaccgagauccugccuguguccaugaccaagaccagcguggacugcaccauguacaucugcggcgauuccaccgagugcuccaaccugcugcugcaguacggcagcuucugcacccagcugaauagagcccugacagggaucgccguggaacaggacaagaacacccaagagguguucgcccaagugaagcaaaucuacaagaccccuccuaucaaggacuucggcggcuucaauuucagccagauucugcccgauccuagcaagcccagcaagcggagcuucaucgaggaccugcuguucaacaaagugacacuggccgacgccggcuucaucaagcaguauggcgauugucugggcgacauugccgccagggaucugauuugcgcccagaaguuuaacggacugacagugcugccuccucugcugaccgaugagaugaucgcccaguacacaucugcccugcuggccggcacaaucacaagcggcuggacauuuggagcuggcgccgcucugcagauccccuuugcuaugcagauggccuaccgguucaacggcaucggagugacccagaaugugcuguacgagaaccagaagcugaucgccaaccaguucaacagcgccaucggcaagauccaggacagccugagcagcacagcaagcgcccugggaaagcugcaggacguggucaaccagaaugcccaggcacugaacacccuggucaagcagcuguccuccaacuucggcgccaucagcucugugcugaacgauauccugagcagacuggacaaggucgaggccgaggugcagaucgacagacugaucacaggcagacugcagagccuccagacauacgugacccagcagcugaucagagccgccgagauuagagccucugccaaucuggccgccaccaagaugucugagugugugcugggccagagcaagagaguggacuuuugcggcaagggcuaccaccugaugagcuucccucagucugccccucacggcgugguguuucugcacgugacauaugugcccgcucaagagaagaauuucaccaccgcuccagccaucugccacgacggcaaagcccacuuuccuagagaaggcguguucguguccaacggcacccauugguucgugacacagcggaacuucuacgagccccagaucaucaccaccgacaacaccuucgugucuggcaacugcgacguugugaucggcauugugaacaauaccguguacgacccucugcagcccgagcuggacagcuucaaagaggaacuggacaaguacuuuaagaaccacacaagccccgacguggaccugggcgauaucagcggaaucaaugccagcgucgugaacauccagaaagagaucgaccggcugaacgagguggccaagaaucugaacgagagccugaucgaccugcaagaacuggggaaguacgagcaguacaucaaguggcccugguacaucuggcugggcuuuaucgccggacugauugccaucgugauggucacaaucaugcuguguugcaugaccagcugcuguagcugccugaagggcuguuguagcuguggcagcugcugcaaguucgacgaggacgauucugagcccgugcugaagggcgugaaacugcacuacaccugaggacuagucccuguucccagagcccacuuuuuuuucuuuuuuugaaauaaaauagccugucuuucagaucuaaaaaaaaaaaaaaaaaaaaaaaaaaaaaaaaaaaaaaaaaaaaaaaaaaaaaaaaaaaaaaaaaaaaaaaaaaaaaaaaaaaaaaaaaaaaaaaaaaaa

SEQ ID NO: 24816 - RNA, 4070 nt, Artificial Sequence
  SARS-CoV-2/Wuhan/WIV05/2019__EPI_ISL_402128 spike protein mRNA gc mod (1-1273)(E484K_D614G)
aggagagucccgcagucggcguccagcggcucugcuuguucgugugugugucguugcaggccuuauucaagcuuaccauguucguguuucuggugcugcugccccugguguccagccagugugugaaccugaccaccagaacacagcugccuccagccuacaccaacagcuucaccagaggcguguacuaccccgacaagguguucagauccagcgugcugcacucuacccaggaccuguuccugccuuucuucagcaacgugaccugguuccacgccauccacguguccggcaccaauggcaccaagagauucgacaaccccgugcugcccuucaacgacgggguguacuuugccagcaccgagaaguccaacaucaucagaggcuggaucuucggcaccacacuggacagcaagacccagagccugcugaucgugaacaacgccaccaacguggucaucaaagugugcgaguuccaguucugcaacgaccccuuccugggcgucuacuaccacaagaacaacaagagcuggauggaaagcgaguuccggguguacagcagcgccaacaacugcaccuucgaguacgugucccagccuuuccugauggaccuggaaggcaagcagggcaacuucaagaaccugcgcgaguucguguucaagaacaucgacggcuacuucaaaaucuacagcaagcacaccccuaucaaccucgugcgggaucugccucagggcuucucugcucuggaaccccugguggaucugcccaucggcaucaacaucacccgguuucagacacugcuggcccugcacagaagcuaccugacaccuggcgauagcagcagcggauggacagcuggugccgccgcuuacuaugugggcuaccugcagccuagaaccuuccugcugaaguacaacgagaacggcaccaucaccgacgccguggauugugcucuggauccucugagcgagacaaagugcacccugaaguccuucaccguggaaaagggcaucuaccagaccagcaacuuccgggugcagcccaccgaauccaucgugcgguuccccaauaucaccaaucugugccccuucggcgagguguucaaugccaccagauucgccucuguguacgccuggaaccggaagcggaucagcaauugcguggccgacuacuccgugcuguacaacuccgccagcuucagcaccuucaagugcuacggcguguccccuaccaagcugaacgaccugugcuucacaaacguguacgccgacagcuucgugauccggggagaugaagugcggcagauugccccuggacagacaggcaagaucgccgacuacaacuacaagcugcccgacgacuucaccggcugugugauugccuggaacagcaacaaccuggacuccaaagucggcggcaacuacaauuaccuguaccggcuguuccggaaguccaaucugaagcccuucgagcgggacaucagcaccgaaaucuaucaggccggcagcaccccuugcaacggcgugaagggcuucaacugcuacuucccacugcaguccuacggcuuucagcccacaaauggcgugggcuaucagcccuacagagugguggugcugagcuucgaacugcugcaugcuccugccacagugugcggcccuaagaaaagcaccaaucucgugaagaacaaaugcgugaacuucaacuucaacggccugaccggcaccggcgugcugacagagagcaacaagaaguuccugccauuccagcaguuuggccgggauaucgccgauaccacagacgccguuagagauccccagacacuggaaauccuggacaucaccccaugcagcuucggcggagugucugugaucaccccuggcaccaacaccagcaaucagguggcagugcuguaccagggcgugaacuguaccgaagugcccguggccauucacgccgaucagcugacaccuacauggcggguguacuccaccggcagcaauguguuucagaccagagccggcugucugaucggagccgagcacgugaacaauagcuacgagugcgacauccccaucggcgcuggcaucugugccagcuaccagacacagacaaacagccccagacgggcuagaagcguggccagccagagcaucauugccuacacaaugucucugggcgccgagaacagcguggccuacuccaacaacucuaucgcuauccccaccaacuucaccaucagcgugaccaccgagauccugccuguguccaugaccaagaccagcguggacugcaccauguacaucugcggcgauuccaccgagugcuccaaccugcugcugcaguacggcagcuucugcacccagcugaauagagcccugacagggaucgccguggaacaggacaagaacacccaagagguguucgcccaagugaagcaaaucuacaagaccccuccuaucaaggacuucggcggcuucaauuucagccagauucugcccgauccuagcaagcccagcaagcggagcuucaucgaggaccugcuguucaacaaagugacacuggccgacgccggcuucaucaagcaguauggcgauugucugggcgacauugccgccagggaucugauuugcgcccagaaguuuaacggacugacagugcugccuccucugcugaccgaugagaugaucgcccaguacacaucugcccugcuggccggcacaaucacaagcggcuggacauuuggagcuggcgccgcucugcagauccccuuugcuaugcagauggccuaccgguucaacggcaucggagugacccagaaugugcuguacgagaaccagaagcugaucgccaaccaguucaacagcgccaucggcaagauccaggacagccugagcagcacagcaagcgcccugggaaagcugcaggacguggucaaccagaaugcccaggcacugaacacccuggucaagcagcuguccuccaacuucggcgccaucagcucugugcugaacgauauccugagcagacuggacaaggucgaggccgaggugcagaucgacagacugaucacaggcagacugcagagccuccagacauacgugacccagcagcugaucagagccgccgagauuagagccucugccaaucuggccgccaccaagaugucugagugugugcugggccagagcaagagaguggacuuuugcggcaagggcuaccaccugaugagcuucccucagucugccccucacggcgugguguuucugcacgugacauaugugcccgcucaagagaagaauuucaccaccgcuccagccaucugccacgacggcaaagcccacuuuccuagagaaggcguguucguguccaacggcacccauugguucgugacacagcggaacuucuacgagccccagaucaucaccaccgacaacaccuucgugucuggcaacugcgacguugugaucggcauugugaacaauaccguguacgacccucugcagcccgagcuggacagcuucaaagaggaacuggacaaguacuuuaagaaccacacaagccccgacguggaccugggcgauaucagcggaaucaaugccagcgucgugaacauccagaaagagaucgaccggcugaacgagguggccaagaaucugaacgagagccugaucgaccugcaagaacuggggaaguacgagcaguacaucaaguggcccugguacaucuggcugggcuuuaucgccggacugauugccaucgugauggucacaaucaugcuguguugcaugaccagcugcuguagcugccugaagggcuguuguagcuguggcagcugcugcaaguucgacgaggacgauucugagcccgugcugaagggcgugaaacugcacuacaccugaggacuagucccuguucccagagcccacuuuuuuuucuuuuuuugaaauaaaauagccugucuuucagaucuaaaaaaaaaaaaaaaaaaaaaaaaaaaaaaaaaaaaaaaaaaaaaaaaaaaaaaaaaaaaaaaaaaaaaaaaaaaaaaaaaaaaaaaaaaaaaaaaaaaa

SEQ ID NO: 24817 - RNA, 4070 nt, Artificial Sequence
  SARS-CoV-2/Wuhan/WIV05/2019__EPI_ISL_402128 spike protein mRNA gc mod (1-1273)(L18F_T20N_P26S_D138Y_R190S_K417T_E484K_N501Y_D614G_H655Y _T1027I)
aggagagucccgcagucggcguccagcggcucugcuuguucgugugugugucguugcaggccuuauucaagcuuaccauguucguguuucuggugcugcugccccugguguccagccagugugugaacuucaccaacagaacacagcugccuagcgccuacaccaacagcuucaccagaggcguguacuaccccgacaagguguucagauccagcgugcugcacucuacccaggaccuguuccugccuuucuucagcaacgugaccugguuccacgccauccacguguccggcaccaauggcaccaagagauucgacaaccccgugcugcccuucaacgacgggguguacuuugccagcaccgagaaguccaacaucaucagaggcuggaucuucggcaccacacuggacagcaagacccagagccugcugaucgugaacaacgccaccaacguggucaucaaagugugcgaguuccaguucugcaacuaccccuuccugggcgucuacuaccacaagaacaacaagagcuggauggaaagcgaguuccggguguacagcagcgccaacaacugcaccuucgaguacgugucccagccuuuccugauggaccuggaaggcaagcagggcaacuucaagaaccugagcgaguucguguucaagaacaucgacggcuacuucaaaaucuacagcaagcacaccccuaucaaccucgugcgggaucugccucagggcuucucugcucuggaaccccugguggaucugcccaucggcaucaacaucacccgguuucagacacugcuggcccugcacagaagcuaccugacaccuggcgauagcagcagcggauggacagcuggugccgccgcuuacuaugugggcuaccugcagccuagaaccuuccugcugaaguacaacgagaacggcaccaucaccgacgccguggauugugcucuggauccucugagcgagacaaagugcacccugaaguccuucaccguggaaaagggcaucuaccagaccagcaacuuccgggugcagcccaccgaauccaucgugcgguuccccaauaucaccaaucugugccccuucggcgagguguucaaugccaccagauucgccucuguguacgccuggaaccggaagcggaucagcaauugcguggccgacuacuccgugcuguacaacuccgccagcuucagcaccuucaagugcuacggcguguccccuaccaagcugaacgaccugugcuucacaaacguguacgccgacagcuucgugauccggggagaugaagugcggcagauugccccuggacagacaggcaccaucgccgacuacaacuacaagcugcccgacgacuucaccggcugugugauugccuggaacagcaacaaccuggacuccaaagucggcggcaacuacaauuaccuguaccggcuguuccggaaguccaaucugaagcccuucgagcgggacaucagcaccgaaaucuaucaggccggcagcaccccuugcaacggcgugaagggcuucaacugcuacuucccacugcaguccuacggcuuucagcccacauacggcgugggcuaucagcccuacagagugguggugcugagcuucgaacugcugcaugcuccugccacagugugcggcccuaagaaaagcaccaaucucgugaagaacaaaugcgugaacuucaacuucaacggccugaccggcaccggcgugcugacagagagcaacaagaaguuccugccauuccagcaguuuggccgggauaucgccgauaccacagacgccguuagagauccccagacacuggaaauccuggacaucaccccaugcagcuucggcggagugucugugaucaccccuggcaccaacaccagcaaucagguggcagugcuguaccagggcgugaacuguaccgaagugcccguggccauucacgccgaucagcugacaccuacauggcggguguacuccaccggcagcaauguguuucagaccagagccggcugucugaucggagccgaguacgugaacaauagcuacgagugcgacauccccaucggcgcuggcaucugugccagcuaccagacacagacaaacagccccagacgggcuagaagcguggccagccagagcaucauugccuacacaaugucucugggcgccgagaacagcguggccuacuccaacaacucuaucgcuauccccaccaacuucaccaucagcgugaccaccgagauccugccuguguccaugaccaagaccagcguggacugcaccauguacaucugcggcgauuccaccgagugcuccaaccugcugcugcaguacggcagcuucugcacccagcugaauagagcccugacagggaucgccguggaacaggacaagaacacccaagagguguucgcccaagugaagcaaaucuacaagaccccuccuaucaaggacuucggcggcuucaauuucagccagauucugcccgauccuagcaagcccagcaagcggagcuucaucgaggaccugcuguucaacaaagugacacuggccgacgccggcuucaucaagcaguauggcgauugucugggcgacauugccgccagggaucugauuugcgcccagaaguuuaacggacugacagugcugccuccucugcugaccgaugagaugaucgcccaguacacaucugcccugcuggccggcacaaucacaagcggcuggacauuuggagcuggcgccgcucugcagauccccuuugcuaugcagauggccuaccgguucaacggcaucggagugacccagaaugugcuguacgagaaccagaagcugaucgccaaccaguucaacagcgccaucggcaagauccaggacagccugagcagcacagcaagcgcccugggaaagcugcaggacguggucaaccagaaugcccaggcacugaacacccuggucaagcagcuguccuccaacuucggcgccaucagcucugugcugaacgauauccugagcagacuggacaaggucgaggccgaggugcagaucgacagacugaucacaggcagacugcagagccuccagacauacgugacccagcagcugaucagagccgccgagauuagagccucugccaaucuggccgccaucaagaugucugagugugugcugggccagagcaagagaguggacuuuugcggcaagggcuaccaccugaugagcuucccucagucugccccucacggcgugguguuucugcacgugacauaugugcccgcucaagagaagaauuucaccaccgcuccagccaucugccacgacggcaaagcccacuuuccuagagaaggcguguucguguccaacggcacccauugguucgugacacagcggaacuucuacgagccccagaucaucaccaccgacaacaccuucgugucuggcaacugcgacguugugaucggcauugugaacaauaccguguacgacccucugcagcccgagcuggacagcuucaaagaggaacuggacaaguacuuuaagaaccacacaagccccgacguggaccugggcgauaucagcggaaucaaugccagcgucgugaacauccagaaagagaucgaccggcugaacgagguggccaagaaucugaacgagagccugaucgaccugcaagaacuggggaaguacgagcaguacaucaaguggcccugguacaucuggcugggcuuuaucgccggacugauugccaucgugauggucacaaucaugcuguguugcaugaccagcugcuguagcugccugaagggcuguuguagcuguggcagcugcugcaaguucgacgaggacgauucugagcccgugcugaagggcgugaaacugcacuacaccugaggacuagucccuguucccagagcccacuuuuuuuucuuuuuuugaaauaaaauagccugucuuucagaucuaaaaaaaaaaaaaaaaaaaaaaaaaaaaaaaaaaaaaaaaaaaaaaaaaaaaaaaaaaaaaaaaaaaaaaaaaaaaaaaaaaaaaaaaaaaaaaaaaaaa

SEQ ID NO: 24818 - RNA, 4070 nt, Artificial Sequence
  SARS-CoV-2/Wuhan/WIV05/2019__EPI_ISL_402128 spike protein mRNA gc mod (1-1273)(S13I_W152C_L452R_D614G)
aggagagucccgcagucggcguccagcggcucugcuuguucgugugugugucguugcaggccuuauucaagcuuaccauguucguguuucuggugcugcugccccugguguccauccagugugugaaccugaccaccagaacacagcugccuccagccuacaccaacagcuucaccagaggcguguacuaccccgacaagguguucagauccagcgugcugcacucuacccaggaccuguuccugccuuucuucagcaacgugaccugguuccacgccauccacguguccggcaccaauggcaccaagagauucgacaaccccgugcugcccuucaacgacgggguguacuuugccagcaccgagaaguccaacaucaucagaggcuggaucuucggcaccacacuggacagcaagacccagagccugcugaucgugaacaacgccaccaacguggucaucaaagugugcgaguuccaguucugcaacgaccccuuccugggcgucuacuaccacaagaacaacaagagcugcauggaaagcgaguuccggguguacagcagcgccaacaacugcaccuucgaguacgugucccagccuuuccugauggaccuggaaggcaagcagggcaacuucaagaaccugcgcgaguucguguucaagaacaucgacggcuacuucaaaaucuacagcaagcacaccccuaucaaccucgugcgggaucugccucagggcuucucugcucuggaaccccugguggaucugcccaucggcaucaacaucacccgguuucagacacugcuggcccugcacagaagcuaccugacaccuggcgauagcagcagcggauggacagcuggugccgccgcuuacuaugugggcuaccugcagccuagaaccuuccugcugaaguacaacgagaacggcaccaucaccgacgccguggauugugcucuggauccucugagcgagacaaagugcacccugaaguccuucaccguggaaaagggcaucuaccagaccagcaacuuccgggugcagcccaccgaauccaucgugcgguuccccaauaucaccaaucugugccccuucggcgagguguucaaugccaccagauucgccucuguguacgccuggaaccggaagcggaucagcaauugcguggccgacuacuccgugcuguacaacuccgccagcuucagcaccuucaagugcuacggcguguccccuaccaagcugaacgaccugugcuucacaaacguguacgccgacagcuucgugauccggggagaugaagugcggcagauugccccuggacagacaggcaagaucgccgacuacaacuacaagcugcccgacgacuucaccggcugugugauugccuggaacagcaacaaccuggacuccaaagucggcggcaacuacaauuaccgcuaccggcuguuccggaaguccaaucugaagcccuucgagcgggacaucagcaccgaaaucuaucaggccggcagcaccccuugcaacggcguggaaggcuucaacugcuacuucccacugcaguccuacggcuuucagcccacaaauggcgugggcuaucagcccuacagagugguggugcugagcuucgaacugcugcaugcuccugccacagugugcggcccuaagaaaagcaccaaucucgugaagaacaaaugcgugaacuucaacuucaacggccugaccggcaccggcgugcugacagagagcaacaagaaguuccugccauuccagcaguuuggccgggauaucgccgauaccacagacgccguuagagauccccagacacuggaaauccuggacaucaccccaugcagcuucggcggagugucugugaucaccccuggcaccaacaccagcaaucagguggcagugcuguaccagggcgugaacuguaccgaagugcccguggccauucacgccgaucagcugacaccuacauggcggguguacuccaccggcagcaauguguuucagaccagagccggcugucugaucggagccgagcacgugaacaauagcuacgagugcgacauccccaucggcgcuggcaucugugccagcuaccagacacagacaaacagccccagacgggcuagaagcguggccagccagagcaucauugccuacacaaugucucugggcgccgagaacagcguggccuacuccaacaacucuaucgcuauccccaccaacuucaccaucagcgugaccaccgagauccugccuguguccaugaccaagaccagcguggacugcaccauguacaucugcggcgauuccaccgagugcuccaaccugcugcugcaguacggcagcuucugcacccagcugaauagagcccugacagggaucgccguggaacaggacaagaacacccaagagguguucgcccaagugaagcaaaucuacaagaccccuccuaucaaggacuucggcggcuucaauuucagccagauucugcccgauccuagcaagcccagcaagcggagcuucaucgaggaccugcuguucaacaaagugacacuggccgacgccggcuucaucaagcaguauggcgauugucugggcgacauugccgccagggaucugauuugcgcccagaaguuuaacggacugacagugcugccuccucugcugaccgaugagaugaucgcccaguacacaucugcccugcuggccggcacaaucacaagcggcuggacauuuggagcuggcgccgcucugcagauccccuuugcuaugcagauggccuaccgguucaacggcaucggagugacccagaaugugcuguacgagaaccagaagcugaucgccaaccaguucaacagcgccaucggcaagauccaggacagccugagcagcacagcaagcgcccugggaaagcugcaggacguggucaaccagaaugcccaggcacugaacacccuggucaagcagcuguccuccaacuucggcgccaucagcucugugcugaacgauauccugagcagacuggacaaggucgaggccgaggugcagaucgacagacugaucacaggcagacugcagagccuccagacauacgugacccagcagcugaucagagccgccgagauuagagccucugccaaucuggccgccaccaagaugucugagugugugcugggccagagcaagagaguggacuuuugcggcaagggcuaccaccugaugagcuucccucagucugccccucacggcgugguguuucugcacgugacauaugugcccgcucaagagaagaauuucaccaccgcuccagccaucugccacgacggcaaagcccacuuuccuagagaaggcguguucguguccaacggcacccauugguucgugacacagcggaacuucuacgagccccagaucaucaccaccgacaacaccuucgugucuggcaacugcgacguugugaucggcauugugaacaauaccguguacgacccucugcagcccgagcuggacagcuucaaagaggaacuggacaaguacuuuaagaaccacacaagccccgacguggaccugggcgauaucagcggaaucaaugccagcgucgugaacauccagaaagagaucgaccggcugaacgagguggccaagaaucugaacgagagccugaucgaccugcaagaacuggggaaguacgagcaguacaucaaguggcccugguacaucuggcugggcuuuaucgccggacugauugccaucgugauggucacaaucaugcuguguugcaugaccagcugcuguagcugccugaagggcuguuguagcuguggcagcugcugcaaguucgacgaggacgauucugagcccgugcugaagggcgugaaacugcacuacaccugaggacuagucccuguucccagagcccacuuuuuuuucuuuuuuugaaauaaaauagccugucuuucagaucuaaaaaaaaaaaaaaaaaaaaaaaaaaaaaaaaaaaaaaaaaaaaaaaaaaaaaaaaaaaaaaaaaaaaaaaaaaaaaaaaaaaaaaaaaaaaaaaaaaaa

SEQ ID NO: 24819 - RNA, 4070 nt, Artificial Sequence
  SARS-CoV-2/Wuhan/WIV05/2019__EPI_ISL_402128 spike protein mRNA gc mod (1-1273)
aggagagucccgcagucggcguccagcggcucugcuuguucgugugugugucguugcaggccuuauucaagcuuaccauguucguguuccuggugcugcugccucugguguccagccagugugugaaccugaccaccagaacacagcugccuccagccuacaccaacagcuuuaccagaggcguguacuaccccgacaagguguucagauccagcgugcugcacucuacccaggaccuguuccugccuuucuucagcaacgugaccugguuccacgccauccacguguccggcaccaauggcaccaagagauucgacaaccccgugcugcccuucaacgacgggguguacuuugccagcaccgagaaguccaacaucaucagaggcuggaucuucggcaccacacuggacagcaagacccagagccugcugaucgugaacaacgccaccaacguggucaucaaagugugcgaguuccaguucugcaacgaccccuuccugggcgucuacuaccacaagaacaacaagagcuggauggaaagcgaguuccggguguacagcagcgccaacaacugcaccuucgaguacgugucccagccuuuccugauggaccuggaaggcaagcagggcaacuucaagaaccugcgcgaguucguguuuaagaacaucgacggcuacuucaagaucuacagcaagcacaccccuaucaaccucgugcgggaucugccucagggcuucucugcucuggaaccccugguggaucugcccaucggcaucaacaucacccgguuucagacacugcuggcccugcacagaagcuaccugacaccuggcgauagcagcagcggauggacagcuggugccgccgcuuacuaugugggcuaccugcagccuagaaccuuccugcugaaguacaacgagaacggcaccaucaccgacgccguggauugugcucuggauccucugagcgagacaaagugcacccugaaguccuucaccguggaaaagggcaucuaccagaccagcaacuuccgggugcagcccaccgaauccaucgugcgguuccccaauaucaccaaucugugccccuucggcgagguguucaaugccaccagauucgccucuguguacgccuggaaccggaagcggaucagcaauugcguggccgacuacuccgugcuguacaacuccgccagcuucagcaccuucaagugcuacggcguguccccuaccaagcugaacgaccugugcuucacaaacguguacgccgacagcuucgugauccggggagaugaagugcggcagauugccccuggacagacaggcaagaucgccgacuacaacuacaagcugcccgacgacuucaccggcugugugauugccuggaacagcaacaaccuggacuccaaagucggcggcaacuacaauuaccuguaccggcuguuccggaaguccaaucugaagcccuucgagcgggacaucuccaccgagaucuaucaggccggcagcaccccuuguaacggcguggaaggcuucaacugcuacuucccacugcaguccuacggcuuucagcccacaaauggcgugggcuaucagcccuacagagugguggugcugagcuucgaacugcugcaugccccugccacagugugcggcccuaagaaaagcaccaaucucgugaagaacaaaugcgugaacuucaacuucaacggccugaccggcaccggcgugcugacagagagcaacaagaaguuccugccauuccagcaguuuggccgggauaucgccgauaccacagacgccguuagagauccccagacacuggaaauccuggacaucaccccuugcagcuucggcggagugucugugaucaccccuggcaccaacaccagcaaucagguggcagugcuguaccaggacgugaacuguaccgaagugcccguggccauucacgccgaucagcugacaccuacauggcggguguacuccaccggcagcaauguguuucagaccagagccggcugucugaucggagccgagcacgugaacaauagcuacgagugcgacauccccaucggcgcuggaaucugcgccagcuaccagacacagacaaacagcccucggagagccagaagcguggccagccagagcaucauugccuacacaaugucucugggcgccgagaacagcguggccuacuccaacaacucuaucgcuauccccaccaacuucaccaucagcgugaccacagagauccugccuguguccaugaccaagaccagcguggacugcaccauguacaucugcggcgauuccaccgagugcuccaaccugcugcugcaguacggcagcuucugcacccagcugaauagagcccugacagggaucgccguggaacaggacaagaacacccaagagguguucgcccaagugaagcagaucuacaagaccccuccuaucaaggacuucggcggcuucaauuucagccagauucugcccgauccuagcaagcccagcaagcggagcuucaucgaggaccugcuguucaacaaagugacacuggccgacgccggcuucaucaagcaguauggcgauugucugggcgacauugccgccagggaucugauuugcgcccagaaguuuaacggacugacagugcugccuccucugcugaccgaugagaugaucgcccaguacacaucugcccugcuggccggcacaaucacaagcggcuggacauuuggagcaggcgccgcucugcagauccccuuugcuaugcagauggccuaccgguucaacggcaucggagugacccagaaugugcuguacgagaaccagaagcugaucgccaaccaguucaacagcgccaucggcaagauccaggacagccugagcagcacagcaagcgcccugggaaagcugcaggacguggucaaccagaaugcccaggcacugaacacccuggucaagcagcuguccuccaacuucggcgccaucagcucugugcugaacgauauccugagcagacuggacaaggucgaggccgaggugcagaucgacagacugaucacaggcagacugcagagccuccagacauacgugacccagcagcugaucagagccgccgagauuagagccucugccaaucuggccgccaccaagaugucugagugugugcugggccagagcaagagaguggacuuuugcggcaagggcuaccaccugaugagcuucccucagucugccccucacggcgugguguuucugcacgugacauaugugcccgcucaagagaagaauuucaccaccgcuccagccaucugccacgacggcaaagcccacuuuccuagagaaggcguguucguguccaacggcacccauugguucgugacacagcggaacuucuacgagccccagaucaucaccaccgacaacaccuucgugucuggcaacugcgacgucgugaucggcauugugaacaauaccguguacgacccucugcagcccgagcuggacagcuucaaagaggaacuggacaaguacuuuaagaaccacacaagccccgacguggaccugggcgauaucagcggaaucaaugccagcgucgugaacauccagaaagagaucgaccggcugaacgagguggccaagaaucugaacgagagccugaucgaccugcaagaacuggggaaguacgagcaguacaucaaguggcccugguacaucuggcugggcuuuaucgccggacugauugccaucgugauggucacaaucaugcuguguugcaugaccagcugcuguagcugccugaagggcuguuguagcuguggcagcugcugcaaguucgacgaggacgauucugagcccgugcugaagggcgugaaacugcacuacacaugaggacuagucccuguucccagagcccacuuuuuuuucuuuuuuugaaauaaaauagccugucuuucagaucuaaaaaaaaaaaaaaaaaaaaaaaaaaaaaaaaaaaaaaaaaaaaaaaaaaaaaaaaaaaaaaaaaaaaaaaaaaaaaaaaaaaaaaaaaaaaaaaaaaaa

SEQ ID NO: 24820 - RNA, 4070 nt, Artificial Sequence
  SARS-CoV-2/Wuhan/WIV05/2019__EPI_ISL_402128 spike protein mRNA gc mod (1-1273)(D614G)
aggagagucccgcagucggcguccagcggcucugcuuguucgugugugugucguugcaggccuuauucaagcuuaccauguucguguuccuggugcugcugccucugguguccagccagugugugaaccugaccaccagaacacagcugccuccagccuacaccaacagcuuuaccagaggcguguacuaccccgacaagguguucagauccagcgugcugcacucuacccaggaccuguuccugccuuucuucagcaacgugaccugguuccacgccauccacguguccggcaccaauggcaccaagagauucgacaaccccgugcugcccuucaacgacgggguguacuuugccagcaccgagaaguccaacaucaucagaggcuggaucuucggcaccacacuggacagcaagacccagagccugcugaucgugaacaacgccaccaacguggucaucaaagugugcgaguuccaguucugcaacgaccccuuccugggcgucuacuaccacaagaacaacaagagcuggauggaaagcgaguuccggguguacagcagcgccaacaacugcaccuucgaguacgugucccagccuuuccugauggaccuggaaggcaagcagggcaacuucaagaaccugcgcgaguucguguuuaagaacaucgacggcuacuucaagaucuacagcaagcacaccccuaucaaccucgugcgggaucugccucagggcuucucugcucuggaaccccugguggaucugcccaucggcaucaacaucacccgguuucagacacugcuggcccugcacagaagcuaccugacaccuggcgauagcagcagcggauggacagcuggugccgccgcuuacuaugugggcuaccugcagccuagaaccuuccugcugaaguacaacgagaacggcaccaucaccgacgccguggauugugcucuggauccucugagcgagacaaagugcacccugaaguccuucaccguggaaaagggcaucuaccagaccagcaacuuccgggugcagcccaccgaauccaucgugcgguuccccaauaucaccaaucugugccccuucggcgagguguucaaugccaccagauucgccucuguguacgccuggaaccggaagcggaucagcaauugcguggccgacuacuccgugcuguacaacuccgccagcuucagcaccuucaagugcuacggcguguccccuaccaagcugaacgaccugugcuucacaaacguguacgccgacagcuucgugauccggggagaugaagugcggcagauugccccuggacagacaggcaagaucgccgacuacaacuacaagcugcccgacgacuucaccggcugugugauugccuggaacagcaacaaccuggacuccaaagucggcggcaacuacaauuaccuguaccggcuguuccggaaguccaaucugaagcccuucgagcgggacaucuccaccgagaucuaucaggccggcagcaccccuuguaacggcguggaaggcuucaacugcuacuucccacugcaguccuacggcuuucagcccacaaauggcgugggcuaucagcccuacagagugguggugcugagcuucgaacugcugcaugccccugccacagugugcggcccuaagaaaagcaccaaucucgugaagaacaaaugcgugaacuucaacuucaacggccugaccggcaccggcgugcugacagagagcaacaagaaguuccugccauuccagcaguuuggccgggauaucgccgauaccacagacgccguuagagauccccagacacuggaaauccuggacaucaccccuugcagcuucggcggagugucugugaucaccccuggcaccaacaccagcaaucagguggcagugcuguaccagggcgugaacuguaccgaagugcccguggccauucacgccgaucagcugacaccuacauggcggguguacuccaccggcagcaauguguuucagaccagagccggcugucugaucggagccgagcacgugaacaauagcuacgagugcgacauccccaucggcgcuggaaucugcgccagcuaccagacacagacaaacagcccucggagagccagaagcguggccagccagagcaucauugccuacacaaugucucugggcgccgagaacagcguggccuacuccaacaacucuaucgcuauccccaccaacuucaccaucagcgugaccacagagauccugccuguguccaugaccaagaccagcguggacugcaccauguacaucugcggcgauuccaccgagugcuccaaccugcugcugcaguacggcagcuucugcacccagcugaauagagcccugacagggaucgccguggaacaggacaagaacacccaagagguguucgcccaagugaagcagaucuacaagaccccuccuaucaaggacuucggcggcuucaauuucagccagauucugcccgauccuagcaagcccagcaagcggagcuucaucgaggaccugcuguucaacaaagugacacuggccgacgccggcuucaucaagcaguauggcgauugucugggcgacauugccgccagggaucugauuugcgcccagaaguuuaacggacugacagugcugccuccucugcugaccgaugagaugaucgcccaguacacaucugcccugcuggccggcacaaucacaagcggcuggacauuuggagcaggcgccgcucugcagauccccuuugcuaugcagauggccuaccgguucaacggcaucggagugacccagaaugugcuguacgagaaccagaagcugaucgccaaccaguucaacagcgccaucggcaagauccaggacagccugagcagcacagcaagcgcccugggaaagcugcaggacguggucaaccagaaugcccaggcacugaacacccuggucaagcagcuguccuccaacuucggcgccaucagcucugugcugaacgauauccugagcagacuggacaaggucgaggccgaggugcagaucgacagacugaucacaggcagacugcagagccuccagacauacgugacccagcagcugaucagagccgccgagauuagagccucugccaaucuggccgccaccaagaugucugagugugugcugggccagagcaagagaguggacuuuugcggcaagggcuaccaccugaugagcuucccucagucugccccucacggcgugguguuucugcacgugacauaugugcccgcucaagagaagaauuucaccaccgcuccagccaucugccacgacggcaaagcccacuuuccuagagaaggcguguucguguccaacggcacccauugguucgugacacagcggaacuucuacgagccccagaucaucaccaccgacaacaccuucgugucuggcaacugcgacgucgugaucggcauugugaacaauaccguguacgacccucugcagcccgagcuggacagcuucaaagaggaacuggacaaguacuuuaagaaccacacaagccccgacguggaccugggcgauaucagcggaaucaaugccagcgucgugaacauccagaaagagaucgaccggcugaacgagguggccaagaaucugaacgagagccugaucgaccugcaagaacuggggaaguacgagcaguacaucaaguggcccugguacaucuggcugggcuuuaucgccggacugauugccaucgugauggucacaaucaugcuguguugcaugaccagcugcuguagcugccugaagggcuguuguagcuguggcagcugcugcaaguucgacgaggacgauucugagcccgugcugaagggcgugaaacugcacuacacaugaggacuagucccuguucccagagcccacuuuuuuuucuuuuuuugaaauaaaauagccugucuuucagaucuaaaaaaaaaaaaaaaaaaaaaaaaaaaaaaaaaaaaaaaaaaaaaaaaaaaaaaaaaaaaaaaaaaaaaaaaaaaaaaaaaaaaaaaaaaaaaaaaaaaa

SEQ ID NO: 24821 - RNA, 4070 nt, Artificial Sequence
  SARS-CoV-2/Wuhan/WIV05/2019__EPI_ISL_402128 spike protein mRNA gc mod (1-1273)(A222V_D614G)
aggagagucccgcagucggcguccagcggcucugcuuguucgugugugugucguugcaggccuuauucaagcuuaccauguucguguuccuggugcugcugccucugguguccagccagugugugaaccugaccaccagaacacagcugccuccagccuacaccaacagcuuuaccagaggcguguacuaccccgacaagguguucagauccagcgugcugcacucuacccaggaccuguuccugccuuucuucagcaacgugaccugguuccacgccauccacguguccggcaccaauggcaccaagagauucgacaaccccgugcugcccuucaacgacgggguguacuuugccagcaccgagaaguccaacaucaucagaggcuggaucuucggcaccacacuggacagcaagacccagagccugcugaucgugaacaacgccaccaacguggucaucaaagugugcgaguuccaguucugcaacgaccccuuccugggcgucuacuaccacaagaacaacaagagcuggauggaaagcgaguuccggguguacagcagcgccaacaacugcaccuucgaguacgugucccagccuuuccugauggaccuggaaggcaagcagggcaacuucaagaaccugcgcgaguucguguuuaagaacaucgacggcuacuucaagaucuacagcaagcacaccccuaucaaccucgugcgggaucugccucagggcuucucugugcuggaaccccugguggaucugcccaucggcaucaacaucacccgguuucagacacugcuggcccugcacagaagcuaccugacaccuggcgauagcagcagcggauggacagcuggugccgccgcuuacuaugugggcuaccugcagccuagaaccuuccugcugaaguacaacgagaacggcaccaucaccgacgccguggauugugcucuggauccucugagcgagacaaagugcacccugaaguccuucaccguggaaaagggcaucuaccagaccagcaacuuccgggugcagcccaccgaauccaucgugcgguuccccaauaucaccaaucugugccccuucggcgagguguucaaugccaccagauucgccucuguguacgccuggaaccggaagcggaucagcaauugcguggccgacuacuccgugcuguacaacuccgccagcuucagcaccuucaagugcuacggcguguccccuaccaagcugaacgaccugugcuucacaaacguguacgccgacagcuucgugauccggggagaugaagugcggcagauugccccuggacagacaggcaagaucgccgacuacaacuacaagcugcccgacgacuucaccggcugugugauugccuggaacagcaacaaccuggacuccaaagucggcggcaacuacaauuaccuguaccggcuguuccggaaguccaaucugaagcccuucgagcgggacaucuccaccgagaucuaucaggccggcagcaccccuuguaacggcguggaaggcuucaacugcuacuucccacugcaguccuacggcuuucagcccacaaauggcgugggcuaucagcccuacagagugguggugcugagcuucgaacugcugcaugccccugccacagugugcggcccuaagaaaagcaccaaucucgugaagaacaaaugcgugaacuucaacuucaacggccugaccggcaccggcgugcugacagagagcaacaagaaguuccugccauuccagcaguuuggccgggauaucgccgauaccacagacgccguuagagauccccagacacuggaaauccuggacaucaccccuugcagcuucggcggagugucugugaucaccccuggcaccaacaccagcaaucagguggcagugcuguaccagggcgugaacuguaccgaagugcccguggccauucacgccgaucagcugacaccuacauggcggguguacuccaccggcagcaauguguuucagaccagagccggcugucugaucggagccgagcacgugaacaauagcuacgagugcgacauccccaucggcgcuggaaucugcgccagcuaccagacacagacaaacagcccucggagagccagaagcguggccagccagagcaucauugccuacacaaugucucugggcgccgagaacagcguggccuacuccaacaacucuaucgcuauccccaccaacuucaccaucagcgugaccacagagauccugccuguguccaugaccaagaccagcguggacugcaccauguacaucugcggcgauuccaccgagugcuccaaccugcugcugcaguacggcagcuucugcacccagcugaauagagcccugacagggaucgccguggaacaggacaagaacacccaagagguguucgcccaagugaagcagaucuacaagaccccuccuaucaaggacuucggcggcuucaauuucagccagauucugcccgauccuagcaagcccagcaagcggagcuucaucgaggaccugcuguucaacaaagugacacuggccgacgccggcuucaucaagcaguauggcgauugucugggcgacauugccgccagggaucugauuugcgcccagaaguuuaacggacugacagugcugccuccucugcugaccgaugagaugaucgcccaguacacaucugcccugcuggccggcacaaucacaagcggcuggacauuuggagcaggcgccgcucugcagauccccuuugcuaugcagauggccuaccgguucaacggcaucggagugacccagaaugugcuguacgagaaccagaagcugaucgccaaccaguucaacagcgccaucggcaagauccaggacagccugagcagcacagcaagcgcccugggaaagcugcaggacguggucaaccagaaugcccaggcacugaacacccuggucaagcagcuguccuccaacuucggcgccaucagcucugugcugaacgauauccugagcagacuggacaaggucgaggccgaggugcagaucgacagacugaucacaggcagacugcagagccuccagacauacgugacccagcagcugaucagagccgccgagauuagagccucugccaaucuggccgccaccaagaugucugagugugugcugggccagagcaagagaguggacuuuugcggcaagggcuaccaccugaugagcuucccucagucugccccucacggcgugguguuucugcacgugacauaugugcccgcucaagagaagaauuucaccaccgcuccagccaucugccacgacggcaaagcccacuuuccuagagaaggcguguucguguccaacggcacccauugguucgugacacagcggaacuucuacgagccccagaucaucaccaccgacaacaccuucgugucuggcaacugcgacgucgugaucggcauugugaacaauaccguguacgacccucugcagcccgagcuggacagcuucaaagaggaacuggacaaguacuuuaagaaccacacaagccccgacguggaccugggcgauaucagcggaaucaaugccagcgucgugaacauccagaaagagaucgaccggcugaacgagguggccaagaaucugaacgagagccugaucgaccugcaagaacuggggaaguacgagcaguacaucaaguggcccugguacaucuggcugggcuuuaucgccggacugauugccaucgugauggucacaaucaugcuguguugcaugaccagcugcuguagcugccugaagggcuguuguagcuguggcagcugcugcaaguucgacgaggacgauucugagcccgugcugaagggcgugaaacugcacuacacaugaggacuagucccuguucccagagcccacuuuuuuuucuuuuuuugaaauaaaauagccugucuuucagaucuaaaaaaaaaaaaaaaaaaaaaaaaaaaaaaaaaaaaaaaaaaaaaaaaaaaaaaaaaaaaaaaaaaaaaaaaaaaaaaaaaaaaaaaaaaaaaaaaaaaa

SEQ ID NO: 24822 - RNA, 4070 nt, Artificial Sequence
  SARS-CoV-2/Wuhan/WIV05/2019__EPI_ISL_402128 spike protein mRNA gc mod (1-1273)(N439K_D614G)
aggagagucccgcagucggcguccagcggcucugcuuguucgugugugugucguugcaggccuuauucaagcuuaccauguucguguuccuggugcugcugccucugguguccagccagugugugaaccugaccaccagaacacagcugccuccagccuacaccaacagcuuuaccagaggcguguacuaccccgacaagguguucagauccagcgugcugcacucuacccaggaccuguuccugccuuucuucagcaacgugaccugguuccacgccauccacguguccggcaccaauggcaccaagagauucgacaaccccgugcugcccuucaacgacgggguguacuuugccagcaccgagaaguccaacaucaucagaggcuggaucuucggcaccacacuggacagcaagacccagagccugcugaucgugaacaacgccaccaacguggucaucaaagugugcgaguuccaguucugcaacgaccccuuccugggcgucuacuaccacaagaacaacaagagcuggauggaaagcgaguuccggguguacagcagcgccaacaacugcaccuucgaguacgugucccagccuuuccugauggaccuggaaggcaagcagggcaacuucaagaaccugcgcgaguucguguuuaagaacaucgacggcuacuucaagaucuacagcaagcacaccccuaucaaccucgugcgggaucugccucagggcuucucugcucuggaaccccugguggaucugcccaucggcaucaacaucacccgguuucagacacugcuggcccugcacagaagcuaccugacaccuggcgauagcagcagcggauggacagcuggugccgccgcuuacuaugugggcuaccugcagccuagaaccuuccugcugaaguacaacgagaacggcaccaucaccgacgccguggauugugcucuggauccucugagcgagacaaagugcacccugaaguccuucaccguggaaaagggcaucuaccagaccagcaacuuccgggugcagcccaccgaauccaucgugcgguuccccaauaucaccaaucugugccccuucggcgagguguucaaugccaccagauucgccucuguguacgccuggaaccggaagcggaucagcaauugcguggccgacuacuccgugcuguacaacuccgccagcuucagcaccuucaagugcuacggcguguccccuaccaagcugaacgaccugugcuucacaaacguguacgccgacagcuucgugauccggggagaugaagugcggcagauugccccuggacagacaggcaagaucgccgacuacaacuacaagcugcccgacgacuucaccggcugugugauugccuggaacagcaagaaccuggacuccaaagucggcggcaacuacaauuaccuguaccggcuguuccggaaguccaaucugaagcccuucgagcgggacaucuccaccgagaucuaucaggccggcagcaccccuuguaacggcguggaaggcuucaacugcuacuucccacugcaguccuacggcuuucagcccacaaauggcgugggcuaucagcccuacagagugguggugcugagcuucgaacugcugcaugccccugccacagugugcggcccuaagaaaagcaccaaucucgugaagaacaaaugcgugaacuucaacuucaacggccugaccggcaccggcgugcugacagagagcaacaagaaguuccugccauuccagcaguuuggccgggauaucgccgauaccacagacgccguuagagauccccagacacuggaaauccuggacaucaccccuugcagcuucggcggagugucugugaucaccccuggcaccaacaccagcaaucagguggcagugcuguaccagggcgugaacuguaccgaagugcccguggccauucacgccgaucagcugacaccuacauggcggguguacuccaccggcagcaauguguuucagaccagagccggcugucugaucggagccgagcacgugaacaauagcuacgagugcgacauccccaucggcgcuggaaucugcgccagcuaccagacacagacaaacagcccucggagagccagaagcguggccagccagagcaucauugccuacacaaugucucugggcgccgagaacagcguggccuacuccaacaacucuaucgcuauccccaccaacuucaccaucagcgugaccacagagauccugccuguguccaugaccaagaccagcguggacugcaccauguacaucugcggcgauuccaccgagugcuccaaccugcugcugcaguacggcagcuucugcacccagcugaauagagcccugacagggaucgccguggaacaggacaagaacacccaagagguguucgcccaagugaagcagaucuacaagaccccuccuaucaaggacuucggcggcuucaauuucagccagauucugcccgauccuagcaagcccagcaagcggagcuucaucgaggaccugcuguucaacaaagugacacuggccgacgccggcuucaucaagcaguauggcgauugucugggcgacauugccgccagggaucugauuugcgcccagaaguuuaacggacugacagugcugccuccucugcugaccgaugagaugaucgcccaguacacaucugcccugcuggccggcacaaucacaagcggcuggacauuuggagcaggcgccgcucugcagauccccuuugcuaugcagauggccuaccgguucaacggcaucggagugacccagaaugugcuguacgagaaccagaagcugaucgccaaccaguucaacagcgccaucggcaagauccaggacagccugagcagcacagcaagcgcccugggaaagcugcaggacguggucaaccagaaugcccaggcacugaacacccuggucaagcagcuguccuccaacuucggcgccaucagcucugugcugaacgauauccugagcagacuggacaaggucgaggccgaggugcagaucgacagacugaucacaggcagacugcagagccuccagacauacgugacccagcagcugaucagagccgccgagauuagagccucugccaaucuggccgccaccaagaugucugagugugugcugggccagagcaagagaguggacuuuugcggcaagggcuaccaccugaugagcuucccucagucugccccucacggcgugguguuucugcacgugacauaugugcccgcucaagagaagaauuucaccaccgcuccagccaucugccacgacggcaaagcccacuuuccuagagaaggcguguucguguccaacggcacccauugguucgugacacagcggaacuucuacgagccccagaucaucaccaccgacaacaccuucgugucuggcaacugcgacgucgugaucggcauugugaacaauaccguguacgacccucugcagcccgagcuggacagcuucaaagaggaacuggacaaguacuuuaagaaccacacaagccccgacguggaccugggcgauaucagcggaaucaaugccagcgucgugaacauccagaaagagaucgaccggcugaacgagguggccaagaaucugaacgagagccugaucgaccugcaagaacuggggaaguacgagcaguacaucaaguggcccugguacaucuggcugggcuuuaucgccggacugauugccaucgugauggucacaaucaugcuguguugcaugaccagcugcuguagcugccugaagggcuguuguagcuguggcagcugcugcaaguucgacgaggacgauucugagcccgugcugaagggcgugaaacugcacuacacaugaggacuagucccuguucccagagcccacuuuuuuuucuuuuuuugaaauaaaauagccugucuuucagaucuaaaaaaaaaaaaaaaaaaaaaaaaaaaaaaaaaaaaaaaaaaaaaaaaaaaaaaaaaaaaaaaaaaaaaaaaaaaaaaaaaaaaaaaaaaaaaaaaaaaa

SEQ ID NO: 24823 - RNA, 4070 nt, Artificial Sequence
  SARS-CoV-2/Wuhan/WIV05/2019__EPI_ISL_402128 spike protein mRNA gc mod (1-1273)(S477N_D614G)
aggagagucccgcagucggcguccagcggcucugcuuguucgugugugugucguugcaggccuuauucaagcuuaccauguucguguuccuggugcugcugccucugguguccagccagugugugaaccugaccaccagaacacagcugccuccagccuacaccaacagcuuuaccagaggcguguacuaccccgacaagguguucagauccagcgugcugcacucuacccaggaccuguuccugccuuucuucagcaacgugaccugguuccacgccauccacguguccggcaccaauggcaccaagagauucgacaaccccgugcugcccuucaacgacgggguguacuuugccagcaccgagaaguccaacaucaucagaggcuggaucuucggcaccacacuggacagcaagacccagagccugcugaucgugaacaacgccaccaacguggucaucaaagugugcgaguuccaguucugcaacgaccccuuccugggcgucuacuaccacaagaacaacaagagcuggauggaaagcgaguuccggguguacagcagcgccaacaacugcaccuucgaguacgugucccagccuuuccugauggaccuggaaggcaagcagggcaacuucaagaaccugcgcgaguucguguuuaagaacaucgacggcuacuucaagaucuacagcaagcacaccccuaucaaccucgugcgggaucugccucagggcuucucugcucuggaaccccugguggaucugcccaucggcaucaacaucacccgguuucagacacugcuggcccugcacagaagcuaccugacaccuggcgauagcagcagcggauggacagcuggugccgccgcuuacuaugugggcuaccugcagccuagaaccuuccugcugaaguacaacgagaacggcaccaucaccgacgccguggauugugcucuggauccucugagcgagacaaagugcacccugaaguccuucaccguggaaaagggcaucuaccagaccagcaacuuccgggugcagcccaccgaauccaucgugcgguuccccaauaucaccaaucugugccccuucggcgagguguucaaugccaccagauucgccucuguguacgccuggaaccggaagcggaucagcaauugcguggccgacuacuccgugcuguacaacuccgccagcuucagcaccuucaagugcuacggcguguccccuaccaagcugaacgaccugugcuucacaaacguguacgccgacagcuucgugauccggggagaugaagugcggcagauugccccuggacagacaggcaagaucgccgacuacaacuacaagcugcccgacgacuucaccggcugugugauugccuggaacagcaacaaccuggacuccaaagucggcggcaacuacaauuaccuguaccggcuguuccggaaguccaaucugaagcccuucgagcgggacaucuccaccgagaucuaucaggccggcaacaccccuuguaacggcguggaaggcuucaacugcuacuucccacugcaguccuacggcuuucagcccacaaauggcgugggcuaucagcccuacagagugguggugcugagcuucgaacugcugcaugccccugccacagugugcggcccuaagaaaagcaccaaucucgugaagaacaaaugcgugaacuucaacuucaacggccugaccggcaccggcgugcugacagagagcaacaagaaguuccugccauuccagcaguuuggccgggauaucgccgauaccacagacgccguuagagauccccagacacuggaaauccuggacaucaccccuugcagcuucggcggagugucugugaucaccccuggcaccaacaccagcaaucagguggcagugcuguaccagggcgugaacuguaccgaagugcccguggccauucacgccgaucagcugacaccuacauggcggguguacuccaccggcagcaauguguuucagaccagagccggcugucugaucggagccgagcacgugaacaauagcuacgagugcgacauccccaucggcgcuggaaucugcgccagcuaccagacacagacaaacagcccucggagagccagaagcguggccagccagagcaucauugccuacacaaugucucugggcgccgagaacagcguggccuacuccaacaacucuaucgcuauccccaccaacuucaccaucagcgugaccacagagauccugccuguguccaugaccaagaccagcguggacugcaccauguacaucugcggcgauuccaccgagugcuccaaccugcugcugcaguacggcagcuucugcacccagcugaauagagcccugacagggaucgccguggaacaggacaagaacacccaagagguguucgcccaagugaagcagaucuacaagaccccuccuaucaaggacuucggcggcuucaauuucagccagauucugcccgauccuagcaagcccagcaagcggagcuucaucgaggaccugcuguucaacaaagugacacuggccgacgccggcuucaucaagcaguauggcgauugucugggcgacauugccgccagggaucugauuugcgcccagaaguuuaacggacugacagugcugccuccucugcugaccgaugagaugaucgcccaguacacaucugcccugcuggccggcacaaucacaagcggcuggacauuuggagcaggcgccgcucugcagauccccuuugcuaugcagauggccuaccgguucaacggcaucggagugacccagaaugugcuguacgagaaccagaagcugaucgccaaccaguucaacagcgccaucggcaagauccaggacagccugagcagcacagcaagcgcccugggaaagcugcaggacguggucaaccagaaugcccaggcacugaacacccuggucaagcagcuguccuccaacuucggcgccaucagcucugugcugaacgauauccugagcagacuggacaaggucgaggccgaggugcagaucgacagacugaucacaggcagacugcagagccuccagacauacgugacccagcagcugaucagagccgccgagauuagagccucugccaaucuggccgccaccaagaugucugagugugugcugggccagagcaagagaguggacuuuugcggcaagggcuaccaccugaugagcuucccucagucugccccucacggcgugguguuucugcacgugacauaugugcccgcucaagagaagaauuucaccaccgcuccagccaucugccacgacggcaaagcccacuuuccuagagaaggcguguucguguccaacggcacccauugguucgugacacagcggaacuucuacgagccccagaucaucaccaccgacaacaccuucgugucuggcaacugcgacgucgugaucggcauugugaacaauaccguguacgacccucugcagcccgagcuggacagcuucaaagaggaacuggacaaguacuuuaagaaccacacaagccccgacguggaccugggcgauaucagcggaaucaaugccagcgucgugaacauccagaaagagaucgaccggcugaacgagguggccaagaaucugaacgagagccugaucgaccugcaagaacuggggaaguacgagcaguacaucaaguggcccugguacaucuggcugggcuuuaucgccggacugauugccaucgugauggucacaaucaugcuguguugcaugaccagcugcuguagcugccugaagggcuguuguagcuguggcagcugcugcaaguucgacgaggacgauucugagcccgugcugaagggcgugaaacugcacuacacaugaggacuagucccuguucccagagcccacuuuuuuuucuuuuuuugaaauaaaauagccugucuuucagaucuaaaaaaaaaaaaaaaaaaaaaaaaaaaaaaaaaaaaaaaaaaaaaaaaaaaaaaaaaaaaaaaaaaaaaaaaaaaaaaaaaaaaaaaaaaaaaaaaaaaa

SEQ ID NO: 24824 - RNA, 4070 nt, Artificial Sequence
  SARS-CoV-2/Wuhan/WIV05/2019__EPI_ISL_402128 spike protein mRNA gc mod (1-1273)(N501Y_D614G)
aggagagucccgcagucggcguccagcggcucugcuuguucgugugugugucguugcaggccuuauucaagcuuaccauguucguguuccuggugcugcugccucugguguccagccagugugugaaccugaccaccagaacacagcugccuccagccuacaccaacagcuuuaccagaggcguguacuaccccgacaagguguucagauccagcgugcugcacucuacccaggaccuguuccugccuuucuucagcaacgugaccugguuccacgccauccacguguccggcaccaauggcaccaagagauucgacaaccccgugcugcccuucaacgacgggguguacuuugccagcaccgagaaguccaacaucaucagaggcuggaucuucggcaccacacuggacagcaagacccagagccugcugaucgugaacaacgccaccaacguggucaucaaagugugcgaguuccaguucugcaacgaccccuuccugggcgucuacuaccacaagaacaacaagagcuggauggaaagcgaguuccggguguacagcagcgccaacaacugcaccuucgaguacgugucccagccuuuccugauggaccuggaaggcaagcagggcaacuucaagaaccugcgcgaguucguguuuaagaacaucgacggcuacuucaagaucuacagcaagcacaccccuaucaaccucgugcgggaucugccucagggcuucucugcucuggaaccccugguggaucugcccaucggcaucaacaucacccgguuucagacacugcuggcccugcacagaagcuaccugacaccuggcgauagcagcagcggauggacagcuggugccgccgcuuacuaugugggcuaccugcagccuagaaccuuccugcugaaguacaacgagaacggcaccaucaccgacgccguggauugugcucuggauccucugagcgagacaaagugcacccugaaguccuucaccguggaaaagggcaucuaccagaccagcaacuuccgggugcagcccaccgaauccaucgugcgguuccccaauaucaccaaucugugccccuucggcgagguguucaaugccaccagauucgccucuguguacgccuggaaccggaagcggaucagcaauugcguggccgacuacuccgugcuguacaacuccgccagcuucagcaccuucaagugcuacggcguguccccuaccaagcugaacgaccugugcuucacaaacguguacgccgacagcuucgugauccggggagaugaagugcggcagauugccccuggacagacaggcaagaucgccgacuacaacuacaagcugcccgacgacuucaccggcugugugauugccuggaacagcaacaaccuggacuccaaagucggcggcaacuacaauuaccuguaccggcuguuccggaaguccaaucugaagcccuucgagcgggacaucuccaccgagaucuaucaggccggcagcaccccuuguaacggcguggaaggcuucaacugcuacuucccacugcaguccuacggcuuucagcccacauacggcgugggcuaucagcccuacagagugguggugcugagcuucgaacugcugcaugccccugccacagugugcggcccuaagaaaagcaccaaucucgugaagaacaaaugcgugaacuucaacuucaacggccugaccggcaccggcgugcugacagagagcaacaagaaguuccugccauuccagcaguuuggccgggauaucgccgauaccacagacgccguuagagauccccagacacuggaaauccuggacaucaccccuugcagcuucggcggagugucugugaucaccccuggcaccaacaccagcaaucagguggcagugcuguaccagggcgugaacuguaccgaagugcccguggccauucacgccgaucagcugacaccuacauggcggguguacuccaccggcagcaauguguuucagaccagagccggcugucugaucggagccgagcacgugaacaauagcuacgagugcgacauccccaucggcgcuggaaucugcgccagcuaccagacacagacaaacagcccucggagagccagaagcguggccagccagagcaucauugccuacacaaugucucugggcgccgagaacagcguggccuacuccaacaacucuaucgcuauccccaccaacuucaccaucagcgugaccacagagauccugccuguguccaugaccaagaccagcguggacugcaccauguacaucugcggcgauuccaccgagugcuccaaccugcugcugcaguacggcagcuucugcacccagcugaauagagcccugacagggaucgccguggaacaggacaagaacacccaagagguguucgcccaagugaagcagaucuacaagaccccuccuaucaaggacuucggcggcuucaauuucagccagauucugcccgauccuagcaagcccagcaagcggagcuucaucgaggaccugcuguucaacaaagugacacuggccgacgccggcuucaucaagcaguauggcgauugucugggcgacauugccgccagggaucugauuugcgcccagaaguuuaacggacugacagugcugccuccucugcugaccgaugagaugaucgcccaguacacaucugcccugcuggccggcacaaucacaagcggcuggacauuuggagcaggcgccgcucugcagauccccuuugcuaugcagauggccuaccgguucaacggcaucggagugacccagaaugugcuguacgagaaccagaagcugaucgccaaccaguucaacagcgccaucggcaagauccaggacagccugagcagcacagcaagcgcccugggaaagcugcaggacguggucaaccagaaugcccaggcacugaacacccuggucaagcagcuguccuccaacuucggcgccaucagcucugugcugaacgauauccugagcagacuggacaaggucgaggccgaggugcagaucgacagacugaucacaggcagacugcagagccuccagacauacgugacccagcagcugaucagagccgccgagauuagagccucugccaaucuggccgccaccaagaugucugagugugugcugggccagagcaagagaguggacuuuugcggcaagggcuaccaccugaugagcuucccucagucugccccucacggcgugguguuucugcacgugacauaugugcccgcucaagagaagaauuucaccaccgcuccagccaucugccacgacggcaaagcccacuuuccuagagaaggcguguucguguccaacggcacccauugguucgugacacagcggaacuucuacgagccccagaucaucaccaccgacaacaccuucgugucuggcaacugcgacgucgugaucggcauugugaacaauaccguguacgacccucugcagcccgagcuggacagcuucaaagaggaacuggacaaguacuuuaagaaccacacaagccccgacguggaccugggcgauaucagcggaaucaaugccagcgucgugaacauccagaaagagaucgaccggcugaacgagguggccaagaaucugaacgagagccugaucgaccugcaagaacuggggaaguacgagcaguacaucaaguggcccugguacaucuggcugggcuuuaucgccggacugauugccaucgugauggucacaaucaugcuguguugcaugaccagcugcuguagcugccugaagggcuguuguagcuguggcagcugcugcaaguucgacgaggacgauucugagcccgugcugaagggcgugaaacugcacuacacaugaggacuagucccuguucccagagcccacuuuuuuuucuuuuuuugaaauaaaauagccugucuuucagaucuaaaaaaaaaaaaaaaaaaaaaaaaaaaaaaaaaaaaaaaaaaaaaaaaaaaaaaaaaaaaaaaaaaaaaaaaaaaaaaaaaaaaaaaaaaaaaaaaaaaa

SEQ ID NO: 24825 - RNA, 4064 nt, Artificial Sequence
  SARS-CoV-2/Wuhan/WIV05/2019__EPI_ISL_402128 spike protein mRNA gc mod (1-1273)(H69del_V70del_D614G)
aggagagucccgcagucggcguccagcggcucugcuuguucgugugugugucguugcaggccuuauucaagcuuaccauguucguguuccuggugcugcugccucugguguccagccagugugugaaccugaccaccagaacacagcugccuccagccuacaccaacagcuuuaccagaggcguguacuaccccgacaagguguucagauccagcgugcugcacucuacccaggaccuguuccugccuuucuucagcaacgugaccugguuccacgccaucuccggcaccaauggcaccaagagauucgacaaccccgugcugcccuucaacgacgggguguacuuugccagcaccgagaaguccaacaucaucagaggcuggaucuucggcaccacacuggacagcaagacccagagccugcugaucgugaacaacgccaccaacguggucaucaaagugugcgaguuccaguucugcaacgaccccuuccugggcgucuacuaccacaagaacaacaagagcuggauggaaagcgaguuccggguguacagcagcgccaacaacugcaccuucgaguacgugucccagccuuuccugauggaccuggaaggcaagcagggcaacuucaagaaccugcgcgaguucguguuuaagaacaucgacggcuacuucaagaucuacagcaagcacaccccuaucaaccucgugcgggaucugccucagggcuucucugcucuggaaccccugguggaucugcccaucggcaucaacaucacccgguuucagacacugcuggcccugcacagaagcuaccugacaccuggcgauagcagcagcggauggacagcuggugccgccgcuuacuaugugggcuaccugcagccuagaaccuuccugcugaaguacaacgagaacggcaccaucaccgacgccguggauugugcucuggauccucugagcgagacaaagugcacccugaaguccuucaccguggaaaagggcaucuaccagaccagcaacuuccgggugcagcccaccgaauccaucgugcgguuccccaauaucaccaaucugugccccuucggcgagguguucaaugccaccagauucgccucuguguacgccuggaaccggaagcggaucagcaauugcguggccgacuacuccgugcuguacaacuccgccagcuucagcaccuucaagugcuacggcguguccccuaccaagcugaacgaccugugcuucacaaacguguacgccgacagcuucgugauccggggagaugaagugcggcagauugccccuggacagacaggcaagaucgccgacuacaacuacaagcugcccgacgacuucaccggcugugugauugccuggaacagcaacaaccuggacuccaaagucggcggcaacuacaauuaccuguaccggcuguuccggaaguccaaucugaagcccuucgagcgggacaucuccaccgagaucuaucaggccggcagcaccccuuguaacggcguggaaggcuucaacugcuacuucccacugcaguccuacggcuuucagcccacaaauggcgugggcuaucagcccuacagagugguggugcugagcuucgaacugcugcaugccccugccacagugugcggcccuaagaaaagcaccaaucucgugaagaacaaaugcgugaacuucaacuucaacggccugaccggcaccggcgugcugacagagagcaacaagaaguuccugccauuccagcaguuuggccgggauaucgccgauaccacagacgccguuagagauccccagacacuggaaauccuggacaucaccccuugcagcuucggcggagugucugugaucaccccuggcaccaacaccagcaaucagguggcagugcuguaccagggcgugaacuguaccgaagugcccguggccauucacgccgaucagcugacaccuacauggcggguguacuccaccggcagcaauguguuucagaccagagccggcugucugaucggagccgagcacgugaacaauagcuacgagugcgacauccccaucggcgcuggaaucugcgccagcuaccagacacagacaaacagcccucggagagccagaagcguggccagccagagcaucauugccuacacaaugucucugggcgccgagaacagcguggccuacuccaacaacucuaucgcuauccccaccaacuucaccaucagcgugaccacagagauccugccuguguccaugaccaagaccagcguggacugcaccauguacaucugcggcgauuccaccgagugcuccaaccugcugcugcaguacggcagcuucugcacccagcugaauagagcccugacagggaucgccguggaacaggacaagaacacccaagagguguucgcccaagugaagcagaucuacaagaccccuccuaucaaggacuucggcggcuucaauuucagccagauucugcccgauccuagcaagcccagcaagcggagcuucaucgaggaccugcuguucaacaaagugacacuggccgacgccggcuucaucaagcaguauggcgauugucugggcgacauugccgccagggaucugauuugcgcccagaaguuuaacggacugacagugcugccuccucugcugaccgaugagaugaucgcccaguacacaucugcccugcuggccggcacaaucacaagcggcuggacauuuggagcaggcgccgcucugcagauccccuuugcuaugcagauggccuaccgguucaacggcaucggagugacccagaaugugcuguacgagaaccagaagcugaucgccaaccaguucaacagcgccaucggcaagauccaggacagccugagcagcacagcaagcgcccugggaaagcugcaggacguggucaaccagaaugcccaggcacugaacacccuggucaagcagcuguccuccaacuucggcgccaucagcucugugcugaacgauauccugagcagacuggacaaggucgaggccgaggugcagaucgacagacugaucacaggcagacugcagagccuccagacauacgugacccagcagcugaucagagccgccgagauuagagccucugccaaucuggccgccaccaagaugucugagugugugcugggccagagcaagagaguggacuuuugcggcaagggcuaccaccugaugagcuucccucagucugccccucacggcgugguguuucugcacgugacauaugugcccgcucaagagaagaauuucaccaccgcuccagccaucugccacgacggcaaagcccacuuuccuagagaaggcguguucguguccaacggcacccauugguucgugacacagcggaacuucuacgagccccagaucaucaccaccgacaacaccuucgugucuggcaacugcgacgucgugaucggcauugugaacaauaccguguacgacccucugcagcccgagcuggacagcuucaaagaggaacuggacaaguacuuuaagaaccacacaagccccgacguggaccugggcgauaucagcggaaucaaugccagcgucgugaacauccagaaagagaucgaccggcugaacgagguggccaagaaucugaacgagagccugaucgaccugcaagaacuggggaaguacgagcaguacaucaaguggcccugguacaucuggcugggcuuuaucgccggacugauugccaucgugauggucacaaucaugcuguguugcaugaccagcugcuguagcugccugaagggcuguuguagcuguggcagcugcugcaaguucgacgaggacgauucugagcccgugcugaagggcgugaaacugcacuacacaugaggacuagucccuguucccagagcccacuuuuuuuucuuuuuuugaaauaaaauagccugucuuucagaucuaaaaaaaaaaaaaaaaaaaaaaaaaaaaaaaaaaaaaaaaaaaaaaaaaaaaaaaaaaaaaaaaaaaaaaaaaaaaaaaaaaaaaaaaaaaaaaaaaaaa

SEQ ID NO: 24826 - RNA, 4070 nt, Artificial Sequence
  SARS-CoV-2/Wuhan/WIV05/2019__EPI_ISL_402128 spike protein mRNA gc mod (1-1273)(Y453F_D614G)
aggagagucccgcagucggcguccagcggcucugcuuguucgugugugugucguugcaggccuuauucaagcuuaccauguucguguuccuggugcugcugccucugguguccagccagugugugaaccugaccaccagaacacagcugccuccagccuacaccaacagcuuuaccagaggcguguacuaccccgacaagguguucagauccagcgugcugcacucuacccaggaccuguuccugccuuucuucagcaacgugaccugguuccacgccauccacguguccggcaccaauggcaccaagagauucgacaaccccgugcugcccuucaacgacgggguguacuuugccagcaccgagaaguccaacaucaucagaggcuggaucuucggcaccacacuggacagcaagacccagagccugcugaucgugaacaacgccaccaacguggucaucaaagugugcgaguuccaguucugcaacgaccccuuccugggcgucuacuaccacaagaacaacaagagcuggauggaaagcgaguuccggguguacagcagcgccaacaacugcaccuucgaguacgugucccagccuuuccugauggaccuggaaggcaagcagggcaacuucaagaaccugcgcgaguucguguuuaagaacaucgacggcuacuucaagaucuacagcaagcacaccccuaucaaccucgugcgggaucugccucagggcuucucugcucuggaaccccugguggaucugcccaucggcaucaacaucacccgguuucagacacugcuggcccugcacagaagcuaccugacaccuggcgauagcagcagcggauggacagcuggugccgccgcuuacuaugugggcuaccugcagccuagaaccuuccugcugaaguacaacgagaacggcaccaucaccgacgccguggauugugcucuggauccucugagcgagacaaagugcacccugaaguccuucaccguggaaaagggcaucuaccagaccagcaacuuccgggugcagcccaccgaauccaucgugcgguuccccaauaucaccaaucugugccccuucggcgagguguucaaugccaccagauucgccucuguguacgccuggaaccggaagcggaucagcaauugcguggccgacuacuccgugcuguacaacuccgccagcuucagcaccuucaagugcuacggcguguccccuaccaagcugaacgaccugugcuucacaaacguguacgccgacagcuucgugauccggggagaugaagugcggcagauugccccuggacagacaggcaagaucgccgacuacaacuacaagcugcccgacgacuucaccggcugugugauugccuggaacagcaacaaccuggacuccaaagucggcggcaacuacaauuaccuguuccggcuguuccggaaguccaaucugaagcccuucgagcgggacaucuccaccgagaucuaucaggccggcagcaccccuuguaacggcguggaaggcuucaacugcuacuucccacugcaguccuacggcuuucagcccacaaauggcgugggcuaucagcccuacagagugguggugcugagcuucgaacugcugcaugccccugccacagugugcggcccuaagaaaagcaccaaucucgugaagaacaaaugcgugaacuucaacuucaacggccugaccggcaccggcgugcugacagagagcaacaagaaguuccugccauuccagcaguuuggccgggauaucgccgauaccacagacgccguuagagauccccagacacuggaaauccuggacaucaccccuugcagcuucggcggagugucugugaucaccccuggcaccaacaccagcaaucagguggcagugcuguaccagggcgugaacuguaccgaagugcccguggccauucacgccgaucagcugacaccuacauggcggguguacuccaccggcagcaauguguuucagaccagagccggcugucugaucggagccgagcacgugaacaauagcuacgagugcgacauccccaucggcgcuggaaucugcgccagcuaccagacacagacaaacagcccucggagagccagaagcguggccagccagagcaucauugccuacacaaugucucugggcgccgagaacagcguggccuacuccaacaacucuaucgcuauccccaccaacuucaccaucagcgugaccacagagauccugccuguguccaugaccaagaccagcguggacugcaccauguacaucugcggcgauuccaccgagugcuccaaccugcugcugcaguacggcagcuucugcacccagcugaauagagcccugacagggaucgccguggaacaggacaagaacacccaagagguguucgcccaagugaagcagaucuacaagaccccuccuaucaaggacuucggcggcuucaauuucagccagauucugcccgauccuagcaagcccagcaagcggagcuucaucgaggaccugcuguucaacaaagugacacuggccgacgccggcuucaucaagcaguauggcgauugucugggcgacauugccgccagggaucugauuugcgcccagaaguuuaacggacugacagugcugccuccucugcugaccgaugagaugaucgcccaguacacaucugcccugcuggccggcacaaucacaagcggcuggacauuuggagcaggcgccgcucugcagauccccuuugcuaugcagauggccuaccgguucaacggcaucggagugacccagaaugugcuguacgagaaccagaagcugaucgccaaccaguucaacagcgccaucggcaagauccaggacagccugagcagcacagcaagcgcccugggaaagcugcaggacguggucaaccagaaugcccaggcacugaacacccuggucaagcagcuguccuccaacuucggcgccaucagcucugugcugaacgauauccugagcagacuggacaaggucgaggccgaggugcagaucgacagacugaucacaggcagacugcagagccuccagacauacgugacccagcagcugaucagagccgccgagauuagagccucugccaaucuggccgccaccaagaugucugagugugugcugggccagagcaagagaguggacuuuugcggcaagggcuaccaccugaugagcuucccucagucugccccucacggcgugguguuucugcacgugacauaugugcccgcucaagagaagaauuucaccaccgcuccagccaucugccacgacggcaaagcccacuuuccuagagaaggcguguucguguccaacggcacccauugguucgugacacagcggaacuucuacgagccccagaucaucaccaccgacaacaccuucgugucuggcaacugcgacgucgugaucggcauugugaacaauaccguguacgacccucugcagcccgagcuggacagcuucaaagaggaacuggacaaguacuuuaagaaccacacaagccccgacguggaccugggcgauaucagcggaaucaaugccagcgucgugaacauccagaaagagaucgaccggcugaacgagguggccaagaaucugaacgagagccugaucgaccugcaagaacuggggaaguacgagcaguacaucaaguggcccugguacaucuggcugggcuuuaucgccggacugauugccaucgugauggucacaaucaugcuguguugcaugaccagcugcuguagcugccugaagggcuguuguagcuguggcagcugcugcaaguucgacgaggacgauucugagcccgugcugaagggcgugaaacugcacuacacaugaggacuagucccuguucccagagcccacuuuuuuuucuuuuuuugaaauaaaauagccugucuuucagaucuaaaaaaaaaaaaaaaaaaaaaaaaaaaaaaaaaaaaaaaaaaaaaaaaaaaaaaaaaaaaaaaaaaaaaaaaaaaaaaaaaaaaaaaaaaaaaaaaaaaa

SEQ ID NO: 24827 - RNA, 4070 nt, Artificial Sequence
  SARS-CoV-2/Wuhan/WIV05/2019__EPI_ISL_402128 spike protein mRNA gc mod (1-1273)(D614G_I692V)
aggagagucccgcagucggcguccagcggcucugcuuguucgugugugugucguugcaggccuuauucaagcuuaccauguucguguuccuggugcugcugccucugguguccagccagugugugaaccugaccaccagaacacagcugccuccagccuacaccaacagcuuuaccagaggcguguacuaccccgacaagguguucagauccagcgugcugcacucuacccaggaccuguuccugccuuucuucagcaacgugaccugguuccacgccauccacguguccggcaccaauggcaccaagagauucgacaaccccgugcugcccuucaacgacgggguguacuuugccagcaccgagaaguccaacaucaucagaggcuggaucuucggcaccacacuggacagcaagacccagagccugcugaucgugaacaacgccaccaacguggucaucaaagugugcgaguuccaguucugcaacgaccccuuccugggcgucuacuaccacaagaacaacaagagcuggauggaaagcgaguuccggguguacagcagcgccaacaacugcaccuucgaguacgugucccagccuuuccugauggaccuggaaggcaagcagggcaacuucaagaaccugcgcgaguucguguuuaagaacaucgacggcuacuucaagaucuacagcaagcacaccccuaucaaccucgugcgggaucugccucagggcuucucugcucuggaaccccugguggaucugcccaucggcaucaacaucacccgguuucagacacugcuggcccugcacagaagcuaccugacaccuggcgauagcagcagcggauggacagcuggugccgccgcuuacuaugugggcuaccugcagccuagaaccuuccugcugaaguacaacgagaacggcaccaucaccgacgccguggauugugcucuggauccucugagcgagacaaagugcacccugaaguccuucaccguggaaaagggcaucuaccagaccagcaacuuccgggugcagcccaccgaauccaucgugcgguuccccaauaucaccaaucugugccccuucggcgagguguucaaugccaccagauucgccucuguguacgccuggaaccggaagcggaucagcaauugcguggccgacuacuccgugcuguacaacuccgccagcuucagcaccuucaagugcuacggcguguccccuaccaagcugaacgaccugugcuucacaaacguguacgccgacagcuucgugauccggggagaugaagugcggcagauugccccuggacagacaggcaagaucgccgacuacaacuacaagcugcccgacgacuucaccggcugugugauugccuggaacagcaacaaccuggacuccaaagucggcggcaacuacaauuaccuguaccggcuguuccggaaguccaaucugaagcccuucgagcgggacaucuccaccgagaucuaucaggccggcagcaccccuuguaacggcguggaaggcuucaacugcuacuucccacugcaguccuacggcuuucagcccacaaauggcgugggcuaucagcccuacagagugguggugcugagcuucgaacugcugcaugccccugccacagugugcggcccuaagaaaagcaccaaucucgugaagaacaaaugcgugaacuucaacuucaacggccugaccggcaccggcgugcugacagagagcaacaagaaguuccugccauuccagcaguuuggccgggauaucgccgauaccacagacgccguuagagauccccagacacuggaaauccuggacaucaccccuugcagcuucggcggagugucugugaucaccccuggcaccaacaccagcaaucagguggcagugcuguaccagggcgugaacuguaccgaagugcccguggccauucacgccgaucagcugacaccuacauggcggguguacuccaccggcagcaauguguuucagaccagagccggcugucugaucggagccgagcacgugaacaauagcuacgagugcgacauccccaucggcgcuggaaucugcgccagcuaccagacacagacaaacagcccucggagagccagaagcguggccagccagagcgugauugccuacacaaugucucugggcgccgagaacagcguggccuacuccaacaacucuaucgcuauccccaccaacuucaccaucagcgugaccacagagauccugccuguguccaugaccaagaccagcguggacugcaccauguacaucugcggcgauuccaccgagugcuccaaccugcugcugcaguacggcagcuucugcacccagcugaauagagcccugacagggaucgccguggaacaggacaagaacacccaagagguguucgcccaagugaagcagaucuacaagaccccuccuaucaaggacuucggcggcuucaauuucagccagauucugcccgauccuagcaagcccagcaagcggagcuucaucgaggaccugcuguucaacaaagugacacuggccgacgccggcuucaucaagcaguauggcgauugucugggcgacauugccgccagggaucugauuugcgcccagaaguuuaacggacugacagugcugccuccucugcugaccgaugagaugaucgcccaguacacaucugcccugcuggccggcacaaucacaagcggcuggacauuuggagcaggcgccgcucugcagauccccuuugcuaugcagauggccuaccgguucaacggcaucggagugacccagaaugugcuguacgagaaccagaagcugaucgccaaccaguucaacagcgccaucggcaagauccaggacagccugagcagcacagcaagcgcccugggaaagcugcaggacguggucaaccagaaugcccaggcacugaacacccuggucaagcagcuguccuccaacuucggcgccaucagcucugugcugaacgauauccugagcagacuggacaaggucgaggccgaggugcagaucgacagacugaucacaggcagacugcagagccuccagacauacgugacccagcagcugaucagagccgccgagauuagagccucugccaaucuggccgccaccaagaugucugagugugugcugggccagagcaagagaguggacuuuugcggcaagggcuaccaccugaugagcuucccucagucugccccucacggcgugguguuucugcacgugacauaugugcccgcucaagagaagaauuucaccaccgcuccagccaucugccacgacggcaaagcccacuuuccuagagaaggcguguucguguccaacggcacccauugguucgugacacagcggaacuucuacgagccccagaucaucaccaccgacaacaccuucgugucuggcaacugcgacgucgugaucggcauugugaacaauaccguguacgacccucugcagcccgagcuggacagcuucaaagaggaacuggacaaguacuuuaagaaccacacaagccccgacguggaccugggcgauaucagcggaaucaaugccagcgucgugaacauccagaaagagaucgaccggcugaacgagguggccaagaaucugaacgagagccugaucgaccugcaagaacuggggaaguacgagcaguacaucaaguggcccugguacaucuggcugggcuuuaucgccggacugauugccaucgugauggucacaaucaugcuguguugcaugaccagcugcuguagcugccugaagggcuguuguagcuguggcagcugcugcaaguucgacgaggacgauucugagcccgugcugaagggcgugaaacugcacuacacaugaggacuagucccuguucccagagcccacuuuuuuuucuuuuuuugaaauaaaauagccugucuuucagaucuaaaaaaaaaaaaaaaaaaaaaaaaaaaaaaaaaaaaaaaaaaaaaaaaaaaaaaaaaaaaaaaaaaaaaaaaaaaaaaaaaaaaaaaaaaaaaaaaaaaa

SEQ ID NO: 24828 - RNA, 4070 nt, Artificial Sequence
  SARS-CoV-2/Wuhan/WIV05/2019__EPI_ISL_402128 spike protein mRNA gc mod (1-1273)(D614G_M1229I)
aggagagucccgcagucggcguccagcggcucugcuuguucgugugugugucguugcaggccuuauucaagcuuaccauguucguguuccuggugcugcugccucugguguccagccagugugugaaccugaccaccagaacacagcugccuccagccuacaccaacagcuuuaccagaggcguguacuaccccgacaagguguucagauccagcgugcugcacucuacccaggaccuguuccugccuuucuucagcaacgugaccugguuccacgccauccacguguccggcaccaauggcaccaagagauucgacaaccccgugcugcccuucaacgacgggguguacuuugccagcaccgagaaguccaacaucaucagaggcuggaucuucggcaccacacuggacagcaagacccagagccugcugaucgugaacaacgccaccaacguggucaucaaagugugcgaguuccaguucugcaacgaccccuuccugggcgucuacuaccacaagaacaacaagagcuggauggaaagcgaguuccggguguacagcagcgccaacaacugcaccuucgaguacgugucccagccuuuccugauggaccuggaaggcaagcagggcaacuucaagaaccugcgcgaguucguguuuaagaacaucgacggcuacuucaagaucuacagcaagcacaccccuaucaaccucgugcgggaucugccucagggcuucucugcucuggaaccccugguggaucugcccaucggcaucaacaucacccgguuucagacacugcuggcccugcacagaagcuaccugacaccuggcgauagcagcagcggauggacagcuggugccgccgcuuacuaugugggcuaccugcagccuagaaccuuccugcugaaguacaacgagaacggcaccaucaccgacgccguggauugugcucuggauccucugagcgagacaaagugcacccugaaguccuucaccguggaaaagggcaucuaccagaccagcaacuuccgggugcagcccaccgaauccaucgugcgguuccccaauaucaccaaucugugccccuucggcgagguguucaaugccaccagauucgccucuguguacgccuggaaccggaagcggaucagcaauugcguggccgacuacuccgugcuguacaacuccgccagcuucagcaccuucaagugcuacggcguguccccuaccaagcugaacgaccugugcuucacaaacguguacgccgacagcuucgugauccggggagaugaagugcggcagauugccccuggacagacaggcaagaucgccgacuacaacuacaagcugcccgacgacuucaccggcugugugauugccuggaacagcaacaaccuggacuccaaagucggcggcaacuacaauuaccuguaccggcuguuccggaaguccaaucugaagcccuucgagcgggacaucuccaccgagaucuaucaggccggcagcaccccuuguaacggcguggaaggcuucaacugcuacuucccacugcaguccuacggcuuucagcccacaaauggcgugggcuaucagcccuacagagugguggugcugagcuucgaacugcugcaugccccugccacagugugcggcccuaagaaaagcaccaaucucgugaagaacaaaugcgugaacuucaacuucaacggccugaccggcaccggcgugcugacagagagcaacaagaaguuccugccauuccagcaguuuggccgggauaucgccgauaccacagacgccguuagagauccccagacacuggaaauccuggacaucaccccuugcagcuucggcggagugucugugaucaccccuggcaccaacaccagcaaucagguggcagugcuguaccagggcgugaacuguaccgaagugcccguggccauucacgccgaucagcugacaccuacauggcggguguacuccaccggcagcaauguguuucagaccagagccggcugucugaucggagccgagcacgugaacaauagcuacgagugcgacauccccaucggcgcuggaaucugcgccagcuaccagacacagacaaacagcccucggagagccagaagcguggccagccagagcaucauugccuacacaaugucucugggcgccgagaacagcguggccuacuccaacaacucuaucgcuauccccaccaacuucaccaucagcgugaccacagagauccugccuguguccaugaccaagaccagcguggacugcaccauguacaucugcggcgauuccaccgagugcuccaaccugcugcugcaguacggcagcuucugcacccagcugaauagagcccugacagggaucgccguggaacaggacaagaacacccaagagguguucgcccaagugaagcagaucuacaagaccccuccuaucaaggacuucggcggcuucaauuucagccagauucugcccgauccuagcaagcccagcaagcggagcuucaucgaggaccugcuguucaacaaagugacacuggccgacgccggcuucaucaagcaguauggcgauugucugggcgacauugccgccagggaucugauuugcgcccagaaguuuaacggacugacagugcugccuccucugcugaccgaugagaugaucgcccaguacacaucugcccugcuggccggcacaaucacaagcggcuggacauuuggagcaggcgccgcucugcagauccccuuugcuaugcagauggccuaccgguucaacggcaucggagugacccagaaugugcuguacgagaaccagaagcugaucgccaaccaguucaacagcgccaucggcaagauccaggacagccugagcagcacagcaagcgcccugggaaagcugcaggacguggucaaccagaaugcccaggcacugaacacccuggucaagcagcuguccuccaacuucggcgccaucagcucugugcugaacgauauccugagcagacuggacaaggucgaggccgaggugcagaucgacagacugaucacaggcagacugcagagccuccagacauacgugacccagcagcugaucagagccgccgagauuagagccucugccaaucuggccgccaccaagaugucugagugugugcugggccagagcaagagaguggacuuuugcggcaagggcuaccaccugaugagcuucccucagucugccccucacggcgugguguuucugcacgugacauaugugcccgcucaagagaagaauuucaccaccgcuccagccaucugccacgacggcaaagcccacuuuccuagagaaggcguguucguguccaacggcacccauugguucgugacacagcggaacuucuacgagccccagaucaucaccaccgacaacaccuucgugucuggcaacugcgacgucgugaucggcauugugaacaauaccguguacgacccucugcagcccgagcuggacagcuucaaagaggaacuggacaaguacuuuaagaaccacacaagccccgacguggaccugggcgauaucagcggaaucaaugccagcgucgugaacauccagaaagagaucgaccggcugaacgagguggccaagaaucugaacgagagccugaucgaccugcaagaacuggggaaguacgagcaguacaucaaguggcccugguacaucuggcugggcuuuaucgccggacugauugccaucgugaucgucacaaucaugcuguguugcaugaccagcugcuguagcugccugaagggcuguuguagcuguggcagcugcugcaaguucgacgaggacgauucugagcccgugcugaagggcgugaaacugcacuacacaugaggacuagucccuguucccagagcccacuuuuuuuucuuuuuuugaaauaaaauagccugucuuucagaucuaaaaaaaaaaaaaaaaaaaaaaaaaaaaaaaaaaaaaaaaaaaaaaaaaaaaaaaaaaaaaaaaaaaaaaaaaaaaaaaaaaaaaaaaaaaaaaaaaaaa

SEQ ID NO: 24829 - RNA, 4064 nt, Artificial Sequence
  SARS-CoV-2/Wuhan/WIV05/2019__EPI_ISL_402128 spike protein mRNA gc mod (1-1273)(H69del_V70del_A222V_Y453F_S477N_D614G_I692V)
aggagagucccgcagucggcguccagcggcucugcuuguucgugugugugucguugcaggccuuauucaagcuuaccauguucguguuccuggugcugcugccucugguguccagccagugugugaaccugaccaccagaacacagcugccuccagccuacaccaacagcuuuaccagaggcguguacuaccccgacaagguguucagauccagcgugcugcacucuacccaggaccuguuccugccuuucuucagcaacgugaccugguuccacgccaucuccggcaccaauggcaccaagagauucgacaaccccgugcugcccuucaacgacgggguguacuuugccagcaccgagaaguccaacaucaucagaggcuggaucuucggcaccacacuggacagcaagacccagagccugcugaucgugaacaacgccaccaacguggucaucaaagugugcgaguuccaguucugcaacgaccccuuccugggcgucuacuaccacaagaacaacaagagcuggauggaaagcgaguuccggguguacagcagcgccaacaacugcaccuucgaguacgugucccagccuuuccugauggaccuggaaggcaagcagggcaacuucaagaaccugcgcgaguucguguuuaagaacaucgacggcuacuucaagaucuacagcaagcacaccccuaucaaccucgugcgggaucugccucagggcuucucugugcuggaaccccugguggaucugcccaucggcaucaacaucacccgguuucagacacugcuggcccugcacagaagcuaccugacaccuggcgauagcagcagcggauggacagcuggugccgccgcuuacuaugugggcuaccugcagccuagaaccuuccugcugaaguacaacgagaacggcaccaucaccgacgccguggauugugcucuggauccucugagcgagacaaagugcacccugaaguccuucaccguggaaaagggcaucuaccagaccagcaacuuccgggugcagcccaccgaauccaucgugcgguuccccaauaucaccaaucugugccccuucggcgagguguucaaugccaccagauucgccucuguguacgccuggaaccggaagcggaucagcaauugcguggccgacuacuccgugcuguacaacuccgccagcuucagcaccuucaagugcuacggcguguccccuaccaagcugaacgaccugugcuucacaaacguguacgccgacagcuucgugauccggggagaugaagugcggcagauugccccuggacagacaggcaagaucgccgacuacaacuacaagcugcccgacgacuucaccggcugugugauugccuggaacagcaacaaccuggacuccaaagucggcggcaacuacaauuaccuguuccggcuguuccggaaguccaaucugaagcccuucgagcgggacaucuccaccgagaucuaucaggccggcaacaccccuuguaacggcguggaaggcuucaacugcuacuucccacugcaguccuacggcuuucagcccacaaauggcgugggcuaucagcccuacagagugguggugcugagcuucgaacugcugcaugccccugccacagugugcggcccuaagaaaagcaccaaucucgugaagaacaaaugcgugaacuucaacuucaacggccugaccggcaccggcgugcugacagagagcaacaagaaguuccugccauuccagcaguuuggccgggauaucgccgauaccacagacgccguuagagauccccagacacuggaaauccuggacaucaccccuugcagcuucggcggagugucugugaucaccccuggcaccaacaccagcaaucagguggcagugcuguaccagggcgugaacuguaccgaagugcccguggccauucacgccgaucagcugacaccuacauggcggguguacuccaccggcagcaauguguuucagaccagagccggcugucugaucggagccgagcacgugaacaauagcuacgagugcgacauccccaucggcgcuggaaucugcgccagcuaccagacacagacaaacagcccucggagagccagaagcguggccagccagagcgugauugccuacacaaugucucugggcgccgagaacagcguggccuacuccaacaacucuaucgcuauccccaccaacuucaccaucagcgugaccacagagauccugccuguguccaugaccaagaccagcguggacugcaccauguacaucugcggcgauuccaccgagugcuccaaccugcugcugcaguacggcagcuucugcacccagcugaauagagcccugacagggaucgccguggaacaggacaagaacacccaagagguguucgcccaagugaagcagaucuacaagaccccuccuaucaaggacuucggcggcuucaauuucagccagauucugcccgauccuagcaagcccagcaagcggagcuucaucgaggaccugcuguucaacaaagugacacuggccgacgccggcuucaucaagcaguauggcgauugucugggcgacauugccgccagggaucugauuugcgcccagaaguuuaacggacugacagugcugccuccucugcugaccgaugagaugaucgcccaguacacaucugcccugcuggccggcacaaucacaagcggcuggacauuuggagcaggcgccgcucugcagauccccuuugcuaugcagauggccuaccgguucaacggcaucggagugacccagaaugugcuguacgagaaccagaagcugaucgccaaccaguucaacagcgccaucggcaagauccaggacagccugagcagcacagcaagcgcccugggaaagcugcaggacguggucaaccagaaugcccaggcacugaacacccuggucaagcagcuguccuccaacuucggcgccaucagcucugugcugaacgauauccugagcagacuggacaaggucgaggccgaggugcagaucgacagacugaucacaggcagacugcagagccuccagacauacgugacccagcagcugaucagagccgccgagauuagagccucugccaaucuggccgccaccaagaugucugagugugugcugggccagagcaagagaguggacuuuugcggcaagggcuaccaccugaugagcuucccucagucugccccucacggcgugguguuucugcacgugacauaugugcccgcucaagagaagaauuucaccaccgcuccagccaucugccacgacggcaaagcccacuuuccuagagaaggcguguucguguccaacggcacccauugguucgugacacagcggaacuucuacgagccccagaucaucaccaccgacaacaccuucgugucuggcaacugcgacgucgugaucggcauugugaacaauaccguguacgacccucugcagcccgagcuggacagcuucaaagaggaacuggacaaguacuuuaagaaccacacaagccccgacguggaccugggcgauaucagcggaaucaaugccagcgucgugaacauccagaaagagaucgaccggcugaacgagguggccaagaaucugaacgagagccugaucgaccugcaagaacuggggaaguacgagcaguacaucaaguggcccugguacaucuggcugggcuuuaucgccggacugauugccaucgugauggucacaaucaugcuguguugcaugaccagcugcuguagcugccugaagggcuguuguagcuguggcagcugcugcaaguucgacgaggacgauucugagcccgugcugaagggcgugaaacugcacuacacaugaggacuagucccuguucccagagcccacuuuuuuuucuuuuuuugaaauaaaauagccugucuuucagaucuaaaaaaaaaaaaaaaaaaaaaaaaaaaaaaaaaaaaaaaaaaaaaaaaaaaaaaaaaaaaaaaaaaaaaaaaaaaaaaaaaaaaaaaaaaaaaaaaaaaa

SEQ ID NO: 24830 - RNA, 4064 nt, Artificial Sequence
  SARS-CoV-2/Wuhan/WIV05/2019__EPI_ISL_402128 spike protein mRNA gc mod (1-1273)(H69del_V70del_Y453F_D614G_I692V_M1229I)
aggagagucccgcagucggcguccagcggcucugcuuguucgugugugugucguugcaggccuuauucaagcuuaccauguucguguuccuggugcugcugccucugguguccagccagugugugaaccugaccaccagaacacagcugccuccagccuacaccaacagcuuuaccagaggcguguacuaccccgacaagguguucagauccagcgugcugcacucuacccaggaccuguuccugccuuucuucagcaacgugaccugguuccacgccaucuccggcaccaauggcaccaagagauucgacaaccccgugcugcccuucaacgacgggguguacuuugccagcaccgagaaguccaacaucaucagaggcuggaucuucggcaccacacuggacagcaagacccagagccugcugaucgugaacaacgccaccaacguggucaucaaagugugcgaguuccaguucugcaacgaccccuuccugggcgucuacuaccacaagaacaacaagagcuggauggaaagcgaguuccggguguacagcagcgccaacaacugcaccuucgaguacgugucccagccuuuccugauggaccuggaaggcaagcagggcaacuucaagaaccugcgcgaguucguguuuaagaacaucgacggcuacuucaagaucuacagcaagcacaccccuaucaaccucgugcgggaucugccucagggcuucucugcucuggaaccccugguggaucugcccaucggcaucaacaucacccgguuucagacacugcuggcccugcacagaagcuaccugacaccuggcgauagcagcagcggauggacagcuggugccgccgcuuacuaugugggcuaccugcagccuagaaccuuccugcugaaguacaacgagaacggcaccaucaccgacgccguggauugugcucuggauccucugagcgagacaaagugcacccugaaguccuucaccguggaaaagggcaucuaccagaccagcaacuuccgggugcagcccaccgaauccaucgugcgguuccccaauaucaccaaucugugccccuucggcgagguguucaaugccaccagauucgccucuguguacgccuggaaccggaagcggaucagcaauugcguggccgacuacuccgugcuguacaacuccgccagcuucagcaccuucaagugcuacggcguguccccuaccaagcugaacgaccugugcuucacaaacguguacgccgacagcuucgugauccggggagaugaagugcggcagauugccccuggacagacaggcaagaucgccgacuacaacuacaagcugcccgacgacuucaccggcugugugauugccuggaacagcaacaaccuggacuccaaagucggcggcaacuacaauuaccuguuccggcuguuccggaaguccaaucugaagcccuucgagcgggacaucuccaccgagaucuaucaggccggcagcaccccuuguaacggcguggaaggcuucaacugcuacuucccacugcaguccuacggcuuucagcccacaaauggcgugggcuaucagcccuacagagugguggugcugagcuucgaacugcugcaugccccugccacagugugcggcccuaagaaaagcaccaaucucgugaagaacaaaugcgugaacuucaacuucaacggccugaccggcaccggcgugcugacagagagcaacaagaaguuccugccauuccagcaguuuggccgggauaucgccgauaccacagacgccguuagagauccccagacacuggaaauccuggacaucaccccuugcagcuucggcggagugucugugaucaccccuggcaccaacaccagcaaucagguggcagugcuguaccagggcgugaacuguaccgaagugcccguggccauucacgccgaucagcugacaccuacauggcggguguacuccaccggcagcaauguguuucagaccagagccggcugucugaucggagccgagcacgugaacaauagcuacgagugcgacauccccaucggcgcuggaaucugcgccagcuaccagacacagacaaacagcccucggagagccagaagcguggccagccagagcgugauugccuacacaaugucucugggcgccgagaacagcguggccuacuccaacaacucuaucgcuauccccaccaacuucaccaucagcgugaccacagagauccugccuguguccaugaccaagaccagcguggacugcaccauguacaucugcggcgauuccaccgagugcuccaaccugcugcugcaguacggcagcuucugcacccagcugaauagagcccugacagggaucgccguggaacaggacaagaacacccaagagguguucgcccaagugaagcagaucuacaagaccccuccuaucaaggacuucggcggcuucaauuucagccagauucugcccgauccuagcaagcccagcaagcggagcuucaucgaggaccugcuguucaacaaagugacacuggccgacgccggcuucaucaagcaguauggcgauugucugggcgacauugccgccagggaucugauuugcgcccagaaguuuaacggacugacagugcugccuccucugcugaccgaugagaugaucgcccaguacacaucugcccugcuggccggcacaaucacaagcggcuggacauuuggagcaggcgccgcucugcagauccccuuugcuaugcagauggccuaccgguucaacggcaucggagugacccagaaugugcuguacgagaaccagaagcugaucgccaaccaguucaacagcgccaucggcaagauccaggacagccugagcagcacagcaagcgcccugggaaagcugcaggacguggucaaccagaaugcccaggcacugaacacccuggucaagcagcuguccuccaacuucggcgccaucagcucugugcugaacgauauccugagcagacuggacaaggucgaggccgaggugcagaucgacagacugaucacaggcagacugcagagccuccagacauacgugacccagcagcugaucagagccgccgagauuagagccucugccaaucuggccgccaccaagaugucugagugugugcugggccagagcaagagaguggacuuuugcggcaagggcuaccaccugaugagcuucccucagucugccccucacggcgugguguuucugcacgugacauaugugcccgcucaagagaagaauuucaccaccgcuccagccaucugccacgacggcaaagcccacuuuccuagagaaggcguguucguguccaacggcacccauugguucgugacacagcggaacuucuacgagccccagaucaucaccaccgacaacaccuucgugucuggcaacugcgacgucgugaucggcauugugaacaauaccguguacgacccucugcagcccgagcuggacagcuucaaagaggaacuggacaaguacuuuaagaaccacacaagccccgacguggaccugggcgauaucagcggaaucaaugccagcgucgugaacauccagaaagagaucgaccggcugaacgagguggccaagaaucugaacgagagccugaucgaccugcaagaacuggggaaguacgagcaguacaucaaguggcccugguacaucuggcugggcuuuaucgccggacugauugccaucgugaucgucacaaucaugcuguguugcaugaccagcugcuguagcugccugaagggcuguuguagcuguggcagcugcugcaaguucgacgaggacgauucugagcccgugcugaagggcgugaaacugcacuacacaugaggacuagucccuguucccagagcccacuuuuuuuucuuuuuuugaaauaaaauagccugucuuucagaucuaaaaaaaaaaaaaaaaaaaaaaaaaaaaaaaaaaaaaaaaaaaaaaaaaaaaaaaaaaaaaaaaaaaaaaaaaaaaaaaaaaaaaaaaaaaaaaaaaaaa

SEQ ID NO: 24831 - RNA, 4061 nt, Artificial Sequence
  SARS-CoV-2/Wuhan/WIV05/2019__EPI_ISL_402128 spike protein mRNA gc mod (1-1273)(H69del_V70del_Y144del_N501Y_A570D_D614G_P681H_T716I_S982 A_D1118H)
aggagagucccgcagucggcguccagcggcucugcuuguucgugugugugucguugcaggccuuauucaagcuuaccauguucguguuccuggugcugcugccucugguguccagccagugugugaaccugaccaccagaacacagcugccuccagccuacaccaacagcuuuaccagaggcguguacuaccccgacaagguguucagauccagcgugcugcacucuacccaggaccuguuccugccuuucuucagcaacgugaccugguuccacgccaucuccggcaccaauggcaccaagagauucgacaaccccgugcugcccuucaacgacgggguguacuuugccagcaccgagaaguccaacaucaucagaggcuggaucuucggcaccacacuggacagcaagacccagagccugcugaucgugaacaacgccaccaacguggucaucaaagugugcgaguuccaguucugcaacgaccccuuccugggcgucuaccacaagaacaacaagagcuggauggaaagcgaguuccggguguacagcagcgccaacaacugcaccuucgaguacgugucccagccuuuccugauggaccuggaaggcaagcagggcaacuucaagaaccugcgcgaguucguguuuaagaacaucgacggcuacuucaagaucuacagcaagcacaccccuaucaaccucgugcgggaucugccucagggcuucucugcucuggaaccccugguggaucugcccaucggcaucaacaucacccgguuucagacacugcuggcccugcacagaagcuaccugacaccuggcgauagcagcagcggauggacagcuggugccgccgcuuacuaugugggcuaccugcagccuagaaccuuccugcugaaguacaacgagaacggcaccaucaccgacgccguggauugugcucuggauccucugagcgagacaaagugcacccugaaguccuucaccguggaaaagggcaucuaccagaccagcaacuuccgggugcagcccaccgaauccaucgugcgguuccccaauaucaccaaucugugccccuucggcgagguguucaaugccaccagauucgccucuguguacgccuggaaccggaagcggaucagcaauugcguggccgacuacuccgugcuguacaacuccgccagcuucagcaccuucaagugcuacggcguguccccuaccaagcugaacgaccugugcuucacaaacguguacgccgacagcuucgugauccggggagaugaagugcggcagauugccccuggacagacaggcaagaucgccgacuacaacuacaagcugcccgacgacuucaccggcugugugauugccuggaacagcaacaaccuggacuccaaagucggcggcaacuacaauuaccuguaccggcuguuccggaaguccaaucugaagcccuucgagcgggacaucuccaccgagaucuaucaggccggcagcaccccuuguaacggcguggaaggcuucaacugcuacuucccacugcaguccuacggcuuucagcccacauacggcgugggcuaucagcccuacagagugguggugcugagcuucgaacugcugcaugccccugccacagugugcggcccuaagaaaagcaccaaucucgugaagaacaaaugcgugaacuucaacuucaacggccugaccggcaccggcgugcugacagagagcaacaagaaguuccugccauuccagcaguuuggccgggauaucgacgauaccacagacgccguuagagauccccagacacuggaaauccuggacaucaccccuugcagcuucggcggagugucugugaucaccccuggcaccaacaccagcaaucagguggcagugcuguaccagggcgugaacuguaccgaagugcccguggccauucacgccgaucagcugacaccuacauggcggguguacuccaccggcagcaauguguuucagaccagagccggcugucugaucggagccgagcacgugaacaauagcuacgagugcgacauccccaucggcgcuggaaucugcgccagcuaccagacacagacaaacagccaccggagagccagaagcguggccagccagagcaucauugccuacacaaugucucugggcgccgagaacagcguggccuacuccaacaacucuaucgcuauccccaucaacuucaccaucagcgugaccacagagauccugccuguguccaugaccaagaccagcguggacugcaccauguacaucugcggcgauuccaccgagugcuccaaccugcugcugcaguacggcagcuucugcacccagcugaauagagcccugacagggaucgccguggaacaggacaagaacacccaagagguguucgcccaagugaagcagaucuacaagaccccuccuaucaaggacuucggcggcuucaauuucagccagauucugcccgauccuagcaagcccagcaagcggagcuucaucgaggaccugcuguucaacaaagugacacuggccgacgccggcuucaucaagcaguauggcgauugucugggcgacauugccgccagggaucugauuugcgcccagaaguuuaacggacugacagugcugccuccucugcugaccgaugagaugaucgcccaguacacaucugcccugcuggccggcacaaucacaagcggcuggacauuuggagcaggcgccgcucugcagauccccuuugcuaugcagauggccuaccgguucaacggcaucggagugacccagaaugugcuguacgagaaccagaagcugaucgccaaccaguucaacagcgccaucggcaagauccaggacagccugagcagcacagcaagcgcccugggaaagcugcaggacguggucaaccagaaugcccaggcacugaacacccuggucaagcagcuguccuccaacuucggcgccaucagcucugugcugaacgauauccuggccagacuggacaaggucgaggccgaggugcagaucgacagacugaucacaggcagacugcagagccuccagacauacgugacccagcagcugaucagagccgccgagauuagagccucugccaaucuggccgccaccaagaugucugagugugugcugggccagagcaagagaguggacuuuugcggcaagggcuaccaccugaugagcuucccucagucugccccucacggcgugguguuucugcacgugacauaugugcccgcucaagagaagaauuucaccaccgcuccagccaucugccacgacggcaaagcccacuuuccuagagaaggcguguucguguccaacggcacccauugguucgugacacagcggaacuucuacgagccccagaucaucaccacccacaacaccuucgugucuggcaacugcgacgucgugaucggcauugugaacaauaccguguacgacccucugcagcccgagcuggacagcuucaaagaggaacuggacaaguacuuuaagaaccacacaagccccgacguggaccugggcgauaucagcggaaucaaugccagcgucgugaacauccagaaagagaucgaccggcugaacgagguggccaagaaucugaacgagagccugaucgaccugcaagaacuggggaaguacgagcaguacaucaaguggcccugguacaucuggcugggcuuuaucgccggacugauugccaucgugauggucacaaucaugcuguguugcaugaccagcugcuguagcugccugaagggcuguuguagcuguggcagcugcugcaaguucgacgaggacgauucugagcccgugcugaagggcgugaaacugcacuacacaugaggacuagucccuguucccagagcccacuuuuuuuucuuuuuuugaaauaaaauagccugucuuucagaucuaaaaaaaaaaaaaaaaaaaaaaaaaaaaaaaaaaaaaaaaaaaaaaaaaaaaaaaaaaaaaaaaaaaaaaaaaaaaaaaaaaaaaaaaaaaaaaaaaaaa

SEQ ID NO: 24832 - RNA, 4070 nt, Artificial Sequence
  SARS-CoV-2/Wuhan/WIV05/2019__EPI_ISL_402128 spike protein mRNA gc mod (1-1273)(K417N_E484K_N501Y_D614G)
aggagagucccgcagucggcguccagcggcucugcuuguucgugugugugucguugcaggccuuauucaagcuuaccauguucguguuccuggugcugcugccucugguguccagccagugugugaaccugaccaccagaacacagcugccuccagccuacaccaacagcuuuaccagaggcguguacuaccccgacaagguguucagauccagcgugcugcacucuacccaggaccuguuccugccuuucuucagcaacgugaccugguuccacgccauccacguguccggcaccaauggcaccaagagauucgacaaccccgugcugcccuucaacgacgggguguacuuugccagcaccgagaaguccaacaucaucagaggcuggaucuucggcaccacacuggacagcaagacccagagccugcugaucgugaacaacgccaccaacguggucaucaaagugugcgaguuccaguucugcaacgaccccuuccugggcgucuacuaccacaagaacaacaagagcuggauggaaagcgaguuccggguguacagcagcgccaacaacugcaccuucgaguacgugucccagccuuuccugauggaccuggaaggcaagcagggcaacuucaagaaccugcgcgaguucguguuuaagaacaucgacggcuacuucaagaucuacagcaagcacaccccuaucaaccucgugcgggaucugccucagggcuucucugcucuggaaccccugguggaucugcccaucggcaucaacaucacccgguuucagacacugcuggcccugcacagaagcuaccugacaccuggcgauagcagcagcggauggacagcuggugccgccgcuuacuaugugggcuaccugcagccuagaaccuuccugcugaaguacaacgagaacggcaccaucaccgacgccguggauugugcucuggauccucugagcgagacaaagugcacccugaaguccuucaccguggaaaagggcaucuaccagaccagcaacuuccgggugcagcccaccgaauccaucgugcgguuccccaauaucaccaaucugugccccuucggcgagguguucaaugccaccagauucgccucuguguacgccuggaaccggaagcggaucagcaauugcguggccgacuacuccgugcuguacaacuccgccagcuucagcaccuucaagugcuacggcguguccccuaccaagcugaacgaccugugcuucacaaacguguacgccgacagcuucgugauccggggagaugaagugcggcagauugccccuggacagacaggcaacaucgccgacuacaacuacaagcugcccgacgacuucaccggcugugugauugccuggaacagcaacaaccuggacuccaaagucggcggcaacuacaauuaccuguaccggcuguuccggaaguccaaucugaagcccuucgagcgggacaucuccaccgagaucuaucaggccggcagcaccccuuguaacggcgugaagggcuucaacugcuacuucccacugcaguccuacggcuuucagcccacauacggcgugggcuaucagcccuacagagugguggugcugagcuucgaacugcugcaugccccugccacagugugcggcccuaagaaaagcaccaaucucgugaagaacaaaugcgugaacuucaacuucaacggccugaccggcaccggcgugcugacagagagcaacaagaaguuccugccauuccagcaguuuggccgggauaucgccgauaccacagacgccguuagagauccccagacacuggaaauccuggacaucaccccuugcagcuucggcggagugucugugaucaccccuggcaccaacaccagcaaucagguggcagugcuguaccagggcgugaacuguaccgaagugcccguggccauucacgccgaucagcugacaccuacauggcggguguacuccaccggcagcaauguguuucagaccagagccggcugucugaucggagccgagcacgugaacaauagcuacgagugcgacauccccaucggcgcuggaaucugcgccagcuaccagacacagacaaacagcccucggagagccagaagcguggccagccagagcaucauugccuacacaaugucucugggcgccgagaacagcguggccuacuccaacaacucuaucgcuauccccaccaacuucaccaucagcgugaccacagagauccugccuguguccaugaccaagaccagcguggacugcaccauguacaucugcggcgauuccaccgagugcuccaaccugcugcugcaguacggcagcuucugcacccagcugaauagagcccugacagggaucgccguggaacaggacaagaacacccaagagguguucgcccaagugaagcagaucuacaagaccccuccuaucaaggacuucggcggcuucaauuucagccagauucugcccgauccuagcaagcccagcaagcggagcuucaucgaggaccugcuguucaacaaagugacacuggccgacgccggcuucaucaagcaguauggcgauugucugggcgacauugccgccagggaucugauuugcgcccagaaguuuaacggacugacagugcugccuccucugcugaccgaugagaugaucgcccaguacacaucugcccugcuggccggcacaaucacaagcggcuggacauuuggagcaggcgccgcucugcagauccccuuugcuaugcagauggccuaccgguucaacggcaucggagugacccagaaugugcuguacgagaaccagaagcugaucgccaaccaguucaacagcgccaucggcaagauccaggacagccugagcagcacagcaagcgcccugggaaagcugcaggacguggucaaccagaaugcccaggcacugaacacccuggucaagcagcuguccuccaacuucggcgccaucagcucugugcugaacgauauccugagcagacuggacaaggucgaggccgaggugcagaucgacagacugaucacaggcagacugcagagccuccagacauacgugacccagcagcugaucagagccgccgagauuagagccucugccaaucuggccgccaccaagaugucugagugugugcugggccagagcaagagaguggacuuuugcggcaagggcuaccaccugaugagcuucccucagucugccccucacggcgugguguuucugcacgugacauaugugcccgcucaagagaagaauuucaccaccgcuccagccaucugccacgacggcaaagcccacuuuccuagagaaggcguguucguguccaacggcacccauugguucgugacacagcggaacuucuacgagccccagaucaucaccaccgacaacaccuucgugucuggcaacugcgacgucgugaucggcauugugaacaauaccguguacgacccucugcagcccgagcuggacagcuucaaagaggaacuggacaaguacuuuaagaaccacacaagccccgacguggaccugggcgauaucagcggaaucaaugccagcgucgugaacauccagaaagagaucgaccggcugaacgagguggccaagaaucugaacgagagccugaucgaccugcaagaacuggggaaguacgagcaguacaucaaguggcccugguacaucuggcugggcuuuaucgccggacugauugccaucgugauggucacaaucaugcuguguugcaugaccagcugcuguagcugccugaagggcuguuguagcuguggcagcugcugcaaguucgacgaggacgauucugagcccgugcugaagggcgugaaacugcacuacacaugaggacuagucccuguucccagagcccacuuuuuuuucuuuuuuugaaauaaaauagccugucuuucagaucuaaaaaaaaaaaaaaaaaaaaaaaaaaaaaaaaaaaaaaaaaaaaaaaaaaaaaaaaaaaaaaaaaaaaaaaaaaaaaaaaaaaaaaaaaaaaaaaaaaaa

SEQ ID NO: 24833 - RNA, 4061 nt, Artificial Sequence
  SARS-CoV-2/Wuhan/WIV05/2019__EPI_ISL_402128 spike protein mRNA gc mod (1-1273)(L18F_D80A_D215G_L242del_A243del_L244del_R246I_K417N_E484 K_N501Y_D614G_A701V)
aggagagucccgcagucggcguccagcggcucugcuuguucgugugugugucguugcaggccuuauucaagcuuaccauguucguguuccuggugcugcugccucugguguccagccagugugugaacuucaccaccagaacacagcugccuccagccuacaccaacagcuuuaccagaggcguguacuaccccgacaagguguucagauccagcgugcugcacucuacccaggaccuguuccugccuuucuucagcaacgugaccugguuccacgccauccacguguccggcaccaauggcaccaagagauucgccaaccccgugcugcccuucaacgacgggguguacuuugccagcaccgagaaguccaacaucaucagaggcuggaucuucggcaccacacuggacagcaagacccagagccugcugaucgugaacaacgccaccaacguggucaucaaagugugcgaguuccaguucugcaacgaccccuuccugggcgucuacuaccacaagaacaacaagagcuggauggaaagcgaguuccggguguacagcagcgccaacaacugcaccuucgaguacgugucccagccuuuccugauggaccuggaaggcaagcagggcaacuucaagaaccugcgcgaguucguguuuaagaacaucgacggcuacuucaagaucuacagcaagcacaccccuaucaaccucgugcggggccugccucagggcuucucugcucuggaaccccugguggaucugcccaucggcaucaacaucacccgguuucagacacugcacaucagcuaccugacaccuggcgauagcagcagcggauggacagcuggugccgccgcuuacuaugugggcuaccugcagccuagaaccuuccugcugaaguacaacgagaacggcaccaucaccgacgccguggauugugcucuggauccucugagcgagacaaagugcacccugaaguccuucaccguggaaaagggcaucuaccagaccagcaacuuccgggugcagcccaccgaauccaucgugcgguuccccaauaucaccaaucugugccccuucggcgagguguucaaugccaccagauucgccucuguguacgccuggaaccggaagcggaucagcaauugcguggccgacuacuccgugcuguacaacuccgccagcuucagcaccuucaagugcuacggcguguccccuaccaagcugaacgaccugugcuucacaaacguguacgccgacagcuucgugauccggggagaugaagugcggcagauugccccuggacagacaggcaacaucgccgacuacaacuacaagcugcccgacgacuucaccggcugugugauugccuggaacagcaacaaccuggacuccaaagucggcggcaacuacaauuaccuguaccggcuguuccggaaguccaaucugaagcccuucgagcgggacaucuccaccgagaucuaucaggccggcagcaccccuuguaacggcgugaagggcuucaacugcuacuucccacugcaguccuacggcuuucagcccacauacggcgugggcuaucagcccuacagagugguggugcugagcuucgaacugcugcaugccccugccacagugugcggcccuaagaaaagcaccaaucucgugaagaacaaaugcgugaacuucaacuucaacggccugaccggcaccggcgugcugacagagagcaacaagaaguuccugccauuccagcaguuuggccgggauaucgccgauaccacagacgccguuagagauccccagacacuggaaauccuggacaucaccccuugcagcuucggcggagugucugugaucaccccuggcaccaacaccagcaaucagguggcagugcuguaccagggcgugaacuguaccgaagugcccguggccauucacgccgaucagcugacaccuacauggcggguguacuccaccggcagcaauguguuucagaccagagccggcugucugaucggagccgagcacgugaacaauagcuacgagugcgacauccccaucggcgcuggaaucugcgccagcuaccagacacagacaaacagcccucggagagccagaagcguggccagccagagcaucauugccuacacaaugucucugggcguggagaacagcguggccuacuccaacaacucuaucgcuauccccaccaacuucaccaucagcgugaccacagagauccugccuguguccaugaccaagaccagcguggacugcaccauguacaucugcggcgauuccaccgagugcuccaaccugcugcugcaguacggcagcuucugcacccagcugaauagagcccugacagggaucgccguggaacaggacaagaacacccaagagguguucgcccaagugaagcagaucuacaagaccccuccuaucaaggacuucggcggcuucaauuucagccagauucugcccgauccuagcaagcccagcaagcggagcuucaucgaggaccugcuguucaacaaagugacacuggccgacgccggcuucaucaagcaguauggcgauugucugggcgacauugccgccagggaucugauuugcgcccagaaguuuaacggacugacagugcugccuccucugcugaccgaugagaugaucgcccaguacacaucugcccugcuggccggcacaaucacaagcggcuggacauuuggagcaggcgccgcucugcagauccccuuugcuaugcagauggccuaccgguucaacggcaucggagugacccagaaugugcuguacgagaaccagaagcugaucgccaaccaguucaacagcgccaucggcaagauccaggacagccugagcagcacagcaagcgcccugggaaagcugcaggacguggucaaccagaaugcccaggcacugaacacccuggucaagcagcuguccuccaacuucggcgccaucagcucugugcugaacgauauccugagcagacuggacaaggucgaggccgaggugcagaucgacagacugaucacaggcagacugcagagccuccagacauacgugacccagcagcugaucagagccgccgagauuagagccucugccaaucuggccgccaccaagaugucugagugugugcugggccagagcaagagaguggacuuuugcggcaagggcuaccaccugaugagcuucccucagucugccccucacggcgugguguuucugcacgugacauaugugcccgcucaagagaagaauuucaccaccgcuccagccaucugccacgacggcaaagcccacuuuccuagagaaggcguguucguguccaacggcacccauugguucgugacacagcggaacuucuacgagccccagaucaucaccaccgacaacaccuucgugucuggcaacugcgacgucgugaucggcauugugaacaauaccguguacgacccucugcagcccgagcuggacagcuucaaagaggaacuggacaaguacuuuaagaaccacacaagccccgacguggaccugggcgauaucagcggaaucaaugccagcgucgugaacauccagaaagagaucgaccggcugaacgagguggccaagaaucugaacgagagccugaucgaccugcaagaacuggggaaguacgagcaguacaucaaguggcccugguacaucuggcugggcuuuaucgccggacugauugccaucgugauggucacaaucaugcuguguugcaugaccagcugcuguagcugccugaagggcuguuguagcuguggcagcugcugcaaguucgacgaggacgauucugagcccgugcugaagggcgugaaacugcacuacacaugaggacuagucccuguucccagagcccacuuuuuuuucuuuuuuugaaauaaaauagccugucuuucagaucuaaaaaaaaaaaaaaaaaaaaaaaaaaaaaaaaaaaaaaaaaaaaaaaaaaaaaaaaaaaaaaaaaaaaaaaaaaaaaaaaaaaaaaaaaaaaaaaaaaaa

SEQ ID NO: 24834 - RNA, 4070 nt, Artificial Sequence
  SARS-CoV-2/Wuhan/WIV05/2019__EPI_ISL_402128 spike protein mRNA gc mod (1-1273)(E484K_D614G)
aggagagucccgcagucggcguccagcggcucugcuuguucgugugugugucguugcaggccuuauucaagcuuaccauguucguguuccuggugcugcugccucugguguccagccagugugugaaccugaccaccagaacacagcugccuccagccuacaccaacagcuuuaccagaggcguguacuaccccgacaagguguucagauccagcgugcugcacucuacccaggaccuguuccugccuuucuucagcaacgugaccugguuccacgccauccacguguccggcaccaauggcaccaagagauucgacaaccccgugcugcccuucaacgacgggguguacuuugccagcaccgagaaguccaacaucaucagaggcuggaucuucggcaccacacuggacagcaagacccagagccugcugaucgugaacaacgccaccaacguggucaucaaagugugcgaguuccaguucugcaacgaccccuuccugggcgucuacuaccacaagaacaacaagagcuggauggaaagcgaguuccggguguacagcagcgccaacaacugcaccuucgaguacgugucccagccuuuccugauggaccuggaaggcaagcagggcaacuucaagaaccugcgcgaguucguguuuaagaacaucgacggcuacuucaagaucuacagcaagcacaccccuaucaaccucgugcgggaucugccucagggcuucucugcucuggaaccccugguggaucugcccaucggcaucaacaucacccgguuucagacacugcuggcccugcacagaagcuaccugacaccuggcgauagcagcagcggauggacagcuggugccgccgcuuacuaugugggcuaccugcagccuagaaccuuccugcugaaguacaacgagaacggcaccaucaccgacgccguggauugugcucuggauccucugagcgagacaaagugcacccugaaguccuucaccguggaaaagggcaucuaccagaccagcaacuuccgggugcagcccaccgaauccaucgugcgguuccccaauaucaccaaucugugccccuucggcgagguguucaaugccaccagauucgccucuguguacgccuggaaccggaagcggaucagcaauugcguggccgacuacuccgugcuguacaacuccgccagcuucagcaccuucaagugcuacggcguguccccuaccaagcugaacgaccugugcuucacaaacguguacgccgacagcuucgugauccggggagaugaagugcggcagauugccccuggacagacaggcaagaucgccgacuacaacuacaagcugcccgacgacuucaccggcugugugauugccuggaacagcaacaaccuggacuccaaagucggcggcaacuacaauuaccuguaccggcuguuccggaaguccaaucugaagcccuucgagcgggacaucuccaccgagaucuaucaggccggcagcaccccuuguaacggcgugaagggcuucaacugcuacuucccacugcaguccuacggcuuucagcccacaaauggcgugggcuaucagcccuacagagugguggugcugagcuucgaacugcugcaugccccugccacagugugcggcccuaagaaaagcaccaaucucgugaagaacaaaugcgugaacuucaacuucaacggccugaccggcaccggcgugcugacagagagcaacaagaaguuccugccauuccagcaguuuggccgggauaucgccgauaccacagacgccguuagagauccccagacacuggaaauccuggacaucaccccuugcagcuucggcggagugucugugaucaccccuggcaccaacaccagcaaucagguggcagugcuguaccagggcgugaacuguaccgaagugcccguggccauucacgccgaucagcugacaccuacauggcggguguacuccaccggcagcaauguguuucagaccagagccggcugucugaucggagccgagcacgugaacaauagcuacgagugcgacauccccaucggcgcuggaaucugcgccagcuaccagacacagacaaacagcccucggagagccagaagcguggccagccagagcaucauugccuacacaaugucucugggcgccgagaacagcguggccuacuccaacaacucuaucgcuauccccaccaacuucaccaucagcgugaccacagagauccugccuguguccaugaccaagaccagcguggacugcaccauguacaucugcggcgauuccaccgagugcuccaaccugcugcugcaguacggcagcuucugcacccagcugaauagagcccugacagggaucgccguggaacaggacaagaacacccaagagguguucgcccaagugaagcagaucuacaagaccccuccuaucaaggacuucggcggcuucaauuucagccagauucugcccgauccuagcaagcccagcaagcggagcuucaucgaggaccugcuguucaacaaagugacacuggccgacgccggcuucaucaagcaguauggcgauugucugggcgacauugccgccagggaucugauuugcgcccagaaguuuaacggacugacagugcugccuccucugcugaccgaugagaugaucgcccaguacacaucugcccugcuggccggcacaaucacaagcggcuggacauuuggagcaggcgccgcucugcagauccccuuugcuaugcagauggccuaccgguucaacggcaucggagugacccagaaugugcuguacgagaaccagaagcugaucgccaaccaguucaacagcgccaucggcaagauccaggacagccugagcagcacagcaagcgcccugggaaagcugcaggacguggucaaccagaaugcccaggcacugaacacccuggucaagcagcuguccuccaacuucggcgccaucagcucugugcugaacgauauccugagcagacuggacaaggucgaggccgaggugcagaucgacagacugaucacaggcagacugcagagccuccagacauacgugacccagcagcugaucagagccgccgagauuagagccucugccaaucuggccgccaccaagaugucugagugugugcugggccagagcaagagaguggacuuuugcggcaagggcuaccaccugaugagcuucccucagucugccccucacggcgugguguuucugcacgugacauaugugcccgcucaagagaagaauuucaccaccgcuccagccaucugccacgacggcaaagcccacuuuccuagagaaggcguguucguguccaacggcacccauugguucgugacacagcggaacuucuacgagccccagaucaucaccaccgacaacaccuucgugucuggcaacugcgacgucgugaucggcauugugaacaauaccguguacgacccucugcagcccgagcuggacagcuucaaagaggaacuggacaaguacuuuaagaaccacacaagccccgacguggaccugggcgauaucagcggaaucaaugccagcgucgugaacauccagaaagagaucgaccggcugaacgagguggccaagaaucugaacgagagccugaucgaccugcaagaacuggggaaguacgagcaguacaucaaguggcccugguacaucuggcugggcuuuaucgccggacugauugccaucgugauggucacaaucaugcuguguugcaugaccagcugcuguagcugccugaagggcuguuguagcuguggcagcugcugcaaguucgacgaggacgauucugagcccgugcugaagggcgugaaacugcacuacacaugaggacuagucccuguucccagagcccacuuuuuuuucuuuuuuugaaauaaaauagccugucuuucagaucuaaaaaaaaaaaaaaaaaaaaaaaaaaaaaaaaaaaaaaaaaaaaaaaaaaaaaaaaaaaaaaaaaaaaaaaaaaaaaaaaaaaaaaaaaaaaaaaaaaaa

SEQ ID NO: 24835 - RNA, 4070 nt, Artificial Sequence
  SARS-CoV-2/Wuhan/WIV05/2019__EPI_ISL_402128 spike protein mRNA gc mod (1-1273)(L18F_T20N_P26S_D138Y_R190S_K417T_E484K_N501Y_D614G_H655Y _T1027I)
aggagagucccgcagucggcguccagcggcucugcuuguucgugugugugucguugcaggccuuauucaagcuuaccauguucguguuccuggugcugcugccucugguguccagccagugugugaacuucaccaacagaacacagcugccuagcgccuacaccaacagcuuuaccagaggcguguacuaccccgacaagguguucagauccagcgugcugcacucuacccaggaccuguuccugccuuucuucagcaacgugaccugguuccacgccauccacguguccggcaccaauggcaccaagagauucgacaaccccgugcugcccuucaacgacgggguguacuuugccagcaccgagaaguccaacaucaucagaggcuggaucuucggcaccacacuggacagcaagacccagagccugcugaucgugaacaacgccaccaacguggucaucaaagugugcgaguuccaguucugcaacuaccccuuccugggcgucuacuaccacaagaacaacaagagcuggauggaaagcgaguuccggguguacagcagcgccaacaacugcaccuucgaguacgugucccagccuuuccugauggaccuggaaggcaagcagggcaacuucaagaaccugagcgaguucguguuuaagaacaucgacggcuacuucaagaucuacagcaagcacaccccuaucaaccucgugcgggaucugccucagggcuucucugcucuggaaccccugguggaucugcccaucggcaucaacaucacccgguuucagacacugcuggcccugcacagaagcuaccugacaccuggcgauagcagcagcggauggacagcuggugccgccgcuuacuaugugggcuaccugcagccuagaaccuuccugcugaaguacaacgagaacggcaccaucaccgacgccguggauugugcucuggauccucugagcgagacaaagugcacccugaaguccuucaccguggaaaagggcaucuaccagaccagcaacuuccgggugcagcccaccgaauccaucgugcgguuccccaauaucaccaaucugugccccuucggcgagguguucaaugccaccagauucgccucuguguacgccuggaaccggaagcggaucagcaauugcguggccgacuacuccgugcuguacaacuccgccagcuucagcaccuucaagugcuacggcguguccccuaccaagcugaacgaccugugcuucacaaacguguacgccgacagcuucgugauccggggagaugaagugcggcagauugccccuggacagacaggcaccaucgccgacuacaacuacaagcugcccgacgacuucaccggcugugugauugccuggaacagcaacaaccuggacuccaaagucggcggcaacuacaauuaccuguaccggcuguuccggaaguccaaucugaagcccuucgagcgggacaucuccaccgagaucuaucaggccggcagcaccccuuguaacggcgugaagggcuucaacugcuacuucccacugcaguccuacggcuuucagcccacauacggcgugggcuaucagcccuacagagugguggugcugagcuucgaacugcugcaugccccugccacagugugcggcccuaagaaaagcaccaaucucgugaagaacaaaugcgugaacuucaacuucaacggccugaccggcaccggcgugcugacagagagcaacaagaaguuccugccauuccagcaguuuggccgggauaucgccgauaccacagacgccguuagagauccccagacacuggaaauccuggacaucaccccuugcagcuucggcggagugucugugaucaccccuggcaccaacaccagcaaucagguggcagugcuguaccagggcgugaacuguaccgaagugcccguggccauucacgccgaucagcugacaccuacauggcggguguacuccaccggcagcaauguguuucagaccagagccggcugucugaucggagccgaguacgugaacaauagcuacgagugcgacauccccaucggcgcuggaaucugcgccagcuaccagacacagacaaacagcccucggagagccagaagcguggccagccagagcaucauugccuacacaaugucucugggcgccgagaacagcguggccuacuccaacaacucuaucgcuauccccaccaacuucaccaucagcgugaccacagagauccugccuguguccaugaccaagaccagcguggacugcaccauguacaucugcggcgauuccaccgagugcuccaaccugcugcugcaguacggcagcuucugcacccagcugaauagagcccugacagggaucgccguggaacaggacaagaacacccaagagguguucgcccaagugaagcagaucuacaagaccccuccuaucaaggacuucggcggcuucaauuucagccagauucugcccgauccuagcaagcccagcaagcggagcuucaucgaggaccugcuguucaacaaagugacacuggccgacgccggcuucaucaagcaguauggcgauugucugggcgacauugccgccagggaucugauuugcgcccagaaguuuaacggacugacagugcugccuccucugcugaccgaugagaugaucgcccaguacacaucugcccugcuggccggcacaaucacaagcggcuggacauuuggagcaggcgccgcucugcagauccccuuugcuaugcagauggccuaccgguucaacggcaucggagugacccagaaugugcuguacgagaaccagaagcugaucgccaaccaguucaacagcgccaucggcaagauccaggacagccugagcagcacagcaagcgcccugggaaagcugcaggacguggucaaccagaaugcccaggcacugaacacccuggucaagcagcuguccuccaacuucggcgccaucagcucugugcugaacgauauccugagcagacuggacaaggucgaggccgaggugcagaucgacagacugaucacaggcagacugcagagccuccagacauacgugacccagcagcugaucagagccgccgagauuagagccucugccaaucuggccgccaucaagaugucugagugugugcugggccagagcaagagaguggacuuuugcggcaagggcuaccaccugaugagcuucccucagucugccccucacggcgugguguuucugcacgugacauaugugcccgcucaagagaagaauuucaccaccgcuccagccaucugccacgacggcaaagcccacuuuccuagagaaggcguguucguguccaacggcacccauugguucgugacacagcggaacuucuacgagccccagaucaucaccaccgacaacaccuucgugucuggcaacugcgacgucgugaucggcauugugaacaauaccguguacgacccucugcagcccgagcuggacagcuucaaagaggaacuggacaaguacuuuaagaaccacacaagccccgacguggaccugggcgauaucagcggaaucaaugccagcgucgugaacauccagaaagagaucgaccggcugaacgagguggccaagaaucugaacgagagccugaucgaccugcaagaacuggggaaguacgagcaguacaucaaguggcccugguacaucuggcugggcuuuaucgccggacugauugccaucgugauggucacaaucaugcuguguugcaugaccagcugcuguagcugccugaagggcuguuguagcuguggcagcugcugcaaguucgacgaggacgauucugagcccgugcugaagggcgugaaacugcacuacacaugaggacuagucccuguucccagagcccacuuuuuuuucuuuuuuugaaauaaaauagccugucuuucagaucuaaaaaaaaaaaaaaaaaaaaaaaaaaaaaaaaaaaaaaaaaaaaaaaaaaaaaaaaaaaaaaaaaaaaaaaaaaaaaaaaaaaaaaaaaaaaaaaaaaaa

SEQ ID NO: 24836 - RNA, 4070 nt, Artificial Sequence
  SARS-CoV-2/Wuhan/WIV05/2019__EPI_ISL_402128 spike protein mRNA gc mod (1-1273)(S13I_W152C_L452R_D614G)
aggagagucccgcagucggcguccagcggcucugcuuguucgugugugugucguugcaggccuuauucaagcuuaccauguucguguuccuggugcugcugccucugguguccauccagugugugaaccugaccaccagaacacagcugccuccagccuacaccaacagcuuuaccagaggcguguacuaccccgacaagguguucagauccagcgugcugcacucuacccaggaccuguuccugccuuucuucagcaacgugaccugguuccacgccauccacguguccggcaccaauggcaccaagagauucgacaaccccgugcugcccuucaacgacgggguguacuuugccagcaccgagaaguccaacaucaucagaggcuggaucuucggcaccacacuggacagcaagacccagagccugcugaucgugaacaacgccaccaacguggucaucaaagugugcgaguuccaguucugcaacgaccccuuccugggcgucuacuaccacaagaacaacaagagcugcauggaaagcgaguuccggguguacagcagcgccaacaacugcaccuucgaguacgugucccagccuuuccugauggaccuggaaggcaagcagggcaacuucaagaaccugcgcgaguucguguuuaagaacaucgacggcuacuucaagaucuacagcaagcacaccccuaucaaccucgugcgggaucugccucagggcuucucugcucuggaaccccugguggaucugcccaucggcaucaacaucacccgguuucagacacugcuggcccugcacagaagcuaccugacaccuggcgauagcagcagcggauggacagcuggugccgccgcuuacuaugugggcuaccugcagccuagaaccuuccugcugaaguacaacgagaacggcaccaucaccgacgccguggauugugcucuggauccucugagcgagacaaagugcacccugaaguccuucaccguggaaaagggcaucuaccagaccagcaacuuccgggugcagcccaccgaauccaucgugcgguuccccaauaucaccaaucugugccccuucggcgagguguucaaugccaccagauucgccucuguguacgccuggaaccggaagcggaucagcaauugcguggccgacuacuccgugcuguacaacuccgccagcuucagcaccuucaagugcuacggcguguccccuaccaagcugaacgaccugugcuucacaaacguguacgccgacagcuucgugauccggggagaugaagugcggcagauugccccuggacagacaggcaagaucgccgacuacaacuacaagcugcccgacgacuucaccggcugugugauugccuggaacagcaacaaccuggacuccaaagucggcggcaacuacaauuaccgcuaccggcuguuccggaaguccaaucugaagcccuucgagcgggacaucuccaccgagaucuaucaggccggcagcaccccuuguaacggcguggaaggcuucaacugcuacuucccacugcaguccuacggcuuucagcccacaaauggcgugggcuaucagcccuacagagugguggugcugagcuucgaacugcugcaugccccugccacagugugcggcccuaagaaaagcaccaaucucgugaagaacaaaugcgugaacuucaacuucaacggccugaccggcaccggcgugcugacagagagcaacaagaaguuccugccauuccagcaguuuggccgggauaucgccgauaccacagacgccguuagagauccccagacacuggaaauccuggacaucaccccuugcagcuucggcggagugucugugaucaccccuggcaccaacaccagcaaucagguggcagugcuguaccagggcgugaacuguaccgaagugcccguggccauucacgccgaucagcugacaccuacauggcggguguacuccaccggcagcaauguguuucagaccagagccggcugucugaucggagccgagcacgugaacaauagcuacgagugcgacauccccaucggcgcuggaaucugcgccagcuaccagacacagacaaacagcccucggagagccagaagcguggccagccagagcaucauugccuacacaaugucucugggcgccgagaacagcguggccuacuccaacaacucuaucgcuauccccaccaacuucaccaucagcgugaccacagagauccugccuguguccaugaccaagaccagcguggacugcaccauguacaucugcggcgauuccaccgagugcuccaaccugcugcugcaguacggcagcuucugcacccagcugaauagagcccugacagggaucgccguggaacaggacaagaacacccaagagguguucgcccaagugaagcagaucuacaagaccccuccuaucaaggacuucggcggcuucaauuucagccagauucugcccgauccuagcaagcccagcaagcggagcuucaucgaggaccugcuguucaacaaagugacacuggccgacgccggcuucaucaagcaguauggcgauugucugggcgacauugccgccagggaucugauuugcgcccagaaguuuaacggacugacagugcugccuccucugcugaccgaugagaugaucgcccaguacacaucugcccugcuggccggcacaaucacaagcggcuggacauuuggagcaggcgccgcucugcagauccccuuugcuaugcagauggccuaccgguucaacggcaucggagugacccagaaugugcuguacgagaaccagaagcugaucgccaaccaguucaacagcgccaucggcaagauccaggacagccugagcagcacagcaagcgcccugggaaagcugcaggacguggucaaccagaaugcccaggcacugaacacccuggucaagcagcuguccuccaacuucggcgccaucagcucugugcugaacgauauccugagcagacuggacaaggucgaggccgaggugcagaucgacagacugaucacaggcagacugcagagccuccagacauacgugacccagcagcugaucagagccgccgagauuagagccucugccaaucuggccgccaccaagaugucugagugugugcugggccagagcaagagaguggacuuuugcggcaagggcuaccaccugaugagcuucccucagucugccccucacggcgugguguuucugcacgugacauaugugcccgcucaagagaagaauuucaccaccgcuccagccaucugccacgacggcaaagcccacuuuccuagagaaggcguguucguguccaacggcacccauugguucgugacacagcggaacuucuacgagccccagaucaucaccaccgacaacaccuucgugucuggcaacugcgacgucgugaucggcauugugaacaauaccguguacgacccucugcagcccgagcuggacagcuucaaagaggaacuggacaaguacuuuaagaaccacacaagccccgacguggaccugggcgauaucagcggaaucaaugccagcgucgugaacauccagaaagagaucgaccggcugaacgagguggccaagaaucugaacgagagccugaucgaccugcaagaacuggggaaguacgagcaguacaucaaguggcccugguacaucuggcugggcuuuaucgccggacugauugccaucgugauggucacaaucaugcuguguugcaugaccagcugcuguagcugccugaagggcuguuguagcuguggcagcugcugcaaguucgacgaggacgauucugagcccgugcugaagggcgugaaacugcacuacacaugaggacuagucccuguucccagagcccacuuuuuuuucuuuuuuugaaauaaaauagccugucuuucagaucuaaaaaaaaaaaaaaaaaaaaaaaaaaaaaaaaaaaaaaaaaaaaaaaaaaaaaaaaaaaaaaaaaaaaaaaaaaaaaaaaaaaaaaaaaaaaaaaaaaaa

SEQ ID NO: 24837 - RNA, 4070 nt, Artificial Sequence
  SARS-CoV-2/Wuhan/WIV05/2019__EPI_ISL_402128 spike protein mRNA gc (1-1273)(K986P_V987P) R10153
aggagagucccgcagucggcguccagcggcucugcuuguucgugugugugucguugcaggccuuauucaagcuuaccauguucguguuccugguccuccugccccuggugagcucccagugcgugaaccucaccacccgcacgcagcugccgcccgccuacaccaacagcuucacccggggcgucuacuaccccgacaagguguuccgcuccagcgugcugcacuccacccaggaccucuuccugcccuucuucagcaacgucacgugguuccacgccauccacguguccgggaccaacggcaccaagcgguucgacaacccggugcugcccuucaacgacggggucuacuucgcgagcaccgagaaguccaacaucauccgcggcuggaucuucgggacgacccucgacagcaagacccagucccugcugaucgugaacaacgccaccaacguggucaucaaggugugcgaguuccaguucugcaacgaccccuuccucggcguguacuaccacaagaacaacaagagcuggauggaguccgaguuccgggucuacagcuccgccaacaacugcacguucgaguacgugagccagcccuuccugauggaccuggagggcaagcaggggaacuucaagaaccuccgcgaguucguguucaagaacaucgacggcuacuucaagaucuacuccaagcacaccccgaucaaccugguccgggaccugccccagggguucagcgcccucgagccccugguggaccugcccaucggcaucaacaucacccgcuuccagacccuccuggcccugcaccgguccuaccucacgccgggggacagcagcuccggcuggaccgcgggcgccgccgccuacuacgugggguaccugcagccccgcaccuuccugcucaaguacaacgagaacggcaccaucacggacgcggucgacugcgcccuggacccccugagcgagaccaagugcacccucaaguccuucaccguggagaaggggaucuaccagacgagcaacuuccgggugcagcccaccgaguccaucguccgcuucccgaacaucaccaaccugugccccuucggcgagguguucaacgccacccgguucgccagcgucuacgccuggaaccgcaagcggaucuccaacugcguggcggacuacagcgugcuguacaacuccgccagcuucuccacguucaagugcuacggcgucagccccaccaagcucaacgaccugugcuucaccaacguguacgccgacuccuucgugauccgcggggacgagguccggcagaucgcccccggccagaccgggaagaucgccgacuacaacuacaagcugccggacgacuucacgggcugcgugaucgcguggaacagcaacaaccucgacuccaaggucgggggcaacuacaacuaccuguaccgccuguuccgcaagagcaaccucaagcccuucgagcgggacaucuccaccgagaucuaccaggccggcagcacccccugcaacgggguggagggcuucaacugcuacuucccccugcaguccuacggguuccagccgaccaacggcgugggguaccagcccuaccggguggucgugcugagcuucgagcuccugcacgcccccgccacggugugcggccccaagaaguccaccaaccuggucaagaacaagugcgugaacuucaacuucaacggccucaccgggaccggcgugcugaccgagagcaacaagaaguuccugccguuccagcaguucgggcgcgacaucgccgacacgaccgacgcgguccgcgacccccagacccuggagauccucgacaucacccccugcagcuucggcgggguguccgugaucacgccgggcaccaacaccagcaaccaggucgccgugcuguaccaggacgugaacugcaccgagguccccguggccauccacgccgaccagcugacgcccaccuggcggguguacuccaccggcagcaacgucuuccagacccgcgccgggugccucaucggcgcggagcacgugaacaacuccuacgagugcgacauccccaucggggccggcaucugcgccagcuaccagacgcagaccaacuccccgcggcgcgcccggagcguggcgucccagagcaucaucgccuacaccaugucccugggcgccgagaacagcgucgccuacuccaacaacagcaucgccauccccaccaacuucacgaucuccgugaccaccgagauccugcccgugagcaugaccaagacgagcgucgacugcaccauguacaucugcggggacuccaccgagugcagcaaccuccugcugcaguacggcuccuucugcacccagcucaaccgcgcgcugacggggaucgccguggagcaggacaagaacacccaggagguguucgcccaggucaagcagaucuacaagacgcccccgaucaaggacuucggcggguucaacuucagccagauccugcccgaccccuccaagcccagcaagcgguccuucaucgaggaccuccuguucaacaaggugacccuggccgacgccggcuucaucaagcaguacggcgacugccucggggacaucgcggcccgcgaccugaucugcgcccagaaguucaacggccugaccgugcucccgccccugcugaccgacgagaugaucgcccaguacaccagcgcccuccuggcggggaccaucacguccggcuggaccuucggggccggcgccgcccugcagauccccuucgcgaugcagauggccuaccgguucaacggcaucggggucacccagaacgugcucuacgagaaccagaagcugaucgccaaccaguucaacagcgccaucggcaagauccaggacucccugagcuccaccgccagcgcgcucgggaagcugcaggacguggucaaccagaacgcccaggcccugaacacgcucgugaagcagcuguccagcaacuucggcgccaucuccagcgugcugaacgacauccucucccgccuggacccgcccgaggccgaggugcagaucgaccggcugaucaccgggcgccuccagagccugcagaccuacgugacccagcagcugauccgggcggccgagauccgcgccagcgccaaccucgccgcgaccaagauguccgagugcguccugggccagagcaagcggguggacuucugcggcaagggguaccaccugauguccuucccccagagcgccccgcacggcguggucuuccuccacgugacguacguccccgcccaggagaagaacuucaccaccgcccccgcgaucugccacgacgggaaggcccacuucccccgcgagggcguguucguguccaacgggacccacugguucgucacgcagcggaacuucuacgagccgcagaucaucaccaccgacaacaccuucgugagcggcaacugcgacguggucaucggcaucgugaacaacacgguguacgacccccugcagcccgagcuggacuccuucaaggaggagcucgacaaguacuucaagaaccacaccagccccgacgucgaccugggggacaucuccggcaucaacgccagcguggugaacauccagaaggagaucgaccgccugaacgaggucgccaagaaccucaacgagucccugaucgaccugcaggagcucgggaaguacgagcaguacaucaaguggccgugguacaucuggcugggcuucaucgccggccugaucgcgaucgugauggugaccaucaugcucugcugcaugaccagcugcugcuccugccugaaggggugcugcagcugcggcuccugcugcaaguucgacgaggacgacagcgagcccguccugaagggggugaagcuccacuacacgugaggacuagucccuguucccagagcccacuuuuuuuucuuuuuuugaaauaaaauagccugucuuucagaucuaaaaaaaaaaaaaaaaaaaaaaaaaaaaaaaaaaaaaaaaaaaaaaaaaaaaaaaaaaaaaaaaaaaaaaaaaaaaaaaaaaaaaaaaaaaaaaaaaaaa

SEQ ID NO: 24838 - RNA, 4070 nt, Artificial Sequence
  SARS-CoV-2/Wuhan/WIV05/2019__EPI_ISL_402128 spike protein mRNA gc (1-1273)(K986P_V987P_ D614G)
aggagagucccgcagucggcguccagcggcucugcuuguucgugugugugucguugcaggccuuauucaagcuuaccauguucguguuccugguccuccugccccuggugagcucccagugcgugaaccucaccacccgcacgcagcugccgcccgccuacaccaacagcuucacccggggcgucuacuaccccgacaagguguuccgcuccagcgugcugcacuccacccaggaccucuuccugcccuucuucagcaacgucacgugguuccacgccauccacguguccgggaccaacggcaccaagcgguucgacaacccggugcugcccuucaacgacggggucuacuucgcgagcaccgagaaguccaacaucauccgcggcuggaucuucgggacgacccucgacagcaagacccagucccugcugaucgugaacaacgccaccaacguggucaucaaggugugcgaguuccaguucugcaacgaccccuuccucggcguguacuaccacaagaacaacaagagcuggauggaguccgaguuccgggucuacagcuccgccaacaacugcacguucgaguacgugagccagcccuuccugauggaccuggagggcaagcaggggaacuucaagaaccuccgcgaguucguguucaagaacaucgacggcuacuucaagaucuacuccaagcacaccccgaucaaccugguccgggaccugccccagggguucagcgcccucgagccccugguggaccugcccaucggcaucaacaucacccgcuuccagacccuccuggcccugcaccgguccuaccucacgccgggggacagcagcuccggcuggaccgcgggcgccgccgccuacuacgugggguaccugcagccccgcaccuuccugcucaaguacaacgagaacggcaccaucacggacgcggucgacugcgcccuggacccccugagcgagaccaagugcacccucaaguccuucaccguggagaaggggaucuaccagacgagcaacuuccgggugcagcccaccgaguccaucguccgcuucccgaacaucaccaaccugugccccuucggcgagguguucaacgccacccgguucgccagcgucuacgccuggaaccgcaagcggaucuccaacugcguggcggacuacagcgugcuguacaacuccgccagcuucuccacguucaagugcuacggcgucagccccaccaagcucaacgaccugugcuucaccaacguguacgccgacuccuucgugauccgcggggacgagguccggcagaucgcccccggccagaccgggaagaucgccgacuacaacuacaagcugccggacgacuucacgggcugcgugaucgcguggaacagcaacaaccucgacuccaaggucgggggcaacuacaacuaccuguaccgccuguuccgcaagagcaaccucaagcccuucgagcgggacaucuccaccgagaucuaccaggccggcagcacccccugcaacgggguggagggcuucaacugcuacuucccccugcaguccuacggguuccagccgaccaacggcgugggguaccagcccuaccggguggucgugcugagcuucgagcuccugcacgcccccgccacggugugcggccccaagaaguccaccaaccuggucaagaacaagugcgugaacuucaacuucaacggccucaccgggaccggcgugcugaccgagagcaacaagaaguuccugccguuccagcaguucgggcgcgacaucgccgacacgaccgacgcgguccgcgacccccagacccuggagauccucgacaucacccccugcagcuucggcgggguguccgugaucacgccgggcaccaacaccagcaaccaggucgccgugcuguaccagggcgugaacugcaccgagguccccguggccauccacgccgaccagcugacgcccaccuggcggguguacuccaccggcagcaacgucuuccagacccgcgccgggugccucaucggcgcggagcacgugaacaacuccuacgagugcgacauccccaucggggccggcaucugcgccagcuaccagacgcagaccaacuccccgcggcgcgcccggagcguggcgucccagagcaucaucgccuacaccaugucccugggcgccgagaacagcgucgccuacuccaacaacagcaucgccauccccaccaacuucacgaucuccgugaccaccgagauccugcccgugagcaugaccaagacgagcgucgacugcaccauguacaucugcggggacuccaccgagugcagcaaccuccugcugcaguacggcuccuucugcacccagcucaaccgcgcgcugacggggaucgccguggagcaggacaagaacacccaggagguguucgcccaggucaagcagaucuacaagacgcccccgaucaaggacuucggcggguucaacuucagccagauccugcccgaccccuccaagcccagcaagcgguccuucaucgaggaccuccuguucaacaaggugacccuggccgacgccggcuucaucaagcaguacggcgacugccucggggacaucgcggcccgcgaccugaucugcgcccagaaguucaacggccugaccgugcucccgccccugcugaccgacgagaugaucgcccaguacaccagcgcccuccuggcggggaccaucacguccggcuggaccuucggggccggcgccgcccugcagauccccuucgcgaugcagauggccuaccgguucaacggcaucggggucacccagaacgugcucuacgagaaccagaagcugaucgccaaccaguucaacagcgccaucggcaagauccaggacucccugagcuccaccgccagcgcgcucgggaagcugcaggacguggucaaccagaacgcccaggcccugaacacgcucgugaagcagcuguccagcaacuucggcgccaucuccagcgugcugaacgacauccucucccgccuggacccgcccgaggccgaggugcagaucgaccggcugaucaccgggcgccuccagagccugcagaccuacgugacccagcagcugauccgggcggccgagauccgcgccagcgccaaccucgccgcgaccaagauguccgagugcguccugggccagagcaagcggguggacuucugcggcaagggguaccaccugauguccuucccccagagcgccccgcacggcguggucuuccuccacgugacguacguccccgcccaggagaagaacuucaccaccgcccccgcgaucugccacgacgggaaggcccacuucccccgcgagggcguguucguguccaacgggacccacugguucgucacgcagcggaacuucuacgagccgcagaucaucaccaccgacaacaccuucgugagcggcaacugcgacguggucaucggcaucgugaacaacacgguguacgacccccugcagcccgagcuggacuccuucaaggaggagcucgacaaguacuucaagaaccacaccagccccgacgucgaccugggggacaucuccggcaucaacgccagcguggugaacauccagaaggagaucgaccgccugaacgaggucgccaagaaccucaacgagucccugaucgaccugcaggagcucgggaaguacgagcaguacaucaaguggccgugguacaucuggcugggcuucaucgccggccugaucgcgaucgugauggugaccaucaugcucugcugcaugaccagcugcugcuccugccugaaggggugcugcagcugcggcuccugcugcaaguucgacgaggacgacagcgagcccguccugaagggggugaagcuccacuacacgugaggacuagucccuguucccagagcccacuuuuuuuucuuuuuuugaaauaaaauagccugucuuucagaucuaaaaaaaaaaaaaaaaaaaaaaaaaaaaaaaaaaaaaaaaaaaaaaaaaaaaaaaaaaaaaaaaaaaaaaaaaaaaaaaaaaaaaaaaaaaaaaaaaaaa

SEQ ID NO: 24839 - RNA, 4070 nt, Artificial Sequence
  SARS-CoV-2/Wuhan/WIV05/2019__EPI_ISL_402128 spike protein mRNA gc (1-1273)(K986P_V987P_A222V_D614G)
aggagagucccgcagucggcguccagcggcucugcuuguucgugugugugucguugcaggccuuauucaagcuuaccauguucguguuccugguccuccugccccuggugagcucccagugcgugaaccucaccacccgcacgcagcugccgcccgccuacaccaacagcuucacccggggcgucuacuaccccgacaagguguuccgcuccagcgugcugcacuccacccaggaccucuuccugcccuucuucagcaacgucacgugguuccacgccauccacguguccgggaccaacggcaccaagcgguucgacaacccggugcugcccuucaacgacggggucuacuucgcgagcaccgagaaguccaacaucauccgcggcuggaucuucgggacgacccucgacagcaagacccagucccugcugaucgugaacaacgccaccaacguggucaucaaggugugcgaguuccaguucugcaacgaccccuuccucggcguguacuaccacaagaacaacaagagcuggauggaguccgaguuccgggucuacagcuccgccaacaacugcacguucgaguacgugagccagcccuuccugauggaccuggagggcaagcaggggaacuucaagaaccuccgcgaguucguguucaagaacaucgacggcuacuucaagaucuacuccaagcacaccccgaucaaccugguccgggaccugccccagggguucagcguccucgagccccugguggaccugcccaucggcaucaacaucacccgcuuccagacccuccuggcccugcaccgguccuaccucacgccgggggacagcagcuccggcuggaccgcgggcgccgccgccuacuacgugggguaccugcagccccgcaccuuccugcucaaguacaacgagaacggcaccaucacggacgcggucgacugcgcccuggacccccugagcgagaccaagugcacccucaaguccuucaccguggagaaggggaucuaccagacgagcaacuuccgggugcagcccaccgaguccaucguccgcuucccgaacaucaccaaccugugccccuucggcgagguguucaacgccacccgguucgccagcgucuacgccuggaaccgcaagcggaucuccaacugcguggcggacuacagcgugcuguacaacuccgccagcuucuccacguucaagugcuacggcgucagccccaccaagcucaacgaccugugcuucaccaacguguacgccgacuccuucgugauccgcggggacgagguccggcagaucgcccccggccagaccgggaagaucgccgacuacaacuacaagcugccggacgacuucacgggcugcgugaucgcguggaacagcaacaaccucgacuccaaggucgggggcaacuacaacuaccuguaccgccuguuccgcaagagcaaccucaagcccuucgagcgggacaucuccaccgagaucuaccaggccggcagcacccccugcaacgggguggagggcuucaacugcuacuucccccugcaguccuacggguuccagccgaccaacggcgugggguaccagcccuaccggguggucgugcugagcuucgagcuccugcacgcccccgccacggugugcggccccaagaaguccaccaaccuggucaagaacaagugcgugaacuucaacuucaacggccucaccgggaccggcgugcugaccgagagcaacaagaaguuccugccguuccagcaguucgggcgcgacaucgccgacacgaccgacgcgguccgcgacccccagacccuggagauccucgacaucacccccugcagcuucggcgggguguccgugaucacgccgggcaccaacaccagcaaccaggucgccgugcuguaccagggcgugaacugcaccgagguccccguggccauccacgccgaccagcugacgcccaccuggcggguguacuccaccggcagcaacgucuuccagacccgcgccgggugccucaucggcgcggagcacgugaacaacuccuacgagugcgacauccccaucggggccggcaucugcgccagcuaccagacgcagaccaacuccccgcggcgcgcccggagcguggcgucccagagcaucaucgccuacaccaugucccugggcgccgagaacagcgucgccuacuccaacaacagcaucgccauccccaccaacuucacgaucuccgugaccaccgagauccugcccgugagcaugaccaagacgagcgucgacugcaccauguacaucugcggggacuccaccgagugcagcaaccuccugcugcaguacggcuccuucugcacccagcucaaccgcgcgcugacggggaucgccguggagcaggacaagaacacccaggagguguucgcccaggucaagcagaucuacaagacgcccccgaucaaggacuucggcggguucaacuucagccagauccugcccgaccccuccaagcccagcaagcgguccuucaucgaggaccuccuguucaacaaggugacccuggccgacgccggcuucaucaagcaguacggcgacugccucggggacaucgcggcccgcgaccugaucugcgcccagaaguucaacggccugaccgugcucccgccccugcugaccgacgagaugaucgcccaguacaccagcgcccuccuggcggggaccaucacguccggcuggaccuucggggccggcgccgcccugcagauccccuucgcgaugcagauggccuaccgguucaacggcaucggggucacccagaacgugcucuacgagaaccagaagcugaucgccaaccaguucaacagcgccaucggcaagauccaggacucccugagcuccaccgccagcgcgcucgggaagcugcaggacguggucaaccagaacgcccaggcccugaacacgcucgugaagcagcuguccagcaacuucggcgccaucuccagcgugcugaacgacauccucucccgccuggacccgcccgaggccgaggugcagaucgaccggcugaucaccgggcgccuccagagccugcagaccuacgugacccagcagcugauccgggcggccgagauccgcgccagcgccaaccucgccgcgaccaagauguccgagugcguccugggccagagcaagcggguggacuucugcggcaagggguaccaccugauguccuucccccagagcgccccgcacggcguggucuuccuccacgugacguacguccccgcccaggagaagaacuucaccaccgcccccgcgaucugccacgacgggaaggcccacuucccccgcgagggcguguucguguccaacgggacccacugguucgucacgcagcggaacuucuacgagccgcagaucaucaccaccgacaacaccuucgugagcggcaacugcgacguggucaucggcaucgugaacaacacgguguacgacccccugcagcccgagcuggacuccuucaaggaggagcucgacaaguacuucaagaaccacaccagccccgacgucgaccugggggacaucuccggcaucaacgccagcguggugaacauccagaaggagaucgaccgccugaacgaggucgccaagaaccucaacgagucccugaucgaccugcaggagcucgggaaguacgagcaguacaucaaguggccgugguacaucuggcugggcuucaucgccggccugaucgcgaucgugauggugaccaucaugcucugcugcaugaccagcugcugcuccugccugaaggggugcugcagcugcggcuccugcugcaaguucgacgaggacgacagcgagcccguccugaagggggugaagcuccacuacacgugaggacuagucccuguucccagagcccacuuuuuuuucuuuuuuugaaauaaaauagccugucuuucagaucuaaaaaaaaaaaaaaaaaaaaaaaaaaaaaaaaaaaaaaaaaaaaaaaaaaaaaaaaaaaaaaaaaaaaaaaaaaaaaaaaaaaaaaaaaaaaaaaaaaaa

SEQ ID NO: 24840 - RNA, 4070 nt, Artificial Sequence
  SARS-CoV-2/Wuhan/WIV05/2019__EPI_ISL_402128 spike protein mRNA gc (1-1273)(K986P_V987P_N439K_D614G)
aggagagucccgcagucggcguccagcggcucugcuuguucgugugugugucguugcaggccuuauucaagcuuaccauguucguguuccugguccuccugccccuggugagcucccagugcgugaaccucaccacccgcacgcagcugccgcccgccuacaccaacagcuucacccggggcgucuacuaccccgacaagguguuccgcuccagcgugcugcacuccacccaggaccucuuccugcccuucuucagcaacgucacgugguuccacgccauccacguguccgggaccaacggcaccaagcgguucgacaacccggugcugcccuucaacgacggggucuacuucgcgagcaccgagaaguccaacaucauccgcggcuggaucuucgggacgacccucgacagcaagacccagucccugcugaucgugaacaacgccaccaacguggucaucaaggugugcgaguuccaguucugcaacgaccccuuccucggcguguacuaccacaagaacaacaagagcuggauggaguccgaguuccgggucuacagcuccgccaacaacugcacguucgaguacgugagccagcccuuccugauggaccuggagggcaagcaggggaacuucaagaaccuccgcgaguucguguucaagaacaucgacggcuacuucaagaucuacuccaagcacaccccgaucaaccugguccgggaccugccccagggguucagcgcccucgagccccugguggaccugcccaucggcaucaacaucacccgcuuccagacccuccuggcccugcaccgguccuaccucacgccgggggacagcagcuccggcuggaccgcgggcgccgccgccuacuacgugggguaccugcagccccgcaccuuccugcucaaguacaacgagaacggcaccaucacggacgcggucgacugcgcccuggacccccugagcgagaccaagugcacccucaaguccuucaccguggagaaggggaucuaccagacgagcaacuuccgggugcagcccaccgaguccaucguccgcuucccgaacaucaccaaccugugccccuucggcgagguguucaacgccacccgguucgccagcgucuacgccuggaaccgcaagcggaucuccaacugcguggcggacuacagcgugcuguacaacuccgccagcuucuccacguucaagugcuacggcgucagccccaccaagcucaacgaccugugcuucaccaacguguacgccgacuccuucgugauccgcggggacgagguccggcagaucgcccccggccagaccgggaagaucgccgacuacaacuacaagcugccggacgacuucacgggcugcgugaucgcguggaacagcaagaaccucgacuccaaggucgggggcaacuacaacuaccuguaccgccuguuccgcaagagcaaccucaagcccuucgagcgggacaucuccaccgagaucuaccaggccggcagcacccccugcaacgggguggagggcuucaacugcuacuucccccugcaguccuacggguuccagccgaccaacggcgugggguaccagcccuaccggguggucgugcugagcuucgagcuccugcacgcccccgccacggugugcggccccaagaaguccaccaaccuggucaagaacaagugcgugaacuucaacuucaacggccucaccgggaccggcgugcugaccgagagcaacaagaaguuccugccguuccagcaguucgggcgcgacaucgccgacacgaccgacgcgguccgcgacccccagacccuggagauccucgacaucacccccugcagcuucggcgggguguccgugaucacgccgggcaccaacaccagcaaccaggucgccgugcuguaccagggcgugaacugcaccgagguccccguggccauccacgccgaccagcugacgcccaccuggcggguguacuccaccggcagcaacgucuuccagacccgcgccgggugccucaucggcgcggagcacgugaacaacuccuacgagugcgacauccccaucggggccggcaucugcgccagcuaccagacgcagaccaacuccccgcggcgcgcccggagcguggcgucccagagcaucaucgccuacaccaugucccugggcgccgagaacagcgucgccuacuccaacaacagcaucgccauccccaccaacuucacgaucuccgugaccaccgagauccugcccgugagcaugaccaagacgagcgucgacugcaccauguacaucugcggggacuccaccgagugcagcaaccuccugcugcaguacggcuccuucugcacccagcucaaccgcgcgcugacggggaucgccguggagcaggacaagaacacccaggagguguucgcccaggucaagcagaucuacaagacgcccccgaucaaggacuucggcggguucaacuucagccagauccugcccgaccccuccaagcccagcaagcgguccuucaucgaggaccuccuguucaacaaggugacccuggccgacgccggcuucaucaagcaguacggcgacugccucggggacaucgcggcccgcgaccugaucugcgcccagaaguucaacggccugaccgugcucccgccccugcugaccgacgagaugaucgcccaguacaccagcgcccuccuggcggggaccaucacguccggcuggaccuucggggccggcgccgcccugcagauccccuucgcgaugcagauggccuaccgguucaacggcaucggggucacccagaacgugcucuacgagaaccagaagcugaucgccaaccaguucaacagcgccaucggcaagauccaggacucccugagcuccaccgccagcgcgcucgggaagcugcaggacguggucaaccagaacgcccaggcccugaacacgcucgugaagcagcuguccagcaacuucggcgccaucuccagcgugcugaacgacauccucucccgccuggacccgcccgaggccgaggugcagaucgaccggcugaucaccgggcgccuccagagccugcagaccuacgugacccagcagcugauccgggcggccgagauccgcgccagcgccaaccucgccgcgaccaagauguccgagugcguccugggccagagcaagcggguggacuucugcggcaagggguaccaccugauguccuucccccagagcgccccgcacggcguggucuuccuccacgugacguacguccccgcccaggagaagaacuucaccaccgcccccgcgaucugccacgacgggaaggcccacuucccccgcgagggcguguucguguccaacgggacccacugguucgucacgcagcggaacuucuacgagccgcagaucaucaccaccgacaacaccuucgugagcggcaacugcgacguggucaucggcaucgugaacaacacgguguacgacccccugcagcccgagcuggacuccuucaaggaggagcucgacaaguacuucaagaaccacaccagccccgacgucgaccugggggacaucuccggcaucaacgccagcguggugaacauccagaaggagaucgaccgccugaacgaggucgccaagaaccucaacgagucccugaucgaccugcaggagcucgggaaguacgagcaguacaucaaguggccgugguacaucuggcugggcuucaucgccggccugaucgcgaucgugauggugaccaucaugcucugcugcaugaccagcugcugcuccugccugaaggggugcugcagcugcggcuccugcugcaaguucgacgaggacgacagcgagcccguccugaagggggugaagcuccacuacacgugaggacuagucccuguucccagagcccacuuuuuuuucuuuuuuugaaauaaaauagccugucuuucagaucuaaaaaaaaaaaaaaaaaaaaaaaaaaaaaaaaaaaaaaaaaaaaaaaaaaaaaaaaaaaaaaaaaaaaaaaaaaaaaaaaaaaaaaaaaaaaaaaaaaaa

SEQ ID NO: 24841 - RNA, 4070 nt, Artificial Sequence
  SARS-CoV-2/Wuhan/WIV05/2019__EPI_ISL_402128 spike protein mRNA gc (1-1273)(K986P_V987P_S477N_D614G)
aggagagucccgcagucggcguccagcggcucugcuuguucgugugugugucguugcaggccuuauucaagcuuaccauguucguguuccugguccuccugccccuggugagcucccagugcgugaaccucaccacccgcacgcagcugccgcccgccuacaccaacagcuucacccggggcgucuacuaccccgacaagguguuccgcuccagcgugcugcacuccacccaggaccucuuccugcccuucuucagcaacgucacgugguuccacgccauccacguguccgggaccaacggcaccaagcgguucgacaacccggugcugcccuucaacgacggggucuacuucgcgagcaccgagaaguccaacaucauccgcggcuggaucuucgggacgacccucgacagcaagacccagucccugcugaucgugaacaacgccaccaacguggucaucaaggugugcgaguuccaguucugcaacgaccccuuccucggcguguacuaccacaagaacaacaagagcuggauggaguccgaguuccgggucuacagcuccgccaacaacugcacguucgaguacgugagccagcccuuccugauggaccuggagggcaagcaggggaacuucaagaaccuccgcgaguucguguucaagaacaucgacggcuacuucaagaucuacuccaagcacaccccgaucaaccugguccgggaccugccccagggguucagcgcccucgagccccugguggaccugcccaucggcaucaacaucacccgcuuccagacccuccuggcccugcaccgguccuaccucacgccgggggacagcagcuccggcuggaccgcgggcgccgccgccuacuacgugggguaccugcagccccgcaccuuccugcucaaguacaacgagaacggcaccaucacggacgcggucgacugcgcccuggacccccugagcgagaccaagugcacccucaaguccuucaccguggagaaggggaucuaccagacgagcaacuuccgggugcagcccaccgaguccaucguccgcuucccgaacaucaccaaccugugccccuucggcgagguguucaacgccacccgguucgccagcgucuacgccuggaaccgcaagcggaucuccaacugcguggcggacuacagcgugcuguacaacuccgccagcuucuccacguucaagugcuacggcgucagccccaccaagcucaacgaccugugcuucaccaacguguacgccgacuccuucgugauccgcggggacgagguccggcagaucgcccccggccagaccgggaagaucgccgacuacaacuacaagcugccggacgacuucacgggcugcgugaucgcguggaacagcaacaaccucgacuccaaggucgggggcaacuacaacuaccuguaccgccuguuccgcaagagcaaccucaagcccuucgagcgggacaucuccaccgagaucuaccaggccggcaacacccccugcaacgggguggagggcuucaacugcuacuucccccugcaguccuacggguuccagccgaccaacggcgugggguaccagcccuaccggguggucgugcugagcuucgagcuccugcacgcccccgccacggugugcggccccaagaaguccaccaaccuggucaagaacaagugcgugaacuucaacuucaacggccucaccgggaccggcgugcugaccgagagcaacaagaaguuccugccguuccagcaguucgggcgcgacaucgccgacacgaccgacgcgguccgcgacccccagacccuggagauccucgacaucacccccugcagcuucggcgggguguccgugaucacgccgggcaccaacaccagcaaccaggucgccgugcuguaccagggcgugaacugcaccgagguccccguggccauccacgccgaccagcugacgcccaccuggcggguguacuccaccggcagcaacgucuuccagacccgcgccgggugccucaucggcgcggagcacgugaacaacuccuacgagugcgacauccccaucggggccggcaucugcgccagcuaccagacgcagaccaacuccccgcggcgcgcccggagcguggcgucccagagcaucaucgccuacaccaugucccugggcgccgagaacagcgucgccuacuccaacaacagcaucgccauccccaccaacuucacgaucuccgugaccaccgagauccugcccgugagcaugaccaagacgagcgucgacugcaccauguacaucugcggggacuccaccgagugcagcaaccuccugcugcaguacggcuccuucugcacccagcucaaccgcgcgcugacggggaucgccguggagcaggacaagaacacccaggagguguucgcccaggucaagcagaucuacaagacgcccccgaucaaggacuucggcggguucaacuucagccagauccugcccgaccccuccaagcccagcaagcgguccuucaucgaggaccuccuguucaacaaggugacccuggccgacgccggcuucaucaagcaguacggcgacugccucggggacaucgcggcccgcgaccugaucugcgcccagaaguucaacggccugaccgugcucccgccccugcugaccgacgagaugaucgcccaguacaccagcgcccuccuggcggggaccaucacguccggcuggaccuucggggccggcgccgcccugcagauccccuucgcgaugcagauggccuaccgguucaacggcaucggggucacccagaacgugcucuacgagaaccagaagcugaucgccaaccaguucaacagcgccaucggcaagauccaggacucccugagcuccaccgccagcgcgcucgggaagcugcaggacguggucaaccagaacgcccaggcccugaacacgcucgugaagcagcuguccagcaacuucggcgccaucuccagcgugcugaacgacauccucucccgccuggacccgcccgaggccgaggugcagaucgaccggcugaucaccgggcgccuccagagccugcagaccuacgugacccagcagcugauccgggcggccgagauccgcgccagcgccaaccucgccgcgaccaagauguccgagugcguccugggccagagcaagcggguggacuucugcggcaagggguaccaccugauguccuucccccagagcgccccgcacggcguggucuuccuccacgugacguacguccccgcccaggagaagaacuucaccaccgcccccgcgaucugccacgacgggaaggcccacuucccccgcgagggcguguucguguccaacgggacccacugguucgucacgcagcggaacuucuacgagccgcagaucaucaccaccgacaacaccuucgugagcggcaacugcgacguggucaucggcaucgugaacaacacgguguacgacccccugcagcccgagcuggacuccuucaaggaggagcucgacaaguacuucaagaaccacaccagccccgacgucgaccugggggacaucuccggcaucaacgccagcguggugaacauccagaaggagaucgaccgccugaacgaggucgccaagaaccucaacgagucccugaucgaccugcaggagcucgggaaguacgagcaguacaucaaguggccgugguacaucuggcugggcuucaucgccggccugaucgcgaucgugauggugaccaucaugcucugcugcaugaccagcugcugcuccugccugaaggggugcugcagcugcggcuccugcugcaaguucgacgaggacgacagcgagcccguccugaagggggugaagcuccacuacacgugaggacuagucccuguucccagagcccacuuuuuuuucuuuuuuugaaauaaaauagccugucuuucagaucuaaaaaaaaaaaaaaaaaaaaaaaaaaaaaaaaaaaaaaaaaaaaaaaaaaaaaaaaaaaaaaaaaaaaaaaaaaaaaaaaaaaaaaaaaaaaaaaaaaaa

SEQ ID NO: 24842 - RNA, 4070 nt, Artificial Sequence
  SARS-CoV-2/Wuhan/WIV05/2019__EPI_ISL_402128 spike protein mRNA gc (1-1273)(K986P_V987P_N501Y_D614G)
aggagagucccgcagucggcguccagcggcucugcuuguucgugugugugucguugcaggccuuauucaagcuuaccauguucguguuccugguccuccugccccuggugagcucccagugcgugaaccucaccacccgcacgcagcugccgcccgccuacaccaacagcuucacccggggcgucuacuaccccgacaagguguuccgcuccagcgugcugcacuccacccaggaccucuuccugcccuucuucagcaacgucacgugguuccacgccauccacguguccgggaccaacggcaccaagcgguucgacaacccggugcugcccuucaacgacggggucuacuucgcgagcaccgagaaguccaacaucauccgcggcuggaucuucgggacgacccucgacagcaagacccagucccugcugaucgugaacaacgccaccaacguggucaucaaggugugcgaguuccaguucugcaacgaccccuuccucggcguguacuaccacaagaacaacaagagcuggauggaguccgaguuccgggucuacagcuccgccaacaacugcacguucgaguacgugagccagcccuuccugauggaccuggagggcaagcaggggaacuucaagaaccuccgcgaguucguguucaagaacaucgacggcuacuucaagaucuacuccaagcacaccccgaucaaccugguccgggaccugccccagggguucagcgcccucgagccccugguggaccugcccaucggcaucaacaucacccgcuuccagacccuccuggcccugcaccgguccuaccucacgccgggggacagcagcuccggcuggaccgcgggcgccgccgccuacuacgugggguaccugcagccccgcaccuuccugcucaaguacaacgagaacggcaccaucacggacgcggucgacugcgcccuggacccccugagcgagaccaagugcacccucaaguccuucaccguggagaaggggaucuaccagacgagcaacuuccgggugcagcccaccgaguccaucguccgcuucccgaacaucaccaaccugugccccuucggcgagguguucaacgccacccgguucgccagcgucuacgccuggaaccgcaagcggaucuccaacugcguggcggacuacagcgugcuguacaacuccgccagcuucuccacguucaagugcuacggcgucagccccaccaagcucaacgaccugugcuucaccaacguguacgccgacuccuucgugauccgcggggacgagguccggcagaucgcccccggccagaccgggaagaucgccgacuacaacuacaagcugccggacgacuucacgggcugcgugaucgcguggaacagcaacaaccucgacuccaaggucgggggcaacuacaacuaccuguaccgccuguuccgcaagagcaaccucaagcccuucgagcgggacaucuccaccgagaucuaccaggccggcagcacccccugcaacgggguggagggcuucaacugcuacuucccccugcaguccuacggguuccagccgaccuacggcgugggguaccagcccuaccggguggucgugcugagcuucgagcuccugcacgcccccgccacggugugcggccccaagaaguccaccaaccuggucaagaacaagugcgugaacuucaacuucaacggccucaccgggaccggcgugcugaccgagagcaacaagaaguuccugccguuccagcaguucgggcgcgacaucgccgacacgaccgacgcgguccgcgacccccagacccuggagauccucgacaucacccccugcagcuucggcgggguguccgugaucacgccgggcaccaacaccagcaaccaggucgccgugcuguaccagggcgugaacugcaccgagguccccguggccauccacgccgaccagcugacgcccaccuggcggguguacuccaccggcagcaacgucuuccagacccgcgccgggugccucaucggcgcggagcacgugaacaacuccuacgagugcgacauccccaucggggccggcaucugcgccagcuaccagacgcagaccaacuccccgcggcgcgcccggagcguggcgucccagagcaucaucgccuacaccaugucccugggcgccgagaacagcgucgccuacuccaacaacagcaucgccauccccaccaacuucacgaucuccgugaccaccgagauccugcccgugagcaugaccaagacgagcgucgacugcaccauguacaucugcggggacuccaccgagugcagcaaccuccugcugcaguacggcuccuucugcacccagcucaaccgcgcgcugacggggaucgccguggagcaggacaagaacacccaggagguguucgcccaggucaagcagaucuacaagacgcccccgaucaaggacuucggcggguucaacuucagccagauccugcccgaccccuccaagcccagcaagcgguccuucaucgaggaccuccuguucaacaaggugacccuggccgacgccggcuucaucaagcaguacggcgacugccucggggacaucgcggcccgcgaccugaucugcgcccagaaguucaacggccugaccgugcucccgccccugcugaccgacgagaugaucgcccaguacaccagcgcccuccuggcggggaccaucacguccggcuggaccuucggggccggcgccgcccugcagauccccuucgcgaugcagauggccuaccgguucaacggcaucggggucacccagaacgugcucuacgagaaccagaagcugaucgccaaccaguucaacagcgccaucggcaagauccaggacucccugagcuccaccgccagcgcgcucgggaagcugcaggacguggucaaccagaacgcccaggcccugaacacgcucgugaagcagcuguccagcaacuucggcgccaucuccagcgugcugaacgacauccucucccgccuggacccgcccgaggccgaggugcagaucgaccggcugaucaccgggcgccuccagagccugcagaccuacgugacccagcagcugauccgggcggccgagauccgcgccagcgccaaccucgccgcgaccaagauguccgagugcguccugggccagagcaagcggguggacuucugcggcaagggguaccaccugauguccuucccccagagcgccccgcacggcguggucuuccuccacgugacguacguccccgcccaggagaagaacuucaccaccgcccccgcgaucugccacgacgggaaggcccacuucccccgcgagggcguguucguguccaacgggacccacugguucgucacgcagcggaacuucuacgagccgcagaucaucaccaccgacaacaccuucgugagcggcaacugcgacguggucaucggcaucgugaacaacacgguguacgacccccugcagcccgagcuggacuccuucaaggaggagcucgacaaguacuucaagaaccacaccagccccgacgucgaccugggggacaucuccggcaucaacgccagcguggugaacauccagaaggagaucgaccgccugaacgaggucgccaagaaccucaacgagucccugaucgaccugcaggagcucgggaaguacgagcaguacaucaaguggccgugguacaucuggcugggcuucaucgccggccugaucgcgaucgugauggugaccaucaugcucugcugcaugaccagcugcugcuccugccugaaggggugcugcagcugcggcuccugcugcaaguucgacgaggacgacagcgagcccguccugaagggggugaagcuccacuacacgugaggacuagucccuguucccagagcccacuuuuuuuucuuuuuuugaaauaaaauagccugucuuucagaucuaaaaaaaaaaaaaaaaaaaaaaaaaaaaaaaaaaaaaaaaaaaaaaaaaaaaaaaaaaaaaaaaaaaaaaaaaaaaaaaaaaaaaaaaaaaaaaaaaaaa

SEQ ID NO: 24843 - RNA, 4064 nt, Artificial Sequence
  SARS-CoV-2/Wuhan/WIV05/2019__EPI_ISL_402128 spike protein mRNA gc (1-1273)(K986P_V987P_H69del_V70del_D614G)
aggagagucccgcagucggcguccagcggcucugcuuguucgugugugugucguugcaggccuuauucaagcuuaccauguucguguuccugguccuccugccccuggugagcucccagugcgugaaccucaccacccgcacgcagcugccgcccgccuacaccaacagcuucacccggggcgucuacuaccccgacaagguguuccgcuccagcgugcugcacuccacccaggaccucuuccugcccuucuucagcaacgucacgugguuccacgccaucuccgggaccaacggcaccaagcgguucgacaacccggugcugcccuucaacgacggggucuacuucgcgagcaccgagaaguccaacaucauccgcggcuggaucuucgggacgacccucgacagcaagacccagucccugcugaucgugaacaacgccaccaacguggucaucaaggugugcgaguuccaguucugcaacgaccccuuccucggcguguacuaccacaagaacaacaagagcuggauggaguccgaguuccgggucuacagcuccgccaacaacugcacguucgaguacgugagccagcccuuccugauggaccuggagggcaagcaggggaacuucaagaaccuccgcgaguucguguucaagaacaucgacggcuacuucaagaucuacuccaagcacaccccgaucaaccugguccgggaccugccccagggguucagcgcccucgagccccugguggaccugcccaucggcaucaacaucacccgcuuccagacccuccuggcccugcaccgguccuaccucacgccgggggacagcagcuccggcuggaccgcgggcgccgccgccuacuacgugggguaccugcagccccgcaccuuccugcucaaguacaacgagaacggcaccaucacggacgcggucgacugcgcccuggacccccugagcgagaccaagugcacccucaaguccuucaccguggagaaggggaucuaccagacgagcaacuuccgggugcagcccaccgaguccaucguccgcuucccgaacaucaccaaccugugccccuucggcgagguguucaacgccacccgguucgccagcgucuacgccuggaaccgcaagcggaucuccaacugcguggcggacuacagcgugcuguacaacuccgccagcuucuccacguucaagugcuacggcgucagccccaccaagcucaacgaccugugcuucaccaacguguacgccgacuccuucgugauccgcggggacgagguccggcagaucgcccccggccagaccgggaagaucgccgacuacaacuacaagcugccggacgacuucacgggcugcgugaucgcguggaacagcaacaaccucgacuccaaggucgggggcaacuacaacuaccuguaccgccuguuccgcaagagcaaccucaagcccuucgagcgggacaucuccaccgagaucuaccaggccggcagcacccccugcaacgggguggagggcuucaacugcuacuucccccugcaguccuacggguuccagccgaccaacggcgugggguaccagcccuaccggguggucgugcugagcuucgagcuccugcacgcccccgccacggugugcggccccaagaaguccaccaaccuggucaagaacaagugcgugaacuucaacuucaacggccucaccgggaccggcgugcugaccgagagcaacaagaaguuccugccguuccagcaguucgggcgcgacaucgccgacacgaccgacgcgguccgcgacccccagacccuggagauccucgacaucacccccugcagcuucggcgggguguccgugaucacgccgggcaccaacaccagcaaccaggucgccgugcuguaccagggcgugaacugcaccgagguccccguggccauccacgccgaccagcugacgcccaccuggcggguguacuccaccggcagcaacgucuuccagacccgcgccgggugccucaucggcgcggagcacgugaacaacuccuacgagugcgacauccccaucggggccggcaucugcgccagcuaccagacgcagaccaacuccccgcggcgcgcccggagcguggcgucccagagcaucaucgccuacaccaugucccugggcgccgagaacagcgucgccuacuccaacaacagcaucgccauccccaccaacuucacgaucuccgugaccaccgagauccugcccgugagcaugaccaagacgagcgucgacugcaccauguacaucugcggggacuccaccgagugcagcaaccuccugcugcaguacggcuccuucugcacccagcucaaccgcgcgcugacggggaucgccguggagcaggacaagaacacccaggagguguucgcccaggucaagcagaucuacaagacgcccccgaucaaggacuucggcggguucaacuucagccagauccugcccgaccccuccaagcccagcaagcgguccuucaucgaggaccuccuguucaacaaggugacccuggccgacgccggcuucaucaagcaguacggcgacugccucggggacaucgcggcccgcgaccugaucugcgcccagaaguucaacggccugaccgugcucccgccccugcugaccgacgagaugaucgcccaguacaccagcgcccuccuggcggggaccaucacguccggcuggaccuucggggccggcgccgcccugcagauccccuucgcgaugcagauggccuaccgguucaacggcaucggggucacccagaacgugcucuacgagaaccagaagcugaucgccaaccaguucaacagcgccaucggcaagauccaggacucccugagcuccaccgccagcgcgcucgggaagcugcaggacguggucaaccagaacgcccaggcccugaacacgcucgugaagcagcuguccagcaacuucggcgccaucuccagcgugcugaacgacauccucucccgccuggacccgcccgaggccgaggugcagaucgaccggcugaucaccgggcgccuccagagccugcagaccuacgugacccagcagcugauccgggcggccgagauccgcgccagcgccaaccucgccgcgaccaagauguccgagugcguccugggccagagcaagcggguggacuucugcggcaagggguaccaccugauguccuucccccagagcgccccgcacggcguggucuuccuccacgugacguacguccccgcccaggagaagaacuucaccaccgcccccgcgaucugccacgacgggaaggcccacuucccccgcgagggcguguucguguccaacgggacccacugguucgucacgcagcggaacuucuacgagccgcagaucaucaccaccgacaacaccuucgugagcggcaacugcgacguggucaucggcaucgugaacaacacgguguacgacccccugcagcccgagcuggacuccuucaaggaggagcucgacaaguacuucaagaaccacaccagccccgacgucgaccugggggacaucuccggcaucaacgccagcguggugaacauccagaaggagaucgaccgccugaacgaggucgccaagaaccucaacgagucccugaucgaccugcaggagcucgggaaguacgagcaguacaucaaguggccgugguacaucuggcugggcuucaucgccggccugaucgcgaucgugauggugaccaucaugcucugcugcaugaccagcugcugcuccugccugaaggggugcugcagcugcggcuccugcugcaaguucgacgaggacgacagcgagcccguccugaagggggugaagcuccacuacacgugaggacuagucccuguucccagagcccacuuuuuuuucuuuuuuugaaauaaaauagccugucuuucagaucuaaaaaaaaaaaaaaaaaaaaaaaaaaaaaaaaaaaaaaaaaaaaaaaaaaaaaaaaaaaaaaaaaaaaaaaaaaaaaaaaaaaaaaaaaaaaaaaaaaaa

SEQ ID NO: 24844 - RNA, 4070 nt, Artificial Sequence
  SARS-CoV-2/Wuhan/WIV05/2019__EPI_ISL_402128 spike protein mRNA gc (1-1273)(K986P_V987P_Y453F_D614G)
aggagagucccgcagucggcguccagcggcucugcuuguucgugugugugucguugcaggccuuauucaagcuuaccauguucguguuccugguccuccugccccuggugagcucccagugcgugaaccucaccacccgcacgcagcugccgcccgccuacaccaacagcuucacccggggcgucuacuaccccgacaagguguuccgcuccagcgugcugcacuccacccaggaccucuuccugcccuucuucagcaacgucacgugguuccacgccauccacguguccgggaccaacggcaccaagcgguucgacaacccggugcugcccuucaacgacggggucuacuucgcgagcaccgagaaguccaacaucauccgcggcuggaucuucgggacgacccucgacagcaagacccagucccugcugaucgugaacaacgccaccaacguggucaucaaggugugcgaguuccaguucugcaacgaccccuuccucggcguguacuaccacaagaacaacaagagcuggauggaguccgaguuccgggucuacagcuccgccaacaacugcacguucgaguacgugagccagcccuuccugauggaccuggagggcaagcaggggaacuucaagaaccuccgcgaguucguguucaagaacaucgacggcuacuucaagaucuacuccaagcacaccccgaucaaccugguccgggaccugccccagggguucagcgcccucgagccccugguggaccugcccaucggcaucaacaucacccgcuuccagacccuccuggcccugcaccgguccuaccucacgccgggggacagcagcuccggcuggaccgcgggcgccgccgccuacuacgugggguaccugcagccccgcaccuuccugcucaaguacaacgagaacggcaccaucacggacgcggucgacugcgcccuggacccccugagcgagaccaagugcacccucaaguccuucaccguggagaaggggaucuaccagacgagcaacuuccgggugcagcccaccgaguccaucguccgcuucccgaacaucaccaaccugugccccuucggcgagguguucaacgccacccgguucgccagcgucuacgccuggaaccgcaagcggaucuccaacugcguggcggacuacagcgugcuguacaacuccgccagcuucuccacguucaagugcuacggcgucagccccaccaagcucaacgaccugugcuucaccaacguguacgccgacuccuucgugauccgcggggacgagguccggcagaucgcccccggccagaccgggaagaucgccgacuacaacuacaagcugccggacgacuucacgggcugcgugaucgcguggaacagcaacaaccucgacuccaaggucgggggcaacuacaacuaccuguuccgccuguuccgcaagagcaaccucaagcccuucgagcgggacaucuccaccgagaucuaccaggccggcagcacccccugcaacgggguggagggcuucaacugcuacuucccccugcaguccuacggguuccagccgaccaacggcgugggguaccagcccuaccggguggucgugcugagcuucgagcuccugcacgcccccgccacggugugcggccccaagaaguccaccaaccuggucaagaacaagugcgugaacuucaacuucaacggccucaccgggaccggcgugcugaccgagagcaacaagaaguuccugccguuccagcaguucgggcgcgacaucgccgacacgaccgacgcgguccgcgacccccagacccuggagauccucgacaucacccccugcagcuucggcgggguguccgugaucacgccgggcaccaacaccagcaaccaggucgccgugcuguaccagggcgugaacugcaccgagguccccguggccauccacgccgaccagcugacgcccaccuggcggguguacuccaccggcagcaacgucuuccagacccgcgccgggugccucaucggcgcggagcacgugaacaacuccuacgagugcgacauccccaucggggccggcaucugcgccagcuaccagacgcagaccaacuccccgcggcgcgcccggagcguggcgucccagagcaucaucgccuacaccaugucccugggcgccgagaacagcgucgccuacuccaacaacagcaucgccauccccaccaacuucacgaucuccgugaccaccgagauccugcccgugagcaugaccaagacgagcgucgacugcaccauguacaucugcggggacuccaccgagugcagcaaccuccugcugcaguacggcuccuucugcacccagcucaaccgcgcgcugacggggaucgccguggagcaggacaagaacacccaggagguguucgcccaggucaagcagaucuacaagacgcccccgaucaaggacuucggcggguucaacuucagccagauccugcccgaccccuccaagcccagcaagcgguccuucaucgaggaccuccuguucaacaaggugacccuggccgacgccggcuucaucaagcaguacggcgacugccucggggacaucgcggcccgcgaccugaucugcgcccagaaguucaacggccugaccgugcucccgccccugcugaccgacgagaugaucgcccaguacaccagcgcccuccuggcggggaccaucacguccggcuggaccuucggggccggcgccgcccugcagauccccuucgcgaugcagauggccuaccgguucaacggcaucggggucacccagaacgugcucuacgagaaccagaagcugaucgccaaccaguucaacagcgccaucggcaagauccaggacucccugagcuccaccgccagcgcgcucgggaagcugcaggacguggucaaccagaacgcccaggcccugaacacgcucgugaagcagcuguccagcaacuucggcgccaucuccagcgugcugaacgacauccucucccgccuggacccgcccgaggccgaggugcagaucgaccggcugaucaccgggcgccuccagagccugcagaccuacgugacccagcagcugauccgggcggccgagauccgcgccagcgccaaccucgccgcgaccaagauguccgagugcguccugggccagagcaagcggguggacuucugcggcaagggguaccaccugauguccuucccccagagcgccccgcacggcguggucuuccuccacgugacguacguccccgcccaggagaagaacuucaccaccgcccccgcgaucugccacgacgggaaggcccacuucccccgcgagggcguguucguguccaacgggacccacugguucgucacgcagcggaacuucuacgagccgcagaucaucaccaccgacaacaccuucgugagcggcaacugcgacguggucaucggcaucgugaacaacacgguguacgacccccugcagcccgagcuggacuccuucaaggaggagcucgacaaguacuucaagaaccacaccagccccgacgucgaccugggggacaucuccggcaucaacgccagcguggugaacauccagaaggagaucgaccgccugaacgaggucgccaagaaccucaacgagucccugaucgaccugcaggagcucgggaaguacgagcaguacaucaaguggccgugguacaucuggcugggcuucaucgccggccugaucgcgaucgugauggugaccaucaugcucugcugcaugaccagcugcugcuccugccugaaggggugcugcagcugcggcuccugcugcaaguucgacgaggacgacagcgagcccguccugaagggggugaagcuccacuacacgugaggacuagucccuguucccagagcccacuuuuuuuucuuuuuuugaaauaaaauagccugucuuucagaucuaaaaaaaaaaaaaaaaaaaaaaaaaaaaaaaaaaaaaaaaaaaaaaaaaaaaaaaaaaaaaaaaaaaaaaaaaaaaaaaaaaaaaaaaaaaaaaaaaaaa

SEQ ID NO: 24845 - RNA, 4070 nt, Artificial Sequence
  SARS-CoV-2/Wuhan/WIV05/2019__EPI_ISL_402128 spike protein mRNA gc (1-1273)(K986P_V987P_D614G_I692V)
aggagagucccgcagucggcguccagcggcucugcuuguucgugugugugucguugcaggccuuauucaagcuuaccauguucguguuccugguccuccugccccuggugagcucccagugcgugaaccucaccacccgcacgcagcugccgcccgccuacaccaacagcuucacccggggcgucuacuaccccgacaagguguuccgcuccagcgugcugcacuccacccaggaccucuuccugcccuucuucagcaacgucacgugguuccacgccauccacguguccgggaccaacggcaccaagcgguucgacaacccggugcugcccuucaacgacggggucuacuucgcgagcaccgagaaguccaacaucauccgcggcuggaucuucgggacgacccucgacagcaagacccagucccugcugaucgugaacaacgccaccaacguggucaucaaggugugcgaguuccaguucugcaacgaccccuuccucggcguguacuaccacaagaacaacaagagcuggauggaguccgaguuccgggucuacagcuccgccaacaacugcacguucgaguacgugagccagcccuuccugauggaccuggagggcaagcaggggaacuucaagaaccuccgcgaguucguguucaagaacaucgacggcuacuucaagaucuacuccaagcacaccccgaucaaccugguccgggaccugccccagggguucagcgcccucgagccccugguggaccugcccaucggcaucaacaucacccgcuuccagacccuccuggcccugcaccgguccuaccucacgccgggggacagcagcuccggcuggaccgcgggcgccgccgccuacuacgugggguaccugcagccccgcaccuuccugcucaaguacaacgagaacggcaccaucacggacgcggucgacugcgcccuggacccccugagcgagaccaagugcacccucaaguccuucaccguggagaaggggaucuaccagacgagcaacuuccgggugcagcccaccgaguccaucguccgcuucccgaacaucaccaaccugugccccuucggcgagguguucaacgccacccgguucgccagcgucuacgccuggaaccgcaagcggaucuccaacugcguggcggacuacagcgugcuguacaacuccgccagcuucuccacguucaagugcuacggcgucagccccaccaagcucaacgaccugugcuucaccaacguguacgccgacuccuucgugauccgcggggacgagguccggcagaucgcccccggccagaccgggaagaucgccgacuacaacuacaagcugccggacgacuucacgggcugcgugaucgcguggaacagcaacaaccucgacuccaaggucgggggcaacuacaacuaccuguaccgccuguuccgcaagagcaaccucaagcccuucgagcgggacaucuccaccgagaucuaccaggccggcagcacccccugcaacgggguggagggcuucaacugcuacuucccccugcaguccuacggguuccagccgaccaacggcgugggguaccagcccuaccggguggucgugcugagcuucgagcuccugcacgcccccgccacggugugcggccccaagaaguccaccaaccuggucaagaacaagugcgugaacuucaacuucaacggccucaccgggaccggcgugcugaccgagagcaacaagaaguuccugccguuccagcaguucgggcgcgacaucgccgacacgaccgacgcgguccgcgacccccagacccuggagauccucgacaucacccccugcagcuucggcgggguguccgugaucacgccgggcaccaacaccagcaaccaggucgccgugcuguaccagggcgugaacugcaccgagguccccguggccauccacgccgaccagcugacgcccaccuggcggguguacuccaccggcagcaacgucuuccagacccgcgccgggugccucaucggcgcggagcacgugaacaacuccuacgagugcgacauccccaucggggccggcaucugcgccagcuaccagacgcagaccaacuccccgcggcgcgcccggagcguggcgucccagagcgucaucgccuacaccaugucccugggcgccgagaacagcgucgccuacuccaacaacagcaucgccauccccaccaacuucacgaucuccgugaccaccgagauccugcccgugagcaugaccaagacgagcgucgacugcaccauguacaucugcggggacuccaccgagugcagcaaccuccugcugcaguacggcuccuucugcacccagcucaaccgcgcgcugacggggaucgccguggagcaggacaagaacacccaggagguguucgcccaggucaagcagaucuacaagacgcccccgaucaaggacuucggcggguucaacuucagccagauccugcccgaccccuccaagcccagcaagcgguccuucaucgaggaccuccuguucaacaaggugacccuggccgacgccggcuucaucaagcaguacggcgacugccucggggacaucgcggcccgcgaccugaucugcgcccagaaguucaacggccugaccgugcucccgccccugcugaccgacgagaugaucgcccaguacaccagcgcccuccuggcggggaccaucacguccggcuggaccuucggggccggcgccgcccugcagauccccuucgcgaugcagauggccuaccgguucaacggcaucggggucacccagaacgugcucuacgagaaccagaagcugaucgccaaccaguucaacagcgccaucggcaagauccaggacucccugagcuccaccgccagcgcgcucgggaagcugcaggacguggucaaccagaacgcccaggcccugaacacgcucgugaagcagcuguccagcaacuucggcgccaucuccagcgugcugaacgacauccucucccgccuggacccgcccgaggccgaggugcagaucgaccggcugaucaccgggcgccuccagagccugcagaccuacgugacccagcagcugauccgggcggccgagauccgcgccagcgccaaccucgccgcgaccaagauguccgagugcguccugggccagagcaagcggguggacuucugcggcaagggguaccaccugauguccuucccccagagcgccccgcacggcguggucuuccuccacgugacguacguccccgcccaggagaagaacuucaccaccgcccccgcgaucugccacgacgggaaggcccacuucccccgcgagggcguguucguguccaacgggacccacugguucgucacgcagcggaacuucuacgagccgcagaucaucaccaccgacaacaccuucgugagcggcaacugcgacguggucaucggcaucgugaacaacacgguguacgacccccugcagcccgagcuggacuccuucaaggaggagcucgacaaguacuucaagaaccacaccagccccgacgucgaccugggggacaucuccggcaucaacgccagcguggugaacauccagaaggagaucgaccgccugaacgaggucgccaagaaccucaacgagucccugaucgaccugcaggagcucgggaaguacgagcaguacaucaaguggccgugguacaucuggcugggcuucaucgccggccugaucgcgaucgugauggugaccaucaugcucugcugcaugaccagcugcugcuccugccugaaggggugcugcagcugcggcuccugcugcaaguucgacgaggacgacagcgagcccguccugaagggggugaagcuccacuacacgugaggacuagucccuguucccagagcccacuuuuuuuucuuuuuuugaaauaaaauagccugucuuucagaucuaaaaaaaaaaaaaaaaaaaaaaaaaaaaaaaaaaaaaaaaaaaaaaaaaaaaaaaaaaaaaaaaaaaaaaaaaaaaaaaaaaaaaaaaaaaaaaaaaaaa

SEQ ID NO: 24846 - RNA, 4070 nt, Artificial Sequence
  SARS-CoV-2/Wuhan/WIV05/2019__EPI_ISL_402128 spike protein mRNA gc (1-1273)(K986P_V987P_D614G_M1229I)
aggagagucccgcagucggcguccagcggcucugcuuguucgugugugugucguugcaggccuuauucaagcuuaccauguucguguuccugguccuccugccccuggugagcucccagugcgugaaccucaccacccgcacgcagcugccgcccgccuacaccaacagcuucacccggggcgucuacuaccccgacaagguguuccgcuccagcgugcugcacuccacccaggaccucuuccugcccuucuucagcaacgucacgugguuccacgccauccacguguccgggaccaacggcaccaagcgguucgacaacccggugcugcccuucaacgacggggucuacuucgcgagcaccgagaaguccaacaucauccgcggcuggaucuucgggacgacccucgacagcaagacccagucccugcugaucgugaacaacgccaccaacguggucaucaaggugugcgaguuccaguucugcaacgaccccuuccucggcguguacuaccacaagaacaacaagagcuggauggaguccgaguuccgggucuacagcuccgccaacaacugcacguucgaguacgugagccagcccuuccugauggaccuggagggcaagcaggggaacuucaagaaccuccgcgaguucguguucaagaacaucgacggcuacuucaagaucuacuccaagcacaccccgaucaaccugguccgggaccugccccagggguucagcgcccucgagccccugguggaccugcccaucggcaucaacaucacccgcuuccagacccuccuggcccugcaccgguccuaccucacgccgggggacagcagcuccggcuggaccgcgggcgccgccgccuacuacgugggguaccugcagccccgcaccuuccugcucaaguacaacgagaacggcaccaucacggacgcggucgacugcgcccuggacccccugagcgagaccaagugcacccucaaguccuucaccguggagaaggggaucuaccagacgagcaacuuccgggugcagcccaccgaguccaucguccgcuucccgaacaucaccaaccugugccccuucggcgagguguucaacgccacccgguucgccagcgucuacgccuggaaccgcaagcggaucuccaacugcguggcggacuacagcgugcuguacaacuccgccagcuucuccacguucaagugcuacggcgucagccccaccaagcucaacgaccugugcuucaccaacguguacgccgacuccuucgugauccgcggggacgagguccggcagaucgcccccggccagaccgggaagaucgccgacuacaacuacaagcugccggacgacuucacgggcugcgugaucgcguggaacagcaacaaccucgacuccaaggucgggggcaacuacaacuaccuguaccgccuguuccgcaagagcaaccucaagcccuucgagcgggacaucuccaccgagaucuaccaggccggcagcacccccugcaacgggguggagggcuucaacugcuacuucccccugcaguccuacggguuccagccgaccaacggcgugggguaccagcccuaccggguggucgugcugagcuucgagcuccugcacgcccccgccacggugugcggccccaagaaguccaccaaccuggucaagaacaagugcgugaacuucaacuucaacggccucaccgggaccggcgugcugaccgagagcaacaagaaguuccugccguuccagcaguucgggcgcgacaucgccgacacgaccgacgcgguccgcgacccccagacccuggagauccucgacaucacccccugcagcuucggcgggguguccgugaucacgccgggcaccaacaccagcaaccaggucgccgugcuguaccagggcgugaacugcaccgagguccccguggccauccacgccgaccagcugacgcccaccuggcggguguacuccaccggcagcaacgucuuccagacccgcgccgggugccucaucggcgcggagcacgugaacaacuccuacgagugcgacauccccaucggggccggcaucugcgccagcuaccagacgcagaccaacuccccgcggcgcgcccggagcguggcgucccagagcaucaucgccuacaccaugucccugggcgccgagaacagcgucgccuacuccaacaacagcaucgccauccccaccaacuucacgaucuccgugaccaccgagauccugcccgugagcaugaccaagacgagcgucgacugcaccauguacaucugcggggacuccaccgagugcagcaaccuccugcugcaguacggcuccuucugcacccagcucaaccgcgcgcugacggggaucgccguggagcaggacaagaacacccaggagguguucgcccaggucaagcagaucuacaagacgcccccgaucaaggacuucggcggguucaacuucagccagauccugcccgaccccuccaagcccagcaagcgguccuucaucgaggaccuccuguucaacaaggugacccuggccgacgccggcuucaucaagcaguacggcgacugccucggggacaucgcggcccgcgaccugaucugcgcccagaaguucaacggccugaccgugcucccgccccugcugaccgacgagaugaucgcccaguacaccagcgcccuccuggcggggaccaucacguccggcuggaccuucggggccggcgccgcccugcagauccccuucgcgaugcagauggccuaccgguucaacggcaucggggucacccagaacgugcucuacgagaaccagaagcugaucgccaaccaguucaacagcgccaucggcaagauccaggacucccugagcuccaccgccagcgcgcucgggaagcugcaggacguggucaaccagaacgcccaggcccugaacacgcucgugaagcagcuguccagcaacuucggcgccaucuccagcgugcugaacgacauccucucccgccuggacccgcccgaggccgaggugcagaucgaccggcugaucaccgggcgccuccagagccugcagaccuacgugacccagcagcugauccgggcggccgagauccgcgccagcgccaaccucgccgcgaccaagauguccgagugcguccugggccagagcaagcggguggacuucugcggcaagggguaccaccugauguccuucccccagagcgccccgcacggcguggucuuccuccacgugacguacguccccgcccaggagaagaacuucaccaccgcccccgcgaucugccacgacgggaaggcccacuucccccgcgagggcguguucguguccaacgggacccacugguucgucacgcagcggaacuucuacgagccgcagaucaucaccaccgacaacaccuucgugagcggcaacugcgacguggucaucggcaucgugaacaacacgguguacgacccccugcagcccgagcuggacuccuucaaggaggagcucgacaaguacuucaagaaccacaccagccccgacgucgaccugggggacaucuccggcaucaacgccagcguggugaacauccagaaggagaucgaccgccugaacgaggucgccaagaaccucaacgagucccugaucgaccugcaggagcucgggaaguacgagcaguacaucaaguggccgugguacaucuggcugggcuucaucgccggccugaucgcgaucgugaucgugaccaucaugcucugcugcaugaccagcugcugcuccugccugaaggggugcugcagcugcggcuccugcugcaaguucgacgaggacgacagcgagcccguccugaagggggugaagcuccacuacacgugaggacuagucccuguucccagagcccacuuuuuuuucuuuuuuugaaauaaaauagccugucuuucagaucuaaaaaaaaaaaaaaaaaaaaaaaaaaaaaaaaaaaaaaaaaaaaaaaaaaaaaaaaaaaaaaaaaaaaaaaaaaaaaaaaaaaaaaaaaaaaaaaaaaaa

SEQ ID NO: 24847 - RNA, 4064 nt, Artificial Sequence
  SARS-CoV-2/Wuhan/WIV05/2019__EPI_ISL_402128 spike protein mRNA gc (1-1273)(K986P_V987P_H69del_V70del_A222V_Y453F_S477N_D614G_I692V)
aggagagucccgcagucggcguccagcggcucugcuuguucgugugugugucguugcaggccuuauucaagcuuaccauguucguguuccugguccuccugccccuggugagcucccagugcgugaaccucaccacccgcacgcagcugccgcccgccuacaccaacagcuucacccggggcgucuacuaccccgacaagguguuccgcuccagcgugcugcacuccacccaggaccucuuccugcccuucuucagcaacgucacgugguuccacgccaucuccgggaccaacggcaccaagcgguucgacaacccggugcugcccuucaacgacggggucuacuucgcgagcaccgagaaguccaacaucauccgcggcuggaucuucgggacgacccucgacagcaagacccagucccugcugaucgugaacaacgccaccaacguggucaucaaggugugcgaguuccaguucugcaacgaccccuuccucggcguguacuaccacaagaacaacaagagcuggauggaguccgaguuccgggucuacagcuccgccaacaacugcacguucgaguacgugagccagcccuuccugauggaccuggagggcaagcaggggaacuucaagaaccuccgcgaguucguguucaagaacaucgacggcuacuucaagaucuacuccaagcacaccccgaucaaccugguccgggaccugccccagggguucagcguccucgagccccugguggaccugcccaucggcaucaacaucacccgcuuccagacccuccuggcccugcaccgguccuaccucacgccgggggacagcagcuccggcuggaccgcgggcgccgccgccuacuacgugggguaccugcagccccgcaccuuccugcucaaguacaacgagaacggcaccaucacggacgcggucgacugcgcccuggacccccugagcgagaccaagugcacccucaaguccuucaccguggagaaggggaucuaccagacgagcaacuuccgggugcagcccaccgaguccaucguccgcuucccgaacaucaccaaccugugccccuucggcgagguguucaacgccacccgguucgccagcgucuacgccuggaaccgcaagcggaucuccaacugcguggcggacuacagcgugcuguacaacuccgccagcuucuccacguucaagugcuacggcgucagccccaccaagcucaacgaccugugcuucaccaacguguacgccgacuccuucgugauccgcggggacgagguccggcagaucgcccccggccagaccgggaagaucgccgacuacaacuacaagcugccggacgacuucacgggcugcgugaucgcguggaacagcaacaaccucgacuccaaggucgggggcaacuacaacuaccuguuccgccuguuccgcaagagcaaccucaagcccuucgagcgggacaucuccaccgagaucuaccaggccggcaacacccccugcaacgggguggagggcuucaacugcuacuucccccugcaguccuacggguuccagccgaccaacggcgugggguaccagcccuaccggguggucgugcugagcuucgagcuccugcacgcccccgccacggugugcggccccaagaaguccaccaaccuggucaagaacaagugcgugaacuucaacuucaacggccucaccgggaccggcgugcugaccgagagcaacaagaaguuccugccguuccagcaguucgggcgcgacaucgccgacacgaccgacgcgguccgcgacccccagacccuggagauccucgacaucacccccugcagcuucggcgggguguccgugaucacgccgggcaccaacaccagcaaccaggucgccgugcuguaccagggcgugaacugcaccgagguccccguggccauccacgccgaccagcugacgcccaccuggcggguguacuccaccggcagcaacgucuuccagacccgcgccgggugccucaucggcgcggagcacgugaacaacuccuacgagugcgacauccccaucggggccggcaucugcgccagcuaccagacgcagaccaacuccccgcggcgcgcccggagcguggcgucccagagcgucaucgccuacaccaugucccugggcgccgagaacagcgucgccuacuccaacaacagcaucgccauccccaccaacuucacgaucuccgugaccaccgagauccugcccgugagcaugaccaagacgagcgucgacugcaccauguacaucugcggggacuccaccgagugcagcaaccuccugcugcaguacggcuccuucugcacccagcucaaccgcgcgcugacggggaucgccguggagcaggacaagaacacccaggagguguucgcccaggucaagcagaucuacaagacgcccccgaucaaggacuucggcggguucaacuucagccagauccugcccgaccccuccaagcccagcaagcgguccuucaucgaggaccuccuguucaacaaggugacccuggccgacgccggcuucaucaagcaguacggcgacugccucggggacaucgcggcccgcgaccugaucugcgcccagaaguucaacggccugaccgugcucccgccccugcugaccgacgagaugaucgcccaguacaccagcgcccuccuggcggggaccaucacguccggcuggaccuucggggccggcgccgcccugcagauccccuucgcgaugcagauggccuaccgguucaacggcaucggggucacccagaacgugcucuacgagaaccagaagcugaucgccaaccaguucaacagcgccaucggcaagauccaggacucccugagcuccaccgccagcgcgcucgggaagcugcaggacguggucaaccagaacgcccaggcccugaacacgcucgugaagcagcuguccagcaacuucggcgccaucuccagcgugcugaacgacauccucucccgccuggacccgcccgaggccgaggugcagaucgaccggcugaucaccgggcgccuccagagccugcagaccuacgugacccagcagcugauccgggcggccgagauccgcgccagcgccaaccucgccgcgaccaagauguccgagugcguccugggccagagcaagcggguggacuucugcggcaagggguaccaccugauguccuucccccagagcgccccgcacggcguggucuuccuccacgugacguacguccccgcccaggagaagaacuucaccaccgcccccgcgaucugccacgacgggaaggcccacuucccccgcgagggcguguucguguccaacgggacccacugguucgucacgcagcggaacuucuacgagccgcagaucaucaccaccgacaacaccuucgugagcggcaacugcgacguggucaucggcaucgugaacaacacgguguacgacccccugcagcccgagcuggacuccuucaaggaggagcucgacaaguacuucaagaaccacaccagccccgacgucgaccugggggacaucuccggcaucaacgccagcguggugaacauccagaaggagaucgaccgccugaacgaggucgccaagaaccucaacgagucccugaucgaccugcaggagcucgggaaguacgagcaguacaucaaguggccgugguacaucuggcugggcuucaucgccggccugaucgcgaucgugauggugaccaucaugcucugcugcaugaccagcugcugcuccugccugaaggggugcugcagcugcggcuccugcugcaaguucgacgaggacgacagcgagcccguccugaagggggugaagcuccacuacacgugaggacuagucccuguucccagagcccacuuuuuuuucuuuuuuugaaauaaaauagccugucuuucagaucuaaaaaaaaaaaaaaaaaaaaaaaaaaaaaaaaaaaaaaaaaaaaaaaaaaaaaaaaaaaaaaaaaaaaaaaaaaaaaaaaaaaaaaaaaaaaaaaaaaaa

SEQ ID NO: 24848 - RNA, 4064 nt, Artificial Sequence
  SARS-CoV-2/Wuhan/WIV05/2019__EPI_ISL_402128 spike protein mRNA gc (1-1273)(K986P_V987P_H69del_V70del_Y453F_D614G_I692V_M1229I)
aggagagucccgcagucggcguccagcggcucugcuuguucgugugugugucguugcaggccuuauucaagcuuaccauguucguguuccugguccuccugccccuggugagcucccagugcgugaaccucaccacccgcacgcagcugccgcccgccuacaccaacagcuucacccggggcgucuacuaccccgacaagguguuccgcuccagcgugcugcacuccacccaggaccucuuccugcccuucuucagcaacgucacgugguuccacgccaucuccgggaccaacggcaccaagcgguucgacaacccggugcugcccuucaacgacggggucuacuucgcgagcaccgagaaguccaacaucauccgcggcuggaucuucgggacgacccucgacagcaagacccagucccugcugaucgugaacaacgccaccaacguggucaucaaggugugcgaguuccaguucugcaacgaccccuuccucggcguguacuaccacaagaacaacaagagcuggauggaguccgaguuccgggucuacagcuccgccaacaacugcacguucgaguacgugagccagcccuuccugauggaccuggagggcaagcaggggaacuucaagaaccuccgcgaguucguguucaagaacaucgacggcuacuucaagaucuacuccaagcacaccccgaucaaccugguccgggaccugccccagggguucagcgcccucgagccccugguggaccugcccaucggcaucaacaucacccgcuuccagacccuccuggcccugcaccgguccuaccucacgccgggggacagcagcuccggcuggaccgcgggcgccgccgccuacuacgugggguaccugcagccccgcaccuuccugcucaaguacaacgagaacggcaccaucacggacgcggucgacugcgcccuggacccccugagcgagaccaagugcacccucaaguccuucaccguggagaaggggaucuaccagacgagcaacuuccgggugcagcccaccgaguccaucguccgcuucccgaacaucaccaaccugugccccuucggcgagguguucaacgccacccgguucgccagcgucuacgccuggaaccgcaagcggaucuccaacugcguggcggacuacagcgugcuguacaacuccgccagcuucuccacguucaagugcuacggcgucagccccaccaagcucaacgaccugugcuucaccaacguguacgccgacuccuucgugauccgcggggacgagguccggcagaucgcccccggccagaccgggaagaucgccgacuacaacuacaagcugccggacgacuucacgggcugcgugaucgcguggaacagcaacaaccucgacuccaaggucgggggcaacuacaacuaccuguuccgccuguuccgcaagagcaaccucaagcccuucgagcgggacaucuccaccgagaucuaccaggccggcagcacccccugcaacgggguggagggcuucaacugcuacuucccccugcaguccuacggguuccagccgaccaacggcgugggguaccagcccuaccggguggucgugcugagcuucgagcuccugcacgcccccgccacggugugcggccccaagaaguccaccaaccuggucaagaacaagugcgugaacuucaacuucaacggccucaccgggaccggcgugcugaccgagagcaacaagaaguuccugccguuccagcaguucgggcgcgacaucgccgacacgaccgacgcgguccgcgacccccagacccuggagauccucgacaucacccccugcagcuucggcgggguguccgugaucacgccgggcaccaacaccagcaaccaggucgccgugcuguaccagggcgugaacugcaccgagguccccguggccauccacgccgaccagcugacgcccaccuggcggguguacuccaccggcagcaacgucuuccagacccgcgccgggugccucaucggcgcggagcacgugaacaacuccuacgagugcgacauccccaucggggccggcaucugcgccagcuaccagacgcagaccaacuccccgcggcgcgcccggagcguggcgucccagagcgugaucgccuacaccaugucccugggcgccgagaacagcgucgccuacuccaacaacagcaucgccauccccaccaacuucacgaucuccgugaccaccgagauccugcccgugagcaugaccaagacgagcgucgacugcaccauguacaucugcggggacuccaccgagugcagcaaccuccugcugcaguacggcuccuucugcacccagcucaaccgcgcgcugacggggaucgccguggagcaggacaagaacacccaggagguguucgcccaggucaagcagaucuacaagacgcccccgaucaaggacuucggcggguucaacuucagccagauccugcccgaccccuccaagcccagcaagcgguccuucaucgaggaccuccuguucaacaaggugacccuggccgacgccggcuucaucaagcaguacggcgacugccucggggacaucgcggcccgcgaccugaucugcgcccagaaguucaacggccugaccgugcucccgccccugcugaccgacgagaugaucgcccaguacaccagcgcccuccuggcggggaccaucacguccggcuggaccuucggggccggcgccgcccugcagauccccuucgcgaugcagauggccuaccgguucaacggcaucggggucacccagaacgugcucuacgagaaccagaagcugaucgccaaccaguucaacagcgccaucggcaagauccaggacucccugagcuccaccgccagcgcgcucgggaagcugcaggacguggucaaccagaacgcccaggcccugaacacgcucgugaagcagcuguccagcaacuucggcgccaucuccagcgugcugaacgacauccucucccgccuggacccgcccgaggccgaggugcagaucgaccggcugaucaccgggcgccuccagagccugcagaccuacgugacccagcagcugauccgggcggccgagauccgcgccagcgccaaccucgccgcgaccaagauguccgagugcguccugggccagagcaagcggguggacuucugcggcaagggguaccaccugauguccuucccccagagcgccccgcacggcguggucuuccuccacgugacguacguccccgcccaggagaagaacuucaccaccgcccccgcgaucugccacgacgggaaggcccacuucccccgcgagggcguguucguguccaacgggacccacugguucgucacgcagcggaacuucuacgagccgcagaucaucaccaccgacaacaccuucgugagcggcaacugcgacguggucaucggcaucgugaacaacacgguguacgacccccugcagcccgagcuggacuccuucaaggaggagcucgacaaguacuucaagaaccacaccagccccgacgucgaccugggggacaucuccggcaucaacgccagcguggugaacauccagaaggagaucgaccgccugaacgaggucgccaagaaccucaacgagucccugaucgaccugcaggagcucgggaaguacgagcaguacaucaaguggccgugguacaucuggcugggcuucaucgccggccugaucgcgaucgugaucgugaccaucaugcucugcugcaugaccagcugcugcuccugccugaaggggugcugcagcugcggcuccugcugcaaguucgacgaggacgacagcgagcccguccugaagggggugaagcuccacuacacgugaggacuagucccuguucccagagcccacuuuuuuuucuuuuuuugaaauaaaauagccugucuuucagaucuaaaaaaaaaaaaaaaaaaaaaaaaaaaaaaaaaaaaaaaaaaaaaaaaaaaaaaaaaaaaaaaaaaaaaaaaaaaaaaaaaaaaaaaaaaaaaaaaaaaa

SEQ ID NO: 24849 - RNA, 4061 nt, Artificial Sequence
  SARS-CoV-2/Wuhan/WIV05/2019__EPI_ISL_402128 spike protein mRNA gc (1-1273)(K986P_V987P_K986P_V987P_H69del_V70del_Y144del_N501Y_A570 D_D614G_P681H_T716I_S982A_D1118H)
aggagagucccgcagucggcguccagcggcucugcuuguucgugugugugucguugcaggccuuauucaagcuuaccauguucguguuccugguccuccugccccuggugagcucccagugcgugaaccucaccacccgcacgcagcugccgcccgccuacaccaacagcuucacccggggcgucuacuaccccgacaagguguuccgcuccagcgugcugcacuccacccaggaccucuuccugcccuucuucagcaacgucacgugguuccacgccaucuccgggaccaacggcaccaagcgguucgacaacccggugcugcccuucaacgacggggucuacuucgcgagcaccgagaaguccaacaucauccgcggcuggaucuucgggacgacccucgacagcaagacccagucccugcugaucgugaacaacgccaccaacguggucaucaaggugugcgaguuccaguucugcaacgaccccuuccucggcguguaccacaagaacaacaagagcuggauggaguccgaguuccgggucuacagcuccgccaacaacugcacguucgaguacgugagccagcccuuccugauggaccuggagggcaagcaggggaacuucaagaaccuccgcgaguucguguucaagaacaucgacggcuacuucaagaucuacuccaagcacaccccgaucaaccugguccgggaccugccccagggguucagcgcccucgagccccugguggaccugcccaucggcaucaacaucacccgcuuccagacccuccuggcccugcaccgguccuaccucacgccgggggacagcagcuccggcuggaccgcgggcgccgccgccuacuacgugggguaccugcagccccgcaccuuccugcucaaguacaacgagaacggcaccaucacggacgcggucgacugcgcccuggacccccugagcgagaccaagugcacccucaaguccuucaccguggagaaggggaucuaccagacgagcaacuuccgggugcagcccaccgaguccaucguccgcuucccgaacaucaccaaccugugccccuucggcgagguguucaacgccacccgguucgccagcgucuacgccuggaaccgcaagcggaucuccaacugcguggcggacuacagcgugcuguacaacuccgccagcuucuccacguucaagugcuacggcgucagccccaccaagcucaacgaccugugcuucaccaacguguacgccgacuccuucgugauccgcggggacgagguccggcagaucgcccccggccagaccgggaagaucgccgacuacaacuacaagcugccggacgacuucacgggcugcgugaucgcguggaacagcaacaaccucgacuccaaggucgggggcaacuacaacuaccuguaccgccuguuccgcaagagcaaccucaagcccuucgagcgggacaucuccaccgagaucuaccaggccggcagcacccccugcaacgggguggagggcuucaacugcuacuucccccugcaguccuacggguuccagccgaccuacggcgugggguaccagcccuaccggguggucgugcugagcuucgagcuccugcacgcccccgccacggugugcggccccaagaaguccaccaaccuggucaagaacaagugcgugaacuucaacuucaacggccucaccgggaccggcgugcugaccgagagcaacaagaaguuccugccguuccagcaguucgggcgcgacaucgacgacacgaccgacgcgguccgcgacccccagacccuggagauccucgacaucacccccugcagcuucggcgggguguccgugaucacgccgggcaccaacaccagcaaccaggucgccgugcuguaccagggcgugaacugcaccgagguccccguggccauccacgccgaccagcugacgcccaccuggcggguguacuccaccggcagcaacgucuuccagacccgcgccgggugccucaucggcgcggagcacgugaacaacuccuacgagugcgacauccccaucggggccggcaucugcgccagcuaccagacgcagaccaacucccaccggcgcgcccggagcguggcgucccagagcaucaucgccuacaccaugucccugggcgccgagaacagcgucgccuacuccaacaacagcaucgccauccccaucaacuucacgaucuccgugaccaccgagauccugcccgugagcaugaccaagacgagcgucgacugcaccauguacaucugcggggacuccaccgagugcagcaaccuccugcugcaguacggcuccuucugcacccagcucaaccgcgcgcugacggggaucgccguggagcaggacaagaacacccaggagguguucgcccaggucaagcagaucuacaagacgcccccgaucaaggacuucggcggguucaacuucagccagauccugcccgaccccuccaagcccagcaagcgguccuucaucgaggaccuccuguucaacaaggugacccuggccgacgccggcuucaucaagcaguacggcgacugccucggggacaucgcggcccgcgaccugaucugcgcccagaaguucaacggccugaccgugcucccgccccugcugaccgacgagaugaucgcccaguacaccagcgcccuccuggcggggaccaucacguccggcuggaccuucggggccggcgccgcccugcagauccccuucgcgaugcagauggccuaccgguucaacggcaucggggucacccagaacgugcucuacgagaaccagaagcugaucgccaaccaguucaacagcgccaucggcaagauccaggacucccugagcuccaccgccagcgcgcucgggaagcugcaggacguggucaaccagaacgcccaggcccugaacacgcucgugaagcagcuguccagcaacuucggcgccaucuccagcgugcugaacgacauccucgcccgccuggacccgcccgaggccgaggugcagaucgaccggcugaucaccgggcgccuccagagccugcagaccuacgugacccagcagcugauccgggcggccgagauccgcgccagcgccaaccucgccgcgaccaagauguccgagugcguccugggccagagcaagcggguggacuucugcggcaagggguaccaccugauguccuucccccagagcgccccgcacggcguggucuuccuccacgugacguacguccccgcccaggagaagaacuucaccaccgcccccgcgaucugccacgacgggaaggcccacuucccccgcgagggcguguucguguccaacgggacccacugguucgucacgcagcggaacuucuacgagccgcagaucaucaccacccacaacaccuucgugagcggcaacugcgacguggucaucggcaucgugaacaacacgguguacgacccccugcagcccgagcuggacuccuucaaggaggagcucgacaaguacuucaagaaccacaccagccccgacgucgaccugggggacaucuccggcaucaacgccagcguggugaacauccagaaggagaucgaccgccugaacgaggucgccaagaaccucaacgagucccugaucgaccugcaggagcucgggaaguacgagcaguacaucaaguggccgugguacaucuggcugggcuucaucgccggccugaucgcgaucgugauggugaccaucaugcucugcugcaugaccagcugcugcuccugccugaaggggugcugcagcugcggcuccugcugcaaguucgacgaggacgacagcgagcccguccugaagggggugaagcuccacuacacgugaggacuagucccuguucccagagcccacuuuuuuuucuuuuuuugaaauaaaauagccugucuuucagaucuaaaaaaaaaaaaaaaaaaaaaaaaaaaaaaaaaaaaaaaaaaaaaaaaaaaaaaaaaaaaaaaaaaaaaaaaaaaaaaaaaaaaaaaaaaaaaaaaaaaa

SEQ ID NO: 24850 - RNA, 4070 nt, Artificial Sequence
  SARS-CoV-2/Wuhan/WIV05/2019__EPI_ISL_402128 spike protein mRNA gc (1-1273)(K986P_V987P_K986P_V987P_K417N_E484K_N501Y_D614G)
aggagagucccgcagucggcguccagcggcucugcuuguucgugugugugucguugcaggccuuauucaagcuuaccauguucguguuccugguccuccugccccuggugagcucccagugcgugaaccucaccacccgcacgcagcugccgcccgccuacaccaacagcuucacccggggcgucuacuaccccgacaagguguuccgcuccagcgugcugcacuccacccaggaccucuuccugcccuucuucagcaacgucacgugguuccacgccauccacguguccgggaccaacggcaccaagcgguucgacaacccggugcugcccuucaacgacggggucuacuucgcgagcaccgagaaguccaacaucauccgcggcuggaucuucgggacgacccucgacagcaagacccagucccugcugaucgugaacaacgccaccaacguggucaucaaggugugcgaguuccaguucugcaacgaccccuuccucggcguguacuaccacaagaacaacaagagcuggauggaguccgaguuccgggucuacagcuccgccaacaacugcacguucgaguacgugagccagcccuuccugauggaccuggagggcaagcaggggaacuucaagaaccuccgcgaguucguguucaagaacaucgacggcuacuucaagaucuacuccaagcacaccccgaucaaccugguccgggaccugccccagggguucagcgcccucgagccccugguggaccugcccaucggcaucaacaucacccgcuuccagacccuccuggcccugcaccgguccuaccucacgccgggggacagcagcuccggcuggaccgcgggcgccgccgccuacuacgugggguaccugcagccccgcaccuuccugcucaaguacaacgagaacggcaccaucacggacgcggucgacugcgcccuggacccccugagcgagaccaagugcacccucaaguccuucaccguggagaaggggaucuaccagacgagcaacuuccgggugcagcccaccgaguccaucguccgcuucccgaacaucaccaaccugugccccuucggcgagguguucaacgccacccgguucgccagcgucuacgccuggaaccgcaagcggaucuccaacugcguggcggacuacagcgugcuguacaacuccgccagcuucuccacguucaagugcuacggcgucagccccaccaagcucaacgaccugugcuucaccaacguguacgccgacuccuucgugauccgcggggacgagguccggcagaucgcccccggccagaccgggaacaucgccgacuacaacuacaagcugccggacgacuucacgggcugcgugaucgcguggaacagcaacaaccucgacuccaaggucgggggcaacuacaacuaccuguaccgccuguuccgcaagagcaaccucaagcccuucgagcgggacaucuccaccgagaucuaccaggccggcagcacccccugcaacggggugaagggcuucaacugcuacuucccccugcaguccuacggguuccagccgaccuacggcgugggguaccagcccuaccggguggucgugcugagcuucgagcuccugcacgcccccgccacggugugcggccccaagaaguccaccaaccuggucaagaacaagugcgugaacuucaacuucaacggccucaccgggaccggcgugcugaccgagagcaacaagaaguuccugccguuccagcaguucgggcgcgacaucgccgacacgaccgacgcgguccgcgacccccagacccuggagauccucgacaucacccccugcagcuucggcgggguguccgugaucacgccgggcaccaacaccagcaaccaggucgccgugcuguaccagggcgugaacugcaccgagguccccguggccauccacgccgaccagcugacgcccaccuggcggguguacuccaccggcagcaacgucuuccagacccgcgccgggugccucaucggcgcggagcacgugaacaacuccuacgagugcgacauccccaucggggccggcaucugcgccagcuaccagacgcagaccaacuccccgcggcgcgcccggagcguggcgucccagagcaucaucgccuacaccaugucccugggcgccgagaacagcgucgccuacuccaacaacagcaucgccauccccaccaacuucacgaucuccgugaccaccgagauccugcccgugagcaugaccaagacgagcgucgacugcaccauguacaucugcggggacuccaccgagugcagcaaccuccugcugcaguacggcuccuucugcacccagcucaaccgcgcgcugacggggaucgccguggagcaggacaagaacacccaggagguguucgcccaggucaagcagaucuacaagacgcccccgaucaaggacuucggcggguucaacuucagccagauccugcccgaccccuccaagcccagcaagcgguccuucaucgaggaccuccuguucaacaaggugacccuggccgacgccggcuucaucaagcaguacggcgacugccucggggacaucgcggcccgcgaccugaucugcgcccagaaguucaacggccugaccgugcucccgccccugcugaccgacgagaugaucgcccaguacaccagcgcccuccuggcggggaccaucacguccggcuggaccuucggggccggcgccgcccugcagauccccuucgcgaugcagauggccuaccgguucaacggcaucggggucacccagaacgugcucuacgagaaccagaagcugaucgccaaccaguucaacagcgccaucggcaagauccaggacucccugagcuccaccgccagcgcgcucgggaagcugcaggacguggucaaccagaacgcccaggcccugaacacgcucgugaagcagcuguccagcaacuucggcgccaucuccagcgugcugaacgacauccucucccgccuggacccgcccgaggccgaggugcagaucgaccggcugaucaccgggcgccuccagagccugcagaccuacgugacccagcagcugauccgggcggccgagauccgcgccagcgccaaccucgccgcgaccaagauguccgagugcguccugggccagagcaagcggguggacuucugcggcaagggguaccaccugauguccuucccccagagcgccccgcacggcguggucuuccuccacgugacguacguccccgcccaggagaagaacuucaccaccgcccccgcgaucugccacgacgggaaggcccacuucccccgcgagggcguguucguguccaacgggacccacugguucgucacgcagcggaacuucuacgagccgcagaucaucaccaccgacaacaccuucgugagcggcaacugcgacguggucaucggcaucgugaacaacacgguguacgacccccugcagcccgagcuggacuccuucaaggaggagcucgacaaguacuucaagaaccacaccagccccgacgucgaccugggggacaucuccggcaucaacgccagcguggugaacauccagaaggagaucgaccgccugaacgaggucgccaagaaccucaacgagucccugaucgaccugcaggagcucgggaaguacgagcaguacaucaaguggccgugguacaucuggcugggcuucaucgccggccugaucgcgaucgugauggugaccaucaugcucugcugcaugaccagcugcugcuccugccugaaggggugcugcagcugcggcuccugcugcaaguucgacgaggacgacagcgagcccguccugaagggggugaagcuccacuacacgugaggacuagucccuguucccagagcccacuuuuuuuucuuuuuuugaaauaaaauagccugucuuucagaucuaaaaaaaaaaaaaaaaaaaaaaaaaaaaaaaaaaaaaaaaaaaaaaaaaaaaaaaaaaaaaaaaaaaaaaaaaaaaaaaaaaaaaaaaaaaaaaaaaaaa

SEQ ID NO: 24851 - RNA, 4061 nt, Artificial Sequence
  SARS-CoV-2/Wuhan/WIV05/2019__EPI_ISL_402128 spike protein mRNA gc (1-1273)(K986P_V987P_K986P_V987P_L18F_D80A_D215G_L242del_A243del_ L244del_R246I_K417N_E484K_N501Y_D614G_A701V)
aggagagucccgcagucggcguccagcggcucugcuuguucgugugugugucguugcaggccuuauucaagcuuaccauguucguguuccugguccuccugccccuggugagcucccagugcgugaacuucaccacccgcacgcagcugccgcccgccuacaccaacagcuucacccggggcgucuacuaccccgacaagguguuccgcuccagcgugcugcacuccacccaggaccucuuccugcccuucuucagcaacgucacgugguuccacgccauccacguguccgggaccaacggcaccaagcgguucgccaacccggugcugcccuucaacgacggggucuacuucgcgagcaccgagaaguccaacaucauccgcggcuggaucuucgggacgacccucgacagcaagacccagucccugcugaucgugaacaacgccaccaacguggucaucaaggugugcgaguuccaguucugcaacgaccccuuccucggcguguacuaccacaagaacaacaagagcuggauggaguccgaguuccgggucuacagcuccgccaacaacugcacguucgaguacgugagccagcccuuccugauggaccuggagggcaagcaggggaacuucaagaaccuccgcgaguucguguucaagaacaucgacggcuacuucaagaucuacuccaagcacaccccgaucaaccugguccggggccugccccagggguucagcgcccucgagccccugguggaccugcccaucggcaucaacaucacccgcuuccagacccuccacaucuccuaccucacgccgggggacagcagcuccggcuggaccgcgggcgccgccgccuacuacgugggguaccugcagccccgcaccuuccugcucaaguacaacgagaacggcaccaucacggacgcggucgacugcgcccuggacccccugagcgagaccaagugcacccucaaguccuucaccguggagaaggggaucuaccagacgagcaacuuccgggugcagcccaccgaguccaucguccgcuucccgaacaucaccaaccugugccccuucggcgagguguucaacgccacccgguucgccagcgucuacgccuggaaccgcaagcggaucuccaacugcguggcggacuacagcgugcuguacaacuccgccagcuucuccacguucaagugcuacggcgucagccccaccaagcucaacgaccugugcuucaccaacguguacgccgacuccuucgugauccgcggggacgagguccggcagaucgcccccggccagaccgggaacaucgccgacuacaacuacaagcugccggacgacuucacgggcugcgugaucgcguggaacagcaacaaccucgacuccaaggucgggggcaacuacaacuaccuguaccgccuguuccgcaagagcaaccucaagcccuucgagcgggacaucuccaccgagaucuaccaggccggcagcacccccugcaacggggugaagggcuucaacugcuacuucccccugcaguccuacggguuccagccgaccuacggcgugggguaccagcccuaccggguggucgugcugagcuucgagcuccugcacgcccccgccacggugugcggccccaagaaguccaccaaccuggucaagaacaagugcgugaacuucaacuucaacggccucaccgggaccggcgugcugaccgagagcaacaagaaguuccugccguuccagcaguucgggcgcgacaucgccgacacgaccgacgcgguccgcgacccccagacccuggagauccucgacaucacccccugcagcuucggcgggguguccgugaucacgccgggcaccaacaccagcaaccaggucgccgugcuguaccagggcgugaacugcaccgagguccccguggccauccacgccgaccagcugacgcccaccuggcggguguacuccaccggcagcaacgucuuccagacccgcgccgggugccucaucggcgcggagcacgugaacaacuccuacgagugcgacauccccaucggggccggcaucugcgccagcuaccagacgcagaccaacuccccgcggcgcgcccggagcguggcgucccagagcaucaucgccuacaccaugucccugggcguggagaacagcgucgccuacuccaacaacagcaucgccauccccaccaacuucacgaucuccgugaccaccgagauccugcccgugagcaugaccaagacgagcgucgacugcaccauguacaucugcggggacuccaccgagugcagcaaccuccugcugcaguacggcuccuucugcacccagcucaaccgcgcgcugacggggaucgccguggagcaggacaagaacacccaggagguguucgcccaggucaagcagaucuacaagacgcccccgaucaaggacuucggcggguucaacuucagccagauccugcccgaccccuccaagcccagcaagcgguccuucaucgaggaccuccuguucaacaaggugacccuggccgacgccggcuucaucaagcaguacggcgacugccucggggacaucgcggcccgcgaccugaucugcgcccagaaguucaacggccugaccgugcucccgccccugcugaccgacgagaugaucgcccaguacaccagcgcccuccuggcggggaccaucacguccggcuggaccuucggggccggcgccgcccugcagauccccuucgcgaugcagauggccuaccgguucaacggcaucggggucacccagaacgugcucuacgagaaccagaagcugaucgccaaccaguucaacagcgccaucggcaagauccaggacucccugagcuccaccgccagcgcgcucgggaagcugcaggacguggucaaccagaacgcccaggcccugaacacgcucgugaagcagcuguccagcaacuucggcgccaucuccagcgugcugaacgacauccucucccgccuggacccgcccgaggccgaggugcagaucgaccggcugaucaccgggcgccuccagagccugcagaccuacgugacccagcagcugauccgggcggccgagauccgcgccagcgccaaccucgccgcgaccaagauguccgagugcguccugggccagagcaagcggguggacuucugcggcaagggguaccaccugauguccuucccccagagcgccccgcacggcguggucuuccuccacgugacguacguccccgcccaggagaagaacuucaccaccgcccccgcgaucugccacgacgggaaggcccacuucccccgcgagggcguguucguguccaacgggacccacugguucgucacgcagcggaacuucuacgagccgcagaucaucaccaccgacaacaccuucgugagcggcaacugcgacguggucaucggcaucgugaacaacacgguguacgacccccugcagcccgagcuggacuccuucaaggaggagcucgacaaguacuucaagaaccacaccagccccgacgucgaccugggggacaucuccggcaucaacgccagcguggugaacauccagaaggagaucgaccgccugaacgaggucgccaagaaccucaacgagucccugaucgaccugcaggagcucgggaaguacgagcaguacaucaaguggccgugguacaucuggcugggcuucaucgccggccugaucgcgaucgugauggugaccaucaugcucugcugcaugaccagcugcugcuccugccugaaggggugcugcagcugcggcuccugcugcaaguucgacgaggacgacagcgagcccguccugaagggggugaagcuccacuacacgugaggacuagucccuguucccagagcccacuuuuuuuucuuuuuuugaaauaaaauagccugucuuucagaucuaaaaaaaaaaaaaaaaaaaaaaaaaaaaaaaaaaaaaaaaaaaaaaaaaaaaaaaaaaaaaaaaaaaaaaaaaaaaaaaaaaaaaaaaaaaaaaaaaaaa

SEQ ID NO: 24852 - RNA, 4070 nt, Artificial Sequence
  SARS-CoV-2/Wuhan/WIV05/2019__EPI_ISL_402128 spike protein mRNA gc (1-1273)(K986P_V987P_K986P_V987P_E484K_D614G)
aggagagucccgcagucggcguccagcggcucugcuuguucgugugugugucguugcaggccuuauucaagcuuaccauguucguguuccugguccuccugccccuggugagcucccagugcgugaaccucaccacccgcacgcagcugccgcccgccuacaccaacagcuucacccggggcgucuacuaccccgacaagguguuccgcuccagcgugcugcacuccacccaggaccucuuccugcccuucuucagcaacgucacgugguuccacgccauccacguguccgggaccaacggcaccaagcgguucgacaacccggugcugcccuucaacgacggggucuacuucgcgagcaccgagaaguccaacaucauccgcggcuggaucuucgggacgacccucgacagcaagacccagucccugcugaucgugaacaacgccaccaacguggucaucaaggugugcgaguuccaguucugcaacgaccccuuccucggcguguacuaccacaagaacaacaagagcuggauggaguccgaguuccgggucuacagcuccgccaacaacugcacguucgaguacgugagccagcccuuccugauggaccuggagggcaagcaggggaacuucaagaaccuccgcgaguucguguucaagaacaucgacggcuacuucaagaucuacuccaagcacaccccgaucaaccugguccgggaccugccccagggguucagcgcccucgagccccugguggaccugcccaucggcaucaacaucacccgcuuccagacccuccuggcccugcaccgguccuaccucacgccgggggacagcagcuccggcuggaccgcgggcgccgccgccuacuacgugggguaccugcagccccgcaccuuccugcucaaguacaacgagaacggcaccaucacggacgcggucgacugcgcccuggacccccugagcgagaccaagugcacccucaaguccuucaccguggagaaggggaucuaccagacgagcaacuuccgggugcagcccaccgaguccaucguccgcuucccgaacaucaccaaccugugccccuucggcgagguguucaacgccacccgguucgccagcgucuacgccuggaaccgcaagcggaucuccaacugcguggcggacuacagcgugcuguacaacuccgccagcuucuccacguucaagugcuacggcgucagccccaccaagcucaacgaccugugcuucaccaacguguacgccgacuccuucgugauccgcggggacgagguccggcagaucgcccccggccagaccgggaagaucgccgacuacaacuacaagcugccggacgacuucacgggcugcgugaucgcguggaacagcaacaaccucgacuccaaggucgggggcaacuacaacuaccuguaccgccuguuccgcaagagcaaccucaagcccuucgagcgggacaucuccaccgagaucuaccaggccggcagcacccccugcaacggggugaagggcuucaacugcuacuucccccugcaguccuacggguuccagccgaccaacggcgugggguaccagcccuaccggguggucgugcugagcuucgagcuccugcacgcccccgccacggugugcggccccaagaaguccaccaaccuggucaagaacaagugcgugaacuucaacuucaacggccucaccgggaccggcgugcugaccgagagcaacaagaaguuccugccguuccagcaguucgggcgcgacaucgccgacacgaccgacgcgguccgcgacccccagacccuggagauccucgacaucacccccugcagcuucggcgggguguccgugaucacgccgggcaccaacaccagcaaccaggucgccgugcuguaccagggcgugaacugcaccgagguccccguggccauccacgccgaccagcugacgcccaccuggcggguguacuccaccggcagcaacgucuuccagacccgcgccgggugccucaucggcgcggagcacgugaacaacuccuacgagugcgacauccccaucggggccggcaucugcgccagcuaccagacgcagaccaacuccccgcggcgcgcccggagcguggcgucccagagcaucaucgccuacaccaugucccugggcgccgagaacagcgucgccuacuccaacaacagcaucgccauccccaccaacuucacgaucuccgugaccaccgagauccugcccgugagcaugaccaagacgagcgucgacugcaccauguacaucugcggggacuccaccgagugcagcaaccuccugcugcaguacggcuccuucugcacccagcucaaccgcgcgcugacggggaucgccguggagcaggacaagaacacccaggagguguucgcccaggucaagcagaucuacaagacgcccccgaucaaggacuucggcggguucaacuucagccagauccugcccgaccccuccaagcccagcaagcgguccuucaucgaggaccuccuguucaacaaggugacccuggccgacgccggcuucaucaagcaguacggcgacugccucggggacaucgcggcccgcgaccugaucugcgcccagaaguucaacggccugaccgugcucccgccccugcugaccgacgagaugaucgcccaguacaccagcgcccuccuggcggggaccaucacguccggcuggaccuucggggccggcgccgcccugcagauccccuucgcgaugcagauggccuaccgguucaacggcaucggggucacccagaacgugcucuacgagaaccagaagcugaucgccaaccaguucaacagcgccaucggcaagauccaggacucccugagcuccaccgccagcgcgcucgggaagcugcaggacguggucaaccagaacgcccaggcccugaacacgcucgugaagcagcuguccagcaacuucggcgccaucuccagcgugcugaacgacauccucucccgccuggacccgcccgaggccgaggugcagaucgaccggcugaucaccgggcgccuccagagccugcagaccuacgugacccagcagcugauccgggcggccgagauccgcgccagcgccaaccucgccgcgaccaagauguccgagugcguccugggccagagcaagcggguggacuucugcggcaagggguaccaccugauguccuucccccagagcgccccgcacggcguggucuuccuccacgugacguacguccccgcccaggagaagaacuucaccaccgcccccgcgaucugccacgacgggaaggcccacuucccccgcgagggcguguucguguccaacgggacccacugguucgucacgcagcggaacuucuacgagccgcagaucaucaccaccgacaacaccuucgugagcggcaacugcgacguggucaucggcaucgugaacaacacgguguacgacccccugcagcccgagcuggacuccuucaaggaggagcucgacaaguacuucaagaaccacaccagccccgacgucgaccugggggacaucuccggcaucaacgccagcguggugaacauccagaaggagaucgaccgccugaacgaggucgccaagaaccucaacgagucccugaucgaccugcaggagcucgggaaguacgagcaguacaucaaguggccgugguacaucuggcugggcuucaucgccggccugaucgcgaucgugauggugaccaucaugcucugcugcaugaccagcugcugcuccugccugaaggggugcugcagcugcggcuccugcugcaaguucgacgaggacgacagcgagcccguccugaagggggugaagcuccacuacacgugaggacuagucccuguucccagagcccacuuuuuuuucuuuuuuugaaauaaaauagccugucuuucagaucuaaaaaaaaaaaaaaaaaaaaaaaaaaaaaaaaaaaaaaaaaaaaaaaaaaaaaaaaaaaaaaaaaaaaaaaaaaaaaaaaaaaaaaaaaaaaaaaaaaaa

SEQ ID NO: 24853 - RNA, 4070 nt, Artificial Sequence
  SARS-CoV-2/Wuhan/WIV05/2019__EPI_ISL_402128 spike protein mRNA gc (1-1273)(K986P_V987P_K986P_V987P_L18F_T20N_P26S_D138Y_R190S_K417T _E484K_N501Y_D614G_H655Y_T1027I)
aggagagucccgcagucggcguccagcggcucugcuuguucgugugugugucguugcaggccuuauucaagcuuaccauguucguguuccugguccuccugccccuggugagcucccagugcgugaacuucaccaaccgcacgcagcugccgagcgccuacaccaacagcuucacccggggcgucuacuaccccgacaagguguuccgcuccagcgugcugcacuccacccaggaccucuuccugcccuucuucagcaacgucacgugguuccacgccauccacguguccgggaccaacggcaccaagcgguucgacaacccggugcugcccuucaacgacggggucuacuucgcgagcaccgagaaguccaacaucauccgcggcuggaucuucgggacgacccucgacagcaagacccagucccugcugaucgugaacaacgccaccaacguggucaucaaggugugcgaguuccaguucugcaacuaccccuuccucggcguguacuaccacaagaacaacaagagcuggauggaguccgaguuccgggucuacagcuccgccaacaacugcacguucgaguacgugagccagcccuuccugauggaccuggagggcaagcaggggaacuucaagaaccucagcgaguucguguucaagaacaucgacggcuacuucaagaucuacuccaagcacaccccgaucaaccugguccgggaccugccccagggguucagcgcccucgagccccugguggaccugcccaucggcaucaacaucacccgcuuccagacccuccuggcccugcaccgguccuaccucacgccgggggacagcagcuccggcuggaccgcgggcgccgccgccuacuacgugggguaccugcagccccgcaccuuccugcucaaguacaacgagaacggcaccaucacggacgcggucgacugcgcccuggacccccugagcgagaccaagugcacccucaaguccuucaccguggagaaggggaucuaccagacgagcaacuuccgggugcagcccaccgaguccaucguccgcuucccgaacaucaccaaccugugccccuucggcgagguguucaacgccacccgguucgccagcgucuacgccuggaaccgcaagcggaucuccaacugcguggcggacuacagcgugcuguacaacuccgccagcuucuccacguucaagugcuacggcgucagccccaccaagcucaacgaccugugcuucaccaacguguacgccgacuccuucgugauccgcggggacgagguccggcagaucgcccccggccagaccgggaccaucgccgacuacaacuacaagcugccggacgacuucacgggcugcgugaucgcguggaacagcaacaaccucgacuccaaggucgggggcaacuacaacuaccuguaccgccuguuccgcaagagcaaccucaagcccuucgagcgggacaucuccaccgagaucuaccaggccggcagcacccccugcaacggggugaagggcuucaacugcuacuucccccugcaguccuacggguuccagccgaccuacggcgugggguaccagcccuaccggguggucgugcugagcuucgagcuccugcacgcccccgccacggugugcggccccaagaaguccaccaaccuggucaagaacaagugcgugaacuucaacuucaacggccucaccgggaccggcgugcugaccgagagcaacaagaaguuccugccguuccagcaguucgggcgcgacaucgccgacacgaccgacgcgguccgcgacccccagacccuggagauccucgacaucacccccugcagcuucggcgggguguccgugaucacgccgggcaccaacaccagcaaccaggucgccgugcuguaccagggcgugaacugcaccgagguccccguggccauccacgccgaccagcugacgcccaccuggcggguguacuccaccggcagcaacgucuuccagacccgcgccgggugccucaucggcgcggaguacgugaacaacuccuacgagugcgacauccccaucggggccggcaucugcgccagcuaccagacgcagaccaacuccccgcggcgcgcccggagcguggcgucccagagcaucaucgccuacaccaugucccugggcgccgagaacagcgucgccuacuccaacaacagcaucgccauccccaccaacuucacgaucuccgugaccaccgagauccugcccgugagcaugaccaagacgagcgucgacugcaccauguacaucugcggggacuccaccgagugcagcaaccuccugcugcaguacggcuccuucugcacccagcucaaccgcgcgcugacggggaucgccguggagcaggacaagaacacccaggagguguucgcccaggucaagcagaucuacaagacgcccccgaucaaggacuucggcggguucaacuucagccagauccugcccgaccccuccaagcccagcaagcgguccuucaucgaggaccuccuguucaacaaggugacccuggccgacgccggcuucaucaagcaguacggcgacugccucggggacaucgcggcccgcgaccugaucugcgcccagaaguucaacggccugaccgugcucccgccccugcugaccgacgagaugaucgcccaguacaccagcgcccuccuggcggggaccaucacguccggcuggaccuucggggccggcgccgcccugcagauccccuucgcgaugcagauggccuaccgguucaacggcaucggggucacccagaacgugcucuacgagaaccagaagcugaucgccaaccaguucaacagcgccaucggcaagauccaggacucccugagcuccaccgccagcgcgcucgggaagcugcaggacguggucaaccagaacgcccaggcccugaacacgcucgugaagcagcuguccagcaacuucggcgccaucuccagcgugcugaacgacauccucucccgccuggacccgcccgaggccgaggugcagaucgaccggcugaucaccgggcgccuccagagccugcagaccuacgugacccagcagcugauccgggcggccgagauccgcgccagcgccaaccucgccgcgaucaagauguccgagugcguccugggccagagcaagcggguggacuucugcggcaagggguaccaccugauguccuucccccagagcgccccgcacggcguggucuuccuccacgugacguacguccccgcccaggagaagaacuucaccaccgcccccgcgaucugccacgacgggaaggcccacuucccccgcgagggcguguucguguccaacgggacccacugguucgucacgcagcggaacuucuacgagccgcagaucaucaccaccgacaacaccuucgugagcggcaacugcgacguggucaucggcaucgugaacaacacgguguacgacccccugcagcccgagcuggacuccuucaaggaggagcucgacaaguacuucaagaaccacaccagccccgacgucgaccugggggacaucuccggcaucaacgccagcguggugaacauccagaaggagaucgaccgccugaacgaggucgccaagaaccucaacgagucccugaucgaccugcaggagcucgggaaguacgagcaguacaucaaguggccgugguacaucuggcugggcuucaucgccggccugaucgcgaucgugauggugaccaucaugcucugcugcaugaccagcugcugcuccugccugaaggggugcugcagcugcggcuccugcugcaaguucgacgaggacgacagcgagcccguccugaagggggugaagcuccacuacacgugaggacuagucccuguucccagagcccacuuuuuuuucuuuuuuugaaauaaaauagccugucuuucagaucuaaaaaaaaaaaaaaaaaaaaaaaaaaaaaaaaaaaaaaaaaaaaaaaaaaaaaaaaaaaaaaaaaaaaaaaaaaaaaaaaaaaaaaaaaaaaaaaaaaaa

SEQ ID NO: 24854 - RNA, 4070 nt, Artificial Sequence
  SARS-CoV-2/Wuhan/WIV05/2019__EPI_ISL_402128 spike protein mRNA gc (1-1273)(K986P_V987P_K986P_V987P_S13I_W152C_L452R_D614G)
aggagagucccgcagucggcguccagcggcucugcuuguucgugugugugucguugcaggccuuauucaagcuuaccauguucguguuccugguccuccugccccuggugagcauccagugcgugaaccucaccacccgcacgcagcugccgcccgccuacaccaacagcuucacccggggcgucuacuaccccgacaagguguuccgcuccagcgugcugcacuccacccaggaccucuuccugcccuucuucagcaacgucacgugguuccacgccauccacguguccgggaccaacggcaccaagcgguucgacaacccggugcugcccuucaacgacggggucuacuucgcgagcaccgagaaguccaacaucauccgcggcuggaucuucgggacgacccucgacagcaagacccagucccugcugaucgugaacaacgccaccaacguggucaucaaggugugcgaguuccaguucugcaacgaccccuuccucggcguguacuaccacaagaacaacaagagcugcauggaguccgaguuccgggucuacagcuccgccaacaacugcacguucgaguacgugagccagcccuuccugauggaccuggagggcaagcaggggaacuucaagaaccuccgcgaguucguguucaagaacaucgacggcuacuucaagaucuacuccaagcacaccccgaucaaccugguccgggaccugccccagggguucagcgcccucgagccccugguggaccugcccaucggcaucaacaucacccgcuuccagacccuccuggcccugcaccgguccuaccucacgccgggggacagcagcuccggcuggaccgcgggcgccgccgccuacuacgugggguaccugcagccccgcaccuuccugcucaaguacaacgagaacggcaccaucacggacgcggucgacugcgcccuggacccccugagcgagaccaagugcacccucaaguccuucaccguggagaaggggaucuaccagacgagcaacuuccgggugcagcccaccgaguccaucguccgcuucccgaacaucaccaaccugugccccuucggcgagguguucaacgccacccgguucgccagcgucuacgccuggaaccgcaagcggaucuccaacugcguggcggacuacagcgugcuguacaacuccgccagcuucuccacguucaagugcuacggcgucagccccaccaagcucaacgaccugugcuucaccaacguguacgccgacuccuucgugauccgcggggacgagguccggcagaucgcccccggccagaccgggaagaucgccgacuacaacuacaagcugccggacgacuucacgggcugcgugaucgcguggaacagcaacaaccucgacuccaaggucgggggcaacuacaacuaccgcuaccgccuguuccgcaagagcaaccucaagcccuucgagcgggacaucuccaccgagaucuaccaggccggcagcacccccugcaacgggguggagggcuucaacugcuacuucccccugcaguccuacggguuccagccgaccaacggcgugggguaccagcccuaccggguggucgugcugagcuucgagcuccugcacgcccccgccacggugugcggccccaagaaguccaccaaccuggucaagaacaagugcgugaacuucaacuucaacggccucaccgggaccggcgugcugaccgagagcaacaagaaguuccugccguuccagcaguucgggcgcgacaucgccgacacgaccgacgcgguccgcgacccccagacccuggagauccucgacaucacccccugcagcuucggcgggguguccgugaucacgccgggcaccaacaccagcaaccaggucgccgugcuguaccagggcgugaacugcaccgagguccccguggccauccacgccgaccagcugacgcccaccuggcggguguacuccaccggcagcaacgucuuccagacccgcgccgggugccucaucggcgcggagcacgugaacaacuccuacgagugcgacauccccaucggggccggcaucugcgccagcuaccagacgcagaccaacuccccgcggcgcgcccggagcguggcgucccagagcaucaucgccuacaccaugucccugggcgccgagaacagcgucgccuacuccaacaacagcaucgccauccccaccaacuucacgaucuccgugaccaccgagauccugcccgugagcaugaccaagacgagcgucgacugcaccauguacaucugcggggacuccaccgagugcagcaaccuccugcugcaguacggcuccuucugcacccagcucaaccgcgcgcugacggggaucgccguggagcaggacaagaacacccaggagguguucgcccaggucaagcagaucuacaagacgcccccgaucaaggacuucggcggguucaacuucagccagauccugcccgaccccuccaagcccagcaagcgguccuucaucgaggaccuccuguucaacaaggugacccuggccgacgccggcuucaucaagcaguacggcgacugccucggggacaucgcggcccgcgaccugaucugcgcccagaaguucaacggccugaccgugcucccgccccugcugaccgacgagaugaucgcccaguacaccagcgcccuccuggcggggaccaucacguccggcuggaccuucggggccggcgccgcccugcagauccccuucgcgaugcagauggccuaccgguucaacggcaucggggucacccagaacgugcucuacgagaaccagaagcugaucgccaaccaguucaacagcgccaucggcaagauccaggacucccugagcuccaccgccagcgcgcucgggaagcugcaggacguggucaaccagaacgcccaggcccugaacacgcucgugaagcagcuguccagcaacuucggcgccaucuccagcgugcugaacgacauccucucccgccuggacccgcccgaggccgaggugcagaucgaccggcugaucaccgggcgccuccagagccugcagaccuacgugacccagcagcugauccgggcggccgagauccgcgccagcgccaaccucgccgcgaccaagauguccgagugcguccugggccagagcaagcggguggacuucugcggcaagggguaccaccugauguccuucccccagagcgccccgcacggcguggucuuccuccacgugacguacguccccgcccaggagaagaacuucaccaccgcccccgcgaucugccacgacgggaaggcccacuucccccgcgagggcguguucguguccaacgggacccacugguucgucacgcagcggaacuucuacgagccgcagaucaucaccaccgacaacaccuucgugagcggcaacugcgacguggucaucggcaucgugaacaacacgguguacgacccccugcagcccgagcuggacuccuucaaggaggagcucgacaaguacuucaagaaccacaccagccccgacgucgaccugggggacaucuccggcaucaacgccagcguggugaacauccagaaggagaucgaccgccugaacgaggucgccaagaaccucaacgagucccugaucgaccugcaggagcucgggaaguacgagcaguacaucaaguggccgugguacaucuggcugggcuucaucgccggccugaucgcgaucgugauggugaccaucaugcucugcugcaugaccagcugcugcuccugccugaaggggugcugcagcugcggcuccugcugcaaguucgacgaggacgacagcgagcccguccugaagggggugaagcuccacuacacgugaggacuagucccuguucccagagcccacuuuuuuuucuuuuuuugaaauaaaauagccugucuuucagaucuaaaaaaaaaaaaaaaaaaaaaaaaaaaaaaaaaaaaaaaaaaaaaaaaaaaaaaaaaaaaaaaaaaaaaaaaaaaaaaaaaaaaaaaaaaaaaaaaaaaa

SEQ ID NO: 24855 - RNA, 4070 nt, Artificial Sequence
  SARS-CoV-2/Wuhan/WIV05/2019__EPI_ISL_402128 spike protein mRNA gc (1-1273)(K986P_V987P)
aggagagucccgcagucggcguccagcggcucugcuuguucgugugugugucguugcaggccuuauucaagcuuaccauguucguguuccugguccuccugccccuggugagcucccagugcgugaaccucaccacccgcacgcagcugccgcccgccuacaccaacagcuucacccggggcgucuacuaccccgacaagguguuccgcuccagcgugcugcacuccacccaggaccucuuccugcccuucuucagcaacgucacgugguuccacgccauccacguguccgggaccaacggcaccaagcgguucgacaacccggugcugcccuucaacgacggggucuacuucgcgagcaccgagaaguccaacaucauccgcggcuggaucuucgggacgacccucgacagcaagacccagucccugcugaucgugaacaacgccaccaacguggucaucaaggugugcgaguuccaguucugcaacgaccccuuccucggcguguacuaccacaagaacaacaagagcuggauggaguccgaguuccgggucuacagcuccgccaacaacugcacguucgaguacgugagccagcccuuccugauggaccuggagggcaagcaggggaacuucaagaaccuccgcgaguucguguucaagaacaucgacggcuacuucaagaucuacuccaagcacaccccgaucaaccugguccgggaccugccccagggguucagcgcccucgagccccugguggaccugcccaucggcaucaacaucacccgcuuccagacccuccuggcccugcaccgguccuaccucacgccgggggacagcagcuccggcuggaccgcgggcgccgccgccuacuacgugggguaccugcagccccgcaccuuccugcucaaguacaacgagaacggcaccaucacggacgcggucgacugcgcccuggacccccugagcgagaccaagugcacccucaaguccuucaccguggagaaggggaucuaccagacgagcaacuuccgggugcagcccaccgaguccaucguccgcuucccgaacaucaccaaccugugccccuucggcgagguguucaacgccacccgguucgccagcgucuacgccuggaaccgcaagcggaucuccaacugcguggcggacuacagcgugcuguacaacuccgccagcuucuccacguucaagugcuacggcgucagccccaccaagcucaacgaccugugcuucaccaacguguacgccgacuccuucgugauccgcggggacgagguccggcagaucgcccccggccagaccgggaagaucgccgacuacaacuacaagcugccggacgacuucacgggcugcgugaucgcguggaacagcaacaaccucgacuccaaggucgggggcaacuacaacuaccuguaccgccuguuccgcaagagcaaccucaagcccuucgagcgggacaucuccaccgagaucuaccaggccggcagcacccccugcaacgggguggagggcuucaacugcuacuucccccugcaguccuacggguuccagccgaccaacggcgugggguaccagcccuaccggguggucgugcugagcuucgagcuccugcacgcccccgccacggugugcggccccaagaaguccaccaaccuggucaagaacaagugcgugaacuucaacuucaacggccucaccgggaccggcgugcugaccgagagcaacaagaaguuccugccguuccagcaguucgggcgcgacaucgccgacacgaccgacgcgguccgcgacccccagacccuggagauccucgacaucacccccugcagcuucggcgggguguccgugaucacgccgggcaccaacaccagcaaccaggucgccgugcuguaccaggacgugaacugcaccgagguccccguggccauccacgccgaccagcugacgcccaccuggcggguguacuccaccggcagcaacgucuuccagacccgcgccgggugccucaucggcgcggagcacgugaacaacuccuacgagugcgacauccccaucggggccggcaucugcgccagcuaccagacgcagaccaacuccccgcggcgcgcccggagcguggcgucccagagcaucaucgccuacaccaugucccugggcgccgagaacagcgucgccuacuccaacaacagcaucgccauccccaccaacuucacgaucuccgugaccaccgagauccugcccgugagcaugaccaagacgagcgucgacugcaccauguacaucugcggggacuccaccgagugcagcaaccuccugcugcaguacggcuccuucugcacccagcucaaccgcgcgcugacggggaucgccguggagcaggacaagaacacccaggagguguucgcccaggucaagcagaucuacaagacgcccccgaucaaggacuucggcggguucaacuucagccagauccugcccgaccccuccaagcccagcaagcgguccuucaucgaggaccuccuguucaacaaggugacccuggccgacgccggcuucaucaagcaguacggcgacugccucggggacaucgcggcccgcgaccugaucugcgcccagaaguucaacggccugaccgugcucccgccccugcugaccgacgagaugaucgcccaguacaccagcgcccuccuggcggggaccaucacguccggcuggaccuucggggccggcgccgcccugcagauccccuucgcgaugcagauggccuaccgguucaacggcaucggggucacccagaacgugcucuacgagaaccagaagcugaucgccaaccaguucaacagcgccaucggcaagauccaggacucccugagcuccaccgccagcgcgcucgggaagcugcaggacguggucaaccagaacgcccaggcccugaacacgcucgugaagcagcuguccagcaacuucggcgccaucuccagcgugcugaacgacauccucucccgccuggacccgcccgaggccgagguccagaucgaccggcugaucaccgggcgccuccagagccugcagaccuacgugacccagcagcugauccgggcggccgagauccgcgccagcgccaaccucgccgcgaccaagauguccgagugcgugcugggccagagcaagcgggucgacuucugcggcaagggguaccaccugauguccuucccccagagcgcgccccacggcgugguguuccuccacgucacguacgugcccgcccaggagaagaacuucaccaccgccccggccaucugccacgacgggaaggcccacuucccccgcgagggcgucuucguguccaacgggacccacugguucgugacgcagcggaacuucuacgagccccagaucaucaccaccgacaacaccuucgucagcggcaacugcgacguggugaucggcaucgucaacaacacgguguacgacccccugcagccggagcuggacuccuucaaggaggagcucgacaaguacuucaagaaccacaccagccccgacguggaccugggggacaucuccggcaucaacgccagcgucgugaacauccagaaggagaucgaccgccugaacgagguggccaagaaccucaacgagucccugaucgaccugcaggagcucgggaaguacgagcaguacaucaaguggcccugguacaucuggcugggcuucaucgccggccugaucgcgaucgucauggugaccaucaugcucugcugcaugaccagcugcugcuccugccugaaggggugcugcagcugcggcuccugcugcaaguucgacgaggacgacagcgagccggugcugaagggggucaagcuccacuacacgugaggacuagucccuguucccagagcccacuuuuuuuucuuuuuuugaaauaaaauagccugucuuucagaucuaaaaaaaaaaaaaaaaaaaaaaaaaaaaaaaaaaaaaaaaaaaaaaaaaaaaaaaaaaaaaaaaaaaaaaaaaaaaaaaaaaaaaaaaaaaaaaaaaaaa

SEQ ID NO: 24856 - RNA, 4070 nt, Artificial Sequence
  SARS-CoV-2/Wuhan/WIV05/2019__EPI_ISL_402128 spike protein mRNA gc (1-1273)(K986P_V987P_ D614G)
aggagagucccgcagucggcguccagcggcucugcuuguucgugugugugucguugcaggccuuauucaagcuuaccauguucguguuccugguccuccugccccuggugagcucccagugcgugaaccucaccacccgcacgcagcugccgcccgccuacaccaacagcuucacccggggcgucuacuaccccgacaagguguuccgcuccagcgugcugcacuccacccaggaccucuuccugcccuucuucagcaacgucacgugguuccacgccauccacguguccgggaccaacggcaccaagcgguucgacaacccggugcugcccuucaacgacggggucuacuucgcgagcaccgagaaguccaacaucauccgcggcuggaucuucgggacgacccucgacagcaagacccagucccugcugaucgugaacaacgccaccaacguggucaucaaggugugcgaguuccaguucugcaacgaccccuuccucggcguguacuaccacaagaacaacaagagcuggauggaguccgaguuccgggucuacagcuccgccaacaacugcacguucgaguacgugagccagcccuuccugauggaccuggagggcaagcaggggaacuucaagaaccuccgcgaguucguguucaagaacaucgacggcuacuucaagaucuacuccaagcacaccccgaucaaccugguccgggaccugccccagggguucagcgcccucgagccccugguggaccugcccaucggcaucaacaucacccgcuuccagacccuccuggcccugcaccgguccuaccucacgccgggggacagcagcuccggcuggaccgcgggcgccgccgccuacuacgugggguaccugcagccccgcaccuuccugcucaaguacaacgagaacggcaccaucacggacgcggucgacugcgcccuggacccccugagcgagaccaagugcacccucaaguccuucaccguggagaaggggaucuaccagacgagcaacuuccgggugcagcccaccgaguccaucguccgcuucccgaacaucaccaaccugugccccuucggcgagguguucaacgccacccgguucgccagcgucuacgccuggaaccgcaagcggaucuccaacugcguggcggacuacagcgugcuguacaacuccgccagcuucuccacguucaagugcuacggcgucagccccaccaagcucaacgaccugugcuucaccaacguguacgccgacuccuucgugauccgcggggacgagguccggcagaucgcccccggccagaccgggaagaucgccgacuacaacuacaagcugccggacgacuucacgggcugcgugaucgcguggaacagcaacaaccucgacuccaaggucgggggcaacuacaacuaccuguaccgccuguuccgcaagagcaaccucaagcccuucgagcgggacaucuccaccgagaucuaccaggccggcagcacccccugcaacgggguggagggcuucaacugcuacuucccccugcaguccuacggguuccagccgaccaacggcgugggguaccagcccuaccggguggucgugcugagcuucgagcuccugcacgcccccgccacggugugcggccccaagaaguccaccaaccuggucaagaacaagugcgugaacuucaacuucaacggccucaccgggaccggcgugcugaccgagagcaacaagaaguuccugccguuccagcaguucgggcgcgacaucgccgacacgaccgacgcgguccgcgacccccagacccuggagauccucgacaucacccccugcagcuucggcgggguguccgugaucacgccgggcaccaacaccagcaaccaggucgccgugcuguaccagggcgugaacugcaccgagguccccguggccauccacgccgaccagcugacgcccaccuggcggguguacuccaccgggagcaacgucuuccagacccgcgccggcugccucaucggggcggagcacgugaacaacuccuacgagugcgacauccccaucggcgccggcaucugcgccagcuaccagacgcagaccaacuccccgcggcgcgcccggagcguggcgucccagagcaucaucgccuacaccaugucccugggggccgagaacagcgucgccuacuccaacaacagcaucgccauccccaccaacuucacgaucuccgugaccaccgagauccugcccgugagcaugaccaagacgagcgucgacugcaccauguacaucugcggcgacuccaccgagugcagcaaccuccugcugcaguacggguccuucugcacccagcucaaccgcgcgcugacgggcaucgccguggagcaggacaagaacacccaggagguguucgcccaggucaagcagaucuacaagacgcccccgaucaaggacuucgggggcuucaacuucagccagauccugcccgaccccuccaagcccagcaagcgguccuucaucgaggaccuccuguucaacaaggugacccuggccgacgccggcuucaucaagcaguacggggacugccucggcgacaucgcggcccgcgaccugaucugcgcccagaaguucaacgggcugaccgugcucccgccccugcugaccgacgagaugaucgcccaguacaccagcgcccuccuggcgggcaccaucacguccggguggaccuucggcgccggcgccgcccugcagauccccuucgcgaugcagauggccuaccgguucaacgggaucggcgucacccagaacgugcucuacgagaaccagaagcugaucgccaaccaguucaacagcgccaucgggaagauccaggacucccugagcuccaccgccagcgcgcucggcaagcugcaggacguggucaaccagaacgcccaggcccugaacacgcucgugaagcagcuguccagcaacuucggggccaucuccagcgugcugaacgacauccucucccgccuggacccgcccgaggccgagguccagaucgaccggcugaucaccggccgccuccagagccugcagaccuacgugacccagcagcugauccgggcggccgagauccgcgccagcgccaaccucgccgcgaccaagauguccgagugcgugcugggccagagcaagcgggucgacuucugcgggaagggcuaccaccugauguccuucccccagagcgcgccccacggggugguguuccuccacgucacguacgugcccgcccaggagaagaacuucaccaccgccccggccaucugccacgacggcaaggcccacuucccccgcgagggggucuucguguccaacggcacccacugguucgugacgcagcggaacuucuacgagccccagaucaucaccaccgacaacaccuucgucagcggcaacugcgacguggugaucgggaucgucaacaacacgguguacgacccccugcagccggagcuggacuccuucaaggaggagcucgacaaguacuucaagaaccacaccagccccgacguggaccugggcgacaucuccgggaucaacgccagcgucgugaacauccagaaggagaucgaccgccugaacgagguggccaagaaccucaacgagucccugaucgaccugcaggagcucggcaaguacgagcaguacaucaaguggcccugguacaucuggcugggcuucaucgccgggcugaucgcgaucgucauggugaccaucaugcucugcugcaugaccagcugcugcuccugccugaagggcugcugcagcugcggguccugcugcaaguucgacgaggacgacagcgagccggugcugaagggcgucaagcuccacuacacgugaggacuagucccuguucccagagcccacuuuuuuuucuuuuuuugaaauaaaauagccugucuuucagaucuaaaaaaaaaaaaaaaaaaaaaaaaaaaaaaaaaaaaaaaaaaaaaaaaaaaaaaaaaaaaaaaaaaaaaaaaaaaaaaaaaaaaaaaaaaaaaaaaaaaa

SEQ ID NO: 24857 - RNA, 4070 nt, Artificial Sequence
  SARS-CoV-2/Wuhan/WIV05/2019__EPI_ISL_402128 spike protein mRNA gc (1-1273)(K986P_V987P_A222V_D614G)
aggagagucccgcagucggcguccagcggcucugcuuguucgugugugugucguugcaggccuuauucaagcuuaccauguucguguuccugguccuccugccccuggugagcucccagugcgugaaccucaccacccgcacgcagcugccgcccgccuacaccaacagcuucacccggggcgucuacuaccccgacaagguguuccgcuccagcgugcugcacuccacccaggaccucuuccugcccuucuucagcaacgucacgugguuccacgccauccacguguccgggaccaacggcaccaagcgguucgacaacccggugcugcccuucaacgacggggucuacuucgcgagcaccgagaaguccaacaucauccgcggcuggaucuucgggacgacccucgacagcaagacccagucccugcugaucgugaacaacgccaccaacguggucaucaaggugugcgaguuccaguucugcaacgaccccuuccucggcguguacuaccacaagaacaacaagagcuggauggaguccgaguuccgggucuacagcuccgccaacaacugcacguucgaguacgugagccagcccuuccugauggaccuggagggcaagcaggggaacuucaagaaccuccgcgaguucguguucaagaacaucgacggcuacuucaagaucuacuccaagcacaccccgaucaaccugguccgggaccugccccagggguucagcgugcucgagccccugguggaccugcccaucggcaucaacaucacccgcuuccagacccuccuggcccugcaccgguccuaccucacgccgggggacagcagcuccggcuggaccgccggcgcggccgccuacuacgucggguaccugcagccccgcaccuuccugcucaaguacaacgagaacggcaccaucacggacgccguggacugcgcgcuggacccccugagcgagaccaagugcacccucaaguccuucaccguggagaaggggaucuaccagacgagcaacuuccggguccagcccaccgaguccaucgugcgcuucccgaacaucaccaaccugugccccuucggcgaggucuucaacgccacccgguucgccagcguguacgccuggaaccgcaagcggaucuccaacugcguggccgacuacagcguccuguacaacuccgcgagcuucuccacguucaagugcuacggcgugagccccaccaagcucaacgaccugugcuucaccaacguguacgccgacuccuucgucauccgcggggacgaggugcggcagaucgcccccggccagaccgggaagaucgccgacuacaacuacaagcugccggacgacuucacgggcugcgugaucgccuggaacagcaacaaccucgacuccaaggucgggggcaacuacaacuaccuguaccgccuguuccgcaagagcaaccucaagcccuucgagcgggacaucuccaccgagaucuaccaggcgggcagcacccccugcaacgggguggagggcuucaacugcuacuucccccugcaguccuacggguuccagccgaccaacggcgugggguaccagcccuaccgggucguggugcugagcuucgagcuccugcacgcccccgccacggucugcggccccaagaaguccaccaaccuggugaagaacaagugcgugaacuucaacuucaacggccucaccgggaccggcguccugaccgagagcaacaagaaguuccugccguuccagcaguucgggcgcgacaucgccgacacgaccgacgccgugcgcgacccccagacccuggagauccucgacaucacccccugcagcuucggcgggguguccgucaucacgccgggcaccaacaccagcaaccagguggcggugcuguaccagggcgucaacugcaccgaggugcccguggccauccacgccgaccagcugacgcccaccuggcgggucuacuccaccgggagcaacguguuccagacccgcgccggcugccucaucggggccgagcacgugaacaacuccuacgagugcgacauccccaucggcgcgggcaucugcgccagcuaccagacgcagaccaacuccccgcggcgcgcccggagcgucgccucccagagcaucaucgcguacaccaugucccugggggccgagaacagcguggccuacuccaacaacagcaucgccauccccaccaacuucacgaucuccgugaccaccgagauccugcccgucagcaugaccaagacgagcguggacugcaccauguacaucugcggcgacuccaccgagugcagcaaccuccugcugcaguacggguccuucugcacccagcucaaccgcgcccugacgggcaucgcgguggagcaggacaagaacacccaggaggucuucgcccaggugaagcagaucuacaagacgcccccgaucaaggacuucgggggcuucaacuucagccagauccugcccgaccccuccaagcccagcaagcgguccuucaucgaggaccuccuguucaacaaggugacccuggccgacgccggcuucaucaagcaguacggggacugccucggcgacaucgccgcgcgcgaccugaucugcgcccagaaguucaacgggcugaccguccucccgccccugcugaccgacgagaugaucgcccaguacaccagcgcccuccuggccggcaccaucacguccggguggaccuucggcgcgggcgccgcccugcagauccccuucgccaugcagauggcguaccgguucaacgggaucggcgugacccagaacgugcucuacgagaaccagaagcugaucgccaaccaguucaacagcgccaucgggaagauccaggacucccugagcuccaccgccagcgcccucggcaagcugcaggacgucgugaaccagaacgcgcaggcccugaacacgcucgugaagcagcuguccagcaacuucggggccaucuccagcguccugaacgacauccucucccgccuggacccgcccgaggccgaggugcagaucgaccggcugaucaccggccgccuccagagccugcagaccuacgugacccagcagcugauccgggccgcggagauccgcgccagcgccaaccucgccgccaccaagauguccgagugcguccugggccagagcaagcggguggacuucugcgggaagggcuaccaccugauguccuucccccagagcgcgccccacgggguggucuuccuccacgugacguacguccccgcccaggagaagaacuucaccaccgccccggccaucugccacgacggcaaggcgcacuucccccgcgaggggguguucguguccaacggcacccacugguucgucacgcagcggaacuucuacgagccccagaucaucaccaccgacaacaccuucgugagcggcaacugcgacguggucaucgggaucgugaacaacacgguguacgacccccugcagccggagcuggacuccuucaaggaggagcucgacaaguacuucaagaaccacaccagccccgacgucgaccugggcgacaucuccgggaucaacgccagcguggugaacauccagaaggagaucgaccgccugaacgaggucgccaagaaccucaacgagucccugaucgaccugcaggagcucggcaaguacgagcaguacaucaaguggcccugguacaucuggcugggcuucaucgccgggcugaucgccaucgugauggugaccaucaugcucugcugcaugaccagcugcugcuccugccugaagggcugcugcagcugcggguccugcugcaaguucgacgaggacgacagcgagccgguccugaagggcgugaagcuccacuacacgugaggacuagucccuguucccagagcccacuuuuuuuucuuuuuuugaaauaaaauagccugucuuucagaucuaaaaaaaaaaaaaaaaaaaaaaaaaaaaaaaaaaaaaaaaaaaaaaaaaaaaaaaaaaaaaaaaaaaaaaaaaaaaaaaaaaaaaaaaaaaaaaaaaaaa

SEQ ID NO: 24858 - RNA, 4070 nt, Artificial Sequence
  SARS-CoV-2/Wuhan/WIV05/2019__EPI_ISL_402128 spike protein mRNA gc (1-1273)(K986P_V987P_N439K_D614G)
aggagagucccgcagucggcguccagcggcucugcuuguucgugugugugucguugcaggccuuauucaagcuuaccauguucguguuccugguccuccugccccuggugagcucccagugcgugaaccucaccacccgcacgcagcugccgcccgccuacaccaacagcuucacccggggcgucuacuaccccgacaagguguuccgcuccagcgugcugcacuccacccaggaccucuuccugcccuucuucagcaacgucacgugguuccacgccauccacguguccgggaccaacggcaccaagcgguucgacaacccggugcugcccuucaacgacggggucuacuucgcgagcaccgagaaguccaacaucauccgcggcuggaucuucgggacgacccucgacagcaagacccagucccugcugaucgugaacaacgccaccaacguggucaucaaggugugcgaguuccaguucugcaacgaccccuuccucggcguguacuaccacaagaacaacaagagcuggauggaguccgaguuccgggucuacagcuccgccaacaacugcacguucgaguacgugagccagcccuuccugauggaccuggagggcaagcaggggaacuucaagaaccuccgcgaguucguguucaagaacaucgacggcuacuucaagaucuacuccaagcacaccccgaucaaccugguccgggaccugccccagggguucagcgcccucgagccccugguggaccugcccaucggcaucaacaucacccgcuuccagacccuccuggcccugcaccgguccuaccucacgccgggggacagcagcuccggcuggaccgcgggcgccgccgccuacuacgugggguaccugcagccccgcaccuuccugcucaaguacaacgagaacggcaccaucacggacgcggucgacugcgcccuggacccccugagcgagaccaagugcacccucaaguccuucaccguggagaaggggaucuaccagacgagcaacuuccgggugcagcccaccgaguccaucguccgcuucccgaacaucaccaaccugugccccuucggcgagguguucaacgccacccgguucgccagcgucuacgccuggaaccgcaagcggaucuccaacugcguggcggacuacagcgugcuguacaacuccgccagcuucuccacguucaagugcuacggcgucagccccaccaagcucaacgaccugugcuucaccaacguguacgccgacuccuucgugauccgcggggacgagguccggcagaucgcccccggccagaccgggaagaucgccgacuacaacuacaagcugccggacgacuucacgggcugcgugaucgcguggaacagcaagaaccucgacuccaaggucgggggcaacuacaacuaccuguaccgccuguuccgcaagagcaaccucaagcccuucgagcgggacaucuccaccgagaucuaccaggccggcagcacccccugcaacgggguggagggcuucaacugcuacuucccccugcaguccuacggguuccagccgaccaacggcgugggguaccagcccuaccggguggucgugcugagcuucgagcuccugcacgcccccgccacggugugcggccccaagaaguccaccaaccuggucaagaacaagugcgugaacuucaacuucaacggccucaccgggaccggcgugcugaccgagagcaacaagaaguuccugccguuccagcaguucgggcgcgacaucgccgacacgaccgacgcgguccgcgacccccagacccuggagauccucgacaucacccccugcagcuucggcgggguguccgugaucacgccgggcaccaacaccagcaaccaggucgccgugcuguaccagggcgugaacugcaccgagguccccguggccauccacgccgaccagcugacgcccaccuggcggguguacuccaccgggagcaacgucuuccagacccgcgccggcugccucaucggggcggagcacgugaacaacuccuacgagugcgacauccccaucggcgccggcaucugcgccagcuaccagacgcagaccaacuccccgcggcgcgcccggagcguggcgucccagagcaucaucgccuacaccaugucccugggggccgagaacagcgucgccuacuccaacaacagcaucgccauccccaccaacuucacgaucuccgugaccaccgagauccugcccgugagcaugaccaagacgagcgucgacugcaccauguacaucugcggcgacuccaccgagugcagcaaccuccugcugcaguacggguccuucugcacccagcucaaccgcgcgcugacgggcaucgccguggagcaggacaagaacacccaggagguguucgcccaggucaagcagaucuacaagacgcccccgaucaaggacuucgggggcuucaacuucagccagauccugcccgaccccuccaagcccagcaagcgguccuucaucgaggaccuccuguucaacaaggugacccuggccgacgccggcuucaucaagcaguacggggacugccucggcgacaucgcggcccgcgaccugaucugcgcccagaaguucaacgggcugaccgugcucccgccccugcugaccgacgagaugaucgcccaguacaccagcgcccuccuggcgggcaccaucacguccggguggaccuucggcgccggcgccgcccugcagauccccuucgcgaugcagauggccuaccgguucaacgggaucggcgucacccagaacgugcucuacgagaaccagaagcugaucgccaaccaguucaacagcgccaucgggaagauccaggacucccugagcuccaccgccagcgcgcucggcaagcugcaggacguggucaaccagaacgcccaggcccugaacacgcucgugaagcagcuguccagcaacuucggggccaucuccagcgugcugaacgacauccucucccgccuggacccgcccgaggccgagguccagaucgaccggcugaucaccggccgccuccagagccugcagaccuacgugacccagcagcugauccgggcggccgagauccgcgccagcgccaaccucgccgcgaccaagauguccgagugcgugcugggccagagcaagcgggucgacuucugcgggaagggcuaccaccugauguccuucccccagagcgcgccccacggggugguguuccuccacgucacguacgugcccgcccaggagaagaacuucaccaccgccccggccaucugccacgacggcaaggcccacuucccccgcgagggggucuucguguccaacggcacccacugguucgugacgcagcggaacuucuacgagccccagaucaucaccaccgacaacaccuucgucagcggcaacugcgacguggugaucgggaucgucaacaacacgguguacgacccccugcagccggagcuggacuccuucaaggaggagcucgacaaguacuucaagaaccacaccagccccgacguggaccugggcgacaucuccgggaucaacgccagcgucgugaacauccagaaggagaucgaccgccugaacgagguggccaagaaccucaacgagucccugaucgaccugcaggagcucggcaaguacgagcaguacaucaaguggcccugguacaucuggcugggcuucaucgccgggcugaucgcgaucgucauggugaccaucaugcucugcugcaugaccagcugcugcuccugccugaagggcugcugcagcugcggguccugcugcaaguucgacgaggacgacagcgagccggugcugaagggcgucaagcuccacuacacgugaggacuagucccuguucccagagcccacuuuuuuuucuuuuuuugaaauaaaauagccugucuuucagaucuaaaaaaaaaaaaaaaaaaaaaaaaaaaaaaaaaaaaaaaaaaaaaaaaaaaaaaaaaaaaaaaaaaaaaaaaaaaaaaaaaaaaaaaaaaaaaaaaaaaa

SEQ ID NO: 24859 - RNA, 4070 nt, Artificial Sequence
  SARS-CoV-2/Wuhan/WIV05/2019__EPI_ISL_402128 spike protein mRNA gc (1-1273)(K986P_V987P_S477N_D614G)
aggagagucccgcagucggcguccagcggcucugcuuguucgugugugugucguugcaggccuuauucaagcuuaccauguucguguuccugguccuccugccccuggugagcucccagugcgugaaccucaccacccgcacgcagcugccgcccgccuacaccaacagcuucacccggggcgucuacuaccccgacaagguguuccgcuccagcgugcugcacuccacccaggaccucuuccugcccuucuucagcaacgucacgugguuccacgccauccacguguccgggaccaacggcaccaagcgguucgacaacccggugcugcccuucaacgacggggucuacuucgcgagcaccgagaaguccaacaucauccgcggcuggaucuucgggacgacccucgacagcaagacccagucccugcugaucgugaacaacgccaccaacguggucaucaaggugugcgaguuccaguucugcaacgaccccuuccucggcguguacuaccacaagaacaacaagagcuggauggaguccgaguuccgggucuacagcuccgccaacaacugcacguucgaguacgugagccagcccuuccugauggaccuggagggcaagcaggggaacuucaagaaccuccgcgaguucguguucaagaacaucgacggcuacuucaagaucuacuccaagcacaccccgaucaaccugguccgggaccugccccagggguucagcgcccucgagccccugguggaccugcccaucggcaucaacaucacccgcuuccagacccuccuggcccugcaccgguccuaccucacgccgggggacagcagcuccggcuggaccgcgggcgccgccgccuacuacgugggguaccugcagccccgcaccuuccugcucaaguacaacgagaacggcaccaucacggacgcggucgacugcgcccuggacccccugagcgagaccaagugcacccucaaguccuucaccguggagaaggggaucuaccagacgagcaacuuccgggugcagcccaccgaguccaucguccgcuucccgaacaucaccaaccugugccccuucggcgagguguucaacgccacccgguucgccagcgucuacgccuggaaccgcaagcggaucuccaacugcguggcggacuacagcgugcuguacaacuccgccagcuucuccacguucaagugcuacggcgucagccccaccaagcucaacgaccugugcuucaccaacguguacgccgacuccuucgugauccgcggggacgagguccggcagaucgcccccggccagaccgggaagaucgccgacuacaacuacaagcugccggacgacuucacgggcugcgugaucgcguggaacagcaacaaccucgacuccaaggucgggggcaacuacaacuaccuguaccgccuguuccgcaagagcaaccucaagcccuucgagcgggacaucuccaccgagaucuaccaggccggcaacacccccugcaacgggguggagggcuucaacugcuacuucccccugcagagcuacggguuccagccgaccaacggcgugggguaccagcccuaccggguggucgugcuguccuucgagcuccugcacgcccccgccacggugugcggccccaagaaguccaccaaccuggucaagaacaagugcgugaacuucaacuucaacggccucaccgggaccggcgugcugaccgagagcaacaagaaguuccugccguuccagcaguucgggcgcgacaucgccgacacgaccgacgcgguccgcgacccccagacccuggagauccucgacaucacccccugcagcuucggcggggugagcgugaucacgccgggcaccaacaccuccaaccaggucgccgugcuguaccagggcgugaacugcaccgagguccccguggccauccacgccgaccagcugacgcccaccuggcggguguacagcaccggguccaacgucuuccagacccgcgccggcugccucaucggggcggagcacgugaacaacagcuacgagugcgacauccccaucggcgccggcaucugcgccuccuaccagacgcagaccaacagcccgcggcgcgcccgguccguggcgagccaguccaucaucgccuacaccaugagccugggggccgagaacuccgucgccuacagcaacaacuccaucgccauccccaccaacuucacgaucagcgugaccaccgagauccugcccguguccaugaccaagacgagcgucgacugcaccauguacaucugcggcgacagcaccgagugcuccaaccuccugcugcaguacgggagcuucugcacccagcucaaccgcgcgcugacgggcaucgccguggagcaggacaagaacacccaggagguguucgcccaggucaagcagaucuacaagacgcccccgaucaaggacuucgggggcuucaacuucucccagauccugcccgaccccagcaagcccuccaagcggagcuucaucgaggaccuccuguucaacaaggugacccuggccgacgccggcuucaucaagcaguacggggacugccucggcgacaucgcggcccgcgaccugaucugcgcccagaaguucaacgggcugaccgugcucccgccccugcugaccgacgagaugaucgcccaguacaccuccgcccuccuggcgggcaccaucacgagcggguggaccuucggcgccggcgccgcccugcagauccccuucgcgaugcagauggccuaccgguucaacgggaucggcgucacccagaacgugcucuacgagaaccagaagcugaucgccaaccaguucaacuccgccaucgggaagauccaggacagccuguccagcaccgccuccgcgcucggcaagcugcaggacguggucaaccagaacgcccaggcccugaacacgcucgugaagcagcugagcuccaacuucggggccaucagcuccgugcugaacgacauccucagccgccuggacccgcccgaggccgagguccagaucgaccggcugaucaccggccgccuccagucccugcagaccuacgugacccagcagcugauccgggcggccgagauccgcgccagcgccaaccucgccgcgaccaagaugagcgagugcgugcugggccaguccaagcgggucgacuucugcgggaagggcuaccaccugaugagcuucccccaguccgcgccccacggggugguguuccuccacgucacguacgugcccgcccaggagaagaacuucaccaccgccccggccaucugccacgacggcaaggcccacuucccccgcgagggggucuucgugagcaacggcacccacugguucgugacgcagcggaacuucuacgagccccagaucaucaccaccgacaacaccuucgucuccggcaacugcgacguggugaucgggaucgucaacaacacgguguacgacccccugcagccggagcuggacagcuucaaggaggagcucgacaaguacuucaagaaccacaccucccccgacguggaccugggcgacaucagcgggaucaacgccuccgucgugaacauccagaaggagaucgaccgccugaacgagguggccaagaaccucaacgagagccugaucgaccugcaggagcucggcaaguacgagcaguacaucaaguggcccugguacaucuggcugggcuucaucgccgggcugaucgcgaucgucauggugaccaucaugcucugcugcaugaccuccugcugcagcugccugaagggcugcugcuccugcgggagcugcugcaaguucgacgaggacgacuccgagccggugcugaagggcgucaagcuccacuacacgugaggacuagucccuguucccagagcccacuuuuuuuucuuuuuuugaaauaaaauagccugucuuucagaucuaaaaaaaaaaaaaaaaaaaaaaaaaaaaaaaaaaaaaaaaaaaaaaaaaaaaaaaaaaaaaaaaaaaaaaaaaaaaaaaaaaaaaaaaaaaaaaaaaaaa

SEQ ID NO: 24860 - RNA, 4070 nt, Artificial Sequence
  SARS-CoV-2/Wuhan/WIV05/2019__EPI_ISL_402128 spike protein mRNA gc (1-1273)(K986P_V987P_N501Y_D614G)
aggagagucccgcagucggcguccagcggcucugcuuguucgugugugugucguugcaggccuuauucaagcuuaccauguucguguuccugguccuccugccccuggugagcucccagugcgugaaccucaccacccgcacgcagcugccgcccgccuacaccaacagcuucacccggggcgucuacuaccccgacaagguguuccgcuccagcgugcugcacuccacccaggaccucuuccugcccuucuucagcaacgucacgugguuccacgccauccacguguccgggaccaacggcaccaagcgguucgacaacccggugcugcccuucaacgacggggucuacuucgcgagcaccgagaaguccaacaucauccgcggcuggaucuucgggacgacccucgacagcaagacccagucccugcugaucgugaacaacgccaccaacguggucaucaaggugugcgaguuccaguucugcaacgaccccuuccucggcguguacuaccacaagaacaacaagagcuggauggaguccgaguuccgggucuacagcuccgccaacaacugcacguucgaguacgugagccagcccuuccugauggaccuggagggcaagcaggggaacuucaagaaccuccgcgaguucguguucaagaacaucgacggcuacuucaagaucuacuccaagcacaccccgaucaaccugguccgggaccugccccagggguucagcgcccucgagccccugguggaccugcccaucggcaucaacaucacccgcuuccagacccuccuggcccugcaccgguccuaccucacgccgggggacagcagcuccggcuggaccgcgggcgccgccgccuacuacgugggguaccugcagccccgcaccuuccugcucaaguacaacgagaacggcaccaucacggacgcggucgacugcgcccuggacccccugagcgagaccaagugcacccucaaguccuucaccguggagaaggggaucuaccagacgagcaacuuccgggugcagcccaccgaguccaucguccgcuucccgaacaucaccaaccugugccccuucggcgagguguucaacgccacccgguucgccagcgucuacgccuggaaccgcaagcggaucuccaacugcguggcggacuacagcgugcuguacaacuccgccagcuucuccacguucaagugcuacggcgucagccccaccaagcucaacgaccugugcuucaccaacguguacgccgacuccuucgugauccgcggggacgagguccggcagaucgcccccggccagaccgggaagaucgccgacuacaacuacaagcugccggacgacuucacgggcugcgugaucgcguggaacagcaacaaccucgacuccaaggucgggggcaacuacaacuaccuguaccgccuguuccgcaagagcaaccucaagcccuucgagcgggacaucuccaccgagaucuaccaggccggcagcacccccugcaacgggguggagggcuucaacugcuacuucccccugcaguccuacggguuccagccgaccuacggcgugggguaccagcccuaccggguggucgugcugagcuucgagcuccugcacgcccccgccacggugugcggccccaagaaguccaccaaccuggucaagaacaagugcgugaacuucaacuucaacggccucaccgggaccggcgugcugaccgagagcaacaagaaguuccugccguuccagcaguucgggcgcgacaucgccgacacgaccgacgcgguccgcgacccccagacccuggagauccucgacaucacccccugcagcuucggcgggguguccgugaucacgccgggcaccaacaccagcaaccaggucgccgugcuguaccagggcgugaacugcaccgagguccccguggccauccacgccgaccagcugacgcccaccuggcggguguacuccaccgggagcaacgucuuccagacccgcgccggcugccucaucggggcggagcacgugaacaacuccuacgagugcgacauccccaucggcgccggcaucugcgccagcuaccagacgcagaccaacuccccgcggcgcgcccggagcguggcgucccagagcaucaucgccuacaccaugucccugggggccgagaacagcgucgccuacuccaacaacagcaucgccauccccaccaacuucacgaucuccgugaccaccgagauccugcccgugagcaugaccaagacgagcgucgacugcaccauguacaucugcggcgacuccaccgagugcagcaaccuccugcugcaguacggguccuucugcacccagcucaaccgcgcgcugacgggcaucgccguggagcaggacaagaacacccaggagguguucgcccaggucaagcagaucuacaagacgcccccgaucaaggacuucgggggcuucaacuucagccagauccugcccgaccccuccaagcccagcaagcgguccuucaucgaggaccuccuguucaacaaggugacccuggccgacgccggcuucaucaagcaguacggggacugccucggcgacaucgcggcccgcgaccugaucugcgcccagaaguucaacgggcugaccgugcucccgccccugcugaccgacgagaugaucgcccaguacaccagcgcccuccuggcgggcaccaucacguccggguggaccuucggcgccggcgccgcccugcagauccccuucgcgaugcagauggccuaccgguucaacgggaucggcgucacccagaacgugcucuacgagaaccagaagcugaucgccaaccaguucaacagcgccaucgggaagauccaggacucccugagcuccaccgccagcgcgcucggcaagcugcaggacguggucaaccagaacgcccaggcccugaacacgcucgugaagcagcuguccagcaacuucggggccaucuccagcgugcugaacgacauccucucccgccuggacccgcccgaggccgagguccagaucgaccggcugaucaccggccgccuccagagccugcagaccuacgugacccagcagcugauccgggcggccgagauccgcgccagcgccaaccucgccgcgaccaagauguccgagugcgugcugggccagagcaagcgggucgacuucugcgggaagggcuaccaccugauguccuucccccagagcgcgccccacggggugguguuccuccacgucacguacgugcccgcccaggagaagaacuucaccaccgccccggccaucugccacgacggcaaggcccacuucccccgcgagggggucuucguguccaacggcacccacugguucgugacgcagcggaacuucuacgagccccagaucaucaccaccgacaacaccuucgucagcggcaacugcgacguggugaucgggaucgucaacaacacgguguacgacccccugcagccggagcuggacuccuucaaggaggagcucgacaaguacuucaagaaccacaccagccccgacguggaccugggcgacaucuccgggaucaacgccagcgucgugaacauccagaaggagaucgaccgccugaacgagguggccaagaaccucaacgagucccugaucgaccugcaggagcucggcaaguacgagcaguacaucaaguggcccugguacaucuggcugggcuucaucgccgggcugaucgcgaucgucauggugaccaucaugcucugcugcaugaccagcugcugcuccugccugaagggcugcugcagcugcggguccugcugcaaguucgacgaggacgacagcgagccggugcugaagggcgucaagcuccacuacacgugaggacuagucccuguucccagagcccacuuuuuuuucuuuuuuugaaauaaaauagccugucuuucagaucuaaaaaaaaaaaaaaaaaaaaaaaaaaaaaaaaaaaaaaaaaaaaaaaaaaaaaaaaaaaaaaaaaaaaaaaaaaaaaaaaaaaaaaaaaaaaaaaaaaaa

SEQ ID NO: 24861 - RNA, 4064 nt, Artificial Sequence
  SARS-CoV-2/Wuhan/WIV05/2019__EPI_ISL_402128 spike protein mRNA gc (1-1273)(K986P_V987P_H69del_V70del_D614G)
aggagagucccgcagucggcguccagcggcucugcuuguucgugugugugucguugcaggccuuauucaagcuuaccauguucguguuccugguccuccugccccuggugagcucccagugcgugaaccucaccacccgcacgcagcugccgcccgccuacaccaacagcuucacccggggcgucuacuaccccgacaagguguuccgcuccagcgugcugcacuccacccaggaccucuuccugcccuucuucagcaacgucacgugguuccacgccaucuccgggaccaacggcaccaagcgguucgacaacccggugcugcccuucaacgacgggguguacuucgcgagcaccgagaaguccaacaucauccgcggcuggaucuucgggacgacccucgacagcaagacccagucccugcugaucgucaacaacgccaccaacguggugaucaaggucugcgaguuccaguucugcaacgaccccuuccucggcguguacuaccacaagaacaacaagagcuggauggaguccgaguuccggguguacagcuccgccaacaacugcacguucgaguacgucagccagcccuuccugauggaccuggagggcaagcaggggaacuucaagaaccuccgcgaguucguguucaagaacaucgacggcuacuucaagaucuacuccaagcacaccccgaucaaccuggugcgggaccugccccagggguucagcgcccucgagccccuggucgaccugcccaucggcaucaacaucacccgcuuccagacccuccuggcccugcaccgguccuaccucacgccgggggacagcagcuccggcuggaccgcgggcgccgccgccuacuacgugggguaccugcagccccgcaccuuccugcucaaguacaacgagaacggcaccaucacggacgcgguggacugcgcccuggacccccugagcgagaccaagugcacccucaaguccuucaccgucgagaaggggaucuaccagacgagcaacuuccgggugcagcccaccgaguccaucgugcgcuucccgaacaucaccaaccugugccccuucggcgaggucuucaacgccacccgguucgccagcguguacgccuggaaccgcaagcggaucuccaacugcgucgcggacuacagcgugcuguacaacuccgccagcuucuccacguucaagugcuacggcgugagccccaccaagcucaacgaccugugcuucaccaacgucuacgccgacuccuucgugauccgcggggacgaggugcggcagaucgcccccggccagaccgggaagaucgccgacuacaacuacaagcugccggacgacuucacgggcugcgucaucgcguggaacagcaacaaccucgacuccaaggucgggggcaacuacaacuaccuguaccgccuguuccgcaagagcaaccucaagcccuucgagcgggacaucuccaccgagaucuaccaggccggcagcacccccugcaacgggguggagggcuucaacugcuacuucccccugcaguccuacggguuccagccgaccaacggcgugggguaccagcccuaccggguggugguccugagcuucgagcuccugcacgcccccgccacggugugcggccccaagaaguccaccaaccuggugaagaacaagugcgucaacuucaacuucaacggccucaccgggaccggcgugcugaccgagagcaacaagaaguuccugccguuccagcaguucgggcgcgacaucgccgacacgaccgacgcggugcgcgacccccagacccuggagauccucgacaucacccccugcagcuucggcggggucuccgugaucacgccgggcaccaacaccagcaaccagguggccguccuguaccagggcgugaacugcaccgaggugcccgucgccauccacgccgaccagcugacgcccaccuggcggguguacuccaccgggagcaacguguuccagacccgcgccggcugccucaucggggcggagcacgucaacaacuccuacgagugcgacauccccaucggcgccggcaucugcgccagcuaccagacgcagaccaacuccccgcggcgcgcccggagcguggcgucccagagcaucaucgccuacaccaugucccugggggccgagaacagcguggccuacuccaacaacagcaucgccauccccaccaacuucacgaucuccgucaccaccgagauccugcccgugagcaugaccaagacgagcguggacugcaccauguacaucugcggcgacuccaccgagugcagcaaccuccugcugcaguacggguccuucugcacccagcucaaccgcgcgcugacgggcaucgccgucgagcaggacaagaacacccaggagguguucgcccaggugaagcagaucuacaagacgcccccgaucaaggacuucgggggcuucaacuucagccagauccugcccgaccccuccaagcccagcaagcgguccuucaucgaggaccuccuguucaacaaggucacccuggccgacgccggcuucaucaagcaguacggggacugccucggcgacaucgcggcccgcgaccugaucugcgcccagaaguucaacgggcugaccgugcucccgccccugcugaccgacgagaugaucgcccaguacaccagcgcccuccuggcgggcaccaucacguccggguggaccuucggcgccggcgccgcccugcagauccccuucgcgaugcagauggccuaccgguucaacgggaucggcgugacccagaacguccucuacgagaaccagaagcugaucgccaaccaguucaacagcgccaucgggaagauccaggacucccugagcuccaccgccagcgcgcucggcaagcugcaggacguggugaaccagaacgcccaggcccugaacacgcucgucaagcagcuguccagcaacuucggggccaucuccagcgugcugaacgacauccucucccgccuggacccgcccgaggccgaggugcagaucgaccggcugaucaccggccgccuccagagccugcagaccuacgucacccagcagcugauccgggcggccgagauccgcgccagcgccaaccucgccgcgaccaagauguccgagugcgugcugggccagagcaagcggguggacuucugcgggaagggcuaccaccugauguccuucccccagagcgcgccccacggggucguguuccuccacgugacguacguccccgcccaggagaagaacuucaccaccgccccggccaucugccacgacggcaaggcccacuucccccgcgaggggguguucgucuccaacggcacccacugguucgugacgcagcggaacuucuacgagccccagaucaucaccaccgacaacaccuucgugagcggcaacugcgacgucgugaucgggaucgugaacaacacggucuacgacccccugcagccggagcuggacuccuucaaggaggagcucgacaaguacuucaagaaccacaccagccccgacguggaccugggcgacaucuccgggaucaacgccagcguggucaacauccagaaggagaucgaccgccugaacgagguggccaagaaccucaacgagucccugaucgaccugcaggagcucggcaaguacgagcaguacaucaaguggcccugguacaucuggcugggcuucaucgccgggcugaucgcgaucgugauggucaccaucaugcucugcugcaugaccagcugcugcuccugccugaagggcugcugcagcugcggguccugcugcaaguucgacgaggacgacagcgagccggugcugaagggcgugaagcuccacuacacgugaggacuagucccuguucccagagcccacuuuuuuuucuuuuuuugaaauaaaauagccugucuuucagaucuaaaaaaaaaaaaaaaaaaaaaaaaaaaaaaaaaaaaaaaaaaaaaaaaaaaaaaaaaaaaaaaaaaaaaaaaaaaaaaaaaaaaaaaaaaaaaaaaaaaa

SEQ ID NO: 24862 - RNA, 4070 nt, Artificial Sequence
  SARS-CoV-2/Wuhan/WIV05/2019__EPI_ISL_402128 spike protein mRNA gc (1-1273)(K986P_V987P_Y453F_D614G)
aggagagucccgcagucggcguccagcggcucugcuuguucgugugugugucguugcaggccuuauucaagcuuaccauguucguguuccugguccuccugccccuggugagcucccagugcgugaaccucaccacccgcacgcagcugccgcccgccuacaccaacagcuucacccggggcgucuacuaccccgacaagguguuccgcuccagcgugcugcacuccacccaggaccucuuccugcccuucuucagcaacgucacgugguuccacgccauccacguguccgggaccaacggcaccaagcgguucgacaacccggugcugcccuucaacgacggggucuacuucgcgagcaccgagaaguccaacaucauccgcggcuggaucuucgggacgacccucgacagcaagacccagucccugcugaucgugaacaacgccaccaacguggucaucaaggugugcgaguuccaguucugcaacgaccccuuccucggcguguacuaccacaagaacaacaagagcuggauggaguccgaguuccgggucuacagcuccgccaacaacugcacguucgaguacgugagccagcccuuccugauggaccuggagggcaagcaggggaacuucaagaaccuccgcgaguucguguucaagaacaucgacggcuacuucaagaucuacuccaagcacaccccgaucaaccugguccgggaccugccccagggguucagcgcccucgagccccugguggaccugcccaucggcaucaacaucacccgcuuccagacccuccuggcccugcaccgguccuaccucacgccgggggacagcagcuccggcuggaccgcgggcgccgccgccuacuacgugggguaccugcagccccgcaccuuccugcucaaguacaacgagaacggcaccaucacggacgcggucgacugcgcccuggacccccugagcgagaccaagugcacccucaaguccuucaccguggagaaggggaucuaccagacgagcaacuuccgggugcagcccaccgaguccaucguccgcuucccgaacaucaccaaccugugccccuucggcgagguguucaacgccacccgguucgccagcgucuacgccuggaaccgcaagcggaucuccaacugcguggcggacuacagcgugcuguacaacuccgccagcuucuccacguucaagugcuacggcgucagccccaccaagcucaacgaccugugcuucaccaacguguacgccgacuccuucgugauccgcggggacgagguccggcagaucgcccccggccagaccgggaagaucgccgacuacaacuacaagcugccggacgacuucacgggcugcgugaucgcguggaacagcaacaaccucgacuccaaggucgggggcaacuacaacuaccuguuccgccuguuccgcaagagcaaccucaagcccuucgagcgggacaucuccaccgagaucuaccaggccggcagcacccccugcaacgggguggagggcuucaacugcuacuucccccugcaguccuacggguuccagccgaccaacggcgugggguaccagcccuaccggguggucgugcugagcuucgagcuccugcacgcccccgccacggugugcggccccaagaaguccaccaaccuggucaagaacaagugcgugaacuucaacuucaacggccucaccgggaccggcgugcugaccgagagcaacaagaaguuccugccguuccagcaguucgggcgcgacaucgccgacacgaccgacgcgguccgcgacccccagacccuggagauccucgacaucacccccugcagcuucggcgggguguccgugaucacgccgggcaccaacaccagcaaccaggucgccgugcuguaccagggcgugaacugcaccgagguccccguggccauccacgccgaccagcugacgcccaccuggcggguguacuccaccgggagcaacgucuuccagacccgcgccggcugccucaucggggcggagcacgugaacaacuccuacgagugcgacauccccaucggcgccggcaucugcgccagcuaccagacgcagaccaacuccccgcggcgcgcccggagcguggcgucccagagcaucaucgccuacaccaugucccugggggccgagaacagcgucgccuacuccaacaacagcaucgccauccccaccaacuucacgaucuccgugaccaccgagauccugcccgugagcaugaccaagacgagcgucgacugcaccauguacaucugcggcgacuccaccgagugcagcaaccuccugcugcaguacggguccuucugcacccagcucaaccgcgcgcugacgggcaucgccguggagcaggacaagaacacccaggagguguucgcccaggucaagcagaucuacaagacgcccccgaucaaggacuucgggggcuucaacuucagccagauccugcccgaccccuccaagcccagcaagcgguccuucaucgaggaccuccuguucaacaaggugacccuggccgacgccggcuucaucaagcaguacggggacugccucggcgacaucgcggcccgcgaccugaucugcgcccagaaguucaacgggcugaccgugcucccgccccugcugaccgacgagaugaucgcccaguacaccagcgcccuccuggcgggcaccaucacguccggguggaccuucggcgccggcgccgcccugcagauccccuucgcgaugcagauggccuaccgguucaacgggaucggcgucacccagaacgugcucuacgagaaccagaagcugaucgccaaccaguucaacagcgccaucgggaagauccaggacucccugagcuccaccgccagcgcgcucggcaagcugcaggacguggucaaccagaacgcccaggcccugaacacgcucgugaagcagcuguccagcaacuucggggccaucuccagcgugcugaacgacauccucucccgccuggacccgcccgaggccgagguccagaucgaccggcugaucaccggccgccuccagagccugcagaccuacgugacccagcagcugauccgggcggccgagauccgcgccagcgccaaccucgccgcgaccaagauguccgagugcgugcugggccagagcaagcgggucgacuucugcgggaagggcuaccaccugauguccuucccccagagcgcgccccacggggugguguuccuccacgucacguacgugcccgcccaggagaagaacuucaccaccgccccggccaucugccacgacggcaaggcccacuucccccgcgagggggucuucguguccaacggcacccacugguucgugacgcagcggaacuucuacgagccccagaucaucaccaccgacaacaccuucgucagcggcaacugcgacguggugaucgggaucgucaacaacacgguguacgacccccugcagccggagcuggacuccuucaaggaggagcucgacaaguacuucaagaaccacaccagccccgacguggaccugggcgacaucuccgggaucaacgccagcgucgugaacauccagaaggagaucgaccgccugaacgagguggccaagaaccucaacgagucccugaucgaccugcaggagcucggcaaguacgagcaguacaucaaguggcccugguacaucuggcugggcuucaucgccgggcugaucgcgaucgucauggugaccaucaugcucugcugcaugaccagcugcugcuccugccugaagggcugcugcagcugcggguccugcugcaaguucgacgaggacgacagcgagccggugcugaagggcgucaagcuccacuacacgugaggacuagucccuguucccagagcccacuuuuuuuucuuuuuuugaaauaaaauagccugucuuucagaucuaaaaaaaaaaaaaaaaaaaaaaaaaaaaaaaaaaaaaaaaaaaaaaaaaaaaaaaaaaaaaaaaaaaaaaaaaaaaaaaaaaaaaaaaaaaaaaaaaaaa

SEQ ID NO: 24863 - RNA, 4070 nt, Artificial Sequence
  SARS-CoV-2/Wuhan/WIV05/2019__EPI_ISL_402128 spike protein mRNA gc (1-1273)(K986P_V987P_D614G_I692V)
aggagagucccgcagucggcguccagcggcucugcuuguucgugugugugucguugcaggccuuauucaagcuuaccauguucguguuccugguccuccugccccuggugagcucccagugcgugaaccucaccacccgcacgcagcugccgcccgccuacaccaacagcuucacccggggcgucuacuaccccgacaagguguuccgcuccagcgugcugcacuccacccaggaccucuuccugcccuucuucagcaacgucacgugguuccacgccauccacguguccgggaccaacggcaccaagcgguucgacaacccggugcugcccuucaacgacggggucuacuucgcgagcaccgagaaguccaacaucauccgcggcuggaucuucgggacgacccucgacagcaagacccagucccugcugaucgugaacaacgccaccaacguggucaucaaggugugcgaguuccaguucugcaacgaccccuuccucggcguguacuaccacaagaacaacaagagcuggauggaguccgaguuccgggucuacagcuccgccaacaacugcacguucgaguacgugagccagcccuuccugauggaccuggagggcaagcaggggaacuucaagaaccuccgcgaguucguguucaagaacaucgacggcuacuucaagaucuacuccaagcacaccccgaucaaccugguccgggaccugccccagggguucagcgcccucgagccccugguggaccugcccaucggcaucaacaucacccgcuuccagacccuccuggcccugcaccgguccuaccucacgccgggggacagcagcuccggcuggaccgcgggcgccgccgccuacuacgugggguaccugcagccccgcaccuuccugcucaaguacaacgagaacggcaccaucacggacgcggucgacugcgcccuggacccccugagcgagaccaagugcacccucaaguccuucaccguggagaaggggaucuaccagacgagcaacuuccgggugcagcccaccgaguccaucguccgcuucccgaacaucaccaaccugugccccuucggcgagguguucaacgccacccgguucgccagcgucuacgccuggaaccgcaagcggaucuccaacugcguggcggacuacagcgugcuguacaacuccgccagcuucuccacguucaagugcuacggcgucagccccaccaagcucaacgaccugugcuucaccaacguguacgccgacuccuucgugauccgcggggacgagguccggcagaucgcccccggccagaccgggaagaucgccgacuacaacuacaagcugccggacgacuucacgggcugcgugaucgcguggaacagcaacaaccucgacuccaaggucgggggcaacuacaacuaccuguaccgccuguuccgcaagagcaaccucaagcccuucgagcgggacaucuccaccgagaucuaccaggccggcagcacccccugcaacgggguggagggcuucaacugcuacuucccccugcaguccuacggguuccagccgaccaacggcgugggguaccagcccuaccggguggucgugcugagcuucgagcuccugcacgcccccgccacggugugcggccccaagaaguccaccaaccuggucaagaacaagugcgugaacuucaacuucaacggccucaccgggaccggcgugcugaccgagagcaacaagaaguuccugccguuccagcaguucgggcgcgacaucgccgacacgaccgacgcgguccgcgacccccagacccuggagauccucgacaucacccccugcagcuucggcgggguguccgugaucacgccgggcaccaacaccagcaaccaggucgccgugcuguaccagggcgugaacugcaccgagguccccguggccauccacgccgaccagcugacgcccaccuggcggguguacuccaccgggagcaacgucuuccagacccgcgccggcugccucaucggggcggagcacgugaacaacuccuacgagugcgacauccccaucggcgccggcaucugcgccagcuaccagacgcagaccaacuccccgcggcgcgcccggagcguggcgucccagagcgucaucgccuacaccaugucccugggggccgagaacagcguggccuacuccaacaacagcaucgccauccccaccaacuucacgaucuccgugaccaccgagauccugcccgucagcaugaccaagacgagcguggacugcaccauguacaucugcggcgacuccaccgagugcagcaaccuccugcugcaguacggguccuucugcacccagcucaaccgcgcgcugacgggcaucgccguggagcaggacaagaacacccaggaggucuucgcccaggugaagcagaucuacaagacgcccccgaucaaggacuucgggggcuucaacuucagccagauccugcccgaccccuccaagcccagcaagcgguccuucaucgaggaccuccuguucaacaaggugacccuggccgacgccggcuucaucaagcaguacggggacugccucggcgacaucgcggcccgcgaccugaucugcgcccagaaguucaacgggcugaccguccucccgccccugcugaccgacgagaugaucgcccaguacaccagcgcccuccuggcgggcaccaucacguccggguggaccuucggcgccggcgccgcccugcagauccccuucgcgaugcagauggccuaccgguucaacgggaucggcgugacccagaacgugcucuacgagaaccagaagcugaucgccaaccaguucaacagcgccaucgggaagauccaggacucccugagcuccaccgccagcgcgcucggcaagcugcaggacgucgugaaccagaacgcccaggcccugaacacgcucgugaagcagcuguccagcaacuucggggccaucuccagcguccugaacgacauccucucccgccuggacccgcccgaggccgaggugcagaucgaccggcugaucaccggccgccuccagagccugcagaccuacgugacccagcagcugauccgggcggccgagauccgcgccagcgccaaccucgccgcgaccaagauguccgagugcguccugggccagagcaagcggguggacuucugcgggaagggcuaccaccugauguccuucccccagagcgcgccccacgggguggucuuccuccacgugacguacguccccgcccaggagaagaacuucaccaccgccccggccaucugccacgacggcaaggcccacuucccccgcgaggggguguucguguccaacggcacccacugguucgucacgcagcggaacuucuacgagccccagaucaucaccaccgacaacaccuucgugagcggcaacugcgacguggucaucgggaucgugaacaacacgguguacgacccccugcagccggagcuggacuccuucaaggaggagcucgacaaguacuucaagaaccacaccagccccgacgucgaccugggcgacaucuccgggaucaacgccagcguggugaacauccagaaggagaucgaccgccugaacgaggucgccaagaaccucaacgagucccugaucgaccugcaggagcucggcaaguacgagcaguacaucaaguggcccugguacaucuggcugggcuucaucgccgggcugaucgcgaucgugauggugaccaucaugcucugcugcaugaccagcugcugcuccugccugaagggcugcugcagcugcggguccugcugcaaguucgacgaggacgacagcgagccgguccugaagggcgugaagcuccacuacacgugaggacuagucccuguucccagagcccacuuuuuuuucuuuuuuugaaauaaaauagccugucuuucagaucuaaaaaaaaaaaaaaaaaaaaaaaaaaaaaaaaaaaaaaaaaaaaaaaaaaaaaaaaaaaaaaaaaaaaaaaaaaaaaaaaaaaaaaaaaaaaaaaaaaaa

SEQ ID NO: 24864 - RNA, 4070 nt, Artificial Sequence
  SARS-CoV-2/Wuhan/WIV05/2019__EPI_ISL_402128 spike protein mRNA gc (1-1273)(K986P_V987P_D614G_M1229I)
aggagagucccgcagucggcguccagcggcucugcuuguucgugugugugucguugcaggccuuauucaagcuuaccauguucguguuccugguccuccugccccuggugagcucccagugcgugaaccucaccacccgcacgcagcugccgcccgccuacaccaacagcuucacccggggcgucuacuaccccgacaagguguuccgcuccagcgugcugcacuccacccaggaccucuuccugcccuucuucagcaacgucacgugguuccacgccauccacguguccgggaccaacggcaccaagcgguucgacaacccggugcugcccuucaacgacggggucuacuucgcgagcaccgagaaguccaacaucauccgcggcuggaucuucgggacgacccucgacagcaagacccagucccugcugaucgugaacaacgccaccaacguggucaucaaggugugcgaguuccaguucugcaacgaccccuuccucggcguguacuaccacaagaacaacaagagcuggauggaguccgaguuccgggucuacagcuccgccaacaacugcacguucgaguacgugagccagcccuuccugauggaccuggagggcaagcaggggaacuucaagaaccuccgcgaguucguguucaagaacaucgacggcuacuucaagaucuacuccaagcacaccccgaucaaccugguccgggaccugccccagggguucagcgcccucgagccccugguggaccugcccaucggcaucaacaucacccgcuuccagacccuccuggcccugcaccgguccuaccucacgccgggggacagcagcuccggcuggaccgcgggcgccgccgccuacuacgugggguaccugcagccccgcaccuuccugcucaaguacaacgagaacggcaccaucacggacgcggucgacugcgcccuggacccccugagcgagaccaagugcacccucaaguccuucaccguggagaaggggaucuaccagacgagcaacuuccgggugcagcccaccgaguccaucguccgcuucccgaacaucaccaaccugugccccuucggcgagguguucaacgccacccgguucgccagcgucuacgccuggaaccgcaagcggaucuccaacugcguggcggacuacagcgugcuguacaacuccgccagcuucuccacguucaagugcuacggcgucagccccaccaagcucaacgaccugugcuucaccaacguguacgccgacuccuucgugauccgcggggacgagguccggcagaucgcccccggccagaccgggaagaucgccgacuacaacuacaagcugccggacgacuucacgggcugcgugaucgcguggaacagcaacaaccucgacuccaaggucgggggcaacuacaacuaccuguaccgccuguuccgcaagagcaaccucaagcccuucgagcgggacaucuccaccgagaucuaccaggccggcagcacccccugcaacgggguggagggcuucaacugcuacuucccccugcaguccuacggguuccagccgaccaacggcgugggguaccagcccuaccggguggucgugcugagcuucgagcuccugcacgcccccgccacggugugcggccccaagaaguccaccaaccuggucaagaacaagugcgugaacuucaacuucaacggccucaccgggaccggcgugcugaccgagagcaacaagaaguuccugccguuccagcaguucgggcgcgacaucgccgacacgaccgacgcgguccgcgacccccagacccuggagauccucgacaucacccccugcagcuucggcgggguguccgugaucacgccgggcaccaacaccagcaaccaggucgccgugcuguaccagggcgugaacugcaccgagguccccguggccauccacgccgaccagcugacgcccaccuggcggguguacuccaccgggagcaacgucuuccagacccgcgccggcugccucaucggggcggagcacgugaacaacuccuacgagugcgacauccccaucggcgccggcaucugcgccagcuaccagacgcagaccaacuccccgcggcgcgcccggagcguggcgucccagagcaucaucgccuacaccaugucccugggggccgagaacagcgucgccuacuccaacaacagcaucgccauccccaccaacuucacgaucuccgugaccaccgagauccugcccgugagcaugaccaagacgagcgucgacugcaccauguacaucugcggcgacuccaccgagugcagcaaccuccugcugcaguacggguccuucugcacccagcucaaccgcgcgcugacgggcaucgccguggagcaggacaagaacacccaggagguguucgcccaggucaagcagaucuacaagacgcccccgaucaaggacuucgggggcuucaacuucagccagauccugcccgaccccuccaagcccagcaagcgguccuucaucgaggaccuccuguucaacaaggugacccuggccgacgccggcuucaucaagcaguacggggacugccucggcgacaucgcggcccgcgaccugaucugcgcccagaaguucaacgggcugaccgugcucccgccccugcugaccgacgagaugaucgcccaguacaccagcgcccuccuggcgggcaccaucacguccggguggaccuucggcgccggcgccgcccugcagauccccuucgcgaugcagauggccuaccgguucaacgggaucggcgucacccagaacgugcucuacgagaaccagaagcugaucgccaaccaguucaacagcgccaucgggaagauccaggacucccugagcuccaccgccagcgcgcucggcaagcugcaggacguggucaaccagaacgcccaggcccugaacacgcucgugaagcagcuguccagcaacuucggggccaucuccagcgugcugaacgacauccucucccgccuggacccgcccgaggccgagguccagaucgaccggcugaucaccggccgccuccagagccugcagaccuacgugacccagcagcugauccgggcggccgagauccgcgccagcgccaaccucgccgcgaccaagauguccgagugcgugcugggccagagcaagcgggucgacuucugcgggaagggcuaccaccugauguccuucccccagagcgcgccccacggggugguguuccuccacgucacguacgugcccgcccaggagaagaacuucaccaccgccccggccaucugccacgacggcaaggcccacuucccccgcgagggggucuucguguccaacggcacccacugguucgugacgcagcggaacuucuacgagccccagaucaucaccaccgacaacaccuucgucagcggcaacugcgacguggugaucgggaucgucaacaacacgguguacgacccccugcagccggagcuggacuccuucaaggaggagcucgacaaguacuucaagaaccacaccagccccgacguggaccugggcgacaucuccgggaucaacgccagcgucgugaacauccagaaggagaucgaccgccugaacgagguggccaagaaccucaacgagucccugaucgaccugcaggagcucggcaaguacgagcaguacaucaaguggcccugguacaucuggcugggcuucaucgccgggcugaucgcgaucgucaucgugaccaucaugcucugcugcaugaccagcugcugcuccugccugaagggcugcugcagcugcggguccugcugcaaguucgacgaggacgacagcgagccggugcugaagggcgucaagcuccacuacacgugaggacuagucccuguucccagagcccacuuuuuuuucuuuuuuugaaauaaaauagccugucuuucagaucuaaaaaaaaaaaaaaaaaaaaaaaaaaaaaaaaaaaaaaaaaaaaaaaaaaaaaaaaaaaaaaaaaaaaaaaaaaaaaaaaaaaaaaaaaaaaaaaaaaaa

SEQ ID NO: 24865 - RNA, 4064 nt, Artificial Sequence
  SARS-CoV-2/Wuhan/WIV05/2019__EPI_ISL_402128 spike protein mRNA gc (1-1273)(K986P_V987P_H69del_V70del_A222V_Y453F_S477N_D614G_I692V)
aggagagucccgcagucggcguccagcggcucugcuuguucgugugugugucguugcaggccuuauucaagcuuaccauguucguguuccugguccuccugccccuggugagcucccagugcgugaaccucaccacccgcacgcagcugccgcccgccuacaccaacagcuucacccggggcgucuacuaccccgacaagguguuccgcuccagcgugcugcacuccacccaggaccucuuccugcccuucuucagcaacgucacgugguuccacgccaucuccgggaccaacggcaccaagcgguucgacaacccggugcugcccuucaacgacgggguguacuucgcgagcaccgagaaguccaacaucauccgcggcuggaucuucgggacgacccucgacagcaagacccagucccugcugaucgucaacaacgccaccaacguggugaucaaggucugcgaguuccaguucugcaacgaccccuuccucggcguguacuaccacaagaacaacaagagcuggauggaguccgaguuccggguguacagcuccgccaacaacugcacguucgaguacgucagccagcccuuccugauggaccuggagggcaagcaggggaacuucaagaaccuccgcgaguucguguucaagaacaucgacggcuacuucaagaucuacuccaagcacaccccgaucaaccuggugcgggaccugccccagggguucagcguccucgagccccugguggaccugcccaucggcaucaacaucacccgcuuccagacccuccuggcccugcaccgguccuaccucacgccgggggacagcagcuccggcuggaccgccggcgcggccgccuacuacgugggguaccugcagccccgcaccuuccugcucaaguacaacgagaacggcaccaucacggacgccgucgacugcgcgcuggacccccugagcgagaccaagugcacccucaaguccuucaccguggagaaggggaucuaccagacgagcaacuuccgggugcagcccaccgaguccaucguccgcuucccgaacaucaccaaccugugccccuucggcgagguguucaacgccacccgguucgccagcgucuacgccuggaaccgcaagcggaucuccaacugcguggccgacuacagcgugcuguacaacuccgcgagcuucuccacguucaagugcuacggcgucagccccaccaagcucaacgaccugugcuucaccaacguguacgccgacuccuucgugauccgcggggacgagguccggcagaucgcccccggccagaccgggaagaucgccgacuacaacuacaagcugccggacgacuucacgggcugcgugaucgccuggaacagcaacaaccucgacuccaaggucgggggcaacuacaacuaccuguuccgccuguuccgcaagagcaaccucaagcccuucgagcgggacaucuccaccgagaucuaccaggcgggcaacacccccugcaacgggguggagggcuucaacugcuacuucccccugcagagcuacggguuccagccgaccaacggcgugggguaccagcccuaccggguggucgugcuguccuucgagcuccugcacgcccccgccacggugugcggccccaagaaguccaccaaccuggucaagaacaagugcgugaacuucaacuucaacggccucaccgggaccggcgugcugaccgagagcaacaagaaguuccugccguuccagcaguucgggcgcgacaucgccgacacgaccgacgccguccgcgacccccagacccuggagauccucgacaucacccccugcagcuucggcggggugagcgugaucacgccgggcaccaacaccuccaaccaggucgcggugcuguaccagggcgugaacugcaccgagguccccguggccauccacgccgaccagcugacgcccaccuggcggguguacagcaccggguccaacgucuuccagacccgcgccggcugccucaucggggccgagcacgugaacaacagcuacgagugcgacauccccaucggcgcgggcaucugcgccuccuaccagacgcagaccaacagcccgcggcgcgcccgguccguggccagccaguccgucaucgcguacaccaugagccugggggccgagaacuccguggccuacagcaacaacuccaucgccauccccaccaacuucacgaucagcgugaccaccgagauccugcccgucuccaugaccaagacgagcguggacugcaccauguacaucugcggcgacagcaccgagugcuccaaccuccugcugcaguacgggagcuucugcacccagcucaaccgcgcccugacgggcaucgcgguggagcaggacaagaacacccaggaggucuucgcccaggugaagcagaucuacaagacgcccccgaucaaggacuucgggggcuucaacuucucccagauccugcccgaccccagcaagcccuccaagcggagcuucaucgaggaccuccuguucaacaaggugacccuggccgacgccggcuucaucaagcaguacggggacugccucggcgacaucgccgcgcgcgaccugaucugcgcccagaaguucaacgggcugaccguccucccgccccugcugaccgacgagaugaucgcccaguacaccuccgcccuccuggccggcaccaucacgagcggguggaccuucggcgcgggcgccgcccugcagauccccuucgccaugcagauggcguaccgguucaacgggaucggcgugacccagaacgugcucuacgagaaccagaagcugaucgccaaccaguucaacuccgccaucgggaagauccaggacagccuguccagcaccgccuccgcccucggcaagcugcaggacgucgugaaccagaacgcgcaggcccugaacacgcucgugaagcagcugagcuccaacuucggggccaucagcuccguccugaacgacauccucagccgccuggacccgcccgaggccgaggugcagaucgaccggcugaucaccggccgccuccagucccugcagaccuacgugacccagcagcugauccgggccgcggagauccgcgccagcgccaaccucgccgccaccaagaugagcgagugcguccugggccaguccaagcggguggacuucugcgggaagggcuaccaccugaugagcuucccccaguccgcgccccacgggguggucuuccuccacgugacguacguccccgcccaggagaagaacuucaccaccgccccggccaucugccacgacggcaaggcgcacuucccccgcgaggggguguucgugagcaacggcacccacugguucgucacgcagcggaacuucuacgagccccagaucaucaccaccgacaacaccuucguguccggcaacugcgacguggucaucgggaucgugaacaacacgguguacgacccccugcagccggagcuggacagcuucaaggaggagcucgacaaguacuucaagaaccacaccucccccgacgucgaccugggcgacaucagcgggaucaacgccuccguggugaacauccagaaggagaucgaccgccugaacgaggucgccaagaaccucaacgagagccugaucgaccugcaggagcucggcaaguacgagcaguacaucaaguggcccugguacaucuggcugggcuucaucgccgggcugaucgccaucgugauggugaccaucaugcucugcugcaugaccuccugcugcagcugccugaagggcugcugcuccugcgggagcugcugcaaguucgacgaggacgacuccgagccgguccugaagggcgugaagcuccacuacacgugaggacuagucccuguucccagagcccacuuuuuuuucuuuuuuugaaauaaaauagccugucuuucagaucuaaaaaaaaaaaaaaaaaaaaaaaaaaaaaaaaaaaaaaaaaaaaaaaaaaaaaaaaaaaaaaaaaaaaaaaaaaaaaaaaaaaaaaaaaaaaaaaaaaaa

SEQ ID NO: 24866 - RNA, 4064 nt, Artificial Sequence
  SARS-CoV-2/Wuhan/WIV05/2019__EPI_ISL_402128 spike protein mRNA gc (1-1273)(K986P_V987P_H69del_V70del_Y453F_D614G_I692V_M1229I)
aggagagucccgcagucggcguccagcggcucugcuuguucgugugugugucguugcaggccuuauucaagcuuaccauguucguguuccugguccuccugccccuggugagcucccagugcgugaaccucaccacccgcacgcagcugccgcccgccuacaccaacagcuucacccggggcgucuacuaccccgacaagguguuccgcuccagcgugcugcacuccacccaggaccucuuccugcccuucuucagcaacgucacgugguuccacgccaucuccgggaccaacggcaccaagcgguucgacaacccggugcugcccuucaacgacgggguguacuucgcgagcaccgagaaguccaacaucauccgcggcuggaucuucgggacgacccucgacagcaagacccagucccugcugaucgucaacaacgccaccaacguggugaucaaggucugcgaguuccaguucugcaacgaccccuuccucggcguguacuaccacaagaacaacaagagcuggauggaguccgaguuccggguguacagcuccgccaacaacugcacguucgaguacgucagccagcccuuccugauggaccuggagggcaagcaggggaacuucaagaaccuccgcgaguucguguucaagaacaucgacggcuacuucaagaucuacuccaagcacaccccgaucaaccuggugcgggaccugccccagggguucagcgcccucgagccccuggucgaccugcccaucggcaucaacaucacccgcuuccagacccuccuggcccugcaccgguccuaccucacgccgggggacagcagcuccggcuggaccgcgggcgccgccgccuacuacgugggguaccugcagccccgcaccuuccugcucaaguacaacgagaacggcaccaucacggacgcgguggacugcgcccuggacccccugagcgagaccaagugcacccucaaguccuucaccgucgagaaggggaucuaccagacgagcaacuuccgggugcagcccaccgaguccaucgugcgcuucccgaacaucaccaaccugugccccuucggcgaggucuucaacgccacccgguucgccagcguguacgccuggaaccgcaagcggaucuccaacugcgucgcggacuacagcgugcuguacaacuccgccagcuucuccacguucaagugcuacggcgugagccccaccaagcucaacgaccugugcuucaccaacgucuacgccgacuccuucgugauccgcggggacgaggugcggcagaucgcccccggccagaccgggaagaucgccgacuacaacuacaagcugccggacgacuucacgggcugcgucaucgcguggaacagcaacaaccucgacuccaaggucgggggcaacuacaacuaccuguuccgccuguuccgcaagagcaaccucaagcccuucgagcgggacaucuccaccgagaucuaccaggccggcagcacccccugcaacgggguggagggcuucaacugcuacuucccccugcaguccuacggguuccagccgaccaacggcgugggguaccagcccuaccggguggugguccugagcuucgagcuccugcacgcccccgccacggugugcggccccaagaaguccaccaaccuggugaagaacaagugcgucaacuucaacuucaacggccucaccgggaccggcgugcugaccgagagcaacaagaaguuccugccguuccagcaguucgggcgcgacaucgccgacacgaccgacgcggugcgcgacccccagacccuggagauccucgacaucacccccugcagcuucggcggggucuccgugaucacgccgggcaccaacaccagcaaccagguggccguccuguaccagggcgugaacugcaccgaggugcccgucgccauccacgccgaccagcugacgcccaccuggcggguguacuccaccgggagcaacguguuccagacccgcgccggcugccucaucggggcggagcacgucaacaacuccuacgagugcgacauccccaucggcgccggcaucugcgccagcuaccagacgcagaccaacuccccgcggcgcgcccggagcguggcgucccagagcgugaucgccuacaccaugucccugggggccgagaacagcgucgccuacuccaacaacagcaucgccauccccaccaacuucacgaucuccgugaccaccgagauccugcccgugagcaugaccaagacgagcgucgacugcaccauguacaucugcggcgacuccaccgagugcagcaaccuccugcugcaguacggguccuucugcacccagcucaaccgcgcgcugacgggcaucgccguggagcaggacaagaacacccaggagguguucgcccaggucaagcagaucuacaagacgcccccgaucaaggacuucgggggcuucaacuucagccagauccugcccgaccccuccaagcccagcaagcgguccuucaucgaggaccuccuguucaacaaggugacccuggccgacgccggcuucaucaagcaguacggggacugccucggcgacaucgcggcccgcgaccugaucugcgcccagaaguucaacgggcugaccgugcucccgccccugcugaccgacgagaugaucgcccaguacaccagcgcccuccuggcgggcaccaucacguccggguggaccuucggcgccggcgccgcccugcagauccccuucgcgaugcagauggccuaccgguucaacgggaucggcgucacccagaacgugcucuacgagaaccagaagcugaucgccaaccaguucaacagcgccaucgggaagauccaggacucccugagcuccaccgccagcgcgcucggcaagcugcaggacguggucaaccagaacgcccaggcccugaacacgcucgugaagcagcuguccagcaacuucggggccaucuccagcgugcugaacgacauccucucccgccuggacccgcccgaggccgagguccagaucgaccggcugaucaccggccgccuccagagccugcagaccuacgugacccagcagcugauccgggcggccgagauccgcgccagcgccaaccucgccgcgaccaagauguccgagugcgugcugggccagagcaagcgggucgacuucugcgggaagggcuaccaccugauguccuucccccagagcgcgccccacggggugguguuccuccacgucacguacgugcccgcccaggagaagaacuucaccaccgccccggccaucugccacgacggcaaggcccacuucccccgcgagggggucuucguguccaacggcacccacugguucgugacgcagcggaacuucuacgagccccagaucaucaccaccgacaacaccuucgucagcggcaacugcgacguggugaucgggaucgucaacaacacgguguacgacccccugcagccggagcuggacuccuucaaggaggagcucgacaaguacuucaagaaccacaccagccccgacguggaccugggcgacaucuccgggaucaacgccagcgucgugaacauccagaaggagaucgaccgccugaacgagguggccaagaaccucaacgagucccugaucgaccugcaggagcucggcaaguacgagcaguacaucaaguggcccugguacaucuggcugggcuucaucgccgggcugaucgcgaucgucaucgugaccaucaugcucugcugcaugaccagcugcugcuccugccugaagggcugcugcagcugcggguccugcugcaaguucgacgaggacgacagcgagccggugcugaagggcgucaagcuccacuacacgugaggacuagucccuguucccagagcccacuuuuuuuucuuuuuuugaaauaaaauagccugucuuucagaucuaaaaaaaaaaaaaaaaaaaaaaaaaaaaaaaaaaaaaaaaaaaaaaaaaaaaaaaaaaaaaaaaaaaaaaaaaaaaaaaaaaaaaaaaaaaaaaaaaaaa

SEQ ID NO: 24867 - RNA, 4061 nt, Artificial Sequence
  SARS-CoV-2/Wuhan/WIV05/2019__EPI_ISL_402128 spike protein mRNA gc (1-1273)(K986P_V987P_K986P_V987P_H69del_V70del_Y144del_N501Y_A570 D_D614G_P681H_T716I_S982A_D1118H)
aggagagucccgcagucggcguccagcggcucugcuuguucgugugugugucguugcaggccuuauucaagcuuaccauguucguguuccugguccuccugccccuggugagcucccagugcgugaaccucaccacccgcacgcagcugccgcccgccuacaccaacagcuucacccggggcgucuacuaccccgacaagguguuccgcuccagcgugcugcacuccacccaggaccucuuccugcccuucuucagcaacgucacgugguuccacgccaucuccgggaccaacggcaccaagcgguucgacaacccggugcugcccuucaacgacgggguguacuucgcgagcaccgagaaguccaacaucauccgcggcuggaucuucgggacgacccucgacagcaagacccagucccugcugaucgucaacaacgccaccaacguggugaucaaggucugcgaguuccaguucugcaacgaccccuuccucggcguguaccacaagaacaacaagagcuggauggaguccgaguuccggguguacagcuccgccaacaacugcacguucgaguacgucagccagcccuuccugauggaccuggagggcaagcaggggaacuucaagaaccuccgcgaguucguguucaagaacaucgacggcuacuucaagaucuacuccaagcacaccccgaucaaccuggugcgggaccugccccagggguucagcgcccucgagccccuggucgaccugcccaucggcaucaacaucacccgcuuccagacccuccuggcccugcaccgguccuaccucacgccgggggacagcagcuccggcuggaccgcgggcgccgccgccuacuacgugggguaccugcagccccgcaccuuccugcucaaguacaacgagaacggcaccaucacggacgcgguggacugcgcccuggacccccugagcgagaccaagugcacccucaaguccuucaccgucgagaaggggaucuaccagacgagcaacuuccgggugcagcccaccgaguccaucgugcgcuucccgaacaucaccaaccugugccccuucggcgaggucuucaacgccacccgguucgccagcguguacgccuggaaccgcaagcggaucuccaacugcgucgcggacuacagcgugcuguacaacuccgccagcuucuccacguucaagugcuacggcgugagccccaccaagcucaacgaccugugcuucaccaacgucuacgccgacuccuucgugauccgcggggacgaggugcggcagaucgcccccggccagaccgggaagaucgccgacuacaacuacaagcugccggacgacuucacgggcugcgucaucgcguggaacagcaacaaccucgacuccaaggucgggggcaacuacaacuaccuguaccgccuguuccgcaagagcaaccucaagcccuucgagcgggacaucuccaccgagaucuaccaggccggcagcacccccugcaacgggguggagggcuucaacugcuacuucccccugcaguccuacggguuccagccgaccuacggcgugggguaccagcccuaccggguggugguccugagcuucgagcuccugcacgcccccgccacggugugcggccccaagaaguccaccaaccuggugaagaacaagugcgucaacuucaacuucaacggccucaccgggaccggcgugcugaccgagagcaacaagaaguuccugccguuccagcaguucgggcgcgacaucgacgacacgaccgacgccgugcgcgacccccagacccuggagauccucgacaucacccccugcagcuucggcggggucuccgugaucacgccgggcaccaacaccagcaaccagguggcgguccuguaccagggcgugaacugcaccgaggugcccgucgccauccacgccgaccagcugacgcccaccuggcggguguacuccaccgggagcaacguguuccagacccgcgccggcugccucaucggggccgagcacgucaacaacuccuacgagugcgacauccccaucggcgcgggcaucugcgccagcuaccagacgcagaccaacucccaccggcgcgcccggagcguggccucccagagcaucaucgcguacaccaugucccugggggccgagaacagcguggccuacuccaacaacagcaucgccaucccgaucaacuucaccaucuccgucacgaccgagauccugcccgugagcaugaccaagaccagcguggacugcacgauguacaucugcggcgacuccaccgagugcagcaaccuccugcugcaguacggguccuucugcacccagcucaaccgcgcccugaccggcaucgcggucgagcaggacaagaacacgcaggagguguucgcccaggugaagcagaucuacaagaccccgcccaucaaggacuucgggggcuucaacuucagccagauccugcccgaccccuccaagcccagcaagcgguccuucaucgaggaccuccuguucaacaaggucacccuggccgacgccggcuucaucaagcaguacggggacugccucggcgacaucgccgcgcgcgaccugaucugcgcccagaaguucaacgggcugaccgugcugcccccgcuccugacggacgagaugaucgcccaguacaccagcgcccuccuggccggcaccaucaccuccggguggacguucggcgcgggcgccgcccugcagauccccuucgccaugcagauggcguaccgguucaacgggaucggcgugacccagaacguccucuacgagaaccagaagcugaucgccaaccaguucaacagcgccaucgggaagauccaggacucccugagcuccaccgccagcgcccucggcaagcugcaggacguggugaaccagaacgcgcaggcccugaacacccucgucaagcagcuguccagcaacuucggggccaucuccagcgugcugaacgacauccucgcccgccuggacccgcccgaggccgaggugcagaucgaccggcugaucacgggccgccuccagucccugcagaccuacgucacccagcagcugauccgggcggccgagauccgcgccagcgccaaccucgccgcgaccaagaugagcgagugcgugcugggccaguccaagcggguggacuucugcgggaagggcuaccaccugaugagcuucccccaguccgcgccccacggggucguguuccuccacgugaccuacguccccgcccaggagaagaacuucacgaccgcccccgccaucugccacgacggcaaggcccacuucccgcgcgaggggguguucgucagcaacggcacccacugguucgugacccagcggaacuucuacgagccccagaucaucacgacccacaacaccuucguguccggcaacugcgacgucgugaucgggaucgugaacaacaccgucuacgacccccugcagcccgagcuggacagcuucaaggaggagcucgacaaguacuucaagaaccacacguccccggacguggaccugggcgacaucagcgggaucaacgccuccguggucaacauccagaaggagaucgaccgccugaacgagguggccaagaaccucaacgagagccugaucgaccugcaggagcucggcaaguacgagcaguacaucaaguggcccugguacaucuggcugggcuucaucgccgggcugaucgcgaucgugauggucaccaucaugcucugcugcaugaccuccugcugcagcugccugaagggcugcugcuccugcgggagcugcugcaaguucgacgaggacgacuccgagcccgugcugaagggcgugaagcuccacuacaccugaggacuagucccuguucccagagcccacuuuuuuuucuuuuuuugaaauaaaauagccugucuuucagaucuaaaaaaaaaaaaaaaaaaaaaaaaaaaaaaaaaaaaaaaaaaaaaaaaaaaaaaaaaaaaaaaaaaaaaaaaaaaaaaaaaaaaaaaaaaaaaaaaaaaa

SEQ ID NO: 24868 - RNA, 4070 nt, Artificial Sequence
  SARS-CoV-2/Wuhan/WIV05/2019__EPI_ISL_402128 spike protein mRNA gc (1-1273)(K986P_V987P_K986P_V987P_K417N_E484K_N501Y_D614G)
aggagagucccgcagucggcguccagcggcucugcuuguucgugugugugucguugcaggccuuauucaagcuuaccauguucguguuccugguccuccugccccuggugagcucccagugcgugaaccucaccacccgcacgcagcugccgcccgccuacaccaacagcuucacccggggcgucuacuaccccgacaagguguuccgcuccagcgugcugcacuccacccaggaccucuuccugcccuucuucagcaacgucacgugguuccacgccauccacguguccgggaccaacggcaccaagcgguucgacaacccggugcugcccuucaacgacggggucuacuucgcgagcaccgagaaguccaacaucauccgcggcuggaucuucgggacgacccucgacagcaagacccagucccugcugaucgugaacaacgccaccaacguggucaucaaggugugcgaguuccaguucugcaacgaccccuuccucggcguguacuaccacaagaacaacaagagcuggauggaguccgaguuccgggucuacagcuccgccaacaacugcacguucgaguacgugagccagcccuuccugauggaccuggagggcaagcaggggaacuucaagaaccuccgcgaguucguguucaagaacaucgacggcuacuucaagaucuacuccaagcacaccccgaucaaccugguccgggaccugccccagggguucagcgcccucgagccccugguggaccugcccaucggcaucaacaucacccgcuuccagacccuccuggcccugcaccgguccuaccucacgccgggggacagcagcuccggcuggaccgcgggcgccgccgccuacuacgugggguaccugcagccccgcaccuuccugcucaaguacaacgagaacggcaccaucacggacgcggucgacugcgcccuggacccccugagcgagaccaagugcacccucaaguccuucaccguggagaaggggaucuaccagacgagcaacuuccgggugcagcccaccgaguccaucguccgcuucccgaacaucaccaaccugugccccuucggcgagguguucaacgccacccgguucgccagcgucuacgccuggaaccgcaagcggaucuccaacugcguggcggacuacagcgugcuguacaacuccgccagcuucuccacguucaagugcuacggcgucagccccaccaagcucaacgaccugugcuucaccaacguguacgccgacuccuucgugauccgcggggacgagguccggcagaucgcccccggccagaccgggaacaucgccgacuacaacuacaagcugccggacgacuucacgggcugcgugaucgcguggaacagcaacaaccucgacuccaaggucgggggcaacuacaacuaccuguaccgccuguuccgcaagagcaaccucaagcccuucgagcgggacaucuccaccgagaucuaccaggccggcagcacccccugcaacggggugaagggcuucaacugcuacuucccccugcaguccuacggguuccagccgaccuacggcgugggguaccagcccuaccggguggucgugcugagcuucgagcuccugcacgcccccgccacggugugcggccccaagaaguccaccaaccuggucaagaacaagugcgugaacuucaacuucaacggccucaccgggaccggcgugcugaccgagagcaacaagaaguuccugccguuccagcaguucgggcgcgacaucgccgacacgaccgacgcgguccgcgacccccagacccuggagauccucgacaucacccccugcagcuucggcgggguguccgugaucacgccgggcaccaacaccagcaaccaggucgccgugcuguaccagggcgugaacugcaccgagguccccguggccauccacgccgaccagcugacgcccaccuggcggguguacuccaccgggagcaacgucuuccagacccgcgccggcugccucaucggggcggagcacgugaacaacuccuacgagugcgacauccccaucggcgccggcaucugcgccagcuaccagacgcagaccaacuccccgcggcgcgcccggagcguggcgucccagagcaucaucgccuacaccaugucccugggggccgagaacagcgucgccuacuccaacaacagcaucgccauccccaccaacuucacgaucuccgugaccaccgagauccugcccgugagcaugaccaagacgagcgucgacugcaccauguacaucugcggcgacuccaccgagugcagcaaccuccugcugcaguacggguccuucugcacccagcucaaccgcgcgcugacgggcaucgccguggagcaggacaagaacacccaggagguguucgcccaggucaagcagaucuacaagacgcccccgaucaaggacuucgggggcuucaacuucagccagauccugcccgaccccuccaagcccagcaagcgguccuucaucgaggaccuccuguucaacaaggugacccuggccgacgccggcuucaucaagcaguacggggacugccucggcgacaucgcggcccgcgaccugaucugcgcccagaaguucaacgggcugaccgugcucccgccccugcugaccgacgagaugaucgcccaguacaccagcgcccuccuggcgggcaccaucacguccggguggaccuucggcgccggcgccgcccugcagauccccuucgcgaugcagauggccuaccgguucaacgggaucggcgucacccagaacgugcucuacgagaaccagaagcugaucgccaaccaguucaacagcgccaucgggaagauccaggacucccugagcuccaccgccagcgcgcucggcaagcugcaggacguggucaaccagaacgcccaggcccugaacacgcucgugaagcagcuguccagcaacuucggggccaucuccagcgugcugaacgacauccucucccgccuggacccgcccgaggccgagguccagaucgaccggcugaucaccggccgccuccagagccugcagaccuacgugacccagcagcugauccgggcggccgagauccgcgccagcgccaaccucgccgcgaccaagauguccgagugcgugcugggccagagcaagcgggucgacuucugcgggaagggcuaccaccugauguccuucccccagagcgcgccccacggggugguguuccuccacgucacguacgugcccgcccaggagaagaacuucaccaccgccccggccaucugccacgacggcaaggcccacuucccccgcgagggggucuucguguccaacggcacccacugguucgugacgcagcggaacuucuacgagccccagaucaucaccaccgacaacaccuucgucagcggcaacugcgacguggugaucgggaucgucaacaacacgguguacgacccccugcagccggagcuggacuccuucaaggaggagcucgacaaguacuucaagaaccacaccagccccgacguggaccugggcgacaucuccgggaucaacgccagcgucgugaacauccagaaggagaucgaccgccugaacgagguggccaagaaccucaacgagucccugaucgaccugcaggagcucggcaaguacgagcaguacaucaaguggcccugguacaucuggcugggcuucaucgccgggcugaucgcgaucgucauggugaccaucaugcucugcugcaugaccagcugcugcuccugccugaagggcugcugcagcugcggguccugcugcaaguucgacgaggacgacagcgagccggugcugaagggcgucaagcuccacuacacgugaggacuagucccuguucccagagcccacuuuuuuuucuuuuuuugaaauaaaauagccugucuuucagaucuaaaaaaaaaaaaaaaaaaaaaaaaaaaaaaaaaaaaaaaaaaaaaaaaaaaaaaaaaaaaaaaaaaaaaaaaaaaaaaaaaaaaaaaaaaaaaaaaaaaa

SEQ ID NO: 24869 - RNA, 4061 nt, Artificial Sequence
  SARS-CoV-2/Wuhan/WIV05/2019__EPI_ISL_402128 spike protein mRNA gc (1-1273)(K986P_V987P_K986P_V987P_L18F_D80A_D215G_L242del_A243del_ L244del_R246I_K417N_E484K_N501Y_D614G_A701V)
aggagagucccgcagucggcguccagcggcucugcuuguucgugugugugucguugcaggccuuauucaagcuuaccauguucguguuccugguccuccugccccuggugagcucccagugcgugaacuucaccacccgcacgcagcucccgcccgccuacaccaacagcuucacccggggcgucuacuaccccgacaagguguuccgcuccagcgugcugcacuccacccaggaccuguuccuccccuucuucagcaacgucacgugguuccacgccauccacguguccgggaccaacggcaccaagcgguucgcgaacccggugcugcccuucaacgacggggucuacuucgccagcaccgagaaguccaacaucauccgcggcuggaucuucgggacgacccuggacagcaagacccagucccuccugaucgugaacaacgccaccaacguggucaucaaggugugcgaguuccaguucugcaacgaccccuuccugggcguguacuaccacaagaacaacaagagcuggauggaguccgaguuccgggucuacagcuccgccaacaacugcacguucgaguacgugagccagcccuuccucauggaccuggagggcaagcaggggaacuucaagaaccugcgcgaguucguguucaagaacaucgacggcuacuucaagaucuacuccaagcacaccccgaucaaccucguccgggggcugccccagggcuucagcgcccuggagccccucguggaccugcccaucgggaucaacaucacccgcuuccagacccugcacaucuccuaccucacgccgggcgacagcagcuccggcuggaccgcgggggccgccgccuacuacgugggcuaccugcagccccggaccuuccugcucaaguacaacgagaacgggaccaucacggacgcggucgacugcgcccuggacccccugagcgagaccaagugcacccucaaguccuucaccguggagaagggcaucuaccagacgagcaacuuccgcgugcagcccaccgaguccaucguccgguucccgaacaucaccaaccugugccccuucggcgagguguucaacgccacccgcuucgccagcgucuacgccuggaaccggaagcgcaucuccaacugcguggcggacuacagcgugcuguacaacuccgccagcuucuccacguucaagugcuacggggucagccccaccaagcucaacgaccugugcuucaccaacguguacgccgacuccuucgugauccggggcgacgagguccgccagaucgcccccgggcagaccggcaacaucgccgacuacaacuacaagcugccggacgacuucacggggugcgugaucgcguggaacagcaacaaccucgacuccaaggugggcggcaacuacaacuaccuguaccggcuguuccgcaagagcaaccucaagcccuucgagcgggacaucuccaccgagaucuaccaggccgggagcacccccugcaacggcgucaagggguucaacugcuacuucccccugcaguccuacggcuuccagccgaccuacggggugggcuaccagcccuaccgcguggucgugcugagcuucgagcuccugcacgcccccgccacggugugcggccccaagaaguccaccaaccuggucaagaacaagugcgugaacuucaacuucaacgggcucaccggcaccggggugcugaccgagagcaacaagaaguuccugccguuccagcaguucggccgggacaucgccgacacgaccgacgcgguccgcgacccccagacccucgagauccuggacaucacccccugcagcuucgggggcguguccgugaucacgccgggcaccaacaccagcaaccaggucgccgugcuguaccagggggugaacugcaccgagguccccguggccauccacgccgaccagcugacgcccaccuggcgcguguacuccaccggcagcaacgucuuccagacccgggccgggugccucaucggcgcggagcacgugaacaacuccuacgagugcgacauccccaucggcgccgggaucugcgccagcuaccagacgcagaccaacuccccgcgccgggcccgcagcguggcgucccagagcaucaucgccuacaccaugucccugggcgucgagaacagcguggccuacuccaacaacagcaucgccauccccaccaacuucacgaucuccgugaccaccgagauccugcccgucagcaugaccaagacgagcguggacugcaccauguacaucugcggggacuccaccgagugcagcaaccuccugcugcaguacggcuccuucugcacccagcucaaccgggcccugacggggaucgcgguggagcaggacaagaacacccaggaggucuucgcccaggugaagcagaucuacaagacgcccccgaucaaggacuucggcggcuucaacuucagccagauccugcccgaccccuccaagcccagcaagcgcuccuucaucgaggaccuccuguucaacaaggugacccuggccgacgccggguucaucaagcaguacggcgacugccucggggacaucgccgcgcgggaccugaucugcgcccagaaguucaacggccugaccguccucccgccccugcugaccgacgagaugaucgcccaguacaccagcgcccuccuggccgggaccaucacguccggcuggaccuucggcgcgggggccgcccugcagauccccuucgccaugcagauggcguaccgcuucaacggcaucggggugacccagaacgugcucuacgagaaccagaagcugaucgccaaccaguucaacagcgccaucggcaagauccaggacucccugagcuccaccgccagcgcccucgggaagcugcaggacgucgugaaccagaacgcgcaggcccugaacacgcucgugaagcagcuguccagcaacuucggcgccaucuccagcguccugaacgacauccucucccggcuggacccgcccgaggccgaggugcagaucgaccgccugaucaccggccggcuccagagccugcagaccuacgugacccagcagcugauccgcgccgcggagauccgggccagcgccaaccucgccgccaccaagauguccgagugcguccuggggcagagcaagcgcguggacuucugcggcaagggguaccaccugauguccuucccccagagcgcgccccacggcguggucuuccuccacgugacguacguccccgcccaggagaagaacuucaccaccgccccggccaucugccacgacgggaaggcgcacuucccccgggagggcguguucguguccaacggcacccacugguucgucacgcagcgcaacuucuacgagccccagaucaucaccaccgacaacaccuucgugagcgggaacugcgacguggucaucggcaucgugaacaacacgguguacgacccccugcagccggagcuggacuccuucaaggaggagcucgacaaguacuucaagaaccacaccagccccgacgucgaccugggggacaucuccggcaucaacgccagcguggugaacauccagaaggagaucgaccggcugaacgaggucgccaagaaccucaacgagucccugaucgaccugcaggagcucggcaaguacgagcaguacaucaaguggcccugguacaucuggcugggguucaucgccggccugaucgccaucgugauggugaccaucaugcucugcugcaugaccagcugcugcuccugccugaaggggugcugcagcugcggcuccugcugcaaguucgacgaggacgacagcgagccgguccugaagggggugaagcuccacuacacgugaggacuagucccuguucccagagcccacuuuuuuuucuuuuuuugaaauaaaauagccugucuuucagaucuaaaaaaaaaaaaaaaaaaaaaaaaaaaaaaaaaaaaaaaaaaaaaaaaaaaaaaaaaaaaaaaaaaaaaaaaaaaaaaaaaaaaaaaaaaaaaaaaaaaa

SEQ ID NO: 24870 - RNA, 4070 nt, Artificial Sequence
  SARS-CoV-2/Wuhan/WIV05/2019__EPI_ISL_402128 spike protein mRNA gc (1-1273)(K986P_V987P_K986P_V987P_E484K_D614G)
aggagagucccgcagucggcguccagcggcucugcuuguucgugugugugucguugcaggccuuauucaagcuuaccauguucguguuccugguccuccugccccuggugagcucccagugcgugaaccucaccacccgcacgcagcugccgcccgccuacaccaacagcuucacccggggcgucuacuaccccgacaagguguuccgcuccagcgugcugcacuccacccaggaccucuuccugcccuucuucagcaacgucacgugguuccacgccauccacguguccgggaccaacggcaccaagcgguucgacaacccggugcugcccuucaacgacggggucuacuucgcgagcaccgagaaguccaacaucauccgcggcuggaucuucgggacgacccucgacagcaagacccagucccugcugaucgugaacaacgccaccaacguggucaucaaggugugcgaguuccaguucugcaacgaccccuuccucggcguguacuaccacaagaacaacaagagcuggauggaguccgaguuccgggucuacagcuccgccaacaacugcacguucgaguacgugagccagcccuuccugauggaccuggagggcaagcaggggaacuucaagaaccuccgcgaguucguguucaagaacaucgacggcuacuucaagaucuacuccaagcacaccccgaucaaccugguccgggaccugccccagggguucagcgcccucgagccccugguggaccugcccaucggcaucaacaucacccgcuuccagacccuccuggcccugcaccgguccuaccucacgccgggggacagcagcuccggcuggaccgcgggcgccgccgccuacuacgugggguaccugcagccccgcaccuuccugcucaaguacaacgagaacggcaccaucacggacgcggucgacugcgcccuggacccccugagcgagaccaagugcacccucaaguccuucaccguggagaaggggaucuaccagacgagcaacuuccgggugcagcccaccgaguccaucguccgcuucccgaacaucaccaaccugugccccuucggcgagguguucaacgccacccgguucgccagcgucuacgccuggaaccgcaagcggaucuccaacugcguggcggacuacagcgugcuguacaacuccgccagcuucuccacguucaagugcuacggcgucagccccaccaagcucaacgaccugugcuucaccaacguguacgccgacuccuucgugauccgcggggacgagguccggcagaucgcccccggccagaccgggaagaucgccgacuacaacuacaagcugccggacgacuucacgggcugcgugaucgcguggaacagcaacaaccucgacuccaaggucgggggcaacuacaacuaccuguaccgccuguuccgcaagagcaaccucaagcccuucgagcgggacaucuccaccgagaucuaccaggccggcagcacccccugcaacggggugaagggcuucaacugcuacuucccccugcaguccuacggguuccagccgaccaacggcgugggguaccagcccuaccggguggucgugcugagcuucgagcuccugcacgcccccgccacggugugcggccccaagaaguccaccaaccuggucaagaacaagugcgugaacuucaacuucaacggccucaccgggaccggcgugcugaccgagagcaacaagaaguuccugccguuccagcaguucgggcgcgacaucgccgacacgaccgacgcgguccgcgacccccagacccuggagauccucgacaucacccccugcagcuucggcgggguguccgugaucacgccgggcaccaacaccagcaaccaggucgccgugcuguaccagggcgugaacugcaccgagguccccguggccauccacgccgaccagcugacgcccaccuggcggguguacuccaccgggagcaacgucuuccagacccgcgccggcugccucaucggggcggagcacgugaacaacuccuacgagugcgacauccccaucggcgccggcaucugcgccagcuaccagacgcagaccaacuccccgcggcgcgcccggagcguggcgucccagagcaucaucgccuacaccaugucccugggggccgagaacagcgucgccuacuccaacaacagcaucgccauccccaccaacuucacgaucuccgugaccaccgagauccugcccgugagcaugaccaagacgagcgucgacugcaccauguacaucugcggcgacuccaccgagugcagcaaccuccugcugcaguacggguccuucugcacccagcucaaccgcgcgcugacgggcaucgccguggagcaggacaagaacacccaggagguguucgcccaggucaagcagaucuacaagacgcccccgaucaaggacuucgggggcuucaacuucagccagauccugcccgaccccuccaagcccagcaagcgguccuucaucgaggaccuccuguucaacaaggugacccuggccgacgccggcuucaucaagcaguacggggacugccucggcgacaucgcggcccgcgaccugaucugcgcccagaaguucaacgggcugaccgugcucccgccccugcugaccgacgagaugaucgcccaguacaccagcgcccuccuggcgggcaccaucacguccggguggaccuucggcgccggcgccgcccugcagauccccuucgcgaugcagauggccuaccgguucaacgggaucggcgucacccagaacgugcucuacgagaaccagaagcugaucgccaaccaguucaacagcgccaucgggaagauccaggacucccugagcuccaccgccagcgcgcucggcaagcugcaggacguggucaaccagaacgcccaggcccugaacacgcucgugaagcagcuguccagcaacuucggggccaucuccagcgugcugaacgacauccucucccgccuggacccgcccgaggccgagguccagaucgaccggcugaucaccggccgccuccagagccugcagaccuacgugacccagcagcugauccgggcggccgagauccgcgccagcgccaaccucgccgcgaccaagauguccgagugcgugcugggccagagcaagcgggucgacuucugcgggaagggcuaccaccugauguccuucccccagagcgcgccccacggggugguguuccuccacgucacguacgugcccgcccaggagaagaacuucaccaccgccccggccaucugccacgacggcaaggcccacuucccccgcgagggggucuucguguccaacggcacccacugguucgugacgcagcggaacuucuacgagccccagaucaucaccaccgacaacaccuucgucagcggcaacugcgacguggugaucgggaucgucaacaacacgguguacgacccccugcagccggagcuggacuccuucaaggaggagcucgacaaguacuucaagaaccacaccagccccgacguggaccugggcgacaucuccgggaucaacgccagcgucgugaacauccagaaggagaucgaccgccugaacgagguggccaagaaccucaacgagucccugaucgaccugcaggagcucggcaaguacgagcaguacaucaaguggcccugguacaucuggcugggcuucaucgccgggcugaucgcgaucgucauggugaccaucaugcucugcugcaugaccagcugcugcuccugccugaagggcugcugcagcugcggguccugcugcaaguucgacgaggacgacagcgagccggugcugaagggcgucaagcuccacuacacgugaggacuagucccuguucccagagcccacuuuuuuuucuuuuuuugaaauaaaauagccugucuuucagaucuaaaaaaaaaaaaaaaaaaaaaaaaaaaaaaaaaaaaaaaaaaaaaaaaaaaaaaaaaaaaaaaaaaaaaaaaaaaaaaaaaaaaaaaaaaaaaaaaaaaa

SEQ ID NO: 24871 - RNA, 4070 nt, Artificial Sequence
  SARS-CoV-2/Wuhan/WIV05/2019__EPI_ISL_402128 spike protein mRNA gc (1-1273)(K986P_V987P_K986P_V987P_L18F_T20N_P26S_D138Y_R190S_K417T _E484K_N501Y_D614G_H655Y_T1027I)
aggagagucccgcagucggcguccagcggcucugcuuguucgugugugugucguugcaggccuuauucaagcuuaccauguucguguuccugguccuccugccccuggugagcucccagugcgugaacuucaccaaccgcacccagcucccgagcgccuacacgaacuccuucacccggggcgucuacuaccccgacaagguguuccgcagcuccgugcugcacagcacccaggaccuguuccuccccuucuucuccaacgucaccugguuccacgccauccacgugagcgggacgaacggcaccaagcgguucgacaaccccgugcugccguucaacgacggggucuacuucgcguccaccgagaaguccaacaucauccgcggcuggaucuucgggaccacgcuggacuccaagacccagagccuccugaucgugaacaacgccaccaacguggucaucaaggugugcgaguuccaguucugcaacuaccccuuccugggcguguacuaccacaagaacaacaaguccuggauggagagcgaguuccgggucuacuccagcgccaacaacugcaccuucgaguacgugucccagcccuuccucauggaccuggagggcaagcaggggaacuucaagaaccugagcgaguucguguucaagaacaucgacggcuacuucaagaucuacuccaagcacacgcccaucaaccucguccgcgaccugccgcagggguucagcgcccuggagccccucguggaccugcccaucggcaucaacaucacccgguuccagacccugcucgcccugcaccgcagcuaccugacccccggggacuccagcuccggcuggacggcgggcgccgccgccuacuacgugggguaccuccagccgcggaccuuccugcugaaguacaacgagaacggcaccaucaccgacgcggucgacugcgcccucgacccccugagcgagacgaagugcacccugaaguccuucaccguggagaaggggaucuaccagaccagcaacuuccgcgugcagcccacggaguccaucguccgguuccccaacaucaccaaccucugcccguucggcgagguguucaacgccacccgcuucgccagcgucuacgccuggaaccggaagcgcaucuccaacugcguggcggacuacagcgugcuguacaacuccgccagcuucuccaccuucaagugcuacggcgucagccccacgaagcugaacgaccucugcuucaccaacguguacgccgacuccuucgugauccgcggggacgagguccggcagaucgcccccggccagaccgggaccaucgccgacuacaacuacaagcugcccgacgacuucacgggcugcgugaucgcguggaacagcaacaaccuggacuccaaggucgggggcaacuacaacuaccucuaccggcuguuccgcaagagcaaccugaagccguucgagcgggacaucuccaccgagaucuaccaggccggcagcacccccugcaacggggugaagggcuucaacugcuacuucccccuccagagcuacggguuccagcccaccuacggcgugggguaccagccguaccgcguggucgugcuguccuucgagcugcuccacgcccccgccacggugugcggccccaagaaguccaccaaccuggucaagaacaagugcgugaacuucaacuucaacggccugaccgggaccggcgugcucaccgagagcaacaagaaguuccugcccuuccagcaguucgggcgggacaucgccgacacgaccgacgcgguccgcgacccgcagacccuggagauccuggacaucacccccugcagcuucggcgggguguccgugaucacgcccggcaccaacaccagcaaccaggucgccgugcucuaccagggcgugaacugcaccgaggucccgguggccauccacgccgaccagcugacgcccaccuggcgcguguacuccaccgggagcaacgucuuccagacccgggccggcugccugaucggggcggaguacgugaacaacuccuacgagugcgacauccccaucggcgccggcaucugcgccagcuaccagacgcagaccaacagcccccgccgggcccgcagcguggcgucccagagcaucaucgccuacaccaugucccucggggccgagaacagcgucgccuacuccaacaacagcaucgccaucccgaccaacuucacgaucagcgugaccaccgagauccugcccguguccaugaccaagacgagcgucgacugcaccauguacaucugcggcgacuccaccgagugcagcaaccugcuccugcaguacggguccuucugcacccagcugaaccgggcgcucacgggcaucgccguggagcaggacaagaacacccaggagguguucgcccaggucaagcagaucuacaagaccccgcccaucaaggacuucgggggcuucaacuucagccagauccugcccgaccccuccaagcccagcaagcgcuccuucaucgaggaccuccuguucaacaaggugacccuggccgacgccggcuucaucaagcaguacggggacugccugggcgacaucgcggcccgggaccucaucugcgcccagaaguucaacgggcugacggugcugcccccgcuccugaccgacgagaugaucgcccaguacaccagcgcccugcucgcgggcaccaucacguccggguggaccuucggcgccggcgccgcccugcagauccccuucgcgaugcagauggccuaccgcuucaacgggaucggcgucacccagaacgugcuguacgagaaccagaagcucaucgccaaccaguucaacagcgccaucgggaagauccaggacucccugagcuccaccgccagcgcgcugggcaagcuccaggacguggucaaccagaacgcccaggcccugaacacgcuggugaagcagcucuccagcaacuucggggccaucuccagcgugcugaacgacauccugagccggcucgacccgcccgaggccgagguccagaucgaccgccugaucaccggccggcugcagucccuccagaccuacgugacccagcagcugauccgcgcggccgagauccgggccagcgccaaccuggccgcgaucaagauguccgagugcgugcucggccagagcaagcgcgucgacuucugcgggaagggcuaccaccugauguccuucccccagagcgcgccccacggggugguguuccugcacgucaccuacgugcccgcccaggagaagaacuucacgaccgcccccgccaucugccacgacggcaaggcccacuucccgcgggagggggucuucguguccaacggcacccacugguucgugacccagcgcaacuucuacgagccccagaucaucacgaccgacaacaccuucgucagcggcaacugcgacguggugaucgggaucgucaacaacaccguguacgacccccuccagcccgagcuggacuccuucaaggaggagcuggacaaguacuucaagaaccacacgagcccggacguggaccucggcgacaucuccgggaucaacgccagcgucgugaacauccagaaggagaucgaccggcugaacgagguggccaagaaccugaacgagucccucaucgaccugcaggagcugggcaaguacgagcaguacaucaaguggcccugguacaucuggcucggcuucaucgccgggcugaucgcgaucgucauggugaccaucaugcugugcugcaugaccagcugcugcuccugccucaagggcugcugcagcugcggguccugcugcaaguucgacgaggacgacagcgagcccgugcugaagggcgucaagcugcacuacaccugaggacuagucccuguucccagagcccacuuuuuuuucuuuuuuugaaauaaaauagccugucuuucagaucuaaaaaaaaaaaaaaaaaaaaaaaaaaaaaaaaaaaaaaaaaaaaaaaaaaaaaaaaaaaaaaaaaaaaaaaaaaaaaaaaaaaaaaaaaaaaaaaaaaaa

SEQ ID NO: 24872 - RNA, 4070 nt, Artificial Sequence
  SARS-CoV-2/Wuhan/WIV05/2019__EPI_ISL_402128 spike protein mRNA gc (1-1273)(K986P_V987P_K986P_V987P_S13I_W152C_L452R_D614G)
aggagagucccgcagucggcguccagcggcucugcuuguucgugugugugucguugcaggccuuauucaagcuuaccauguucguguuccugguccuccugccccuggugagcauccagugcgugaaccucaccacccgcacgcagcugccgcccgccuacaccaacuccuucacccggggcgucuacuaccccgacaagguguuccgcagcuccgugcugcacagcacccaggaccucuuccugcccuucuucuccaacgucacgugguuccacgccauccacgugagcgggaccaacggcaccaagcgguucgacaacccggugcugcccuucaacgacggggucuacuucgcguccaccgagaaguccaacaucauccgcggcuggaucuucgggacgacccucgacagcaagacccagagccugcugaucgugaacaacgccaccaacguggucaucaaggugugcgaguuccaguucugcaacgaccccuuccucggcguguacuaccacaagaacaacaaguccugcauggagagcgaguuccgggucuacuccagcgccaacaacugcacguucgaguacgugucccagcccuuccugauggaccuggagggcaagcaggggaacuucaagaaccuccgcgaguucguguucaagaacaucgacggcuacuucaagaucuacagcaagcacaccccgaucaaccugguccgggaccugccccagggguucuccgcccucgagccccugguggaccugcccaucggcaucaacaucacccgcuuccagacccuccuggcccugcaccggagcuaccucacgccgggggacuccagcagcggcuggaccgcgggcgccgccgccuacuacgugggguaccugcagccccgcaccuuccugcucaaguacaacgagaacggcaccaucacggacgcggucgacugcgcccuggacccccuguccgagaccaagugcacccucaagagcuucaccguggagaaggggaucuaccagacguccaacuuccgggugcagcccaccgagagcaucguccgcuucccgaacaucaccaaccugugccccuucggcgagguguucaacgccacccgguucgccuccgucuacgccuggaaccgcaagcggaucagcaacugcguggcggacuacuccgugcuguacaacagcgccuccuucagcacguucaagugcuacggcgucucccccaccaagcucaacgaccugugcuucaccaacguguacgccgacagcuucgugauccgcggggacgagguccggcagaucgcccccggccagaccgggaagaucgccgacuacaacuacaagcugccggacgacuucacgggcugcgugaucgcguggaacuccaacaaccucgacagcaaggucgggggcaacuacaacuaccgcuaccggcuguuccgcaaguccaaccugaagcccuucgagcgggacaucagcaccgagaucuaccaggccggcuccacccccugcaacgggguggagggcuucaacugcuacuucccccuccagagcuacggguuccagccgaccaacggcgugggguaccagcccuaccgcguggucgugcuguccuucgagcugcuccacgcccccgccacggugugcggccccaagaaguccaccaaccuggucaagaacaagugcgugaacuucaacuucaacggccugaccgggaccggcgugcucaccgagagcaacaagaaguuccugccguuccagcaguucgggcgcgacaucgccgacacgaccgacgcgguccgggacccccagacccuggagauccuggacaucacccccugcagcuucggcggggugagcgugaucacgccgggcaccaacaccuccaaccaggucgccgugcucuaccagggcgugaacugcaccgagguccccguggccauccacgccgaccagcugacgcccaccuggcgcguguacagcaccggguccaacgucuuccagacccgggccggcugccugaucggggcggagcacgugaacaacagcuacgagugcgacauccccaucggcgccggcaucugcgccuccuaccagacgcagaccaacagcccgcgccgggcccgcuccguggcgagccaguccaucaucgccuacaccaugagccucggggccgagaacuccgucgccuacagcaacaacuccaucgccauccccaccaacuucacgaucagcgugaccaccgagauccugcccguguccaugaccaagacgagcgucgacugcaccauguacaucugcggcgacagcaccgagugcuccaaccugcuccugcaguacgggagcuucugcacccagcugaaccgggcgcucacgggcaucgccguggagcaggacaagaacacccaggagguguucgcccaggucaagcagaucuacaagacgcccccgaucaaggacuucgggggcuucaacuucucccagauccugcccgaccccagcaagcccuccaagcgcagcuucaucgaggaccuccuguucaacaaggugacccuggccgacgccggcuucaucaagcaguacggggacugccugggcgacaucgcggcccgggaccucaucugcgcccagaaguucaacgggcugaccgugcugccgccccuccugaccgacgagaugaucgcccaguacaccuccgcccugcucgcgggcaccaucacgagcggguggaccuucggcgccggcgccgcccugcagauccccuucgcgaugcagauggccuaccgcuucaacgggaucggcgucacccagaacgugcuguacgagaaccagaagcucaucgccaaccaguucaacuccgccaucgggaagauccaggacagccuguccagcaccgccuccgcgcugggcaagcuccaggacguggucaaccagaacgcccaggcccugaacacgcuggugaagcagcucagcuccaacuucggggccaucagcuccgugcugaacgacauccugagccggcucgacccgcccgaggccgagguccagaucgaccgccugaucaccggccggcugcagucccuccagaccuacgugacccagcagcugauccgcgcggccgagauccgggccagcgccaaccuggccgcgaccaagaugagcgagugcgugcucggccaguccaagcgcgucgacuucugcgggaagggcuaccaccugaugagcuucccccaguccgcgccccacggggugguguuccugcacgucacguacgugcccgcccaggagaagaacuucaccaccgccccggccaucugccacgacggcaaggcccacuucccccgggagggggucuucgugagcaacggcacccacugguucgugacgcagcgcaacuucuacgagccccagaucaucaccaccgacaacaccuucgucuccggcaacugcgacguggugaucgggaucgucaacaacacgguguacgacccccuccagccggagcuggacagcuucaaggaggagcuggacaaguacuucaagaaccacaccucccccgacguggaccucggcgacaucagcgggaucaacgccuccgucgugaacauccagaaggagaucgaccggcugaacgagguggccaagaaccugaacgagagccucaucgaccugcaggagcugggcaaguacgagcaguacaucaaguggcccugguacaucuggcucggcuucaucgccgggcugaucgcgaucgucauggugaccaucaugcugugcugcaugaccuccugcugcagcugccucaagggcugcugcuccugcgggagcugcugcaaguucgacgaggacgacuccgagccggugcugaagggcgucaagcugcacuacacgugaggacuagucccuguucccagagcccacuuuuuuuucuuuuuuugaaauaaaauagccugucuuucagaucuaaaaaaaaaaaaaaaaaaaaaaaaaaaaaaaaaaaaaaaaaaaaaaaaaaaaaaaaaaaaaaaaaaaaaaaaaaaaaaaaaaaaaaaaaaaaaaaaaaaa

SEQ ID NO: 24873 - RNA, 4070 nt, Artificial Sequence
  SARS-CoV-2/Wuhan/WIV05/2019__EPI_ISL_402128 spike protein mRNA gc (1-1273)(K986P_V987P)
aggagagucccgcagucggcguccagcggcucugcuuguucgugugugugucguugcaggccuuauucaagcuuaccauguucguguuccuggugcugcugccccuggugagcagccagugcgugaaccugaccacccggacccagcugccaccagccuacaccaacagcuucacccggggcgucuacuaccccgacaagguguuccggagcagcguccugcacagcacccaggaccuguuccugcccuucuucagcaacgugaccugguuccacgccauccacgugagcggcaccaacggcaccaagcgguucgacaaccccgugcugcccuucaacgacggcguguacuucgccagcaccgagaagagcaacaucauccggggcuggaucuucggcaccacccuggacagcaagacccagagccugcugaucgugaauaacgccaccaacguggugaucaaggugugcgaguuccaguucugcaacgaccccuuccugggcguguacuaccacaagaacaacaagagcuggauggagagcgaguuccggguguacagcagcgccaacaacugcaccuucgaguacgugagccagcccuuccugauggaccuggagggcaagcagggcaacuucaagaaccugcgggaguucguguucaagaacaucgacggcuacuucaagaucuacagcaagcacaccccaaucaaccuggugcgggaucugccccagggcuucucagcccuggagccccugguggaccugcccaucggcaucaacaucacccgguuccagacccugcuggcccugcaccggagcuaccugaccccaggcgacagcagcagcggguggacagcaggcgcggcugcuuacuacgugggcuaccugcagccccggaccuuccugcugaaguacaacgagaacggcaccaucaccgacgccguggacugcgcccuggacccucugagcgagaccaagugcacccugaagagcuucaccguggagaagggcaucuaccagaccagcaacuuccgggugcagcccaccgagagcaucgugcgguuccccaacaucaccaaccugugccccuucggcgagguguucaacgccacccgguucgccagcguguacgccuggaaccggaagcggaucagcaacugcguggccgacuacagcgugcuguacaacagcgccagcuucagcaccuucaagugcuacggcgugagccccaccaagcugaacgaccugugcuucaccaacguguacgccgacagcuucgugauccguggcgacgaggugcggcagaucgcacccggccagacaggcaagaucgccgacuacaacuacaagcugcccgacgacuucaccggcugcgugaucgccuggaacagcaacaaccucgacagcaaggugggcggcaacuacaacuaccuguaccggcuguuccggaagagcaaccugaagcccuucgagcgggacaucagcaccgagaucuaccaagccggcuccaccccuugcaacggcguggagggcuucaacugcuacuucccucugcagagcuacggcuuccagcccaccaacggcgugggcuaccagcccuaccgggugguggugcugagcuucgagcugcugcacgccccagccaccguguguggccccaagaagagcaccaaccuggugaagaacaagugcgugaacuucaacuucaacggccuuaccggcaccggcgugcugaccgagagcaacaagaaauuccugcccuuucagcaguucggccgggacaucgccgacaccaccgacgcugugcgggauccccagacccuggagauccuggacaucaccccuugcagcuucggcggcgugagcgugaucaccccaggcaccaacaccagcaaccagguggccgugcuguaccaggacgugaacugcaccgaggugcccguggccauccacgccgaccagcugacacccaccuggcgggucuacagcaccggcagcaacguguuccagacccgggccgguugccugaucggcgccgagcacgugaacaacagcuacgagugcgacauccccaucggcgccggcaucugugccagcuaccagacccagaccaauucaccccggagggcaaggagcguggccagccagagcaucaucgccuacaccaugagccugggcgccgagaacagcguggccuacagcaacaacagcaucgccauccccaccaacuucaccaucagcgugaccaccgagauucugcccgugagcaugaccaagaccagcguggacugcaccauguacaucugcggcgacagcaccgagugcagcaaccugcugcugcaguacggcagcuucugcacccagcugaaccgggcccugaccggcaucgccguggagcaggacaagaacacccaggagguguucgcccaggugaagcagaucuacaagaccccucccaucaaggacuucggcggcuucaacuucagccagauccugcccgaccccagcaagcccagcaagcggagcuucaucgaggaccugcuguucaacaaggugacccuagccgacgccggcuucaucaagcaguacggcgacugccucggcgacauagccgcccgggaccugaucugcgcccagaaguucaacggccugaccgugcugccuccccugcugaccgacgagaugaucgcccaguacaccagcgcccuguuagccggaaccaucaccagcggcuggacuuucggcgcuggagccgcucugcagauccccuucgccaugcagauggccuaccgguucaacggcaucggcgugacccagaacgugcuguacgagaaccagaagcugaucgccaaccaguucaacagcgccaucggcaagauccaggacagccugagcagcaccgcuagcgcccugggcaagcugcaggacguggugaaccagaacgcccaggcccugaacacccuggugaagcagcugagcagcaacuucggcgccaucagcagcgugcugaacgacauccugagccggcuggacccucccgaggccgaggugcagaucgaccggcugaucacuggccggcugcagagccugcagaccuacgugacccagcagcugauccgggccgccgagauucgggccagcgccaaccuggccgccaccaagaugagcgagugcgugcugggccagagcaagcggguggacuucugcggcaagggcuaccaccugaugagcuuuccccagagcgcaccccacggagugguguuccugcacgugaccuacgugcccgcccaggagaagaacuucaccaccgccccagccaucugccacgacggcaaggcccacuuuccccgggagggcguguucgugagcaacggcacccacugguucgugacccagcggaacuucuacgagccccagaucaucaccaccgacaacaccuucgugagcggcaacugcgacguggugaucggcaucgugaacaacaccguguacgauccccugcagcccgagcuggacagcuucaaggaggagcuggacaaguacuucaagaaucacaccagccccgacguggaccugggcgacaucagcggcaucaacgccagcguggugaacauccagaaggagaucgaucggcugaacgagguggccaagaaccugaacgagagccugaucgaccugcaggagcugggcaaguacgagcaguacaucaaguggcccugguacaucuggcugggcuucaucgccggccugaucgccaucgugauggugaccaucaugcugugcugcaugaccagcugcugcagcugccugaagggcuguugcagcugcggcagcugcugcaaguucgacgaggacgacagcgagcccgugcugaagggcgugaagcugcacuacaccugaggacuagucccuguucccagagcccacuuuuuuuucuuuuuuugaaauaaaauagccugucuuucagaucuaaaaaaaaaaaaaaaaaaaaaaaaaaaaaaaaaaaaaaaaaaaaaaaaaaaaaaaaaaaaaaaaaaaaaaaaaaaaaaaaaaaaaaaaaaaaaaaaaaaa

SEQ ID NO: 24874 - RNA, 4070 nt, Artificial Sequence
  SARS-CoV-2/Wuhan/WIV05/2019__EPI_ISL_402128 spike protein mRNA gc (1-1273)(K986P_V987P_ D614G)
aggagagucccgcagucggcguccagcggcucugcuuguucgugugugugucguugcaggccuuauucaagcuuaccauguucguguuccuggugcugcugccccuggugagcagccagugcgugaaccugaccacccggacccagcugccaccagccuacaccaacagcuucacccggggcgucuacuaccccgacaagguguuccggagcagcguccugcacagcacccaggaccuguuccugcccuucuucagcaacgugaccugguuccacgccauccacgugagcggcaccaacggcaccaagcgguucgacaaccccgugcugcccuucaacgacggcguguacuucgccagcaccgagaagagcaacaucauccggggcuggaucuucggcaccacccuggacagcaagacccagagccugcugaucgugaauaacgccaccaacguggugaucaaggugugcgaguuccaguucugcaacgaccccuuccugggcguguacuaccacaagaacaacaagagcuggauggagagcgaguuccggguguacagcagcgccaacaacugcaccuucgaguacgugagccagcccuuccugauggaccuggagggcaagcagggcaacuucaagaaccugcgggaguucguguucaagaacaucgacggcuacuucaagaucuacagcaagcacaccccaaucaaccuggugcgggaucugccccagggcuucucagcccuggagccccugguggaccugcccaucggcaucaacaucacccgguuccagacccugcuggcccugcaccggagcuaccugaccccaggcgacagcagcagcggguggacagcaggcgcggcugcuuacuacgugggcuaccugcagccccggaccuuccugcugaaguacaacgagaacggcaccaucaccgacgccguggacugcgcccuggacccucugagcgagaccaagugcacccugaagagcuucaccguggagaagggcaucuaccagaccagcaacuuccgggugcagcccaccgagagcaucgugcgguuccccaacaucaccaaccugugccccuucggcgagguguucaacgccacccgguucgccagcguguacgccuggaaccggaagcggaucagcaacugcguggccgacuacagcgugcuguacaacagcgccagcuucagcaccuucaagugcuacggcgugagccccaccaagcugaacgaccugugcuucaccaacguguacgccgacagcuucgugauccguggcgacgaggugcggcagaucgcacccggccagacaggcaagaucgccgacuacaacuacaagcugcccgacgacuucaccggcugcgugaucgccuggaacagcaacaaccucgacagcaaggugggcggcaacuacaacuaccuguaccggcuguuccggaagagcaaccugaagcccuucgagcgggacaucagcaccgagaucuaccaagccggcuccaccccuugcaacggcguggagggcuucaacugcuacuucccucugcagagcuacggcuuccagcccaccaacggcgugggcuaccagcccuaccgggugguggugcugagcuucgagcugcugcacgccccagccaccguguguggccccaagaagagcaccaaccuggugaagaacaagugcgugaacuucaacuucaacggccuuaccggcaccggcgugcugaccgagagcaacaagaaauuccugcccuuucagcaguucggccgggacaucgccgacaccaccgacgcugugcgggauccccagacccuggagauccuggacaucaccccuugcagcuucggcggcgugagcgugaucaccccaggcaccaacaccagcaaccagguggccgugcuguaccagggcgugaacugcaccgaggugcccguggccauccacgccgaccagcugacacccaccuggcgggucuacagcaccggcagcaacguguuccagacccgggccgguugccugaucggcgccgagcacgugaacaacagcuacgagugcgacauccccaucggcgccggcaucugugccagcuaccagacccagaccaauucaccccggagggcaaggagcguggccagccagagcaucaucgccuacaccaugagccugggcgccgagaacagcguggccuacagcaacaacagcaucgccauccccaccaacuucaccaucagcgugaccaccgagauucugcccgugagcaugaccaagaccagcguggacugcaccauguacaucugcggcgacagcaccgagugcagcaaccugcugcugcaguacggcagcuucugcacccagcugaaccgggcccugaccggcaucgccguggagcaggacaagaacacccaggagguguucgcccaggugaagcagaucuacaagaccccucccaucaaggacuucggcggcuucaacuucagccagauccugcccgaccccagcaagcccagcaagcggagcuucaucgaggaccugcuguucaacaaggugacccuagccgacgccggcuucaucaagcaguacggcgacugccucggcgacauagccgcccgggaccugaucugcgcccagaaguucaacggccugaccgugcugccuccccugcugaccgacgagaugaucgcccaguacaccagcgcccuguuagccggaaccaucaccagcggcuggacuuucggcgcuggagccgcucugcagauccccuucgccaugcagauggccuaccgguucaacggcaucggcgugacccagaacgugcuguacgagaaccagaagcugaucgccaaccaguucaacagcgccaucggcaagauccaggacagccugagcagcaccgcuagcgcccugggcaagcugcaggacguggugaaccagaacgcccaggcccugaacacccuggugaagcagcugagcagcaacuucggcgccaucagcagcgugcugaacgacauccugagccggcuggacccucccgaggccgaggugcagaucgaccggcugaucacuggccggcugcagagccugcagaccuacgugacccagcagcugauccgggccgccgagauucgggccagcgccaaccuggccgccaccaagaugagcgagugcgugcugggccagagcaagcggguggacuucugcggcaagggcuaccaccugaugagcuuuccccagagcgcaccccacggagugguguuccugcacgugaccuacgugcccgcccaggagaagaacuucaccaccgccccagccaucugccacgacggcaaggcccacuuuccccgggagggcguguucgugagcaacggcacccacugguucgugacccagcggaacuucuacgagccccagaucaucaccaccgacaacaccuucgugagcggcaacugcgacguggugaucggcaucgugaacaacaccguguacgauccccugcagcccgagcuggacagcuucaaggaggagcuggacaaguacuucaagaaucacaccagccccgacguggaccugggcgacaucagcggcaucaacgccagcguggugaacauccagaaggagaucgaucggcugaacgagguggccaagaaccugaacgagagccugaucgaccugcaggagcugggcaaguacgagcaguacaucaaguggcccugguacaucuggcugggcuucaucgccggccugaucgccaucgugauggugaccaucaugcugugcugcaugaccagcugcugcagcugccugaagggcuguugcagcugcggcagcugcugcaaguucgacgaggacgacagcgagcccgugcugaagggcgugaagcugcacuacaccugaggacuagucccuguucccagagcccacuuuuuuuucuuuuuuugaaauaaaauagccugucuuucagaucuaaaaaaaaaaaaaaaaaaaaaaaaaaaaaaaaaaaaaaaaaaaaaaaaaaaaaaaaaaaaaaaaaaaaaaaaaaaaaaaaaaaaaaaaaaaaaaaaaaaa

SEQ ID NO: 24875 - RNA, 4070 nt, Artificial Sequence
  SARS-CoV-2/Wuhan/WIV05/2019__EPI_ISL_402128 spike protein mRNA gc (1-1273)(K986P_V987P_A222V_D614G)
aggagagucccgcagucggcguccagcggcucugcuuguucgugugugugucguugcaggccuuauucaagcuuaccauguucguguuccuggugcugcugccccuggugagcagccagugcgugaaccugaccacccggacccagcugccaccagccuacaccaacagcuucacccggggcgucuacuaccccgacaagguguuccggagcagcguccugcacagcacccaggaccuguuccugcccuucuucagcaacgugaccugguuccacgccauccacgugagcggcaccaacggcaccaagcgguucgacaaccccgugcugcccuucaacgacggcguguacuucgccagcaccgagaagagcaacaucauccggggcuggaucuucggcaccacccuggacagcaagacccagagccugcugaucgugaauaacgccaccaacguggugaucaaggugugcgaguuccaguucugcaacgaccccuuccugggcguguacuaccacaagaacaacaagagcuggauggagagcgaguuccggguguacagcagcgccaacaacugcaccuucgaguacgugagccagcccuuccugauggaccuggagggcaagcagggcaacuucaagaaccugcgggaguucguguucaagaacaucgacggcuacuucaagaucuacagcaagcacaccccaaucaaccuggugcgggaucugccccagggcuucucagugcuggagccccugguggaccugcccaucggcaucaacaucacccgguuccagacccugcuggcccugcaccggagcuaccugaccccaggcgacagcagcagcggguggacagcaggcgcggcugcuuacuacgugggcuaccugcagccccggaccuuccugcugaaguacaacgagaacggcaccaucaccgacgccguggacugcgcccuggacccucugagcgagaccaagugcacccugaagagcuucaccguggagaagggcaucuaccagaccagcaacuuccgggugcagcccaccgagagcaucgugcgguuccccaacaucaccaaccugugccccuucggcgagguguucaacgccacccgguucgccagcguguacgccuggaaccggaagcggaucagcaacugcguggccgacuacagcgugcuguacaacagcgccagcuucagcaccuucaagugcuacggcgugagccccaccaagcugaacgaccugugcuucaccaacguguacgccgacagcuucgugauccguggcgacgaggugcggcagaucgcacccggccagacaggcaagaucgccgacuacaacuacaagcugcccgacgacuucaccggcugcgugaucgccuggaacagcaacaaccucgacagcaaggugggcggcaacuacaacuaccuguaccggcuguuccggaagagcaaccugaagcccuucgagcgggacaucagcaccgagaucuaccaagccggcuccaccccuugcaacggcguggagggcuucaacugcuacuucccucugcagagcuacggcuuccagcccaccaacggcgugggcuaccagcccuaccgggugguggugcugagcuucgagcugcugcacgccccagccaccguguguggccccaagaagagcaccaaccuggugaagaacaagugcgugaacuucaacuucaacggccuuaccggcaccggcgugcugaccgagagcaacaagaaauuccugcccuuucagcaguucggccgggacaucgccgacaccaccgacgcugugcgggauccccagacccuggagauccuggacaucaccccuugcagcuucggcggcgugagcgugaucaccccaggcaccaacaccagcaaccagguggccgugcuguaccagggcgugaacugcaccgaggugcccguggccauccacgccgaccagcugacacccaccuggcgggucuacagcaccggcagcaacguguuccagacccgggccgguugccugaucggcgccgagcacgugaacaacagcuacgagugcgacauccccaucggcgccggcaucugugccagcuaccagacccagaccaauucaccccggagggcaaggagcguggccagccagagcaucaucgccuacaccaugagccugggcgccgagaacagcguggccuacagcaacaacagcaucgccauccccaccaacuucaccaucagcgugaccaccgagauucugcccgugagcaugaccaagaccagcguggacugcaccauguacaucugcggcgacagcaccgagugcagcaaccugcugcugcaguacggcagcuucugcacccagcugaaccgggcccugaccggcaucgccguggagcaggacaagaacacccaggagguguucgcccaggugaagcagaucuacaagaccccucccaucaaggacuucggcggcuucaacuucagccagauccugcccgaccccagcaagcccagcaagcggagcuucaucgaggaccugcuguucaacaaggugacccuagccgacgccggcuucaucaagcaguacggcgacugccucggcgacauagccgcccgggaccugaucugcgcccagaaguucaacggccugaccgugcugccuccccugcugaccgacgagaugaucgcccaguacaccagcgcccuguuagccggaaccaucaccagcggcuggacuuucggcgcuggagccgcucugcagauccccuucgccaugcagauggccuaccgguucaacggcaucggcgugacccagaacgugcuguacgagaaccagaagcugaucgccaaccaguucaacagcgccaucggcaagauccaggacagccugagcagcaccgcuagcgcccugggcaagcugcaggacguggugaaccagaacgcccaggcccugaacacccuggugaagcagcugagcagcaacuucggcgccaucagcagcgugcugaacgacauccugagccggcuggacccucccgaggccgaggugcagaucgaccggcugaucacuggccggcugcagagccugcagaccuacgugacccagcagcugauccgggccgccgagauucgggccagcgccaaccuggccgccaccaagaugagcgagugcgugcugggccagagcaagcggguggacuucugcggcaagggcuaccaccugaugagcuuuccccagagcgcaccccacggagugguguuccugcacgugaccuacgugcccgcccaggagaagaacuucaccaccgccccagccaucugccacgacggcaaggcccacuuuccccgggagggcguguucgugagcaacggcacccacugguucgugacccagcggaacuucuacgagccccagaucaucaccaccgacaacaccuucgugagcggcaacugcgacguggugaucggcaucgugaacaacaccguguacgauccccugcagcccgagcuggacagcuucaaggaggagcuggacaaguacuucaagaaucacaccagccccgacguggaccugggcgacaucagcggcaucaacgccagcguggugaacauccagaaggagaucgaucggcugaacgagguggccaagaaccugaacgagagccugaucgaccugcaggagcugggcaaguacgagcaguacaucaaguggcccugguacaucuggcugggcuucaucgccggccugaucgccaucgugauggugaccaucaugcugugcugcaugaccagcugcugcagcugccugaagggcuguugcagcugcggcagcugcugcaaguucgacgaggacgacagcgagcccgugcugaagggcgugaagcugcacuacaccugaggacuagucccuguucccagagcccacuuuuuuuucuuuuuuugaaauaaaauagccugucuuucagaucuaaaaaaaaaaaaaaaaaaaaaaaaaaaaaaaaaaaaaaaaaaaaaaaaaaaaaaaaaaaaaaaaaaaaaaaaaaaaaaaaaaaaaaaaaaaaaaaaaaaa

SEQ ID NO: 24876 - RNA, 4070 nt, Artificial Sequence
  SARS-CoV-2/Wuhan/WIV05/2019__EPI_ISL_402128 spike protein mRNA gc (1-1273)(K986P_V987P_N439K_D614G)
aggagagucccgcagucggcguccagcggcucugcuuguucgugugugugucguugcaggccuuauucaagcuuaccauguucguguuccuggugcugcugccccuggugagcagccagugcgugaaccugaccacccggacccagcugccaccagccuacaccaacagcuucacccggggcgucuacuaccccgacaagguguuccggagcagcguccugcacagcacccaggaccuguuccugcccuucuucagcaacgugaccugguuccacgccauccacgugagcggcaccaacggcaccaagcgguucgacaaccccgugcugcccuucaacgacggcguguacuucgccagcaccgagaagagcaacaucauccggggcuggaucuucggcaccacccuggacagcaagacccagagccugcugaucgugaauaacgccaccaacguggugaucaaggugugcgaguuccaguucugcaacgaccccuuccugggcguguacuaccacaagaacaacaagagcuggauggagagcgaguuccggguguacagcagcgccaacaacugcaccuucgaguacgugagccagcccuuccugauggaccuggagggcaagcagggcaacuucaagaaccugcgggaguucguguucaagaacaucgacggcuacuucaagaucuacagcaagcacaccccaaucaaccuggugcgggaucugccccagggcuucucagcccuggagccccugguggaccugcccaucggcaucaacaucacccgguuccagacccugcuggcccugcaccggagcuaccugaccccaggcgacagcagcagcggguggacagcaggcgcggcugcuuacuacgugggcuaccugcagccccggaccuuccugcugaaguacaacgagaacggcaccaucaccgacgccguggacugcgcccuggacccucugagcgagaccaagugcacccugaagagcuucaccguggagaagggcaucuaccagaccagcaacuuccgggugcagcccaccgagagcaucgugcgguuccccaacaucaccaaccugugccccuucggcgagguguucaacgccacccgguucgccagcguguacgccuggaaccggaagcggaucagcaacugcguggccgacuacagcgugcuguacaacagcgccagcuucagcaccuucaagugcuacggcgugagccccaccaagcugaacgaccugugcuucaccaacguguacgccgacagcuucgugauccguggcgacgaggugcggcagaucgcacccggccagacaggcaagaucgccgacuacaacuacaagcugcccgacgacuucaccggcugcgugaucgccuggaacagcaagaaccucgacagcaaggugggcggcaacuacaacuaccuguaccggcuguuccggaagagcaaccugaagcccuucgagcgggacaucagcaccgagaucuaccaagccggcuccaccccuugcaacggcguggagggcuucaacugcuacuucccucugcagagcuacggcuuccagcccaccaacggcgugggcuaccagcccuaccgggugguggugcugagcuucgagcugcugcacgccccagccaccguguguggccccaagaagagcaccaaccuggugaagaacaagugcgugaacuucaacuucaacggccuuaccggcaccggcgugcugaccgagagcaacaagaaauuccugcccuuucagcaguucggccgggacaucgccgacaccaccgacgcugugcgggauccccagacccuggagauccuggacaucaccccuugcagcuucggcggcgugagcgugaucaccccaggcaccaacaccagcaaccagguggccgugcuguaccagggcgugaacugcaccgaggugcccguggccauccacgccgaccagcugacacccaccuggcgggucuacagcaccggcagcaacguguuccagacccgggccgguugccugaucggcgccgagcacgugaacaacagcuacgagugcgacauccccaucggcgccggcaucugugccagcuaccagacccagaccaauucaccccggagggcaaggagcguggccagccagagcaucaucgccuacaccaugagccugggcgccgagaacagcguggccuacagcaacaacagcaucgccauccccaccaacuucaccaucagcgugaccaccgagauucugcccgugagcaugaccaagaccagcguggacugcaccauguacaucugcggcgacagcaccgagugcagcaaccugcugcugcaguacggcagcuucugcacccagcugaaccgggcccugaccggcaucgccguggagcaggacaagaacacccaggagguguucgcccaggugaagcagaucuacaagaccccucccaucaaggacuucggcggcuucaacuucagccagauccugcccgaccccagcaagcccagcaagcggagcuucaucgaggaccugcuguucaacaaggugacccuagccgacgccggcuucaucaagcaguacggcgacugccucggcgacauagccgcccgggaccugaucugcgcccagaaguucaacggccugaccgugcugccuccccugcugaccgacgagaugaucgcccaguacaccagcgcccuguuagccggaaccaucaccagcggcuggacuuucggcgcuggagccgcucugcagauccccuucgccaugcagauggccuaccgguucaacggcaucggcgugacccagaacgugcuguacgagaaccagaagcugaucgccaaccaguucaacagcgccaucggcaagauccaggacagccugagcagcaccgcuagcgcccugggcaagcugcaggacguggugaaccagaacgcccaggcccugaacacccuggugaagcagcugagcagcaacuucggcgccaucagcagcgugcugaacgacauccugagccggcuggacccucccgaggccgaggugcagaucgaccggcugaucacuggccggcugcagagccugcagaccuacgugacccagcagcugauccgggccgccgagauucgggccagcgccaaccuggccgccaccaagaugagcgagugcgugcugggccagagcaagcggguggacuucugcggcaagggcuaccaccugaugagcuuuccccagagcgcaccccacggagugguguuccugcacgugaccuacgugcccgcccaggagaagaacuucaccaccgccccagccaucugccacgacggcaaggcccacuuuccccgggagggcguguucgugagcaacggcacccacugguucgugacccagcggaacuucuacgagccccagaucaucaccaccgacaacaccuucgugagcggcaacugcgacguggugaucggcaucgugaacaacaccguguacgauccccugcagcccgagcuggacagcuucaaggaggagcuggacaaguacuucaagaaucacaccagccccgacguggaccugggcgacaucagcggcaucaacgccagcguggugaacauccagaaggagaucgaucggcugaacgagguggccaagaaccugaacgagagccugaucgaccugcaggagcugggcaaguacgagcaguacaucaaguggcccugguacaucuggcugggcuucaucgccggccugaucgccaucgugauggugaccaucaugcugugcugcaugaccagcugcugcagcugccugaagggcuguugcagcugcggcagcugcugcaaguucgacgaggacgacagcgagcccgugcugaagggcgugaagcugcacuacaccugaggacuagucccuguucccagagcccacuuuuuuuucuuuuuuugaaauaaaauagccugucuuucagaucuaaaaaaaaaaaaaaaaaaaaaaaaaaaaaaaaaaaaaaaaaaaaaaaaaaaaaaaaaaaaaaaaaaaaaaaaaaaaaaaaaaaaaaaaaaaaaaaaaaaa

SEQ ID NO: 24877 - RNA, 4070 nt, Artificial Sequence
  SARS-CoV-2/Wuhan/WIV05/2019__EPI_ISL_402128 spike protein mRNA gc (1-1273)(K986P_V987P_S477N_D614G)
aggagagucccgcagucggcguccagcggcucugcuuguucgugugugugucguugcaggccuuauucaagcuuaccauguucguguuccuggugcugcugccccuggugagcagccagugcgugaaccugaccacccggacccagcugccaccagccuacaccaacagcuucacccggggcgucuacuaccccgacaagguguuccggagcagcguccugcacagcacccaggaccuguuccugcccuucuucagcaacgugaccugguuccacgccauccacgugagcggcaccaacggcaccaagcgguucgacaaccccgugcugcccuucaacgacggcguguacuucgccagcaccgagaagagcaacaucauccggggcuggaucuucggcaccacccuggacagcaagacccagagccugcugaucgugaauaacgccaccaacguggugaucaaggugugcgaguuccaguucugcaacgaccccuuccugggcguguacuaccacaagaacaacaagagcuggauggagagcgaguuccggguguacagcagcgccaacaacugcaccuucgaguacgugagccagcccuuccugauggaccuggagggcaagcagggcaacuucaagaaccugcgggaguucguguucaagaacaucgacggcuacuucaagaucuacagcaagcacaccccaaucaaccuggugcgggaucugccccagggcuucucagcccuggagccccugguggaccugcccaucggcaucaacaucacccgguuccagacccugcuggcccugcaccggagcuaccugaccccaggcgacagcagcagcggguggacagcaggcgcggcugcuuacuacgugggcuaccugcagccccggaccuuccugcugaaguacaacgagaacggcaccaucaccgacgccguggacugcgcccuggacccucugagcgagaccaagugcacccugaagagcuucaccguggagaagggcaucuaccagaccagcaacuuccgggugcagcccaccgagagcaucgugcgguuccccaacaucaccaaccugugccccuucggcgagguguucaacgccacccgguucgccagcguguacgccuggaaccggaagcggaucagcaacugcguggccgacuacagcgugcuguacaacagcgccagcuucagcaccuucaagugcuacggcgugagccccaccaagcugaacgaccugugcuucaccaacguguacgccgacagcuucgugauccguggcgacgaggugcggcagaucgcacccggccagacaggcaagaucgccgacuacaacuacaagcugcccgacgacuucaccggcugcgugaucgccuggaacagcaacaaccucgacagcaaggugggcggcaacuacaacuaccuguaccggcuguuccggaagagcaaccugaagcccuucgagcgggacaucagcaccgagaucuaccaagccggcaacaccccuugcaacggcguggagggcuucaacugcuacuucccucugcagagcuacggcuuccagcccaccaacggcgugggcuaccagcccuaccgggugguggugcugagcuucgagcugcugcacgccccagccaccguguguggccccaagaagagcaccaaccuggugaagaacaagugcgugaacuucaacuucaacggccuuaccggcaccggcgugcugaccgagagcaacaagaaauuccugcccuuucagcaguucggccgggacaucgccgacaccaccgacgcugugcgggauccccagacccuggagauccuggacaucaccccuugcagcuucggcggcgugagcgugaucaccccaggcaccaacaccagcaaccagguggccgugcuguaccagggcgugaacugcaccgaggugcccguggccauccacgccgaccagcugacacccaccuggcgggucuacagcaccggcagcaacguguuccagacccgggccgguugccugaucggcgccgagcacgugaacaacagcuacgagugcgacauccccaucggcgccggcaucugugccagcuaccagacccagaccaauucaccccggagggcaaggagcguggccagccagagcaucaucgccuacaccaugagccugggcgccgagaacagcguggccuacagcaacaacagcaucgccauccccaccaacuucaccaucagcgugaccaccgagauucugcccgugagcaugaccaagaccagcguggacugcaccauguacaucugcggcgacagcaccgagugcagcaaccugcugcugcaguacggcagcuucugcacccagcugaaccgggcccugaccggcaucgccguggagcaggacaagaacacccaggagguguucgcccaggugaagcagaucuacaagaccccucccaucaaggacuucggcggcuucaacuucagccagauccugcccgaccccagcaagcccagcaagcggagcuucaucgaggaccugcuguucaacaaggugacccuagccgacgccggcuucaucaagcaguacggcgacugccucggcgacauagccgcccgggaccugaucugcgcccagaaguucaacggccugaccgugcugccuccccugcugaccgacgagaugaucgcccaguacaccagcgcccuguuagccggaaccaucaccagcggcuggacuuucggcgcuggagccgcucugcagauccccuucgccaugcagauggccuaccgguucaacggcaucggcgugacccagaacgugcuguacgagaaccagaagcugaucgccaaccaguucaacagcgccaucggcaagauccaggacagccugagcagcaccgcuagcgcccugggcaagcugcaggacguggugaaccagaacgcccaggcccugaacacccuggugaagcagcugagcagcaacuucggcgccaucagcagcgugcugaacgacauccugagccggcuggacccucccgaggccgaggugcagaucgaccggcugaucacuggccggcugcagagccugcagaccuacgugacccagcagcugauccgggccgccgagauucgggccagcgccaaccuggccgccaccaagaugagcgagugcgugcugggccagagcaagcggguggacuucugcggcaagggcuaccaccugaugagcuuuccccagagcgcaccccacggagugguguuccugcacgugaccuacgugcccgcccaggagaagaacuucaccaccgccccagccaucugccacgacggcaaggcccacuuuccccgggagggcguguucgugagcaacggcacccacugguucgugacccagcggaacuucuacgagccccagaucaucaccaccgacaacaccuucgugagcggcaacugcgacguggugaucggcaucgugaacaacaccguguacgauccccugcagcccgagcuggacagcuucaaggaggagcuggacaaguacuucaagaaucacaccagccccgacguggaccugggcgacaucagcggcaucaacgccagcguggugaacauccagaaggagaucgaucggcugaacgagguggccaagaaccugaacgagagccugaucgaccugcaggagcugggcaaguacgagcaguacaucaaguggcccugguacaucuggcugggcuucaucgccggccugaucgccaucgugauggugaccaucaugcugugcugcaugaccagcugcugcagcugccugaagggcuguugcagcugcggcagcugcugcaaguucgacgaggacgacagcgagcccgugcugaagggcgugaagcugcacuacaccugaggacuagucccuguucccagagcccacuuuuuuuucuuuuuuugaaauaaaauagccugucuuucagaucuaaaaaaaaaaaaaaaaaaaaaaaaaaaaaaaaaaaaaaaaaaaaaaaaaaaaaaaaaaaaaaaaaaaaaaaaaaaaaaaaaaaaaaaaaaaaaaaaaaaa

SEQ ID NO: 24878 - RNA, 4070 nt, Artificial Sequence
  SARS-CoV-2/Wuhan/WIV05/2019__EPI_ISL_402128 spike protein mRNA gc (1-1273)(K986P_V987P_N501Y_D614G)
aggagagucccgcagucggcguccagcggcucugcuuguucgugugugugucguugcaggccuuauucaagcuuaccauguucguguuccuggugcugcugccccuggugagcagccagugcgugaaccugaccacccggacccagcugccaccagccuacaccaacagcuucacccggggcgucuacuaccccgacaagguguuccggagcagcguccugcacagcacccaggaccuguuccugcccuucuucagcaacgugaccugguuccacgccauccacgugagcggcaccaacggcaccaagcgguucgacaaccccgugcugcccuucaacgacggcguguacuucgccagcaccgagaagagcaacaucauccggggcuggaucuucggcaccacccuggacagcaagacccagagccugcugaucgugaauaacgccaccaacguggugaucaaggugugcgaguuccaguucugcaacgaccccuuccugggcguguacuaccacaagaacaacaagagcuggauggagagcgaguuccggguguacagcagcgccaacaacugcaccuucgaguacgugagccagcccuuccugauggaccuggagggcaagcagggcaacuucaagaaccugcgggaguucguguucaagaacaucgacggcuacuucaagaucuacagcaagcacaccccaaucaaccuggugcgggaucugccccagggcuucucagcccuggagccccugguggaccugcccaucggcaucaacaucacccgguuccagacccugcuggcccugcaccggagcuaccugaccccaggcgacagcagcagcggguggacagcaggcgcggcugcuuacuacgugggcuaccugcagccccggaccuuccugcugaaguacaacgagaacggcaccaucaccgacgccguggacugcgcccuggacccucugagcgagaccaagugcacccugaagagcuucaccguggagaagggcaucuaccagaccagcaacuuccgggugcagcccaccgagagcaucgugcgguuccccaacaucaccaaccugugccccuucggcgagguguucaacgccacccgguucgccagcguguacgccuggaaccggaagcggaucagcaacugcguggccgacuacagcgugcuguacaacagcgccagcuucagcaccuucaagugcuacggcgugagccccaccaagcugaacgaccugugcuucaccaacguguacgccgacagcuucgugauccguggcgacgaggugcggcagaucgcacccggccagacaggcaagaucgccgacuacaacuacaagcugcccgacgacuucaccggcugcgugaucgccuggaacagcaacaaccucgacagcaaggugggcggcaacuacaacuaccuguaccggcuguuccggaagagcaaccugaagcccuucgagcgggacaucagcaccgagaucuaccaagccggcuccaccccuugcaacggcguggagggcuucaacugcuacuucccucugcagagcuacggcuuccagcccaccuacggcgugggcuaccagcccuaccgggugguggugcugagcuucgagcugcugcacgccccagccaccguguguggccccaagaagagcaccaaccuggugaagaacaagugcgugaacuucaacuucaacggccuuaccggcaccggcgugcugaccgagagcaacaagaaauuccugcccuuucagcaguucggccgggacaucgccgacaccaccgacgcugugcgggauccccagacccuggagauccuggacaucaccccuugcagcuucggcggcgugagcgugaucaccccaggcaccaacaccagcaaccagguggccgugcuguaccagggcgugaacugcaccgaggugcccguggccauccacgccgaccagcugacacccaccuggcgggucuacagcaccggcagcaacguguuccagacccgggccgguugccugaucggcgccgagcacgugaacaacagcuacgagugcgacauccccaucggcgccggcaucugugccagcuaccagacccagaccaauucaccccggagggcaaggagcguggccagccagagcaucaucgccuacaccaugagccugggcgccgagaacagcguggccuacagcaacaacagcaucgccauccccaccaacuucaccaucagcgugaccaccgagauucugcccgugagcaugaccaagaccagcguggacugcaccauguacaucugcggcgacagcaccgagugcagcaaccugcugcugcaguacggcagcuucugcacccagcugaaccgggcccugaccggcaucgccguggagcaggacaagaacacccaggagguguucgcccaggugaagcagaucuacaagaccccucccaucaaggacuucggcggcuucaacuucagccagauccugcccgaccccagcaagcccagcaagcggagcuucaucgaggaccugcuguucaacaaggugacccuagccgacgccggcuucaucaagcaguacggcgacugccucggcgacauagccgcccgggaccugaucugcgcccagaaguucaacggccugaccgugcugccuccccugcugaccgacgagaugaucgcccaguacaccagcgcccuguuagccggaaccaucaccagcggcuggacuuucggcgcuggagccgcucugcagauccccuucgccaugcagauggccuaccgguucaacggcaucggcgugacccagaacgugcuguacgagaaccagaagcugaucgccaaccaguucaacagcgccaucggcaagauccaggacagccugagcagcaccgcuagcgcccugggcaagcugcaggacguggugaaccagaacgcccaggcccugaacacccuggugaagcagcugagcagcaacuucggcgccaucagcagcgugcugaacgacauccugagccggcuggacccucccgaggccgaggugcagaucgaccggcugaucacuggccggcugcagagccugcagaccuacgugacccagcagcugauccgggccgccgagauucgggccagcgccaaccuggccgccaccaagaugagcgagugcgugcugggccagagcaagcggguggacuucugcggcaagggcuaccaccugaugagcuuuccccagagcgcaccccacggagugguguuccugcacgugaccuacgugcccgcccaggagaagaacuucaccaccgccccagccaucugccacgacggcaaggcccacuuuccccgggagggcguguucgugagcaacggcacccacugguucgugacccagcggaacuucuacgagccccagaucaucaccaccgacaacaccuucgugagcggcaacugcgacguggugaucggcaucgugaacaacaccguguacgauccccugcagcccgagcuggacagcuucaaggaggagcuggacaaguacuucaagaaucacaccagccccgacguggaccugggcgacaucagcggcaucaacgccagcguggugaacauccagaaggagaucgaucggcugaacgagguggccaagaaccugaacgagagccugaucgaccugcaggagcugggcaaguacgagcaguacaucaaguggcccugguacaucuggcugggcuucaucgccggccugaucgccaucgugauggugaccaucaugcugugcugcaugaccagcugcugcagcugccugaagggcuguugcagcugcggcagcugcugcaaguucgacgaggacgacagcgagcccgugcugaagggcgugaagcugcacuacaccugaggacuagucccuguucccagagcccacuuuuuuuucuuuuuuugaaauaaaauagccugucuuucagaucuaaaaaaaaaaaaaaaaaaaaaaaaaaaaaaaaaaaaaaaaaaaaaaaaaaaaaaaaaaaaaaaaaaaaaaaaaaaaaaaaaaaaaaaaaaaaaaaaaaaa

SEQ ID NO: 24879 - RNA, 4064 nt, Artificial Sequence
  SARS-CoV-2/Wuhan/WIV05/2019__EPI_ISL_402128 spike protein mRNA gc (1-1273)(K986P_V987P_H69del_V70del_D614G)
aggagagucccgcagucggcguccagcggcucugcuuguucgugugugugucguugcaggccuuauucaagcuuaccauguucguguuccuggugcugcugccccuggugagcagccagugcgugaaccugaccacccggacccagcugccaccagccuacaccaacagcuucacccggggcgucuacuaccccgacaagguguuccggagcagcguccugcacagcacccaggaccuguuccugcccuucuucagcaacgugaccugguuccacgccaucagcggcaccaacggcaccaagcgguucgacaaccccgugcugcccuucaacgacggcguguacuucgccagcaccgagaagagcaacaucauccggggcuggaucuucggcaccacccuggacagcaagacccagagccugcugaucgugaauaacgccaccaacguggugaucaaggugugcgaguuccaguucugcaacgaccccuuccugggcguguacuaccacaagaacaacaagagcuggauggagagcgaguuccggguguacagcagcgccaacaacugcaccuucgaguacgugagccagcccuuccugauggaccuggagggcaagcagggcaacuucaagaaccugcgggaguucguguucaagaacaucgacggcuacuucaagaucuacagcaagcacaccccaaucaaccuggugcgggaucugccccagggcuucucagcccuggagccccugguggaccugcccaucggcaucaacaucacccgguuccagacccugcuggcccugcaccggagcuaccugaccccaggcgacagcagcagcggguggacagcaggcgcggcugcuuacuacgugggcuaccugcagccccggaccuuccugcugaaguacaacgagaacggcaccaucaccgacgccguggacugcgcccuggacccucugagcgagaccaagugcacccugaagagcuucaccguggagaagggcaucuaccagaccagcaacuuccgggugcagcccaccgagagcaucgugcgguuccccaacaucaccaaccugugccccuucggcgagguguucaacgccacccgguucgccagcguguacgccuggaaccggaagcggaucagcaacugcguggccgacuacagcgugcuguacaacagcgccagcuucagcaccuucaagugcuacggcgugagccccaccaagcugaacgaccugugcuucaccaacguguacgccgacagcuucgugauccguggcgacgaggugcggcagaucgcacccggccagacaggcaagaucgccgacuacaacuacaagcugcccgacgacuucaccggcugcgugaucgccuggaacagcaacaaccucgacagcaaggugggcggcaacuacaacuaccuguaccggcuguuccggaagagcaaccugaagcccuucgagcgggacaucagcaccgagaucuaccaagccggcuccaccccuugcaacggcguggagggcuucaacugcuacuucccucugcagagcuacggcuuccagcccaccaacggcgugggcuaccagcccuaccgggugguggugcugagcuucgagcugcugcacgccccagccaccguguguggccccaagaagagcaccaaccuggugaagaacaagugcgugaacuucaacuucaacggccuuaccggcaccggcgugcugaccgagagcaacaagaaauuccugcccuuucagcaguucggccgggacaucgccgacaccaccgacgcugugcgggauccccagacccuggagauccuggacaucaccccuugcagcuucggcggcgugagcgugaucaccccaggcaccaacaccagcaaccagguggccgugcuguaccagggcgugaacugcaccgaggugcccguggccauccacgccgaccagcugacacccaccuggcgggucuacagcaccggcagcaacguguuccagacccgggccgguugccugaucggcgccgagcacgugaacaacagcuacgagugcgacauccccaucggcgccggcaucugugccagcuaccagacccagaccaauucaccccggagggcaaggagcguggccagccagagcaucaucgccuacaccaugagccugggcgccgagaacagcguggccuacagcaacaacagcaucgccauccccaccaacuucaccaucagcgugaccaccgagauucugcccgugagcaugaccaagaccagcguggacugcaccauguacaucugcggcgacagcaccgagugcagcaaccugcugcugcaguacggcagcuucugcacccagcugaaccgggcccugaccggcaucgccguggagcaggacaagaacacccaggagguguucgcccaggugaagcagaucuacaagaccccucccaucaaggacuucggcggcuucaacuucagccagauccugcccgaccccagcaagcccagcaagcggagcuucaucgaggaccugcuguucaacaaggugacccuagccgacgccggcuucaucaagcaguacggcgacugccucggcgacauagccgcccgggaccugaucugcgcccagaaguucaacggccugaccgugcugccuccccugcugaccgacgagaugaucgcccaguacaccagcgcccuguuagccggaaccaucaccagcggcuggacuuucggcgcuggagccgcucugcagauccccuucgccaugcagauggccuaccgguucaacggcaucggcgugacccagaacgugcuguacgagaaccagaagcugaucgccaaccaguucaacagcgccaucggcaagauccaggacagccugagcagcaccgcuagcgcccugggcaagcugcaggacguggugaaccagaacgcccaggcccugaacacccuggugaagcagcugagcagcaacuucggcgccaucagcagcgugcugaacgacauccugagccggcuggacccucccgaggccgaggugcagaucgaccggcugaucacuggccggcugcagagccugcagaccuacgugacccagcagcugauccgggccgccgagauucgggccagcgccaaccuggccgccaccaagaugagcgagugcgugcugggccagagcaagcggguggacuucugcggcaagggcuaccaccugaugagcuuuccccagagcgcaccccacggagugguguuccugcacgugaccuacgugcccgcccaggagaagaacuucaccaccgccccagccaucugccacgacggcaaggcccacuuuccccgggagggcguguucgugagcaacggcacccacugguucgugacccagcggaacuucuacgagccccagaucaucaccaccgacaacaccuucgugagcggcaacugcgacguggugaucggcaucgugaacaacaccguguacgauccccugcagcccgagcuggacagcuucaaggaggagcuggacaaguacuucaagaaucacaccagccccgacguggaccugggcgacaucagcggcaucaacgccagcguggugaacauccagaaggagaucgaucggcugaacgagguggccaagaaccugaacgagagccugaucgaccugcaggagcugggcaaguacgagcaguacaucaaguggcccugguacaucuggcugggcuucaucgccggccugaucgccaucgugauggugaccaucaugcugugcugcaugaccagcugcugcagcugccugaagggcuguugcagcugcggcagcugcugcaaguucgacgaggacgacagcgagcccgugcugaagggcgugaagcugcacuacaccugaggacuagucccuguucccagagcccacuuuuuuuucuuuuuuugaaauaaaauagccugucuuucagaucuaaaaaaaaaaaaaaaaaaaaaaaaaaaaaaaaaaaaaaaaaaaaaaaaaaaaaaaaaaaaaaaaaaaaaaaaaaaaaaaaaaaaaaaaaaaaaaaaaaaa

SEQ ID NO: 24880 - RNA, 4070 nt, Artificial Sequence
  SARS-CoV-2/Wuhan/WIV05/2019__EPI_ISL_402128 spike protein mRNA gc (1-1273)(K986P_V987P_Y453F_D614G)
aggagagucccgcagucggcguccagcggcucugcuuguucgugugugugucguugcaggccuuauucaagcuuaccauguucguguuccuggugcugcugccccuggugagcagccagugcgugaaccugaccacccggacccagcugccaccagccuacaccaacagcuucacccggggcgucuacuaccccgacaagguguuccggagcagcguccugcacagcacccaggaccuguuccugcccuucuucagcaacgugaccugguuccacgccauccacgugagcggcaccaacggcaccaagcgguucgacaaccccgugcugcccuucaacgacggcguguacuucgccagcaccgagaagagcaacaucauccggggcuggaucuucggcaccacccuggacagcaagacccagagccugcugaucgugaauaacgccaccaacguggugaucaaggugugcgaguuccaguucugcaacgaccccuuccugggcguguacuaccacaagaacaacaagagcuggauggagagcgaguuccggguguacagcagcgccaacaacugcaccuucgaguacgugagccagcccuuccugauggaccuggagggcaagcagggcaacuucaagaaccugcgggaguucguguucaagaacaucgacggcuacuucaagaucuacagcaagcacaccccaaucaaccuggugcgggaucugccccagggcuucucagcccuggagccccugguggaccugcccaucggcaucaacaucacccgguuccagacccugcuggcccugcaccggagcuaccugaccccaggcgacagcagcagcggguggacagcaggcgcggcugcuuacuacgugggcuaccugcagccccggaccuuccugcugaaguacaacgagaacggcaccaucaccgacgccguggacugcgcccuggacccucugagcgagaccaagugcacccugaagagcuucaccguggagaagggcaucuaccagaccagcaacuuccgggugcagcccaccgagagcaucgugcgguuccccaacaucaccaaccugugccccuucggcgagguguucaacgccacccgguucgccagcguguacgccuggaaccggaagcggaucagcaacugcguggccgacuacagcgugcuguacaacagcgccagcuucagcaccuucaagugcuacggcgugagccccaccaagcugaacgaccugugcuucaccaacguguacgccgacagcuucgugauccguggcgacgaggugcggcagaucgcacccggccagacaggcaagaucgccgacuacaacuacaagcugcccgacgacuucaccggcugcgugaucgccuggaacagcaacaaccucgacagcaaggugggcggcaacuacaacuaccuguuccggcuguuccggaagagcaaccugaagcccuucgagcgggacaucagcaccgagaucuaccaagccggcuccaccccuugcaacggcguggagggcuucaacugcuacuucccucugcagagcuacggcuuccagcccaccaacggcgugggcuaccagcccuaccgggugguggugcugagcuucgagcugcugcacgccccagccaccguguguggccccaagaagagcaccaaccuggugaagaacaagugcgugaacuucaacuucaacggccuuaccggcaccggcgugcugaccgagagcaacaagaaauuccugcccuuucagcaguucggccgggacaucgccgacaccaccgacgcugugcgggauccccagacccuggagauccuggacaucaccccuugcagcuucggcggcgugagcgugaucaccccaggcaccaacaccagcaaccagguggccgugcuguaccagggcgugaacugcaccgaggugcccguggccauccacgccgaccagcugacacccaccuggcgggucuacagcaccggcagcaacguguuccagacccgggccgguugccugaucggcgccgagcacgugaacaacagcuacgagugcgacauccccaucggcgccggcaucugugccagcuaccagacccagaccaauucaccccggagggcaaggagcguggccagccagagcaucaucgccuacaccaugagccugggcgccgagaacagcguggccuacagcaacaacagcaucgccauccccaccaacuucaccaucagcgugaccaccgagauucugcccgugagcaugaccaagaccagcguggacugcaccauguacaucugcggcgacagcaccgagugcagcaaccugcugcugcaguacggcagcuucugcacccagcugaaccgggcccugaccggcaucgccguggagcaggacaagaacacccaggagguguucgcccaggugaagcagaucuacaagaccccucccaucaaggacuucggcggcuucaacuucagccagauccugcccgaccccagcaagcccagcaagcggagcuucaucgaggaccugcuguucaacaaggugacccuagccgacgccggcuucaucaagcaguacggcgacugccucggcgacauagccgcccgggaccugaucugcgcccagaaguucaacggccugaccgugcugccuccccugcugaccgacgagaugaucgcccaguacaccagcgcccuguuagccggaaccaucaccagcggcuggacuuucggcgcuggagccgcucugcagauccccuucgccaugcagauggccuaccgguucaacggcaucggcgugacccagaacgugcuguacgagaaccagaagcugaucgccaaccaguucaacagcgccaucggcaagauccaggacagccugagcagcaccgcuagcgcccugggcaagcugcaggacguggugaaccagaacgcccaggcccugaacacccuggugaagcagcugagcagcaacuucggcgccaucagcagcgugcugaacgacauccugagccggcuggacccucccgaggccgaggugcagaucgaccggcugaucacuggccggcugcagagccugcagaccuacgugacccagcagcugauccgggccgccgagauucgggccagcgccaaccuggccgccaccaagaugagcgagugcgugcugggccagagcaagcggguggacuucugcggcaagggcuaccaccugaugagcuuuccccagagcgcaccccacggagugguguuccugcacgugaccuacgugcccgcccaggagaagaacuucaccaccgccccagccaucugccacgacggcaaggcccacuuuccccgggagggcguguucgugagcaacggcacccacugguucgugacccagcggaacuucuacgagccccagaucaucaccaccgacaacaccuucgugagcggcaacugcgacguggugaucggcaucgugaacaacaccguguacgauccccugcagcccgagcuggacagcuucaaggaggagcuggacaaguacuucaagaaucacaccagccccgacguggaccugggcgacaucagcggcaucaacgccagcguggugaacauccagaaggagaucgaucggcugaacgagguggccaagaaccugaacgagagccugaucgaccugcaggagcugggcaaguacgagcaguacaucaaguggcccugguacaucuggcugggcuucaucgccggccugaucgccaucgugauggugaccaucaugcugugcugcaugaccagcugcugcagcugccugaagggcuguugcagcugcggcagcugcugcaaguucgacgaggacgacagcgagcccgugcugaagggcgugaagcugcacuacaccugaggacuagucccuguucccagagcccacuuuuuuuucuuuuuuugaaauaaaauagccugucuuucagaucuaaaaaaaaaaaaaaaaaaaaaaaaaaaaaaaaaaaaaaaaaaaaaaaaaaaaaaaaaaaaaaaaaaaaaaaaaaaaaaaaaaaaaaaaaaaaaaaaaaaa

SEQ ID NO: 24881 - RNA, 4070 nt, Artificial Sequence
  SARS-CoV-2/Wuhan/WIV05/2019__EPI_ISL_402128 spike protein mRNA gc (1-1273)(K986P_V987P_D614G_I692V)
aggagagucccgcagucggcguccagcggcucugcuuguucgugugugugucguugcaggccuuauucaagcuuaccauguucguguuccuggugcugcugccccuggugagcagccagugcgugaaccugaccacccggacccagcugccaccagccuacaccaacagcuucacccggggcgucuacuaccccgacaagguguuccggagcagcguccugcacagcacccaggaccuguuccugcccuucuucagcaacgugaccugguuccacgccauccacgugagcggcaccaacggcaccaagcgguucgacaaccccgugcugcccuucaacgacggcguguacuucgccagcaccgagaagagcaacaucauccggggcuggaucuucggcaccacccuggacagcaagacccagagccugcugaucgugaauaacgccaccaacguggugaucaaggugugcgaguuccaguucugcaacgaccccuuccugggcguguacuaccacaagaacaacaagagcuggauggagagcgaguuccggguguacagcagcgccaacaacugcaccuucgaguacgugagccagcccuuccugauggaccuggagggcaagcagggcaacuucaagaaccugcgggaguucguguucaagaacaucgacggcuacuucaagaucuacagcaagcacaccccaaucaaccuggugcgggaucugccccagggcuucucagcccuggagccccugguggaccugcccaucggcaucaacaucacccgguuccagacccugcuggcccugcaccggagcuaccugaccccaggcgacagcagcagcggguggacagcaggcgcggcugcuuacuacgugggcuaccugcagccccggaccuuccugcugaaguacaacgagaacggcaccaucaccgacgccguggacugcgcccuggacccucugagcgagaccaagugcacccugaagagcuucaccguggagaagggcaucuaccagaccagcaacuuccgggugcagcccaccgagagcaucgugcgguuccccaacaucaccaaccugugccccuucggcgagguguucaacgccacccgguucgccagcguguacgccuggaaccggaagcggaucagcaacugcguggccgacuacagcgugcuguacaacagcgccagcuucagcaccuucaagugcuacggcgugagccccaccaagcugaacgaccugugcuucaccaacguguacgccgacagcuucgugauccguggcgacgaggugcggcagaucgcacccggccagacaggcaagaucgccgacuacaacuacaagcugcccgacgacuucaccggcugcgugaucgccuggaacagcaacaaccucgacagcaaggugggcggcaacuacaacuaccuguaccggcuguuccggaagagcaaccugaagcccuucgagcgggacaucagcaccgagaucuaccaagccggcuccaccccuugcaacggcguggagggcuucaacugcuacuucccucugcagagcuacggcuuccagcccaccaacggcgugggcuaccagcccuaccgggugguggugcugagcuucgagcugcugcacgccccagccaccguguguggccccaagaagagcaccaaccuggugaagaacaagugcgugaacuucaacuucaacggccuuaccggcaccggcgugcugaccgagagcaacaagaaauuccugcccuuucagcaguucggccgggacaucgccgacaccaccgacgcugugcgggauccccagacccuggagauccuggacaucaccccuugcagcuucggcggcgugagcgugaucaccccaggcaccaacaccagcaaccagguggccgugcuguaccagggcgugaacugcaccgaggugcccguggccauccacgccgaccagcugacacccaccuggcgggucuacagcaccggcagcaacguguuccagacccgggccgguugccugaucggcgccgagcacgugaacaacagcuacgagugcgacauccccaucggcgccggcaucugugccagcuaccagacccagaccaauucaccccggagggcaaggagcguggccagccagagcgugaucgccuacaccaugagccugggcgccgagaacagcguggccuacagcaacaacagcaucgccauccccaccaacuucaccaucagcgugaccaccgagauucugcccgugagcaugaccaagaccagcguggacugcaccauguacaucugcggcgacagcaccgagugcagcaaccugcugcugcaguacggcagcuucugcacccagcugaaccgggcccugaccggcaucgccguggagcaggacaagaacacccaggagguguucgcccaggugaagcagaucuacaagaccccucccaucaaggacuucggcggcuucaacuucagccagauccugcccgaccccagcaagcccagcaagcggagcuucaucgaggaccugcuguucaacaaggugacccuagccgacgccggcuucaucaagcaguacggcgacugccucggcgacauagccgcccgggaccugaucugcgcccagaaguucaacggccugaccgugcugccuccccugcugaccgacgagaugaucgcccaguacaccagcgcccuguuagccggaaccaucaccagcggcuggacuuucggcgcuggagccgcucugcagauccccuucgccaugcagauggccuaccgguucaacggcaucggcgugacccagaacgugcuguacgagaaccagaagcugaucgccaaccaguucaacagcgccaucggcaagauccaggacagccugagcagcaccgcuagcgcccugggcaagcugcaggacguggugaaccagaacgcccaggcccugaacacccuggugaagcagcugagcagcaacuucggcgccaucagcagcgugcugaacgacauccugagccggcuggacccucccgaggccgaggugcagaucgaccggcugaucacuggccggcugcagagccugcagaccuacgugacccagcagcugauccgggccgccgagauucgggccagcgccaaccuggccgccaccaagaugagcgagugcgugcugggccagagcaagcggguggacuucugcggcaagggcuaccaccugaugagcuuuccccagagcgcaccccacggagugguguuccugcacgugaccuacgugcccgcccaggagaagaacuucaccaccgccccagccaucugccacgacggcaaggcccacuuuccccgggagggcguguucgugagcaacggcacccacugguucgugacccagcggaacuucuacgagccccagaucaucaccaccgacaacaccuucgugagcggcaacugcgacguggugaucggcaucgugaacaacaccguguacgauccccugcagcccgagcuggacagcuucaaggaggagcuggacaaguacuucaagaaucacaccagccccgacguggaccugggcgacaucagcggcaucaacgccagcguggugaacauccagaaggagaucgaucggcugaacgagguggccaagaaccugaacgagagccugaucgaccugcaggagcugggcaaguacgagcaguacaucaaguggcccugguacaucuggcugggcuucaucgccggccugaucgccaucgugauggugaccaucaugcugugcugcaugaccagcugcugcagcugccugaagggcuguugcagcugcggcagcugcugcaaguucgacgaggacgacagcgagcccgugcugaagggcgugaagcugcacuacaccugaggacuagucccuguucccagagcccacuuuuuuuucuuuuuuugaaauaaaauagccugucuuucagaucuaaaaaaaaaaaaaaaaaaaaaaaaaaaaaaaaaaaaaaaaaaaaaaaaaaaaaaaaaaaaaaaaaaaaaaaaaaaaaaaaaaaaaaaaaaaaaaaaaaaa

SEQ ID NO: 24882 - RNA, 4070 nt, Artificial Sequence
  SARS-CoV-2/Wuhan/WIV05/2019__EPI_ISL_402128 spike protein mRNA gc (1-1273)(K986P_V987P_D614G_M1229I)
aggagagucccgcagucggcguccagcggcucugcuuguucgugugugugucguugcaggccuuauucaagcuuaccauguucguguuccuggugcugcugccccuggugagcagccagugcgugaaccugaccacccggacccagcugccaccagccuacaccaacagcuucacccggggcgucuacuaccccgacaagguguuccggagcagcguccugcacagcacccaggaccuguuccugcccuucuucagcaacgugaccugguuccacgccauccacgugagcggcaccaacggcaccaagcgguucgacaaccccgugcugcccuucaacgacggcguguacuucgccagcaccgagaagagcaacaucauccggggcuggaucuucggcaccacccuggacagcaagacccagagccugcugaucgugaauaacgccaccaacguggugaucaaggugugcgaguuccaguucugcaacgaccccuuccugggcguguacuaccacaagaacaacaagagcuggauggagagcgaguuccggguguacagcagcgccaacaacugcaccuucgaguacgugagccagcccuuccugauggaccuggagggcaagcagggcaacuucaagaaccugcgggaguucguguucaagaacaucgacggcuacuucaagaucuacagcaagcacaccccaaucaaccuggugcgggaucugccccagggcuucucagcccuggagccccugguggaccugcccaucggcaucaacaucacccgguuccagacccugcuggcccugcaccggagcuaccugaccccaggcgacagcagcagcggguggacagcaggcgcggcugcuuacuacgugggcuaccugcagccccggaccuuccugcugaaguacaacgagaacggcaccaucaccgacgccguggacugcgcccuggacccucugagcgagaccaagugcacccugaagagcuucaccguggagaagggcaucuaccagaccagcaacuuccgggugcagcccaccgagagcaucgugcgguuccccaacaucaccaaccugugccccuucggcgagguguucaacgccacccgguucgccagcguguacgccuggaaccggaagcggaucagcaacugcguggccgacuacagcgugcuguacaacagcgccagcuucagcaccuucaagugcuacggcgugagccccaccaagcugaacgaccugugcuucaccaacguguacgccgacagcuucgugauccguggcgacgaggugcggcagaucgcacccggccagacaggcaagaucgccgacuacaacuacaagcugcccgacgacuucaccggcugcgugaucgccuggaacagcaacaaccucgacagcaaggugggcggcaacuacaacuaccuguaccggcuguuccggaagagcaaccugaagcccuucgagcgggacaucagcaccgagaucuaccaagccggcuccaccccuugcaacggcguggagggcuucaacugcuacuucccucugcagagcuacggcuuccagcccaccaacggcgugggcuaccagcccuaccgggugguggugcugagcuucgagcugcugcacgccccagccaccguguguggccccaagaagagcaccaaccuggugaagaacaagugcgugaacuucaacuucaacggccuuaccggcaccggcgugcugaccgagagcaacaagaaauuccugcccuuucagcaguucggccgggacaucgccgacaccaccgacgcugugcgggauccccagacccuggagauccuggacaucaccccuugcagcuucggcggcgugagcgugaucaccccaggcaccaacaccagcaaccagguggccgugcuguaccagggcgugaacugcaccgaggugcccguggccauccacgccgaccagcugacacccaccuggcgggucuacagcaccggcagcaacguguuccagacccgggccgguugccugaucggcgccgagcacgugaacaacagcuacgagugcgacauccccaucggcgccggcaucugugccagcuaccagacccagaccaauucaccccggagggcaaggagcguggccagccagagcaucaucgccuacaccaugagccugggcgccgagaacagcguggccuacagcaacaacagcaucgccauccccaccaacuucaccaucagcgugaccaccgagauucugcccgugagcaugaccaagaccagcguggacugcaccauguacaucugcggcgacagcaccgagugcagcaaccugcugcugcaguacggcagcuucugcacccagcugaaccgggcccugaccggcaucgccguggagcaggacaagaacacccaggagguguucgcccaggugaagcagaucuacaagaccccucccaucaaggacuucggcggcuucaacuucagccagauccugcccgaccccagcaagcccagcaagcggagcuucaucgaggaccugcuguucaacaaggugacccuagccgacgccggcuucaucaagcaguacggcgacugccucggcgacauagccgcccgggaccugaucugcgcccagaaguucaacggccugaccgugcugccuccccugcugaccgacgagaugaucgcccaguacaccagcgcccuguuagccggaaccaucaccagcggcuggacuuucggcgcuggagccgcucugcagauccccuucgccaugcagauggccuaccgguucaacggcaucggcgugacccagaacgugcuguacgagaaccagaagcugaucgccaaccaguucaacagcgccaucggcaagauccaggacagccugagcagcaccgcuagcgcccugggcaagcugcaggacguggugaaccagaacgcccaggcccugaacacccuggugaagcagcugagcagcaacuucggcgccaucagcagcgugcugaacgacauccugagccggcuggacccucccgaggccgaggugcagaucgaccggcugaucacuggccggcugcagagccugcagaccuacgugacccagcagcugauccgggccgccgagauucgggccagcgccaaccuggccgccaccaagaugagcgagugcgugcugggccagagcaagcggguggacuucugcggcaagggcuaccaccugaugagcuuuccccagagcgcaccccacggagugguguuccugcacgugaccuacgugcccgcccaggagaagaacuucaccaccgccccagccaucugccacgacggcaaggcccacuuuccccgggagggcguguucgugagcaacggcacccacugguucgugacccagcggaacuucuacgagccccagaucaucaccaccgacaacaccuucgugagcggcaacugcgacguggugaucggcaucgugaacaacaccguguacgauccccugcagcccgagcuggacagcuucaaggaggagcuggacaaguacuucaagaaucacaccagccccgacguggaccugggcgacaucagcggcaucaacgccagcguggugaacauccagaaggagaucgaucggcugaacgagguggccaagaaccugaacgagagccugaucgaccugcaggagcugggcaaguacgagcaguacaucaaguggcccugguacaucuggcugggcuucaucgccggccugaucgccaucgugaucgugaccaucaugcugugcugcaugaccagcugcugcagcugccugaagggcuguugcagcugcggcagcugcugcaaguucgacgaggacgacagcgagcccgugcugaagggcgugaagcugcacuacaccugaggacuagucccuguucccagagcccacuuuuuuuucuuuuuuugaaauaaaauagccugucuuucagaucuaaaaaaaaaaaaaaaaaaaaaaaaaaaaaaaaaaaaaaaaaaaaaaaaaaaaaaaaaaaaaaaaaaaaaaaaaaaaaaaaaaaaaaaaaaaaaaaaaaaa

SEQ ID NO: 24883 - RNA, 4064 nt, Artificial Sequence
  SARS-CoV-2/Wuhan/WIV05/2019__EPI_ISL_402128 spike protein mRNA gc (1-1273)(K986P_V987P_H69del_V70del_A222V_Y453F_S477N_D614G_I692V)
aggagagucccgcagucggcguccagcggcucugcuuguucgugugugugucguugcaggccuuauucaagcuuaccauguucguguuccuggugcugcugccccuggugagcagccagugcgugaaccugaccacccggacccagcugccaccagccuacaccaacagcuucacccggggcgucuacuaccccgacaagguguuccggagcagcguccugcacagcacccaggaccuguuccugcccuucuucagcaacgugaccugguuccacgccaucagcggcaccaacggcaccaagcgguucgacaaccccgugcugcccuucaacgacggcguguacuucgccagcaccgagaagagcaacaucauccggggcuggaucuucggcaccacccuggacagcaagacccagagccugcugaucgugaauaacgccaccaacguggugaucaaggugugcgaguuccaguucugcaacgaccccuuccugggcguguacuaccacaagaacaacaagagcuggauggagagcgaguuccggguguacagcagcgccaacaacugcaccuucgaguacgugagccagcccuuccugauggaccuggagggcaagcagggcaacuucaagaaccugcgggaguucguguucaagaacaucgacggcuacuucaagaucuacagcaagcacaccccaaucaaccuggugcgggaucugccccagggcuucucagugcuggagccccugguggaccugcccaucggcaucaacaucacccgguuccagacccugcuggcccugcaccggagcuaccugaccccaggcgacagcagcagcggguggacagcaggcgcggcugcuuacuacgugggcuaccugcagccccggaccuuccugcugaaguacaacgagaacggcaccaucaccgacgccguggacugcgcccuggacccucugagcgagaccaagugcacccugaagagcuucaccguggagaagggcaucuaccagaccagcaacuuccgggugcagcccaccgagagcaucgugcgguuccccaacaucaccaaccugugccccuucggcgagguguucaacgccacccgguucgccagcguguacgccuggaaccggaagcggaucagcaacugcguggccgacuacagcgugcuguacaacagcgccagcuucagcaccuucaagugcuacggcgugagccccaccaagcugaacgaccugugcuucaccaacguguacgccgacagcuucgugauccguggcgacgaggugcggcagaucgcacccggccagacaggcaagaucgccgacuacaacuacaagcugcccgacgacuucaccggcugcgugaucgccuggaacagcaacaaccucgacagcaaggugggcggcaacuacaacuaccuguuccggcuguuccggaagagcaaccugaagcccuucgagcgggacaucagcaccgagaucuaccaagccggcaacaccccuugcaacggcguggagggcuucaacugcuacuucccucugcagagcuacggcuuccagcccaccaacggcgugggcuaccagcccuaccgggugguggugcugagcuucgagcugcugcacgccccagccaccguguguggccccaagaagagcaccaaccuggugaagaacaagugcgugaacuucaacuucaacggccuuaccggcaccggcgugcugaccgagagcaacaagaaauuccugcccuuucagcaguucggccgggacaucgccgacaccaccgacgcugugcgggauccccagacccuggagauccuggacaucaccccuugcagcuucggcggcgugagcgugaucaccccaggcaccaacaccagcaaccagguggccgugcuguaccagggcgugaacugcaccgaggugcccguggccauccacgccgaccagcugacacccaccuggcgggucuacagcaccggcagcaacguguuccagacccgggccgguugccugaucggcgccgagcacgugaacaacagcuacgagugcgacauccccaucggcgccggcaucugugccagcuaccagacccagaccaauucaccccggagggcaaggagcguggccagccagagcgugaucgccuacaccaugagccugggcgccgagaacagcguggccuacagcaacaacagcaucgccauccccaccaacuucaccaucagcgugaccaccgagauucugcccgugagcaugaccaagaccagcguggacugcaccauguacaucugcggcgacagcaccgagugcagcaaccugcugcugcaguacggcagcuucugcacccagcugaaccgggcccugaccggcaucgccguggagcaggacaagaacacccaggagguguucgcccaggugaagcagaucuacaagaccccucccaucaaggacuucggcggcuucaacuucagccagauccugcccgaccccagcaagcccagcaagcggagcuucaucgaggaccugcuguucaacaaggugacccuagccgacgccggcuucaucaagcaguacggcgacugccucggcgacauagccgcccgggaccugaucugcgcccagaaguucaacggccugaccgugcugccuccccugcugaccgacgagaugaucgcccaguacaccagcgcccuguuagccggaaccaucaccagcggcuggacuuucggcgcuggagccgcucugcagauccccuucgccaugcagauggccuaccgguucaacggcaucggcgugacccagaacgugcuguacgagaaccagaagcugaucgccaaccaguucaacagcgccaucggcaagauccaggacagccugagcagcaccgcuagcgcccugggcaagcugcaggacguggugaaccagaacgcccaggcccugaacacccuggugaagcagcugagcagcaacuucggcgccaucagcagcgugcugaacgacauccugagccggcuggacccucccgaggccgaggugcagaucgaccggcugaucacuggccggcugcagagccugcagaccuacgugacccagcagcugauccgggccgccgagauucgggccagcgccaaccuggccgccaccaagaugagcgagugcgugcugggccagagcaagcggguggacuucugcggcaagggcuaccaccugaugagcuuuccccagagcgcaccccacggagugguguuccugcacgugaccuacgugcccgcccaggagaagaacuucaccaccgccccagccaucugccacgacggcaaggcccacuuuccccgggagggcguguucgugagcaacggcacccacugguucgugacccagcggaacuucuacgagccccagaucaucaccaccgacaacaccuucgugagcggcaacugcgacguggugaucggcaucgugaacaacaccguguacgauccccugcagcccgagcuggacagcuucaaggaggagcuggacaaguacuucaagaaucacaccagccccgacguggaccugggcgacaucagcggcaucaacgccagcguggugaacauccagaaggagaucgaucggcugaacgagguggccaagaaccugaacgagagccugaucgaccugcaggagcugggcaaguacgagcaguacaucaaguggcccugguacaucuggcugggcuucaucgccggccugaucgccaucgugauggugaccaucaugcugugcugcaugaccagcugcugcagcugccugaagggcuguugcagcugcggcagcugcugcaaguucgacgaggacgacagcgagcccgugcugaagggcgugaagcugcacuacaccugaggacuagucccuguucccagagcccacuuuuuuuucuuuuuuugaaauaaaauagccugucuuucagaucuaaaaaaaaaaaaaaaaaaaaaaaaaaaaaaaaaaaaaaaaaaaaaaaaaaaaaaaaaaaaaaaaaaaaaaaaaaaaaaaaaaaaaaaaaaaaaaaaaaaa

SEQ ID NO: 24884 - RNA, 4064 nt, Artificial Sequence
  SARS-CoV-2/Wuhan/WIV05/2019__EPI_ISL_402128 spike protein mRNA gc (1-1273)(K986P_V987P_H69del_V70del_Y453F_D614G_I692V_M1229I)
aggagagucccgcagucggcguccagcggcucugcuuguucgugugugugucguugcaggccuuauucaagcuuaccauguucguguuccuggugcugcugccccuggugagcagccagugcgugaaccugaccacccggacccagcugccaccagccuacaccaacagcuucacccggggcgucuacuaccccgacaagguguuccggagcagcguccugcacagcacccaggaccuguuccugcccuucuucagcaacgugaccugguuccacgccaucagcggcaccaacggcaccaagcgguucgacaaccccgugcugcccuucaacgacggcguguacuucgccagcaccgagaagagcaacaucauccggggcuggaucuucggcaccacccuggacagcaagacccagagccugcugaucgugaauaacgccaccaacguggugaucaaggugugcgaguuccaguucugcaacgaccccuuccugggcguguacuaccacaagaacaacaagagcuggauggagagcgaguuccggguguacagcagcgccaacaacugcaccuucgaguacgugagccagcccuuccugauggaccuggagggcaagcagggcaacuucaagaaccugcgggaguucguguucaagaacaucgacggcuacuucaagaucuacagcaagcacaccccaaucaaccuggugcgggaucugccccagggcuucucagcccuggagccccugguggaccugcccaucggcaucaacaucacccgguuccagacccugcuggcccugcaccggagcuaccugaccccaggcgacagcagcagcggguggacagcaggcgcggcugcuuacuacgugggcuaccugcagccccggaccuuccugcugaaguacaacgagaacggcaccaucaccgacgccguggacugcgcccuggacccucugagcgagaccaagugcacccugaagagcuucaccguggagaagggcaucuaccagaccagcaacuuccgggugcagcccaccgagagcaucgugcgguuccccaacaucaccaaccugugccccuucggcgagguguucaacgccacccgguucgccagcguguacgccuggaaccggaagcggaucagcaacugcguggccgacuacagcgugcuguacaacagcgccagcuucagcaccuucaagugcuacggcgugagccccaccaagcugaacgaccugugcuucaccaacguguacgccgacagcuucgugauccguggcgacgaggugcggcagaucgcacccggccagacaggcaagaucgccgacuacaacuacaagcugcccgacgacuucaccggcugcgugaucgccuggaacagcaacaaccucgacagcaaggugggcggcaacuacaacuaccuguuccggcuguuccggaagagcaaccugaagcccuucgagcgggacaucagcaccgagaucuaccaagccggcuccaccccuugcaacggcguggagggcuucaacugcuacuucccucugcagagcuacggcuuccagcccaccaacggcgugggcuaccagcccuaccgggugguggugcugagcuucgagcugcugcacgccccagccaccguguguggccccaagaagagcaccaaccuggugaagaacaagugcgugaacuucaacuucaacggccuuaccggcaccggcgugcugaccgagagcaacaagaaauuccugcccuuucagcaguucggccgggacaucgccgacaccaccgacgcugugcgggauccccagacccuggagauccuggacaucaccccuugcagcuucggcggcgugagcgugaucaccccaggcaccaacaccagcaaccagguggccgugcuguaccagggcgugaacugcaccgaggugcccguggccauccacgccgaccagcugacacccaccuggcgggucuacagcaccggcagcaacguguuccagacccgggccgguugccugaucggcgccgagcacgugaacaacagcuacgagugcgacauccccaucggcgccggcaucugugccagcuaccagacccagaccaauucaccccggagggcaaggagcguggccagccagagcgugaucgccuacaccaugagccugggcgccgagaacagcguggccuacagcaacaacagcaucgccauccccaccaacuucaccaucagcgugaccaccgagauucugcccgugagcaugaccaagaccagcguggacugcaccauguacaucugcggcgacagcaccgagugcagcaaccugcugcugcaguacggcagcuucugcacccagcugaaccgggcccugaccggcaucgccguggagcaggacaagaacacccaggagguguucgcccaggugaagcagaucuacaagaccccucccaucaaggacuucggcggcuucaacuucagccagauccugcccgaccccagcaagcccagcaagcggagcuucaucgaggaccugcuguucaacaaggugacccuagccgacgccggcuucaucaagcaguacggcgacugccucggcgacauagccgcccgggaccugaucugcgcccagaaguucaacggccugaccgugcugccuccccugcugaccgacgagaugaucgcccaguacaccagcgcccuguuagccggaaccaucaccagcggcuggacuuucggcgcuggagccgcucugcagauccccuucgccaugcagauggccuaccgguucaacggcaucggcgugacccagaacgugcuguacgagaaccagaagcugaucgccaaccaguucaacagcgccaucggcaagauccaggacagccugagcagcaccgcuagcgcccugggcaagcugcaggacguggugaaccagaacgcccaggcccugaacacccuggugaagcagcugagcagcaacuucggcgccaucagcagcgugcugaacgacauccugagccggcuggacccucccgaggccgaggugcagaucgaccggcugaucacuggccggcugcagagccugcagaccuacgugacccagcagcugauccgggccgccgagauucgggccagcgccaaccuggccgccaccaagaugagcgagugcgugcugggccagagcaagcggguggacuucugcggcaagggcuaccaccugaugagcuuuccccagagcgcaccccacggagugguguuccugcacgugaccuacgugcccgcccaggagaagaacuucaccaccgccccagccaucugccacgacggcaaggcccacuuuccccgggagggcguguucgugagcaacggcacccacugguucgugacccagcggaacuucuacgagccccagaucaucaccaccgacaacaccuucgugagcggcaacugcgacguggugaucggcaucgugaacaacaccguguacgauccccugcagcccgagcuggacagcuucaaggaggagcuggacaaguacuucaagaaucacaccagccccgacguggaccugggcgacaucagcggcaucaacgccagcguggugaacauccagaaggagaucgaucggcugaacgagguggccaagaaccugaacgagagccugaucgaccugcaggagcugggcaaguacgagcaguacaucaaguggcccugguacaucuggcugggcuucaucgccggccugaucgccaucgugaucgugaccaucaugcugugcugcaugaccagcugcugcagcugccugaagggcuguugcagcugcggcagcugcugcaaguucgacgaggacgacagcgagcccgugcugaagggcgugaagcugcacuacaccugaggacuagucccuguucccagagcccacuuuuuuuucuuuuuuugaaauaaaauagccugucuuucagaucuaaaaaaaaaaaaaaaaaaaaaaaaaaaaaaaaaaaaaaaaaaaaaaaaaaaaaaaaaaaaaaaaaaaaaaaaaaaaaaaaaaaaaaaaaaaaaaaaaaaa

SEQ ID NO: 24885 - RNA, 4061 nt, Artificial Sequence
  SARS-CoV-2/Wuhan/WIV05/2019__EPI_ISL_402128 spike protein mRNA gc (1-1273)(K986P_V987P_K986P_V987P_H69del_V70del_Y144del_N501Y_A570 D_D614G_P681H_T716I_S982A_D1118H)
aggagagucccgcagucggcguccagcggcucugcuuguucgugugugugucguugcaggccuuauucaagcuuaccauguucguguuccuggugcugcugccccuggugagcagccagugcgugaaccugaccacccggacccagcugccaccagccuacaccaacagcuucacccggggcgucuacuaccccgacaagguguuccggagcagcguccugcacagcacccaggaccuguuccugcccuucuucagcaacgugaccugguuccacgccaucagcggcaccaacggcaccaagcgguucgacaaccccgugcugcccuucaacgacggcguguacuucgccagcaccgagaagagcaacaucauccggggcuggaucuucggcaccacccuggacagcaagacccagagccugcugaucgugaauaacgccaccaacguggugaucaaggugugcgaguuccaguucugcaacgaccccuuccugggcguguaccacaagaacaacaagagcuggauggagagcgaguuccggguguacagcagcgccaacaacugcaccuucgaguacgugagccagcccuuccugauggaccuggagggcaagcagggcaacuucaagaaccugcgggaguucguguucaagaacaucgacggcuacuucaagaucuacagcaagcacaccccaaucaaccuggugcgggaucugccccagggcuucucagcccuggagccccugguggaccugcccaucggcaucaacaucacccgguuccagacccugcuggcccugcaccggagcuaccugaccccaggcgacagcagcagcggguggacagcaggcgcggcugcuuacuacgugggcuaccugcagccccggaccuuccugcugaaguacaacgagaacggcaccaucaccgacgccguggacugcgcccuggacccucugagcgagaccaagugcacccugaagagcuucaccguggagaagggcaucuaccagaccagcaacuuccgggugcagcccaccgagagcaucgugcgguuccccaacaucaccaaccugugccccuucggcgagguguucaacgccacccgguucgccagcguguacgccuggaaccggaagcggaucagcaacugcguggccgacuacagcgugcuguacaacagcgccagcuucagcaccuucaagugcuacggcgugagccccaccaagcugaacgaccugugcuucaccaacguguacgccgacagcuucgugauccguggcgacgaggugcggcagaucgcacccggccagacaggcaagaucgccgacuacaacuacaagcugcccgacgacuucaccggcugcgugaucgccuggaacagcaacaaccucgacagcaaggugggcggcaacuacaacuaccuguaccggcuguuccggaagagcaaccugaagcccuucgagcgggacaucagcaccgagaucuaccaagccggcuccaccccuugcaacggcguggagggcuucaacugcuacuucccucugcagagcuacggcuuccagcccaccuacggcgugggcuaccagcccuaccgggugguggugcugagcuucgagcugcugcacgccccagccaccguguguggccccaagaagagcaccaaccuggugaagaacaagugcgugaacuucaacuucaacggccuuaccggcaccggcgugcugaccgagagcaacaagaaauuccugcccuuucagcaguucggccgggacaucgacgacaccaccgacgcugugcgggauccccagacccuggagauccuggacaucaccccuugcagcuucggcggcgugagcgugaucaccccaggcaccaacaccagcaaccagguggccgugcuguaccagggcgugaacugcaccgaggugcccguggccauccacgccgaccagcugacacccaccuggcgggucuacagcaccggcagcaacguguuccagacccgggccgguugccugaucggcgccgagcacgugaacaacagcuacgagugcgacauccccaucggcgccggcaucugugccagcuaccagacccagaccaauucacaccggagggcaaggagcguggccagccagagcaucaucgccuacaccaugagccugggcgccgagaacagcguggccuacagcaacaacagcaucgccauccccaucaacuucaccaucagcgugaccaccgagauucugcccgugagcaugaccaagaccagcguggacugcaccauguacaucugcggcgacagcaccgagugcagcaaccugcugcugcaguacggcagcuucugcacccagcugaaccgggcccugaccggcaucgccguggagcaggacaagaacacccaggagguguucgcccaggugaagcagaucuacaagaccccucccaucaaggacuucggcggcuucaacuucagccagauccugcccgaccccagcaagcccagcaagcggagcuucaucgaggaccugcuguucaacaaggugacccuagccgacgccggcuucaucaagcaguacggcgacugccucggcgacauagccgcccgggaccugaucugcgcccagaaguucaacggccugaccgugcugccuccccugcugaccgacgagaugaucgcccaguacaccagcgcccuguuagccggaaccaucaccagcggcuggacuuucggcgcuggagccgcucugcagauccccuucgccaugcagauggccuaccgguucaacggcaucggcgugacccagaacgugcuguacgagaaccagaagcugaucgccaaccaguucaacagcgccaucggcaagauccaggacagccugagcagcaccgcuagcgcccugggcaagcugcaggacguggugaaccagaacgcccaggcccugaacacccuggugaagcagcugagcagcaacuucggcgccaucagcagcgugcugaacgacauccuggcccggcuggacccucccgaggccgaggugcagaucgaccggcugaucacuggccggcugcagagccugcagaccuacgugacccagcagcugauccgggccgccgagauucgggccagcgccaaccuggccgccaccaagaugagcgagugcgugcugggccagagcaagcggguggacuucugcggcaagggcuaccaccugaugagcuuuccccagagcgcaccccacggagugguguuccugcacgugaccuacgugcccgcccaggagaagaacuucaccaccgccccagccaucugccacgacggcaaggcccacuuuccccgggagggcguguucgugagcaacggcacccacugguucgugacccagcggaacuucuacgagccccagaucaucaccacccacaacaccuucgugagcggcaacugcgacguggugaucggcaucgugaacaacaccguguacgauccccugcagcccgagcuggacagcuucaaggaggagcuggacaaguacuucaagaaucacaccagccccgacguggaccugggcgacaucagcggcaucaacgccagcguggugaacauccagaaggagaucgaucggcugaacgagguggccaagaaccugaacgagagccugaucgaccugcaggagcugggcaaguacgagcaguacaucaaguggcccugguacaucuggcugggcuucaucgccggccugaucgccaucgugauggugaccaucaugcugugcugcaugaccagcugcugcagcugccugaagggcuguugcagcugcggcagcugcugcaaguucgacgaggacgacagcgagcccgugcugaagggcgugaagcugcacuacaccugaggacuagucccuguucccagagcccacuuuuuuuucuuuuuuugaaauaaaauagccugucuuucagaucuaaaaaaaaaaaaaaaaaaaaaaaaaaaaaaaaaaaaaaaaaaaaaaaaaaaaaaaaaaaaaaaaaaaaaaaaaaaaaaaaaaaaaaaaaaaaaaaaaaaa

SEQ ID NO: 24886 - RNA, 4070 nt, Artificial Sequence
  SARS-CoV-2/Wuhan/WIV05/2019__EPI_ISL_402128 spike protein mRNA gc (1-1273)(K986P_V987P_K986P_V987P_K417N_E484K_N501Y_D614G)
aggagagucccgcagucggcguccagcggcucugcuuguucgugugugugucguugcaggccuuauucaagcuuaccauguucguguuccuggugcugcugccccuggugagcagccagugcgugaaccugaccacccggacccagcugccaccagccuacaccaacagcuucacccggggcgucuacuaccccgacaagguguuccggagcagcguccugcacagcacccaggaccuguuccugcccuucuucagcaacgugaccugguuccacgccauccacgugagcggcaccaacggcaccaagcgguucgacaaccccgugcugcccuucaacgacggcguguacuucgccagcaccgagaagagcaacaucauccggggcuggaucuucggcaccacccuggacagcaagacccagagccugcugaucgugaauaacgccaccaacguggugaucaaggugugcgaguuccaguucugcaacgaccccuuccugggcguguacuaccacaagaacaacaagagcuggauggagagcgaguuccggguguacagcagcgccaacaacugcaccuucgaguacgugagccagcccuuccugauggaccuggagggcaagcagggcaacuucaagaaccugcgggaguucguguucaagaacaucgacggcuacuucaagaucuacagcaagcacaccccaaucaaccuggugcgggaucugccccagggcuucucagcccuggagccccugguggaccugcccaucggcaucaacaucacccgguuccagacccugcuggcccugcaccggagcuaccugaccccaggcgacagcagcagcggguggacagcaggcgcggcugcuuacuacgugggcuaccugcagccccggaccuuccugcugaaguacaacgagaacggcaccaucaccgacgccguggacugcgcccuggacccucugagcgagaccaagugcacccugaagagcuucaccguggagaagggcaucuaccagaccagcaacuuccgggugcagcccaccgagagcaucgugcgguuccccaacaucaccaaccugugccccuucggcgagguguucaacgccacccgguucgccagcguguacgccuggaaccggaagcggaucagcaacugcguggccgacuacagcgugcuguacaacagcgccagcuucagcaccuucaagugcuacggcgugagccccaccaagcugaacgaccugugcuucaccaacguguacgccgacagcuucgugauccguggcgacgaggugcggcagaucgcacccggccagacaggcaacaucgccgacuacaacuacaagcugcccgacgacuucaccggcugcgugaucgccuggaacagcaacaaccucgacagcaaggugggcggcaacuacaacuaccuguaccggcuguuccggaagagcaaccugaagcccuucgagcgggacaucagcaccgagaucuaccaagccggcuccaccccuugcaacggcgugaagggcuucaacugcuacuucccucugcagagcuacggcuuccagcccaccuacggcgugggcuaccagcccuaccgggugguggugcugagcuucgagcugcugcacgccccagccaccguguguggccccaagaagagcaccaaccuggugaagaacaagugcgugaacuucaacuucaacggccuuaccggcaccggcgugcugaccgagagcaacaagaaauuccugcccuuucagcaguucggccgggacaucgccgacaccaccgacgcugugcgggauccccagacccuggagauccuggacaucaccccuugcagcuucggcggcgugagcgugaucaccccaggcaccaacaccagcaaccagguggccgugcuguaccagggcgugaacugcaccgaggugcccguggccauccacgccgaccagcugacacccaccuggcgggucuacagcaccggcagcaacguguuccagacccgggccgguugccugaucggcgccgagcacgugaacaacagcuacgagugcgacauccccaucggcgccggcaucugugccagcuaccagacccagaccaauucaccccggagggcaaggagcguggccagccagagcaucaucgccuacaccaugagccugggcgccgagaacagcguggccuacagcaacaacagcaucgccauccccaccaacuucaccaucagcgugaccaccgagauucugcccgugagcaugaccaagaccagcguggacugcaccauguacaucugcggcgacagcaccgagugcagcaaccugcugcugcaguacggcagcuucugcacccagcugaaccgggcccugaccggcaucgccguggagcaggacaagaacacccaggagguguucgcccaggugaagcagaucuacaagaccccucccaucaaggacuucggcggcuucaacuucagccagauccugcccgaccccagcaagcccagcaagcggagcuucaucgaggaccugcuguucaacaaggugacccuagccgacgccggcuucaucaagcaguacggcgacugccucggcgacauagccgcccgggaccugaucugcgcccagaaguucaacggccugaccgugcugccuccccugcugaccgacgagaugaucgcccaguacaccagcgcccuguuagccggaaccaucaccagcggcuggacuuucggcgcuggagccgcucugcagauccccuucgccaugcagauggccuaccgguucaacggcaucggcgugacccagaacgugcuguacgagaaccagaagcugaucgccaaccaguucaacagcgccaucggcaagauccaggacagccugagcagcaccgcuagcgcccugggcaagcugcaggacguggugaaccagaacgcccaggcccugaacacccuggugaagcagcugagcagcaacuucggcgccaucagcagcgugcugaacgacauccugagccggcuggacccucccgaggccgaggugcagaucgaccggcugaucacuggccggcugcagagccugcagaccuacgugacccagcagcugauccgggccgccgagauucgggccagcgccaaccuggccgccaccaagaugagcgagugcgugcugggccagagcaagcggguggacuucugcggcaagggcuaccaccugaugagcuuuccccagagcgcaccccacggagugguguuccugcacgugaccuacgugcccgcccaggagaagaacuucaccaccgccccagccaucugccacgacggcaaggcccacuuuccccgggagggcguguucgugagcaacggcacccacugguucgugacccagcggaacuucuacgagccccagaucaucaccaccgacaacaccuucgugagcggcaacugcgacguggugaucggcaucgugaacaacaccguguacgauccccugcagcccgagcuggacagcuucaaggaggagcuggacaaguacuucaagaaucacaccagccccgacguggaccugggcgacaucagcggcaucaacgccagcguggugaacauccagaaggagaucgaucggcugaacgagguggccaagaaccugaacgagagccugaucgaccugcaggagcugggcaaguacgagcaguacaucaaguggcccugguacaucuggcugggcuucaucgccggccugaucgccaucgugauggugaccaucaugcugugcugcaugaccagcugcugcagcugccugaagggcuguugcagcugcggcagcugcugcaaguucgacgaggacgacagcgagcccgugcugaagggcgugaagcugcacuacaccugaggacuagucccuguucccagagcccacuuuuuuuucuuuuuuugaaauaaaauagccugucuuucagaucuaaaaaaaaaaaaaaaaaaaaaaaaaaaaaaaaaaaaaaaaaaaaaaaaaaaaaaaaaaaaaaaaaaaaaaaaaaaaaaaaaaaaaaaaaaaaaaaaaaaa

SEQ ID NO: 24887 - RNA, 4061 nt, Artificial Sequence
  SARS-CoV-2/Wuhan/WIV05/2019__EPI_ISL_402128 spike protein mRNA gc (1-1273)(K986P_V987P_K986P_V987P_L18F_D80A_D215G_L242del_A243del_ L244del_R246I_K417N_E484K_N501Y_D614G_A701V)
aggagagucccgcagucggcguccagcggcucugcuuguucgugugugugucguugcaggccuuauucaagcuuaccauguucguguuccuggugcugcugccccuggugagcagccagugcgugaacuucaccacccggacccagcugccaccagccuacaccaacagcuucacccggggcgucuacuaccccgacaagguguuccggagcagcguccugcacagcacccaggaccuguuccugcccuucuucagcaacgugaccugguuccacgccauccacgugagcggcaccaacggcaccaagcgguucgccaaccccgugcugcccuucaacgacggcguguacuucgccagcaccgagaagagcaacaucauccggggcuggaucuucggcaccacccuggacagcaagacccagagccugcugaucgugaauaacgccaccaacguggugaucaaggugugcgaguuccaguucugcaacgaccccuuccugggcguguacuaccacaagaacaacaagagcuggauggagagcgaguuccggguguacagcagcgccaacaacugcaccuucgaguacgugagccagcccuuccugauggaccuggagggcaagcagggcaacuucaagaaccugcgggaguucguguucaagaacaucgacggcuacuucaagaucuacagcaagcacaccccaaucaaccuggugcggggccugccccagggcuucucagcccuggagccccugguggaccugcccaucggcaucaacaucacccgguuccagacccugcacaucagcuaccugaccccaggcgacagcagcagcggguggacagcaggcgcggcugcuuacuacgugggcuaccugcagccccggaccuuccugcugaaguacaacgagaacggcaccaucaccgacgccguggacugcgcccuggacccucugagcgagaccaagugcacccugaagagcuucaccguggagaagggcaucuaccagaccagcaacuuccgggugcagcccaccgagagcaucgugcgguuccccaacaucaccaaccugugccccuucggcgagguguucaacgccacccgguucgccagcguguacgccuggaaccggaagcggaucagcaacugcguggccgacuacagcgugcuguacaacagcgccagcuucagcaccuucaagugcuacggcgugagccccaccaagcugaacgaccugugcuucaccaacguguacgccgacagcuucgugauccguggcgacgaggugcggcagaucgcacccggccagacaggcaacaucgccgacuacaacuacaagcugcccgacgacuucaccggcugcgugaucgccuggaacagcaacaaccucgacagcaaggugggcggcaacuacaacuaccuguaccggcuguuccggaagagcaaccugaagcccuucgagcgggacaucagcaccgagaucuaccaagccggcuccaccccuugcaacggcgugaagggcuucaacugcuacuucccucugcagagcuacggcuuccagcccaccuacggcgugggcuaccagcccuaccgggugguggugcugagcuucgagcugcugcacgccccagccaccguguguggccccaagaagagcaccaaccuggugaagaacaagugcgugaacuucaacuucaacggccuuaccggcaccggcgugcugaccgagagcaacaagaaauuccugcccuuucagcaguucggccgggacaucgccgacaccaccgacgcugugcgggauccccagacccuggagauccuggacaucaccccuugcagcuucggcggcgugagcgugaucaccccaggcaccaacaccagcaaccagguggccgugcuguaccagggcgugaacugcaccgaggugcccguggccauccacgccgaccagcugacacccaccuggcgggucuacagcaccggcagcaacguguuccagacccgggccgguugccugaucggcgccgagcacgugaacaacagcuacgagugcgacauccccaucggcgccggcaucugugccagcuaccagacccagaccaauucaccccggagggcaaggagcguggccagccagagcaucaucgccuacaccaugagccugggcguggagaacagcguggccuacagcaacaacagcaucgccauccccaccaacuucaccaucagcgugaccaccgagauucugcccgugagcaugaccaagaccagcguggacugcaccauguacaucugcggcgacagcaccgagugcagcaaccugcugcugcaguacggcagcuucugcacccagcugaaccgggcccugaccggcaucgccguggagcaggacaagaacacccaggagguguucgcccaggugaagcagaucuacaagaccccucccaucaaggacuucggcggcuucaacuucagccagauccugcccgaccccagcaagcccagcaagcggagcuucaucgaggaccugcuguucaacaaggugacccuagccgacgccggcuucaucaagcaguacggcgacugccucggcgacauagccgcccgggaccugaucugcgcccagaaguucaacggccugaccgugcugccuccccugcugaccgacgagaugaucgcccaguacaccagcgcccuguuagccggaaccaucaccagcggcuggacuuucggcgcuggagccgcucugcagauccccuucgccaugcagauggccuaccgguucaacggcaucggcgugacccagaacgugcuguacgagaaccagaagcugaucgccaaccaguucaacagcgccaucggcaagauccaggacagccugagcagcaccgcuagcgcccugggcaagcugcaggacguggugaaccagaacgcccaggcccugaacacccuggugaagcagcugagcagcaacuucggcgccaucagcagcgugcugaacgacauccugagccggcuggacccucccgaggccgaggugcagaucgaccggcugaucacuggccggcugcagagccugcagaccuacgugacccagcagcugauccgggccgccgagauucgggccagcgccaaccuggccgccaccaagaugagcgagugcgugcugggccagagcaagcggguggacuucugcggcaagggcuaccaccugaugagcuuuccccagagcgcaccccacggagugguguuccugcacgugaccuacgugcccgcccaggagaagaacuucaccaccgccccagccaucugccacgacggcaaggcccacuuuccccgggagggcguguucgugagcaacggcacccacugguucgugacccagcggaacuucuacgagccccagaucaucaccaccgacaacaccuucgugagcggcaacugcgacguggugaucggcaucgugaacaacaccguguacgauccccugcagcccgagcuggacagcuucaaggaggagcuggacaaguacuucaagaaucacaccagccccgacguggaccugggcgacaucagcggcaucaacgccagcguggugaacauccagaaggagaucgaucggcugaacgagguggccaagaaccugaacgagagccugaucgaccugcaggagcugggcaaguacgagcaguacaucaaguggcccugguacaucuggcugggcuucaucgccggccugaucgccaucgugauggugaccaucaugcugugcugcaugaccagcugcugcagcugccugaagggcuguugcagcugcggcagcugcugcaaguucgacgaggacgacagcgagcccgugcugaagggcgugaagcugcacuacaccugaggacuagucccuguucccagagcccacuuuuuuuucuuuuuuugaaauaaaauagccugucuuucagaucuaaaaaaaaaaaaaaaaaaaaaaaaaaaaaaaaaaaaaaaaaaaaaaaaaaaaaaaaaaaaaaaaaaaaaaaaaaaaaaaaaaaaaaaaaaaaaaaaaaaa

SEQ ID NO: 24888 - RNA, 4070 nt, Artificial Sequence
  SARS-CoV-2/Wuhan/WIV05/2019__EPI_ISL_402128 spike protein mRNA gc (1-1273)(K986P_V987P_K986P_V987P_E484K_D614G)
aggagagucccgcagucggcguccagcggcucugcuuguucgugugugugucguugcaggccuuauucaagcuuaccauguucguguuccuggugcugcugccccuggugagcagccagugcgugaaccugaccacccggacccagcugccaccagccuacaccaacagcuucacccggggcgucuacuaccccgacaagguguuccggagcagcguccugcacagcacccaggaccuguuccugcccuucuucagcaacgugaccugguuccacgccauccacgugagcggcaccaacggcaccaagcgguucgacaaccccgugcugcccuucaacgacggcguguacuucgccagcaccgagaagagcaacaucauccggggcuggaucuucggcaccacccuggacagcaagacccagagccugcugaucgugaauaacgccaccaacguggugaucaaggugugcgaguuccaguucugcaacgaccccuuccugggcguguacuaccacaagaacaacaagagcuggauggagagcgaguuccggguguacagcagcgccaacaacugcaccuucgaguacgugagccagcccuuccugauggaccuggagggcaagcagggcaacuucaagaaccugcgggaguucguguucaagaacaucgacggcuacuucaagaucuacagcaagcacaccccaaucaaccuggugcgggaucugccccagggcuucucagcccuggagccccugguggaccugcccaucggcaucaacaucacccgguuccagacccugcuggcccugcaccggagcuaccugaccccaggcgacagcagcagcggguggacagcaggcgcggcugcuuacuacgugggcuaccugcagccccggaccuuccugcugaaguacaacgagaacggcaccaucaccgacgccguggacugcgcccuggacccucugagcgagaccaagugcacccugaagagcuucaccguggagaagggcaucuaccagaccagcaacuuccgggugcagcccaccgagagcaucgugcgguuccccaacaucaccaaccugugccccuucggcgagguguucaacgccacccgguucgccagcguguacgccuggaaccggaagcggaucagcaacugcguggccgacuacagcgugcuguacaacagcgccagcuucagcaccuucaagugcuacggcgugagccccaccaagcugaacgaccugugcuucaccaacguguacgccgacagcuucgugauccguggcgacgaggugcggcagaucgcacccggccagacaggcaagaucgccgacuacaacuacaagcugcccgacgacuucaccggcugcgugaucgccuggaacagcaacaaccucgacagcaaggugggcggcaacuacaacuaccuguaccggcuguuccggaagagcaaccugaagcccuucgagcgggacaucagcaccgagaucuaccaagccggcuccaccccuugcaacggcgugaagggcuucaacugcuacuucccucugcagagcuacggcuuccagcccaccaacggcgugggcuaccagcccuaccgggugguggugcugagcuucgagcugcugcacgccccagccaccguguguggccccaagaagagcaccaaccuggugaagaacaagugcgugaacuucaacuucaacggccuuaccggcaccggcgugcugaccgagagcaacaagaaauuccugcccuuucagcaguucggccgggacaucgccgacaccaccgacgcugugcgggauccccagacccuggagauccuggacaucaccccuugcagcuucggcggcgugagcgugaucaccccaggcaccaacaccagcaaccagguggccgugcuguaccagggcgugaacugcaccgaggugcccguggccauccacgccgaccagcugacacccaccuggcgggucuacagcaccggcagcaacguguuccagacccgggccgguugccugaucggcgccgagcacgugaacaacagcuacgagugcgacauccccaucggcgccggcaucugugccagcuaccagacccagaccaauucaccccggagggcaaggagcguggccagccagagcaucaucgccuacaccaugagccugggcgccgagaacagcguggccuacagcaacaacagcaucgccauccccaccaacuucaccaucagcgugaccaccgagauucugcccgugagcaugaccaagaccagcguggacugcaccauguacaucugcggcgacagcaccgagugcagcaaccugcugcugcaguacggcagcuucugcacccagcugaaccgggcccugaccggcaucgccguggagcaggacaagaacacccaggagguguucgcccaggugaagcagaucuacaagaccccucccaucaaggacuucggcggcuucaacuucagccagauccugcccgaccccagcaagcccagcaagcggagcuucaucgaggaccugcuguucaacaaggugacccuagccgacgccggcuucaucaagcaguacggcgacugccucggcgacauagccgcccgggaccugaucugcgcccagaaguucaacggccugaccgugcugccuccccugcugaccgacgagaugaucgcccaguacaccagcgcccuguuagccggaaccaucaccagcggcuggacuuucggcgcuggagccgcucugcagauccccuucgccaugcagauggccuaccgguucaacggcaucggcgugacccagaacgugcuguacgagaaccagaagcugaucgccaaccaguucaacagcgccaucggcaagauccaggacagccugagcagcaccgcuagcgcccugggcaagcugcaggacguggugaaccagaacgcccaggcccugaacacccuggugaagcagcugagcagcaacuucggcgccaucagcagcgugcugaacgacauccugagccggcuggacccucccgaggccgaggugcagaucgaccggcugaucacuggccggcugcagagccugcagaccuacgugacccagcagcugauccgggccgccgagauucgggccagcgccaaccuggccgccaccaagaugagcgagugcgugcugggccagagcaagcggguggacuucugcggcaagggcuaccaccugaugagcuuuccccagagcgcaccccacggagugguguuccugcacgugaccuacgugcccgcccaggagaagaacuucaccaccgccccagccaucugccacgacggcaaggcccacuuuccccgggagggcguguucgugagcaacggcacccacugguucgugacccagcggaacuucuacgagccccagaucaucaccaccgacaacaccuucgugagcggcaacugcgacguggugaucggcaucgugaacaacaccguguacgauccccugcagcccgagcuggacagcuucaaggaggagcuggacaaguacuucaagaaucacaccagccccgacguggaccugggcgacaucagcggcaucaacgccagcguggugaacauccagaaggagaucgaucggcugaacgagguggccaagaaccugaacgagagccugaucgaccugcaggagcugggcaaguacgagcaguacaucaaguggcccugguacaucuggcugggcuucaucgccggccugaucgccaucgugauggugaccaucaugcugugcugcaugaccagcugcugcagcugccugaagggcuguugcagcugcggcagcugcugcaaguucgacgaggacgacagcgagcccgugcugaagggcgugaagcugcacuacaccugaggacuagucccuguucccagagcccacuuuuuuuucuuuuuuugaaauaaaauagccugucuuucagaucuaaaaaaaaaaaaaaaaaaaaaaaaaaaaaaaaaaaaaaaaaaaaaaaaaaaaaaaaaaaaaaaaaaaaaaaaaaaaaaaaaaaaaaaaaaaaaaaaaaaa

SEQ ID NO: 24889 - RNA, 4070 nt, Artificial Sequence
  SARS-CoV-2/Wuhan/WIV05/2019__EPI_ISL_402128 spike protein mRNA gc (1-1273)(K986P_V987P_K986P_V987P_L18F_T20N_P26S_D138Y_R190S_K417T _E484K_N501Y_D614G_H655Y_T1027I)
aggagagucccgcagucggcguccagcggcucugcuuguucgugugugugucguugcaggccuuauucaagcuuaccauguucguguuccuggugcugcugccccuggugagcagccagugcgugaacuucaccaaccggacccagcugccaagcgccuacaccaacagcuucacccggggcgucuacuaccccgacaagguguuccggagcagcguccugcacagcacccaggaccuguuccugcccuucuucagcaacgugaccugguuccacgccauccacgugagcggcaccaacggcaccaagcgguucgacaaccccgugcugcccuucaacgacggcguguacuucgccagcaccgagaagagcaacaucauccggggcuggaucuucggcaccacccuggacagcaagacccagagccugcugaucgugaauaacgccaccaacguggugaucaaggugugcgaguuccaguucugcaacuaccccuuccugggcguguacuaccacaagaacaacaagagcuggauggagagcgaguuccggguguacagcagcgccaacaacugcaccuucgaguacgugagccagcccuuccugauggaccuggagggcaagcagggcaacuucaagaaccugagcgaguucguguucaagaacaucgacggcuacuucaagaucuacagcaagcacaccccaaucaaccuggugcgggaucugccccagggcuucucagcccuggagccccugguggaccugcccaucggcaucaacaucacccgguuccagacccugcuggcccugcaccggagcuaccugaccccaggcgacagcagcagcggguggacagcaggcgcggcugcuuacuacgugggcuaccugcagccccggaccuuccugcugaaguacaacgagaacggcaccaucaccgacgccguggacugcgcccuggacccucugagcgagaccaagugcacccugaagagcuucaccguggagaagggcaucuaccagaccagcaacuuccgggugcagcccaccgagagcaucgugcgguuccccaacaucaccaaccugugccccuucggcgagguguucaacgccacccgguucgccagcguguacgccuggaaccggaagcggaucagcaacugcguggccgacuacagcgugcuguacaacagcgccagcuucagcaccuucaagugcuacggcgugagccccaccaagcugaacgaccugugcuucaccaacguguacgccgacagcuucgugauccguggcgacgaggugcggcagaucgcacccggccagacaggcaccaucgccgacuacaacuacaagcugcccgacgacuucaccggcugcgugaucgccuggaacagcaacaaccucgacagcaaggugggcggcaacuacaacuaccuguaccggcuguuccggaagagcaaccugaagcccuucgagcgggacaucagcaccgagaucuaccaagccggcuccaccccuugcaacggcgugaagggcuucaacugcuacuucccucugcagagcuacggcuuccagcccaccuacggcgugggcuaccagcccuaccgggugguggugcugagcuucgagcugcugcacgccccagccaccguguguggccccaagaagagcaccaaccuggugaagaacaagugcgugaacuucaacuucaacggccuuaccggcaccggcgugcugaccgagagcaacaagaaauuccugcccuuucagcaguucggccgggacaucgccgacaccaccgacgcugugcgggauccccagacccuggagauccuggacaucaccccuugcagcuucggcggcgugagcgugaucaccccaggcaccaacaccagcaaccagguggccgugcuguaccagggcgugaacugcaccgaggugcccguggccauccacgccgaccagcugacacccaccuggcgggucuacagcaccggcagcaacguguuccagacccgggccgguugccugaucggcgccgaguacgugaacaacagcuacgagugcgacauccccaucggcgccggcaucugugccagcuaccagacccagaccaauucaccccggagggcaaggagcguggccagccagagcaucaucgccuacaccaugagccugggcgccgagaacagcguggccuacagcaacaacagcaucgccauccccaccaacuucaccaucagcgugaccaccgagauucugcccgugagcaugaccaagaccagcguggacugcaccauguacaucugcggcgacagcaccgagugcagcaaccugcugcugcaguacggcagcuucugcacccagcugaaccgggcccugaccggcaucgccguggagcaggacaagaacacccaggagguguucgcccaggugaagcagaucuacaagaccccucccaucaaggacuucggcggcuucaacuucagccagauccugcccgaccccagcaagcccagcaagcggagcuucaucgaggaccugcuguucaacaaggugacccuagccgacgccggcuucaucaagcaguacggcgacugccucggcgacauagccgcccgggaccugaucugcgcccagaaguucaacggccugaccgugcugccuccccugcugaccgacgagaugaucgcccaguacaccagcgcccuguuagccggaaccaucaccagcggcuggacuuucggcgcuggagccgcucugcagauccccuucgccaugcagauggccuaccgguucaacggcaucggcgugacccagaacgugcuguacgagaaccagaagcugaucgccaaccaguucaacagcgccaucggcaagauccaggacagccugagcagcaccgcuagcgcccugggcaagcugcaggacguggugaaccagaacgcccaggcccugaacacccuggugaagcagcugagcagcaacuucggcgccaucagcagcgugcugaacgacauccugagccggcuggacccucccgaggccgaggugcagaucgaccggcugaucacuggccggcugcagagccugcagaccuacgugacccagcagcugauccgggccgccgagauucgggccagcgccaaccuggccgccaucaagaugagcgagugcgugcugggccagagcaagcggguggacuucugcggcaagggcuaccaccugaugagcuuuccccagagcgcaccccacggagugguguuccugcacgugaccuacgugcccgcccaggagaagaacuucaccaccgccccagccaucugccacgacggcaaggcccacuuuccccgggagggcguguucgugagcaacggcacccacugguucgugacccagcggaacuucuacgagccccagaucaucaccaccgacaacaccuucgugagcggcaacugcgacguggugaucggcaucgugaacaacaccguguacgauccccugcagcccgagcuggacagcuucaaggaggagcuggacaaguacuucaagaaucacaccagccccgacguggaccugggcgacaucagcggcaucaacgccagcguggugaacauccagaaggagaucgaucggcugaacgagguggccaagaaccugaacgagagccugaucgaccugcaggagcugggcaaguacgagcaguacaucaaguggcccugguacaucuggcugggcuucaucgccggccugaucgccaucgugauggugaccaucaugcugugcugcaugaccagcugcugcagcugccugaagggcuguugcagcugcggcagcugcugcaaguucgacgaggacgacagcgagcccgugcugaagggcgugaagcugcacuacaccugaggacuagucccuguucccagagcccacuuuuuuuucuuuuuuugaaauaaaauagccugucuuucagaucuaaaaaaaaaaaaaaaaaaaaaaaaaaaaaaaaaaaaaaaaaaaaaaaaaaaaaaaaaaaaaaaaaaaaaaaaaaaaaaaaaaaaaaaaaaaaaaaaaaaa

SEQ ID NO: 24890 - RNA, 4070 nt, Artificial Sequence
  SARS-CoV-2/Wuhan/WIV05/2019__EPI_ISL_402128 spike protein mRNA gc (1-1273)(K986P_V987P_K986P_V987P_S13I_W152C_L452R_D614G)
aggagagucccgcagucggcguccagcggcucugcuuguucgugugugugucguugcaggccuuauucaagcuuaccauguucguguuccuggugcugcugccccuggugagcauccagugcgugaaccugaccacccggacccagcugccaccagccuacaccaacagcuucacccggggcgucuacuaccccgacaagguguuccggagcagcguccugcacagcacccaggaccuguuccugcccuucuucagcaacgugaccugguuccacgccauccacgugagcggcaccaacggcaccaagcgguucgacaaccccgugcugcccuucaacgacggcguguacuucgccagcaccgagaagagcaacaucauccggggcuggaucuucggcaccacccuggacagcaagacccagagccugcugaucgugaauaacgccaccaacguggugaucaaggugugcgaguuccaguucugcaacgaccccuuccugggcguguacuaccacaagaacaacaagagcugcauggagagcgaguuccggguguacagcagcgccaacaacugcaccuucgaguacgugagccagcccuuccugauggaccuggagggcaagcagggcaacuucaagaaccugcgggaguucguguucaagaacaucgacggcuacuucaagaucuacagcaagcacaccccaaucaaccuggugcgggaucugccccagggcuucucagcccuggagccccugguggaccugcccaucggcaucaacaucacccgguuccagacccugcuggcccugcaccggagcuaccugaccccaggcgacagcagcagcggguggacagcaggcgcggcugcuuacuacgugggcuaccugcagccccggaccuuccugcugaaguacaacgagaacggcaccaucaccgacgccguggacugcgcccuggacccucugagcgagaccaagugcacccugaagagcuucaccguggagaagggcaucuaccagaccagcaacuuccgggugcagcccaccgagagcaucgugcgguuccccaacaucaccaaccugugccccuucggcgagguguucaacgccacccgguucgccagcguguacgccuggaaccggaagcggaucagcaacugcguggccgacuacagcgugcuguacaacagcgccagcuucagcaccuucaagugcuacggcgugagccccaccaagcugaacgaccugugcuucaccaacguguacgccgacagcuucgugauccguggcgacgaggugcggcagaucgcacccggccagacaggcaagaucgccgacuacaacuacaagcugcccgacgacuucaccggcugcgugaucgccuggaacagcaacaaccucgacagcaaggugggcggcaacuacaacuaccgcuaccggcuguuccggaagagcaaccugaagcccuucgagcgggacaucagcaccgagaucuaccaagccggcuccaccccuugcaacggcguggagggcuucaacugcuacuucccucugcagagcuacggcuuccagcccaccaacggcgugggcuaccagcccuaccgggugguggugcugagcuucgagcugcugcacgccccagccaccguguguggccccaagaagagcaccaaccuggugaagaacaagugcgugaacuucaacuucaacggccuuaccggcaccggcgugcugaccgagagcaacaagaaauuccugcccuuucagcaguucggccgggacaucgccgacaccaccgacgcugugcgggauccccagacccuggagauccuggacaucaccccuugcagcuucggcggcgugagcgugaucaccccaggcaccaacaccagcaaccagguggccgugcuguaccagggcgugaacugcaccgaggugcccguggccauccacgccgaccagcugacacccaccuggcgggucuacagcaccggcagcaacguguuccagacccgggccgguugccugaucggcgccgagcacgugaacaacagcuacgagugcgacauccccaucggcgccggcaucugugccagcuaccagacccagaccaauucaccccggagggcaaggagcguggccagccagagcaucaucgccuacaccaugagccugggcgccgagaacagcguggccuacagcaacaacagcaucgccauccccaccaacuucaccaucagcgugaccaccgagauucugcccgugagcaugaccaagaccagcguggacugcaccauguacaucugcggcgacagcaccgagugcagcaaccugcugcugcaguacggcagcuucugcacccagcugaaccgggcccugaccggcaucgccguggagcaggacaagaacacccaggagguguucgcccaggugaagcagaucuacaagaccccucccaucaaggacuucggcggcuucaacuucagccagauccugcccgaccccagcaagcccagcaagcggagcuucaucgaggaccugcuguucaacaaggugacccuagccgacgccggcuucaucaagcaguacggcgacugccucggcgacauagccgcccgggaccugaucugcgcccagaaguucaacggccugaccgugcugccuccccugcugaccgacgagaugaucgcccaguacaccagcgcccuguuagccggaaccaucaccagcggcuggacuuucggcgcuggagccgcucugcagauccccuucgccaugcagauggccuaccgguucaacggcaucggcgugacccagaacgugcuguacgagaaccagaagcugaucgccaaccaguucaacagcgccaucggcaagauccaggacagccugagcagcaccgcuagcgcccugggcaagcugcaggacguggugaaccagaacgcccaggcccugaacacccuggugaagcagcugagcagcaacuucggcgccaucagcagcgugcugaacgacauccugagccggcuggacccucccgaggccgaggugcagaucgaccggcugaucacuggccggcugcagagccugcagaccuacgugacccagcagcugauccgggccgccgagauucgggccagcgccaaccuggccgccaccaagaugagcgagugcgugcugggccagagcaagcggguggacuucugcggcaagggcuaccaccugaugagcuuuccccagagcgcaccccacggagugguguuccugcacgugaccuacgugcccgcccaggagaagaacuucaccaccgccccagccaucugccacgacggcaaggcccacuuuccccgggagggcguguucgugagcaacggcacccacugguucgugacccagcggaacuucuacgagccccagaucaucaccaccgacaacaccuucgugagcggcaacugcgacguggugaucggcaucgugaacaacaccguguacgauccccugcagcccgagcuggacagcuucaaggaggagcuggacaaguacuucaagaaucacaccagccccgacguggaccugggcgacaucagcggcaucaacgccagcguggugaacauccagaaggagaucgaucggcugaacgagguggccaagaaccugaacgagagccugaucgaccugcaggagcugggcaaguacgagcaguacaucaaguggcccugguacaucuggcugggcuucaucgccggccugaucgccaucgugauggugaccaucaugcugugcugcaugaccagcugcugcagcugccugaagggcuguugcagcugcggcagcugcugcaaguucgacgaggacgacagcgagcccgugcugaagggcgugaagcugcacuacaccugaggacuagucccuguucccagagcccacuuuuuuuucuuuuuuugaaauaaaauagccugucuuucagaucuaaaaaaaaaaaaaaaaaaaaaaaaaaaaaaaaaaaaaaaaaaaaaaaaaaaaaaaaaaaaaaaaaaaaaaaaaaaaaaaaaaaaaaaaaaaaaaaaaaaa

SEQ ID NO: 24891 - RNA, 4070 nt, Artificial Sequence
  SARS-CoV-2/Wuhan/WIV05/2019__EPI_ISL_402128 spike protein mRNA gc (1-1273)(K986P_V987P)
aggagagucccgcagucggcguccagcggcucugcuuguucgugugugugucguugcaggccuuauucaagcuuaccauguucguguuccuggugcugcugccccuggugagcagccagugcgugaaccugaccacccggacccagcugcccccugccuacaccaacagcuucacccggggcguguacuaccccgacaagguguuccggagcagcgugcugcacagcacccaggaccuguuccugcccuucuucagcaacgugaccugguuccacgccauccacgugagcggcaccaacggcaccaagcgguucgacaacccagugcugcccuucaacgacggcguguacuucgccagcaccgagaagucaaacaucauccggggcuggaucuucggcaccacccuggacagcaagacacagagccugcugaucgugaacaacgccaccaacguggugaucaaggugugcgaguuucaguucugcaacgaccccuuccugggcguguacuaccacaagaacaacaagagcuggauggagagcgaguuccgggucuacagcagcgcuaacaauugcaccuucgaguacgugagccagcccuuccugauggaccucgagggcaagcagggcaacuucaagaaccugcgggaguucguguucaagaacaucgauggcuacuucaagaucuacagcaagcacacccccaucaaccuggugcgggaccugccccagggauucagcgcccuggagccucugguggaccugcccaucggcaucaacaucaccagguuccagacccugcuggcccugcaccggagcuaccugacccccggcgacagcagcagcggcuggaccgccggcgccgccgcauacuacgugggcuaccugcagccacggaccuuccugcugaaguacaacgagaacggcaccaucaccgacgccguggacugcgcccuggacccccugagcgagaccaagugcacccuaaagagcuucaccguggagaagggcaucuaccagaccagcaacuuccgggugcagcccacugagagcaucgugcgguuccccaacauuaccaaccugugucccuucggcgagguguucaacgccacccgguucgccagcguguacgccuggaaccggaagcggaucagcaacugcguggccgacuacagcgugcuguacaacagcgccagcuucagcaccuucaagugcuacggcgugagcccuaccaagcugaacgaccugugcuucaccaacguguacgcugacagcuucgugauccggggcgacgaggugcggcagaucgcccccggccagaccggcaagaucgccgacuacaacuacaagcugcccgacgacuucaccggcugcgugaucgccuggaacagcaacaaccuggacagcaaggugggcggcaacuacaacuaccuguaccggcuguuccguaagagcaaccugaagccauucgagcgggacaucagcaccgagaucuaccaggccggcagcacccccugcaacgguguggagggcuuuaacugcuacuucccccugcagagcuacggcuuccagcccaccaacggcgugggcuaccagcccuaccgggugguggugcugagcuucgagcugcugcacgcccccgccaccgugugcggcccuaaaaagagcaccaaccuggugaagaacaagugcgugaacuucaauuucaacggccugaccggcaccggcgugcugaccgagagcaacaagaaguuccugcccuuccagcaguucggccgggauaucgccgacaccaccgacgcagugcgggacccccagacccuggagauccuggacaucaccccaugcagcuucggcggcgugagcgucaucacccccggcacaaacaccagcaaccagguggccgugcuguaccaggacgugaacugcaccgaggugcccguggccauccacgccgaccagcugacccccaccuggcggguguacagcaccggaagcaacguguuccagacccgggccggcugccugaucggcgccgagcacgugaacaacuccuacgagugcgacauccccaucggcgcuggcaucugcgccagcuaccagacccagaccaacagcccccggcgggcccggagcguggccagccagagcaucaucgccuacaccaugagcuuaggcgccgagaacagcguggccuacagcaacaacagcaucgcgaucccuaccaacuucaccaucagcgugaccaccgagauacugcccgugagcaugaccaagaccagcguggacuguaccauguacaucugcggcgacagcaccgagugcagcaaccugcugcugcaguacggcagcuucugcacccagcugaaccgggcccugaccggcaucgccguggagcaggacaagaacacccaagagguguucgcccaggugaagcagaucuacaagacucccccaaucaaggacuucggcggcuucaacuucagccagauccugcccgaccccagcaagcccagcaagcggagcuucaucgaggaccugcuguucaacaaggugacccuggccgacgccggcuucaucaagcaguacggcgauugccugggcgacaucgccgcucgggaccugaucugcgcccagaaguucaacgggcugaccgugcugcccccucugcugaccgacgagaugaucgcccaguacaccagcgcccugcuugccggcaccaucaccagcggcuggaccuucggcgccggcgcagcccugcagauccccuucgccaugcagauggccuaccgguucaacggcaucggcgugacccagaacgugcuguacgagaaccagaagcugaucgccaaccaguucaacagcgccaucggcaagauccaggacagccugagcagcaccgccagcgcccugggcaagcugcaggacguggugaaccagaacgcucaggcccugaacacccuggugaagcagcugagcagcaacuucggcgccaucagcucagugcugaaugacauccugagcaggcuggaucccccagaggccgaggugcagaucgaccggcugaucaccggccggcugcagagccugcagaccuacgugacccagcagcugauccgggccgccgagauccgggccagcgccaaccuggcagccaccaagaugagcgagugcgugcugggccagagcaagcggguggacuuuugcggcaagggcuaccaccugaugagcuucccccagagcgcuccccacggcgugguguuccuccacgugacauacguccccgcccaggagaagaacuucaccaccgcccccgccauuugccacgacggcaaggcccacuucccccgggagggcguguucgugagcaacggaacccacugguucgugacccagcggaacuucuacgagccucagaucaucaccaccgacaacaccuucgugagcggcaacugcgacguggugaucggcaucgugaacaacaccguguacgacccccugcagcccgagcuggacagcuucaaggaggagcuggacaaguacuucaagaaccacaccagcccagacguggaccugggcgacaucagcggcaucaacgccagcguggugaacauccagaaggagaucgaccggcugaacgagguggccaagaaccugaacgagagccugaucgaccugcaggagcugggcaaguacgagcaguacaucaaguggcccugguacaucuggcugggcuucaucgccggccugaucgccaucgugauggugaccaucaugcugugcugcaugaccagcugcuguagcugccugaagggcugcugcagcugcggcagcugcugcaaguucgacgaggacgacagcgagcccgugcugaagggcgugaagcugcacuacaccugaggacuagucccuguucccagagcccacuuuuuuuucuuuuuuugaaauaaaauagccugucuuucagaucuaaaaaaaaaaaaaaaaaaaaaaaaaaaaaaaaaaaaaaaaaaaaaaaaaaaaaaaaaaaaaaaaaaaaaaaaaaaaaaaaaaaaaaaaaaaaaaaaaaaa

SEQ ID NO: 24892 - RNA, 4070 nt, Artificial Sequence
  SARS-CoV-2/Wuhan/WIV05/2019__EPI_ISL_402128 spike protein mRNA gc (1-1273)(K986P_V987P_ D614G)
aggagagucccgcagucggcguccagcggcucugcuuguucgugugugugucguugcaggccuuauucaagcuuaccauguucguguuccuggugcugcugccccuggugagcagccagugcgugaaccugaccacccggacccagcugcccccugccuacaccaacagcuucacccggggcguguacuaccccgacaagguguuccggagcagcgugcugcacagcacccaggaccuguuccugcccuucuucagcaacgugaccugguuccacgccauccacgugagcggcaccaacggcaccaagcgguucgacaacccagugcugcccuucaacgacggcguguacuucgccagcaccgagaagucaaacaucauccggggcuggaucuucggcaccacccuggacagcaagacacagagccugcugaucgugaacaacgccaccaacguggugaucaaggugugcgaguuucaguucugcaacgaccccuuccugggcguguacuaccacaagaacaacaagagcuggauggagagcgaguuccgggucuacagcagcgcuaacaauugcaccuucgaguacgugagccagcccuuccugauggaccucgagggcaagcagggcaacuucaagaaccugcgggaguucguguucaagaacaucgauggcuacuucaagaucuacagcaagcacacccccaucaaccuggugcgggaccugccccagggauucagcgcccuggagccucugguggaccugcccaucggcaucaacaucaccagguuccagacccugcuggcccugcaccggagcuaccugacccccggcgacagcagcagcggcuggaccgccggcgccgccgcauacuacgugggcuaccugcagccacggaccuuccugcugaaguacaacgagaacggcaccaucaccgacgccguggacugcgcccuggacccccugagcgagaccaagugcacccuaaagagcuucaccguggagaagggcaucuaccagaccagcaacuuccgggugcagcccacugagagcaucgugcgguuccccaacauuaccaaccugugucccuucggcgagguguucaacgccacccgguucgccagcguguacgccuggaaccggaagcggaucagcaacugcguggccgacuacagcgugcuguacaacagcgccagcuucagcaccuucaagugcuacggcgugagcccuaccaagcugaacgaccugugcuucaccaacguguacgcugacagcuucgugauccggggcgacgaggugcggcagaucgcccccggccagaccggcaagaucgccgacuacaacuacaagcugcccgacgacuucaccggcugcgugaucgccuggaacagcaacaaccuggacagcaaggugggcggcaacuacaacuaccuguaccggcuguuccguaagagcaaccugaagccauucgagcgggacaucagcaccgagaucuaccaggccggcagcacccccugcaacgguguggagggcuuuaacugcuacuucccccugcagagcuacggcuuccagcccaccaacggcgugggcuaccagcccuaccgggugguggugcugagcuucgagcugcugcacgcccccgccaccgugugcggcccuaaaaagagcaccaaccuggugaagaacaagugcgugaacuucaauuucaacggccugaccggcaccggcgugcugaccgagagcaacaagaaguuccugcccuuccagcaguucggccgggauaucgccgacaccaccgacgcagugcgggacccccagacccuggagauccuggacaucaccccaugcagcuucggcggcgugagcgucaucacccccggcacaaacaccagcaaccagguggccgugcuguaccagggagugaacugcaccgaggugcccguggccauccacgccgaccagcugacccccaccuggcggguguacagcaccggcagcaacguguuccagacccgggccggcugccugaucggcgccgagcacgugaacaacuccuacgagugcgacauccccaucggcgcuggcaucugcgccagcuaccagacccagaccaacagcccccggcgggcccggagcguggccagccagagcaucaucgccuacaccaugagcuuaggcgccgagaacagcguggccuacagcaacaacagcaucgcgaucccuaccaacuucaccaucagcgugaccaccgagauacugcccgugagcaugaccaagaccagcguggacuguaccauguacaucugcggcgacagcaccgagugcagcaaccugcugcugcaguacggcagcuucugcacccagcugaaccgggcccugaccggcaucgccguggagcaggacaagaacacccaagagguguucgcccaggugaagcagaucuacaagacucccccaaucaaggacuucggcggcuucaacuucagccagauccugcccgaccccagcaagcccagcaagcggagcuucaucgaggaccugcuguucaacaaggugacccuggccgacgccggcuucaucaagcaguacggcgacugccugggggauaucgccgcucgggaccugaucugcgcccagaaguucaacggccugaccgugcugcccccucugcugaccgacgagaugaucgcccaguacaccagcgcccugcuugccggcaccaucaccagcggcuggaccuucggcgccggcgcagcccugcagauccccuucgccaugcagauggccuaccgguucaacggcaucggcgugacccagaacgugcuguacgagaaccagaagcugaucgccaaccaguucaacagcgccaucggcaagauccaggacagccugagcagcaccgccagcgcccugggcaagcugcaggacguggugaaccagaacgcucaggcccugaacacccuggugaagcagcugagcagcaacuucggcgccaucagcucagugcugaaugacauccugagcaggcuggaucccccagaggccgaggugcagaucgaccggcugaucaccggccggcugcagagccugcagaccuacgugacccagcagcugauccgggccgccgagauccgggccagcgccaaccuggcagccaccaagaugagcgagugcgugcugggccagagcaagcggguggacuuuugcggcaagggcuaccaccugaugagcuucccccagagcgcuccccacggcgugguguuccuccacgugacauacguccccgcccaggagaagaacuucaccaccgcccccgccauuugccacgacggcaaggcccacuucccccgggagggaguguucgugagcaacggcacccacugguucgugacccagcggaacuucuacgagccucagaucaucaccaccgacaacaccuucgugagcggcaacugcgacguggugaucggcaucgugaacaacaccguguacgacccccugcagcccgagcuggacagcuucaaggaggagcuggacaaguacuucaagaaccacaccagcccagacguggaccugggcgacaucagcggcaucaacgccagcguggugaacauccagaaggagaucgaccggcugaacgagguggccaagaaccugaacgagagccugaucgaccugcaggagcugggcaaguacgagcaguacaucaaguggcccugguacaucuggcugggcuucaucgccggccugaucgccaucgugauggugaccaucaugcugugcugcaugaccagcugcuguagcugccugaagggcugcugcagcugcggcagcugcugcaaguucgacgaggacgacagcgagcccgugcugaagggcgugaagcugcacuacaccugaggacuagucccuguucccagagcccacuuuuuuuucuuuuuuugaaauaaaauagccugucuuucagaucuaaaaaaaaaaaaaaaaaaaaaaaaaaaaaaaaaaaaaaaaaaaaaaaaaaaaaaaaaaaaaaaaaaaaaaaaaaaaaaaaaaaaaaaaaaaaaaaaaaaa

SEQ ID NO: 24893 - RNA, 4070 nt, Artificial Sequence
  SARS-CoV-2/Wuhan/WIV05/2019__EPI_ISL_402128 spike protein mRNA gc (1-1273)(K986P_V987P_A222V_D614G)
aggagagucccgcagucggcguccagcggcucugcuuguucgugugugugucguugcaggccuuauucaagcuuaccauguucguguuccuggugcugcugccccuggugagcagccagugcgugaaccugaccacccggacccagcugcccccugccuacaccaacagcuucacccggggcguguacuaccccgacaagguguuccggagcagcgugcugcacagcacccaggaccuguuccugcccuucuucagcaacgugaccugguuccacgccauccacgugagcggcaccaacggcaccaagcgguucgacaacccagugcugcccuucaacgacggcguguacuucgccagcaccgagaagucaaacaucauccggggcuggaucuucggcaccacccuggacagcaagacacagagccugcugaucgugaacaacgccaccaacguggugaucaaggugugcgaguuucaguucugcaacgaccccuuccugggcguguacuaccacaagaacaacaagagcuggauggagagcgaguuccgggucuacagcagcgcuaacaauugcaccuucgaguacgugagccagcccuuccugauggaccucgagggcaagcagggcaacuucaagaaccugcgggaguucguguucaagaacaucgauggcuacuucaagaucuacagcaagcacacccccaucaaccuggugcgggaccugccccagggauucagcgugcuggagccucugguggaccugcccaucggcaucaacaucaccagguuccagacccugcuggcccugcaccggagcuaccugacccccggcgacagcagcagcggcuggaccgccggcgccgccgccuacuacgugggcuaccugcagccacggaccuuccugcugaaguacaacgagaacggcaccaucaccgacgcaguggacugcgcccuggacccccugagcgagaccaagugcacccuaaagagcuucaccguggagaagggcaucuaccagaccagcaacuuccgggugcagcccacugagagcaucgugcgguuccccaacauuaccaaccugugucccuucggcgagguguucaacgccacccgguucgccagcguguacgccuggaaccggaagcggaucagcaacugcguggccgacuacagcgugcuguacaacagcgccagcuucagcaccuucaagugcuacggcgugagcccuaccaagcugaacgaccugugcuucaccaacguguacgccgacagcuucgugauccggggcgacgaggugcggcagaucgcucccggccagaccggcaagaucgccgacuacaacuacaagcugcccgacgacuucaccggcugcgugaucgccuggaacagcaacaaccuggacagcaaggugggcggcaacuacaacuaccuguaccggcuguuccguaagagcaaccugaagccauucgagcgggacaucagcaccgagaucuaccaggccggcagcacccccugcaacgguguggagggcuuuaacugcuacuucccccugcagagcuacggcuuccagcccaccaacggcgugggcuaccagcccuaccgggugguggugcugagcuucgagcugcugcacgcccccgccaccgugugcggcccuaaaaagagcaccaaccuggugaagaacaagugcgugaacuucaauuucaacggccugaccggcaccggcgugcugaccgagagcaacaagaaguuccugcccuuccagcaguucggccgggauaucgccgacaccaccgacgccgugcgggacccccagacccuggagauccuggacaucaccccaugcagcuucggcggcgucagcgugaucacccccggcacaaacaccagcaaccagguggcagugcuguaccagggagugaacugcaccgaggugcccguggccauccacgccgaccagcugacccccaccuggcggguguacagcaccggcagcaacguguuccagacccgggccggcugccugaucggcgccgagcacgugaacaacuccuacgagugcgacauccccaucggcgccggcaucugcgcuagcuaccagacccagaccaacagcccccggcgggcccggagcguggccagccagagcaucaucgccuacaccaugagcuuaggcgccgagaacagcguggccuacagcaacaacagcaucgccaucccuaccaacuucaccaucagcgugaccaccgagauacugcccgugagcaugaccaagaccagcguggacuguaccauguacaucugcggcgacagcaccgagugcagcaaccugcugcugcaguacggcagcuucugcacccagcugaaccgggcgcugaccggcaucgccguggagcaggacaagaacacccaagagguguucgcccaggugaagcagaucuacaagacucccccaaucaaggacuucggcggcuucaacuucagccagauccugcccgaccccagcaagcccagcaagcggagcuucaucgaggaccugcuguucaacaaggugacccuggccgacgccggcuucaucaagcaguacggcgacugccugggggauaucgccgcccgggaccugaucugcgcucagaaguucaacggccugaccgugcugcccccucugcugaccgacgagaugaucgcccaguacaccagcgcccugcuugccggcaccaucaccagcggcuggaccuucggcgccggcgccgcacugcagauccccuucgccaugcagauggccuaccgguucaacggcaucggcgugacccagaacgugcuguacgagaaccagaagcugaucgccaaccaguucaacagcgccaucggcaagauccaggacagccugagcagcaccgccagcgcccugggcaagcugcaggacguggugaaccagaacgcccaggcucugaacacccuggugaagcagcugagcagcaacuucggcgccaucagcucagugcugaaugacauccugagcaggcuggaucccccagaggccgaggugcagaucgaccggcugaucaccggccggcugcagagccugcagaccuacgugacccagcagcugauccgggccgccgagauccgggccagcgccaaccuggccgcaaccaagaugagcgagugcgugcugggccagagcaagcggguggacuuuugcggcaagggcuaccaccugaugagcuucccccagagcgcuccccacggcgugguguuccuccacgucacauacgugcccgcccaggagaagaacuucaccaccgcccccgccauuugccacgacggcaaggcccacuucccccgggagggaguguucgugagcaacggcacccacugguucgugacccagcggaacuucuacgagccucagaucaucaccaccgacaacaccuucgugagcggcaacugcgacguggugaucggcaucgugaacaacaccguguacgacccccugcagcccgagcuggacagcuucaaggaggagcuggacaaguacuucaagaaccacaccagcccagacguggaccugggcgacaucagcggcaucaacgccagcguggugaacauccagaaggagaucgaccggcugaacgagguggccaagaaccugaacgagagccugaucgaccugcaggagcugggcaaguacgagcaguacaucaaguggcccugguacaucuggcugggcuucaucgccggccugaucgccaucgugauggugaccaucaugcugugcugcaugaccagcugcuguagcugccugaagggcugcugcagcugcggcagcugcugcaaguucgacgaggacgacagcgagcccgugcugaagggcgugaagcugcacuacaccugaggacuagucccuguucccagagcccacuuuuuuuucuuuuuuugaaauaaaauagccugucuuucagaucuaaaaaaaaaaaaaaaaaaaaaaaaaaaaaaaaaaaaaaaaaaaaaaaaaaaaaaaaaaaaaaaaaaaaaaaaaaaaaaaaaaaaaaaaaaaaaaaaaaaa

SEQ ID NO: 24894 - RNA, 4070 nt, Artificial Sequence
  SARS-CoV-2/Wuhan/WIV05/2019__EPI_ISL_402128 spike protein mRNA gc (1-1273)(K986P_V987P_N439K_D614G)
aggagagucccgcagucggcguccagcggcucugcuuguucgugugugugucguugcaggccuuauucaagcuuaccauguucguguuccuggugcugcugccccuggugagcagccagugcgugaaccugaccacccggacccagcugcccccugccuacaccaacagcuucacccggggcguguacuaccccgacaagguguuccggagcagcgugcugcacagcacccaggaccuguuccugcccuucuucagcaacgugaccugguuccacgccauccacgugagcggcaccaacggcaccaagcgguucgacaacccagugcugcccuucaacgacggcguguacuucgccagcaccgagaagucaaacaucauccggggcuggaucuucggcaccacccuggacagcaagacacagagccugcugaucgugaacaacgccaccaacguggugaucaaggugugcgaguuucaguucugcaacgaccccuuccugggcguguacuaccacaagaacaacaagagcuggauggagagcgaguuccgggucuacagcagcgcuaacaauugcaccuucgaguacgugagccagcccuuccugauggaccucgagggcaagcagggcaacuucaagaaccugcgggaguucguguucaagaacaucgauggcuacuucaagaucuacagcaagcacacccccaucaaccuggugcgggaccugccccagggauucagcgcccuggagccucugguggaccugcccaucggcaucaacaucaccagguuccagacccugcuggcccugcaccggagcuaccugacccccggcgacagcagcagcggcuggaccgccggcgccgccgcauacuacgugggcuaccugcagccacggaccuuccugcugaaguacaacgagaacggcaccaucaccgacgccguggacugcgcccuggacccccugagcgagaccaagugcacccuaaagagcuucaccguggagaagggcaucuaccagaccagcaacuuccgggugcagcccacugagagcaucgugcgguuccccaacauuaccaaccugugucccuucggcgagguguucaacgccacccgguucgccagcguguacgccuggaaccggaagcggaucagcaacugcguggccgacuacagcgugcuguacaacagcgccagcuucagcaccuucaagugcuacggcgugagcccuaccaagcugaacgaccugugcuucaccaacguguacgcugacagcuucgugauccggggcgacgaggugcggcagaucgcccccggccagaccggcaagaucgccgacuacaacuacaagcugcccgacgacuucaccggcugcgugaucgccuggaacagcaagaaccuggacagcaaggugggcggcaacuacaacuaccuguaccggcuguuccguaagagcaaccugaagccauucgagcgggacaucagcaccgagaucuaccaggccggcagcacccccugcaacgguguggagggcuuuaacugcuacuucccccugcagagcuacggcuuccagcccaccaacggcgugggcuaccagcccuaccgggugguggugcugagcuucgagcugcugcacgcccccgccaccgugugcggcccuaaaaagagcaccaaccuggugaagaacaagugcgugaacuucaacuucaauggccugaccggcaccggcgugcugaccgagagcaacaagaaguuccugcccuuccagcaguucggccgggauaucgccgacaccaccgacgcagugcgggacccccagacccuggagauccuggacaucaccccaugcagcuucggcggcgugagcgucaucacccccggcacaaacaccagcaaccagguggccgugcuguaccagggagugaacugcaccgaggugcccguggccauccacgccgaccagcugacccccaccuggcggguguacagcaccggcagcaacguguuccagacccgggccggcugccugaucggcgccgagcacgugaacaacuccuacgagugcgacauccccaucggcgcuggcaucugcgccagcuaccagacccagaccaacagcccccggcgggcccggagcguggccagccagagcaucaucgccuacaccaugagcuuaggcgccgagaacagcguggccuacagcaacaacagcaucgcgaucccuaccaacuucaccaucagcgugaccaccgagauacugcccgugagcaugaccaagaccagcguggacuguaccauguacaucugcggcgacagcaccgagugcagcaaccugcugcugcaguacggcagcuucugcacccagcugaaccgggcccugaccggcaucgccguggagcaggacaagaacacccaagagguguucgcccaggugaagcagaucuacaagacucccccaaucaaggacuucggcggcuucaacuucagccagauccugcccgaccccagcaagcccagcaagcggagcuucaucgaggaccugcuguucaacaaggugacccuggccgacgccggcuucaucaagcaguacggcgacugccugggggauaucgccgcucgggaccugaucugcgcccagaaguucaacggccugaccgugcugcccccucugcugaccgacgagaugaucgcccaguacaccagcgcccugcuugccggcaccaucaccagcggcuggaccuucggcgccggcgcagcccugcagauccccuucgccaugcagauggccuaccgguucaacggcaucggcgugacccagaacgugcuguacgagaaccagaagcugaucgccaaccaguucaacagcgccaucggcaagauccaggacagccugagcagcaccgccagcgcccugggcaagcugcaggacguggugaaccagaacgcucaggcccugaacacccuggugaagcagcugagcagcaacuucggcgccaucagcucagugcugaacgacauccugagcaggcuggaucccccagaggccgaggugcagaucgaccggcugaucaccggccggcugcagagccugcagaccuacgugacccagcagcugauccgggccgccgagauccgggccagcgccaaucuggcagccaccaagaugagcgagugcgugcugggccagagcaagcggguggacuuuugcggcaagggcuaccaccugaugagcuucccccagagcgcuccccacggcgugguguuccuccacgugacauacguccccgcccaggagaagaacuucaccaccgcccccgccauuugccacgacggcaaggcccacuucccccgggagggaguguucgugagcaacggcacccacugguucgugacccagcggaacuucuacgagccucagaucaucaccaccgacaacaccuucgugagcggcaacugcgacguggugaucggcaucgugaacaacaccguguacgacccccugcagcccgagcuggacagcuucaaggaggagcuggacaaguacuucaagaaccacaccagcccagacguggaccugggcgacaucagcggcaucaacgccagcguggugaacauccagaaggagaucgaccggcugaacgagguggccaagaaccugaacgagagccugaucgaccugcaggagcugggcaaguacgagcaguacaucaaguggcccugguacaucuggcugggcuucaucgccggccugaucgccaucgugauggugaccaucaugcugugcugcaugaccagcugcuguagcugccugaagggcugcugcagcugcggcagcugcugcaaguucgacgaggacgacagcgagcccgugcugaagggcgugaagcugcacuacaccugaggacuagucccuguucccagagcccacuuuuuuuucuuuuuuugaaauaaaauagccugucuuucagaucuaaaaaaaaaaaaaaaaaaaaaaaaaaaaaaaaaaaaaaaaaaaaaaaaaaaaaaaaaaaaaaaaaaaaaaaaaaaaaaaaaaaaaaaaaaaaaaaaaaaa

SEQ ID NO: 24895 - RNA, 4070 nt, Artificial Sequence
  SARS-CoV-2/Wuhan/WIV05/2019__EPI_ISL_402128 spike protein mRNA gc (1-1273)(K986P_V987P_S477N_D614G)
aggagagucccgcagucggcguccagcggcucugcuuguucgugugugugucguugcaggccuuauucaagcuuaccauguucguguuccuggugcugcugccccuggugagcagccagugcgugaaccugaccacccggacccagcugcccccugccuacaccaacagcuucacccggggcguguacuaccccgacaagguguuccggagcagcgugcugcacagcacccaggaccuguuccugcccuucuucagcaacgugaccugguuccacgccauccacgugagcggcaccaacggcaccaagcgguucgacaacccagugcugcccuucaacgacggcguguacuucgccagcaccgagaagucaaacaucauccggggcuggaucuucggcaccacccuggacagcaagacacagagccugcugaucgugaacaacgccaccaacguggugaucaaggugugcgaguuucaguucugcaacgaccccuuccugggcguguacuaccacaagaacaacaagagcuggauggagagcgaguuccgggucuacagcagcgcuaacaauugcaccuucgaguacgugagccagcccuuccugauggaccucgagggcaagcagggcaacuucaagaaccugcgggaguucguguucaagaacaucgauggcuacuucaagaucuacagcaagcacacccccaucaaccuggugcgggaccugccccagggauucagcgcccuggagccucugguggaccugcccaucggcaucaacaucaccagguuccagacccugcuggcccugcaccggagcuaccugacccccggcgacagcagcagcggcuggaccgccggcgccgccgcauacuacgugggcuaccugcagccacggaccuuccugcugaaguacaacgagaacggcaccaucaccgacgccguggacugcgcccuggacccccugagcgagaccaagugcacccuaaagagcuucaccguggagaagggcaucuaccagaccagcaacuuccgggugcagcccacugagagcaucgugcgguuccccaacauuaccaaccugugucccuucggcgagguguucaacgccacccgguucgccagcguguacgccuggaaccggaagcggaucagcaacugcguggccgacuacagcgugcuguacaacagcgccagcuucagcaccuucaagugcuacggcgugagcccuaccaagcugaacgaccugugcuucaccaacguguacgcugacagcuucgugauccggggcgacgaggugcggcagaucgcccccggccagaccggcaagaucgccgacuacaacuacaagcugcccgacgacuucaccggcugcgugaucgccuggaacagcaacaaccuggacagcaaggugggcggcaacuacaacuaccuguaccggcuguuccguaagagcaaccugaagccauucgagcgggacaucagcaccgagaucuaccaggccggcaacacccccugcaacgguguggagggcuuuaacugcuacuucccccugcagagcuacggcuuccagcccaccaacggcgugggcuaccagcccuaccgggugguggugcugagcuucgagcugcugcacgcccccgccaccgugugcggcccuaaaaagagcaccaaccuggugaagaacaagugcgugaauuucaacuucaacggccugaccggcaccggcgugcugaccgagagcaacaagaaguuccugcccuuccagcaguucggccgggauaucgccgacaccaccgacgcagugcgggacccccagacccuggagauccuggacaucaccccaugcagcuucggcggcgugagcgucaucacccccggcacaaacaccagcaaccagguggccgugcuguaccagggagugaacugcaccgaggugcccguggccauccacgccgaccagcugacccccaccuggcggguguacagcaccggcagcaacguguuccagacccgggccggcugccugaucggcgccgagcacgugaacaacagcuacgagugcgacauccccaucggcgcuggcaucugcgccuccuaccagacccagaccaacagcccccggcgggcccggagcguggccagccagagcaucaucgccuacaccaugagcuuaggcgccgagaacagcguggccuacagcaacaacagcaucgcgaucccuaccaacuucaccaucagcgugaccaccgagauacugcccgugagcaugaccaagaccagcguggacuguaccauguacaucugcggcgacagcaccgagugcagcaaccugcugcugcaguacggcagcuucugcacccagcugaaccgggcccugaccggcaucgccguggagcaggacaagaacacccaagagguguucgcccaggugaagcagaucuacaagacucccccaaucaaggacuucggcggcuucaacuucagccagauccugcccgaccccagcaagcccagcaagcggagcuucaucgaggaccugcuguucaacaaggugacccuggccgacgccggcuucaucaagcaguacggcgacugccugggggauaucgccgcucgggaccugaucugcgcccagaaguucaacggccugaccgugcugcccccucugcugaccgacgagaugaucgcccaguacaccagcgcccugcuugccggcaccaucaccagcggcuggaccuucggcgccggcgcagcccugcagauccccuucgccaugcagauggccuaccgguucaacggcaucggcgugacccagaacgugcuguacgagaaccagaagcugaucgccaaccaguucaacagcgccaucggcaagauccaggacagccugagcagcaccgccagcgcccugggcaagcugcaggacguggugaaccagaacgcucaggcccugaacacccuggugaagcagcugagcagcaauuucggcgccaucagcagcgugcugaacgacauccugucaaggcuggaucccccagaggccgaggugcagaucgaccggcugaucaccggccggcugcagagccugcagaccuacgugacccagcagcugauccgggccgccgagauccgggccagcgccaaccuggcagccaccaagaugagcgagugcgugcugggccagagcaagcggguggacuuuugcggcaagggcuaccaccugaugagcuucccccagagcgcuccccacggcgugguguuccuccacgugacauacguccccgcccaggagaagaacuucaccaccgcccccgccauuugccacgacggcaaggcccacuucccccgggagggaguguucgugagcaacggcacccacugguucgugacccagcggaacuucuacgagccucagaucaucaccaccgacaacaccuucgugagcggcaacugcgacguggugaucggcaucgugaacaacaccguguacgacccccugcagcccgagcuggacagcuucaaggaggagcuggacaaguacuucaagaaccacaccagcccagacguggaccugggcgacaucagcggcaucaacgccagcguggugaacauccagaaggagaucgaccggcugaacgagguggccaagaaccugaacgagagccugaucgaccugcaggagcugggcaaguacgagcaguacaucaaguggcccugguacaucuggcugggcuucaucgccggccugaucgccaucgugauggugaccaucaugcugugcugcaugaccagcugcuguagcugccugaagggcugcugcagcugcggcagcugcugcaaguucgacgaggacgacagcgagcccgugcugaagggcgugaagcugcacuacaccugaggacuagucccuguucccagagcccacuuuuuuuucuuuuuuugaaauaaaauagccugucuuucagaucuaaaaaaaaaaaaaaaaaaaaaaaaaaaaaaaaaaaaaaaaaaaaaaaaaaaaaaaaaaaaaaaaaaaaaaaaaaaaaaaaaaaaaaaaaaaaaaaaaaaa

SEQ ID NO: 24896 - RNA, 4070 nt, Artificial Sequence
  SARS-CoV-2/Wuhan/WIV05/2019__EPI_ISL_402128 spike protein mRNA gc (1-1273)(K986P_V987P_N501Y_D614G)
aggagagucccgcagucggcguccagcggcucugcuuguucgugugugugucguugcaggccuuauucaagcuuaccauguucguguuccuggugcugcugccccuggugagcagccagugcgugaaccugaccacccggacccagcugcccccugccuacaccaacagcuucacccggggcguguacuaccccgacaagguguuccggagcagcgugcugcacagcacccaggaccuguuccugcccuucuucagcaacgugaccugguuccacgccauccacgugagcggcaccaacggcaccaagcgguucgacaacccagugcugcccuucaacgacggcguguacuucgccagcaccgagaagucaaacaucauccggggcuggaucuucggcaccacccuggacagcaagacacagagccugcugaucgugaacaacgccaccaacguggugaucaaggugugcgaguuucaguucugcaacgaccccuuccugggcguguacuaccacaagaacaacaagagcuggauggagagcgaguuccgggucuacagcagcgcuaacaauugcaccuucgaguacgugagccagcccuuccugauggaccucgagggcaagcagggcaacuucaagaaccugcgggaguucguguucaagaacaucgauggcuacuucaagaucuacagcaagcacacccccaucaaccuggugcgggaccugccccagggauucagcgcccuggagccucugguggaccugcccaucggcaucaacaucaccagguuccagacccugcuggcccugcaccggagcuaccugacccccggcgacagcagcagcggcuggaccgccggcgccgccgcauacuacgugggcuaccugcagccacggaccuuccugcugaaguacaacgagaacggcaccaucaccgacgccguggacugcgcccuggacccccugagcgagaccaagugcacccuaaagagcuucaccguggagaagggcaucuaccagaccagcaacuuccgggugcagcccacugagagcaucgugcgguuccccaacauuaccaaccugugucccuucggcgagguguucaacgccacccgguucgccagcguguacgccuggaaccggaagcggaucagcaacugcguggccgacuacagcgugcuguacaacagcgccagcuucagcaccuucaagugcuacggcgugagcccuaccaagcugaacgaccugugcuucaccaacguguacgcugacagcuucgugauccggggcgacgaggugcggcagaucgcccccggccagaccggcaagaucgccgacuacaacuacaagcugcccgacgacuucaccggcugcgugaucgccuggaacagcaacaaccuggacagcaaggugggcggcaacuacaacuaccuguaccggcuguuccguaagagcaaccugaagccauucgagcgggacaucagcaccgagaucuaccaggccggcagcacccccugcaacgguguggagggcuuuaacugcuacuucccccugcagagcuacggcuuccagcccaccuacggcgugggcuaccagcccuaccgggugguggugcugagcuucgagcugcugcacgcccccgccaccgugugcggcccuaaaaagagcaccaaccuggugaagaacaagugcgugaacuucaacuucaauggccugaccggcaccggcgugcugaccgagagcaacaagaaguuccugcccuuccagcaguucggccgggauaucgccgacaccaccgacgcagugcgggacccccagacccuggagauccuggacaucaccccaugcagcuucggcggcgugagcgucaucacccccggcacaaacaccagcaaccagguggccgugcuguaccagggagugaacugcaccgaggugcccguggccauccacgccgaccagcugacccccaccuggcggguguacagcaccggcagcaacguguuccagacccgggccggcugccugaucggcgccgagcacgugaacaacuccuacgagugcgacauccccaucggcgcuggcaucugcgccagcuaccagacccagaccaacagcccccggcgggcccggagcguggccagccagagcaucaucgccuacaccaugagcuuaggcgccgagaacagcguggccuacagcaacaacagcaucgcgaucccuaccaacuucaccaucagcgugaccaccgagauacugcccgugagcaugaccaagaccagcguggacuguaccauguacaucugcggcgacagcaccgagugcagcaaccugcugcugcaguacggcagcuucugcacccagcugaaccgggcccugaccggcaucgccguggagcaggacaagaacacccaagagguguucgcccaggugaagcagaucuacaagacucccccaaucaaggacuucggcggcuucaacuucagccagauccugcccgaccccagcaagcccagcaagcggagcuucaucgaggaccugcuguucaacaaggugacccuggccgacgccggcuucaucaagcaguacggcgacugccugggggauaucgccgcucgggaccugaucugcgcccagaaguucaacggccugaccgugcugcccccucugcugaccgacgagaugaucgcccaguacaccagcgcccugcuugccggcaccaucaccagcggcuggaccuucggcgccggcgcagcccugcagauccccuucgccaugcagauggccuaccgguucaacggcaucggcgugacccagaacgugcuguacgagaaccagaagcugaucgccaaccaguucaacagcgccaucggcaagauccaggacagccugagcagcaccgccagcgcccugggcaagcugcaggacguggugaaccagaacgcucaggcccugaacacccuggugaagcagcugagcagcaacuucggcgccaucagcucagugcugaacgacauccugagcaggcuggaucccccagaggccgaggugcagaucgaccggcugaucaccggccggcugcagagccugcagaccuacgugacccagcagcugauccgggccgccgagauccgggccagcgccaaucuggcagccaccaagaugagcgagugcgugcugggccagagcaagcggguggacuuuugcggcaagggcuaccaccugaugagcuucccccagagcgcuccccacggcgugguguuccuccacgugacauacguccccgcccaggagaagaacuucaccaccgcccccgccauuugccacgacggcaaggcccacuucccccgggagggaguguucgugagcaacggcacccacugguucgugacccagcggaacuucuacgagccucagaucaucaccaccgacaacaccuucgugagcggcaacugcgacguggugaucggcaucgugaacaacaccguguacgacccccugcagcccgagcuggacagcuucaaggaggagcuggacaaguacuucaagaaccacaccagcccagacguggaccugggcgacaucagcggcaucaacgccagcguggugaacauccagaaggagaucgaccggcugaacgagguggccaagaaccugaacgagagccugaucgaccugcaggagcugggcaaguacgagcaguacaucaaguggcccugguacaucuggcugggcuucaucgccggccugaucgccaucgugauggugaccaucaugcugugcugcaugaccagcugcuguagcugccugaagggcugcugcagcugcggcagcugcugcaaguucgacgaggacgacagcgagcccgugcugaagggcgugaagcugcacuacaccugaggacuagucccuguucccagagcccacuuuuuuuucuuuuuuugaaauaaaauagccugucuuucagaucuaaaaaaaaaaaaaaaaaaaaaaaaaaaaaaaaaaaaaaaaaaaaaaaaaaaaaaaaaaaaaaaaaaaaaaaaaaaaaaaaaaaaaaaaaaaaaaaaaaaa

SEQ ID NO: 24897 - RNA, 4064 nt, Artificial Sequence
  SARS-CoV-2/Wuhan/WIV05/2019__EPI_ISL_402128 spike protein mRNA gc (1-1273)(K986P_V987P_H69del_V70del_D614G)
aggagagucccgcagucggcguccagcggcucugcuuguucgugugugugucguugcaggccuuauucaagcuuaccauguucguguuccuggugcugcugccccuggugagcagccagugcgugaaccugaccacccggacccagcugcccccugccuacaccaacagcuucacccggggcguguacuaccccgacaagguguuccggagcagcgugcugcacagcacccaggaccuguuccugcccuucuucagcaacgugaccugguuccacgccaucagcggcaccaacggcaccaagcgguucgacaacccagugcugcccuucaacgacggcguguacuucgccagcaccgagaagucaaacaucauccggggcuggaucuucggcaccacccuggacagcaagacacagagccugcugaucgugaacaacgccaccaacguggugaucaaggugugcgaguuucaguucugcaacgaccccuuccugggcguguacuaccacaagaacaacaagagcuggauggagagcgaguuccggguguacagcagcgcuaacaauugcaccuucgaguacgucagccagcccuuccugauggaccucgagggcaagcagggcaacuucaagaaccugcgggaguucguguucaagaacaucgauggcuacuucaagaucuacagcaagcacacccccaucaaccuggugcgggaccugccccagggauucagcgcccuggagccucugguggaccugcccaucggcaucaacaucaccagguuccagacccugcuggcccugcaccggagcuaccugacccccggcgacagcagcagcggcuggaccgccggcgccgccgcauacuacgugggcuaccugcagccacggaccuuccugcugaaguacaacgagaacggcaccaucaccgacgccguggacugcgcccuggacccccugagcgagaccaagugcacccuaaagagcuucaccguggagaagggcaucuaccagaccagcaacuuccgggugcagcccacugagagcaucgugcgguuccccaacauuaccaaccugugucccuucggcgagguguucaacgccacccgguucgccagcguguacgccuggaaccggaagcggaucagcaacugcguggccgacuacagcgugcuguacaacagcgccagcuucagcaccuucaagugcuacggcgugagcccuaccaagcugaacgaccugugcuucaccaacguguacgcugacagcuucgugauccggggcgacgaggugcggcagaucgcccccggccagaccggcaagaucgccgacuacaacuacaagcugcccgacgacuucaccggcugcgugaucgccuggaacagcaacaaccuggacagcaaggugggcggcaacuacaacuaccuguaccggcuguuccguaagagcaaccugaagccauucgagcgggacaucagcaccgagaucuaccaggccggcagcacccccugcaacgguguggagggcuuuaacugcuacuucccccugcagagcuacggcuuccagcccaccaacggcgugggcuaccagcccuaccgggugguggugcugagcuucgagcugcugcacgcccccgccaccgugugcggcccuaaaaagagcaccaaccuggugaagaacaagugcgugaacuucaauuucaacggccugaccggcaccggcgugcugaccgagagcaacaagaaguuccugcccuuccagcaguucggccgggauaucgccgacaccaccgacgcagugcgggacccccagacccuggagauccuggacaucaccccaugcagcuucggcggcgugagcgugaucacccccggcacaaacaccagcaaccaggucgccgugcuguaccagggagugaacugcaccgaggugcccguggccauccacgccgaccagcugacccccaccuggcggguguacagcaccggcagcaacguguuccagacccgggccggcugccugaucggcgccgagcacgugaacaacuccuacgagugcgacauccccaucggcgcuggcaucugcgccagcuaccagacccagaccaacagcccccggcgggcccggagcguggccagccagagcaucaucgccuacaccaugagcuuaggcgccgagaacagcguggccuacagcaacaacagcaucgcgaucccuaccaacuucaccaucagcgugaccaccgagauacugcccgugagcaugaccaagaccagcguggacuguaccauguacaucugcggcgacagcaccgagugcagcaaccugcugcugcaguacggcagcuucugcacccagcugaaccgggcccugaccggcaucgccguggagcaggacaagaacacccaagagguguucgcccaggugaagcagaucuacaagacucccccaaucaaggacuucggcggcuucaacuucagccagauccugcccgaccccagcaagcccagcaagcggagcuucaucgaggaccugcuguucaacaaggugacccuggccgacgccggcuucaucaagcaguacggcgacugccugggggauaucgccgcucgggaccugaucugcgcccagaaguucaacggccugaccgugcugcccccucugcugaccgacgagaugaucgcccaguacaccagcgcccugcuugccggcaccaucaccagcggcuggaccuucggcgccggcgcagcccugcagauccccuucgccaugcagauggccuaccgguucaacggcaucggcgugacccagaacgugcuguacgagaaccagaagcugaucgccaaccaguucaacagcgccaucggcaagauccaggacagccugagcagcaccgccagcgcccugggcaagcugcaggacguggugaaccagaacgcucaggcccugaacacccuggugaagcagcugagcagcaacuucggcgccaucagcucagugcugaaugacauccugagcaggcuggaucccccagaggccgaggugcagaucgaccggcugaucaccggccggcugcagagccugcagaccuacgugacccagcagcugauccgggccgccgagauccgggccagcgccaaccuggcagccaccaagaugagcgagugcgugcugggccagagcaagcggguggacuuuugcggcaagggcuaccaccugaugagcuucccccagagcgcuccccacggcgugguguuccuccacgugacauacgugcccgcccaggagaagaacuucaccaccgcccccgccauuugccacgacggcaaggcccacuucccccgggagggagucuucgugagcaacggcacccacugguucgugacccagcggaacuucuacgagccucagaucaucaccaccgacaacaccuucgugagcggcaacugcgacguggugaucggcaucgugaacaacaccguguacgacccccugcagcccgagcuggacagcuucaaggaggagcuggacaaguacuucaagaaccacaccagcccagacguggaccugggcgacaucagcggcaucaacgccagcguggugaacauccagaaggagaucgaccggcugaacgagguggccaagaaccugaacgagagccugaucgaccugcaggagcugggcaaguacgagcaguacaucaaguggcccugguacaucuggcugggcuucaucgccggccugaucgccaucgugauggugaccaucaugcugugcugcaugaccagcugcuguagcugccugaagggcugcugcagcugcggcagcugcugcaaguucgacgaggacgacagcgagcccgugcugaagggcgugaagcugcacuacaccugaggacuagucccuguucccagagcccacuuuuuuuucuuuuuuugaaauaaaauagccugucuuucagaucuaaaaaaaaaaaaaaaaaaaaaaaaaaaaaaaaaaaaaaaaaaaaaaaaaaaaaaaaaaaaaaaaaaaaaaaaaaaaaaaaaaaaaaaaaaaaaaaaaaaa

SEQ ID NO: 24898 - RNA, 4070 nt, Artificial Sequence
  SARS-CoV-2/Wuhan/WIV05/2019__EPI_ISL_402128 spike protein mRNA gc (1-1273)(K986P_V987P_Y453F_D614G)
aggagagucccgcagucggcguccagcggcucugcuuguucgugugugugucguugcaggccuuauucaagcuuaccauguucguguuccuggugcugcugccccuggugagcagccagugcgugaaccugaccacccggacccagcugcccccugccuacaccaacagcuucacccggggcguguacuaccccgacaagguguuccggagcagcgugcugcacagcacccaggaccuguuccugcccuucuucagcaacgugaccugguuccacgccauccacgugagcggcaccaacggcaccaagcgguucgacaacccagugcugcccuucaacgacggcguguacuucgccagcaccgagaagucaaacaucauccggggcuggaucuucggcaccacccuggacagcaagacacagagccugcugaucgugaacaacgccaccaacguggugaucaaggugugcgaguuucaguucugcaacgaccccuuccugggcguguacuaccacaagaacaacaagagcuggauggagagcgaguuccgggucuacagcagcgcuaacaauugcaccuucgaguacgugagccagcccuuccugauggaccucgagggcaagcagggcaacuucaagaaccugcgggaguucguguucaagaacaucgauggcuacuucaagaucuacagcaagcacacccccaucaaccuggugcgggaccugccccagggauucagcgcccuggagccucugguggaccugcccaucggcaucaacaucaccagguuccagacccugcuggcccugcaccggagcuaccugacccccggcgacagcagcagcggcuggaccgccggcgccgccgcauacuacgugggcuaccugcagccacggaccuuccugcugaaguacaacgagaacggcaccaucaccgacgccguggacugcgcccuggacccccugagcgagaccaagugcacccuaaagagcuucaccguggagaagggcaucuaccagaccagcaacuuccgggugcagcccacugagagcaucgugcgguuccccaacauuaccaaccugugucccuucggcgagguguucaacgccacccgguucgccagcguguacgccuggaaccggaagcggaucagcaacugcguggccgacuacagcgugcuguacaacagcgccagcuucagcaccuucaagugcuacggcgugagcccuaccaagcugaacgaccugugcuucaccaacguguacgcugacagcuucgugauccggggcgacgaggugcggcagaucgcccccggccagaccggcaagaucgccgacuacaacuacaagcugcccgacgacuucaccggcugcgugaucgccuggaacagcaacaaccuggacagcaaggugggcggcaacuacaacuaccuguuccggcuguuccguaagagcaaccugaagccauuugagcgggacaucagcaccgagaucuaccaggccggcagcacccccugcaacgguguggagggcuucaacugcuacuucccccugcagagcuacggcuuccagcccaccaacggcgugggcuaccagcccuaccgggugguggugcugagcuucgagcugcugcacgcccccgccaccgugugcggcccuaaaaagagcaccaaccuggugaagaacaagugcgugaacuucaauuucaacggccugaccggcaccggcgugcugaccgagagcaacaagaaguuccugcccuuccagcaguucggccgggauaucgccgacaccaccgacgcagugcgggacccccagacccuggagauccuggacaucaccccaugcagcuucggcggcgugagcgucaucacccccggcacaaacaccagcaaccagguggccgugcuguaccagggagugaacugcaccgaggugcccguggccauccacgccgaccagcugacccccaccuggcggguguacagcaccggcagcaacguguuccagacccgggccggcugccugaucggcgccgagcacgugaacaacuccuacgagugcgacauccccaucggcgcuggcaucugcgccagcuaccagacccagaccaacagcccccggcgggcccggagcguggccagccagagcaucaucgccuacaccaugagcuuaggcgccgagaacagcguggccuacagcaacaacagcaucgcgaucccuaccaacuucaccaucagcgugaccaccgagauacugcccgugagcaugaccaagaccagcguggacuguaccauguacaucugcggcgacagcaccgagugcagcaaccugcugcugcaguacggcagcuucugcacccagcugaaccgggcccugaccggcaucgccguggagcaggacaagaacacccaagagguguucgcccaggugaagcagaucuacaagacucccccaaucaaggacuucggcggcuucaacuucagccagauccugcccgaccccagcaagcccagcaagcggagcuucaucgaggaccugcuguucaacaaggugacccuggccgacgccggcuucaucaagcaguacggcgacugccugggggauaucgccgcucgggaccugaucugcgcccagaaguucaacggccugaccgugcugcccccucugcugaccgacgagaugaucgcccaguacaccagcgcccugcuugccggcaccaucaccagcggcuggaccuucggcgccggcgcagcccugcagauccccuucgccaugcagauggccuaccgguucaacggcaucggcgugacccagaacgugcuguacgagaaccagaagcugaucgccaaccaguucaacagcgccaucggcaagauccaggacagccugagcagcaccgccagcgcccugggcaagcugcaggacguggugaaccagaacgcucaggcccugaacacccuggugaagcagcugagcagcaacuuuggcgccaucagcucagugcugaaugacauccugagcaggcuggaucccccagaggccgaggugcagaucgaccggcugaucaccggccggcugcagagccugcagaccuacgugacccagcagcugauccgggccgccgagauccgggccagcgccaaccuggcagccaccaagaugagcgagugcgugcugggccagagcaagcggguggacuucugcggcaagggcuaccaccugaugagcuucccccagagcgcuccccacggcgugguguuccuccacgugacauacguccccgcccaggagaagaacuucaccaccgcccccgccauuugccacgacggcaaggcccacuucccccgggagggaguguucgugagcaacggcacccacugguucgugacccagcggaacuucuacgagccucagaucaucaccaccgacaacaccuucgugagcggcaacugcgacguggugaucggcaucgugaacaacaccguguacgacccccugcagcccgagcuggacagcuucaaggaggagcuggacaaguacuucaagaaccacaccagcccagacguggaccugggcgacaucagcggcaucaacgccagcguggugaacauccagaaggagaucgaccggcugaacgagguggccaagaaccugaacgagagccugaucgaccugcaggagcugggcaaguacgagcaguacaucaaguggcccugguacaucuggcugggcuucaucgccggccugaucgccaucgugauggugaccaucaugcugugcugcaugaccagcugcuguagcugccugaagggcugcugcagcugcggcagcugcugcaaguucgacgaggacgacagcgagcccgugcugaagggcgugaagcugcacuacaccugaggacuagucccuguucccagagcccacuuuuuuuucuuuuuuugaaauaaaauagccugucuuucagaucuaaaaaaaaaaaaaaaaaaaaaaaaaaaaaaaaaaaaaaaaaaaaaaaaaaaaaaaaaaaaaaaaaaaaaaaaaaaaaaaaaaaaaaaaaaaaaaaaaaaa

SEQ ID NO: 24899 - RNA, 4070 nt, Artificial Sequence
  SARS-CoV-2/Wuhan/WIV05/2019__EPI_ISL_402128 spike protein mRNA gc (1-1273)(K986P_V987P_D614G_I692V)
aggagagucccgcagucggcguccagcggcucugcuuguucgugugugugucguugcaggccuuauucaagcuuaccauguucguguuccuggugcugcugccccuggugagcagccagugcgugaaccugaccacccggacccagcugcccccugccuacaccaacagcuucacccggggcguguacuaccccgacaagguguuccggagcagcgugcugcacagcacccaggaccuguuccugcccuucuucagcaacgugaccugguuccacgccauccacgugagcggcaccaacggcaccaagcgguucgacaacccagugcugcccuucaacgacggcguguacuucgccagcaccgagaagucaaacaucauccggggcuggaucuucggcaccacccuggacagcaagacacagagccugcugaucgugaacaacgccaccaacguggugaucaaggugugcgaguuucaguucugcaacgaccccuuccugggcguguacuaccacaagaacaacaagagcuggauggagagcgaguuccgggucuacagcagcgcuaacaauugcaccuucgaguacgugagccagcccuuccugauggaccucgagggcaagcagggcaacuucaagaaccugcgggaguucguguucaagaacaucgauggcuacuucaagaucuacagcaagcacacccccaucaaccuggugcgggaccugccccagggauucagcgcccuggagccucugguggaccugcccaucggcaucaacaucaccagguuccagacccugcuggcccugcaccggagcuaccugacccccggcgacagcagcagcggcuggaccgccggcgccgccgcauacuacgugggcuaccugcagccacggaccuuccugcugaaguacaacgagaacggcaccaucaccgacgccguggacugcgcccuggacccccugagcgagaccaagugcacccuaaagagcuucaccguggagaagggcaucuaccagaccagcaacuuccgggugcagcccacugagagcaucgugcgguuccccaacauuaccaaccugugucccuucggcgagguguucaacgccacccgguucgccagcguguacgccuggaaccggaagcggaucagcaacugcguggccgacuacagcgugcuguacaacagcgccagcuucagcaccuucaagugcuacggcgugagcccuaccaagcugaacgaccugugcuucaccaacguguacgcugacagcuucgugauccggggcgacgaggugcggcagaucgcccccggccagaccggcaagaucgccgacuacaacuacaagcugcccgacgacuucaccggcugcgugaucgccuggaacagcaacaaccuggacagcaaggugggcggcaacuacaacuaccuguaccggcuguuccguaagagcaaccugaagccauucgagcgggacaucagcaccgagaucuaccaggccggcagcacccccugcaacgguguggagggcuuuaacugcuacuucccccugcagagcuacggcuuccagcccaccaacggcgugggcuaccagcccuaccgggugguggugcugagcuucgagcugcugcacgcccccgccaccgugugcggcccuaaaaagagcaccaaccuggugaagaacaagugcgugaacuucaauuucaacggccugaccggcaccggcgugcugaccgagagcaacaagaaguuccugcccuuccagcaguucggccgggauaucgccgacaccaccgacgcagugcgggacccccagacccuggagauccuggacaucaccccaugcagcuucggcggcgugagcgucaucacccccggcacaaacaccagcaaccagguggccgugcuguaccagggagugaacugcaccgaggugcccguggccauccacgccgaccagcugacccccaccuggcggguguacagcaccggcagcaacguguuccagacccgggccggcugccugaucggcgccgagcacgugaacaacuccuacgagugcgacauccccaucggcgcuggcaucugcgccagcuaccagacccagaccaacagcccccggcgggcccggagcguggccagccagagcgugaucgccuacaccaugagcuuaggcgccgagaacagcguggccuacagcaacaacagcaucgcgaucccuaccaacuucaccaucagcgugaccaccgagauccugcccgugagcaugaccaagaccagcguggacuguaccauguacauaugcggcgacagcaccgagugcagcaaccugcugcugcaguacggcagcuucugcacccagcugaaccgggcccugaccggcaucgccguggagcaggacaagaacacccaagagguguucgcccaggugaagcagaucuacaagacucccccaaucaaggacuucggcggcuucaacuucagccagauccugcccgaccccagcaagcccagcaagcggagcuucaucgaggaccugcuguucaacaaggugacccuggccgacgccggcuucaucaagcaguacggcgacugccugggggauaucgccgcucgggaccugaucugcgcccagaaguucaacggccugaccgugcugcccccucugcugaccgacgagaugaucgcccaguacaccagcgcccugcuugccggcaccaucaccagcggcuggaccuucggcgccggcgcagcccugcagauccccuucgccaugcagauggccuaccgguucaacggcaucggcgugacccagaacgugcuguacgagaaccagaagcugaucgccaaccaguucaacagcgccaucggcaagauccaggacagccugagcagcaccgccagcgcccugggcaagcugcaggacguggugaaccagaacgcucaggcccugaacacccuggugaagcagcugagcagcaacuucggcgccaucagcucagugcugaaugacauccugagcaggcuggaucccccagaggccgaggugcagaucgaccggcugaucaccggccggcugcagagccugcagaccuacgugacccagcagcugauccgggccgccgagauccgggccagcgccaaccuggcagccaccaagaugagcgagugcgugcugggccagagcaagcggguggacuuuugcggcaagggcuaccaccugaugagcuucccccagagcgcuccccacggcgugguguuccuccacgucacauacgugcccgcccaggagaagaacuucaccaccgcccccgccaucugccacgacggcaaggcccacuucccccgggagggaguguucgugagcaacggcacccacugguucgugacccagcggaacuucuacgagccucagauuaucaccaccgacaacaccuucgugagcggcaacugcgacguggugaucggcaucgugaacaacaccguguacgacccccugcagcccgagcuggacagcuucaaggaggagcuggacaaguacuucaagaaccacaccagcccagacguggaccugggcgacaucagcggcaucaacgccagcguggugaacauccagaaggagaucgaccggcugaacgagguggccaagaaccugaacgagagccugaucgaccugcaggagcugggcaaguacgagcaguacaucaaguggcccugguacaucuggcugggcuucaucgccggccugaucgccaucgugauggugaccaucaugcugugcugcaugaccagcugcuguagcugccugaagggcugcugcagcugcggcagcugcugcaaguucgacgaggacgacagcgagcccgugcugaagggcgugaagcugcacuacaccugaggacuagucccuguucccagagcccacuuuuuuuucuuuuuuugaaauaaaauagccugucuuucagaucuaaaaaaaaaaaaaaaaaaaaaaaaaaaaaaaaaaaaaaaaaaaaaaaaaaaaaaaaaaaaaaaaaaaaaaaaaaaaaaaaaaaaaaaaaaaaaaaaaaaa

SEQ ID NO: 24900 - RNA, 4070 nt, Artificial Sequence
  SARS-CoV-2/Wuhan/WIV05/2019__EPI_ISL_402128 spike protein mRNA gc (1-1273)(K986P_V987P_D614G_M1229I)
aggagagucccgcagucggcguccagcggcucugcuuguucgugugugugucguugcaggccuuauucaagcuuaccauguucguguuccuggugcugcugccccuggugagcagccagugcgugaaccugaccacccggacccagcugcccccugccuacaccaacagcuucacccggggcguguacuaccccgacaagguguuccggagcagcgugcugcacagcacccaggaccuguuccugcccuucuucagcaacgugaccugguuccacgccauccacgugagcggcaccaacggcaccaagcgguucgacaacccagugcugcccuucaacgacggcguguacuucgccagcaccgagaagucaaacaucauccggggcuggaucuucggcaccacccuggacagcaagacacagagccugcugaucgugaacaacgccaccaacguggugaucaaggugugcgaguuucaguucugcaacgaccccuuccugggcguguacuaccacaagaacaacaagagcuggauggagagcgaguuccgggucuacagcagcgcuaacaauugcaccuucgaguacgugagccagcccuuccugauggaccucgagggcaagcagggcaacuucaagaaccugcgggaguucguguucaagaacaucgauggcuacuucaagaucuacagcaagcacacccccaucaaccuggugcgggaccugccccagggauucagcgcccuggagccucugguggaccugcccaucggcaucaacaucaccagguuccagacccugcuggcccugcaccggagcuaccugacccccggcgacagcagcagcggcuggaccgccggcgccgccgcauacuacgugggcuaccugcagccacggaccuuccugcugaaguacaacgagaacggcaccaucaccgacgccguggacugcgcccuggacccccugagcgagaccaagugcacccuaaagagcuucaccguggagaagggcaucuaccagaccagcaacuuccgggugcagcccacugagagcaucgugcgguuccccaacauuaccaaccugugucccuucggcgagguguucaacgccacccgguucgccagcguguacgccuggaaccggaagcggaucagcaacugcguggccgacuacagcgugcuguacaacagcgccagcuucagcaccuucaagugcuacggcgugagcccuaccaagcugaacgaccugugcuucaccaacguguacgcugacagcuucgugauccggggcgacgaggugcggcagaucgcccccggccagaccggcaagaucgccgacuacaacuacaagcugcccgacgacuucaccggcugcgugaucgccuggaacagcaacaaccuggacagcaaggugggcggcaacuacaacuaccuguaccggcuguuccguaagagcaaccugaagccauucgagcgggacaucagcaccgagaucuaccaggccggcagcacccccugcaacgguguggagggcuuuaacugcuacuucccccugcagagcuacggcuuccagcccaccaacggcgugggcuaccagcccuaccgggugguggugcugagcuucgagcugcugcacgcccccgccaccgugugcggcccuaaaaagagcaccaaccuggugaagaacaagugcgugaacuucaauuucaacggccugaccggcaccggcgugcugaccgagagcaacaagaaguuccugcccuuccagcaguucggccgggauaucgccgacaccaccgacgcagugcgggacccccagacccuggagauccuggacaucaccccaugcagcuucggcggcgugagcgucaucacccccggcacaaacaccagcaaccagguggccgugcuguaccagggagugaacugcaccgaggugcccguggccauccacgccgaccagcugacccccaccuggcggguguacagcaccggcagcaacguguuccagacccgggccggcugccugaucggcgccgagcacgugaacaacuccuacgagugcgacauccccaucggcgcuggcaucugcgccagcuaccagacccagaccaacagcccccggcgggcccggagcguggccagccagagcaucaucgccuacaccaugagcuuaggcgccgagaacagcguggccuacagcaacaacagcaucgcgaucccuaccaacuucaccaucagcgugaccaccgagauacugcccgugagcaugaccaagaccagcguggacuguaccauguacaucugcggcgacagcaccgagugcagcaaccugcugcugcaguacggcagcuucugcacccagcugaaccgggcccugaccggcaucgccguggagcaggacaagaacacccaagagguguucgcccaggugaagcagaucuacaagacucccccaaucaaggacuucggcggcuucaacuucagccagauccugcccgaccccagcaagcccagcaagcggagcuucaucgaggaccugcuguucaacaaggugacccuggccgacgccggcuucaucaagcaguacggcgacugccugggggauaucgccgcucgggaccugaucugcgcccagaaguucaacggccugaccgugcugcccccucugcugaccgacgagaugaucgcccaguacaccagcgcccugcuugccggcaccaucaccagcggcuggaccuucggcgccggcgcagcccugcagauccccuucgccaugcagauggccuaccgguucaacggcaucggcgugacccagaacgugcuguacgagaaccagaagcugaucgccaaccaguucaacagcgccaucggcaagauccaggacagccugagcagcaccgccagcgcccugggcaagcugcaggacguggugaaccagaacgcucaggcccugaacacccuggugaagcagcugagcagcaacuucggcgccaucagcucagugcugaaugacauccugagcaggcuggaucccccagaggccgaggugcagaucgaccggcugaucaccggccggcugcagagccugcagaccuacgugacccagcagcugauccgggccgccgagauccgggccagcgccaaccuggcagccaccaagaugagcgagugcgugcugggccagagcaagcggguggacuuuugcggcaagggcuaccaccugaugagcuucccccagagcgcuccccacggcgugguguuccuccacgugacauacguccccgcccaggagaagaacuucaccaccgcccccgccauuugccacgacggcaaggcccacuucccccgggagggaguguucgugagcaacggcacccacugguucgugacccagcggaacuucuacgagccucagaucaucaccaccgacaacaccuucgugagcggcaacugcgacguggugaucggcaucgugaacaacaccguguacgacccccugcagcccgagcuggacagcuucaaggaggagcuggacaaguacuucaagaaccacaccagcccagacguggaccugggcgacaucagcggcaucaacgccagcguggugaacauccagaaggagaucgaccggcugaacgagguggccaagaaccugaacgagagccugaucgaccugcaggagcugggcaaguacgagcaguacaucaaguggcccugguacaucuggcugggcuucaucgccggccugaucgccaucgugaucgugaccaucaugcugugcugcaugaccagcugcuguagcugccugaagggcugcugcagcugcggcagcugcugcaaguucgacgaggacgacagcgagcccgugcugaagggcgugaagcugcacuacaccugaggacuagucccuguucccagagcccacuuuuuuuucuuuuuuugaaauaaaauagccugucuuucagaucuaaaaaaaaaaaaaaaaaaaaaaaaaaaaaaaaaaaaaaaaaaaaaaaaaaaaaaaaaaaaaaaaaaaaaaaaaaaaaaaaaaaaaaaaaaaaaaaaaaaa

SEQ ID NO: 24901 - RNA, 4064 nt, Artificial Sequence
  SARS-CoV-2/Wuhan/WIV05/2019__EPI_ISL_402128 spike protein mRNA gc (1-1273)(K986P_V987P_H69del_V70del_A222V_Y453F_S477N_D614G_I692V)
aggagagucccgcagucggcguccagcggcucugcuuguucgugugugugucguugcaggccuuauucaagcuuaccauguucguguuccuggugcugcugccccuggugagcagccagugcgugaaccugaccacccggacccagcugcccccugccuacaccaacagcuucacccggggcguguacuaccccgacaagguguuccggagcagcgugcugcacagcacccaggaccuguuccugcccuucuucagcaacgugaccugguuccacgccaucagcggcaccaacggcaccaagcgguucgacaacccagugcugcccuucaacgacggcguguacuucgccagcaccgagaagucaaacaucauccggggcuggaucuucggcaccacccuggacagcaagacacagagccugcugaucgugaacaacgccaccaacguggugaucaaggugugcgaguuucaguucugcaacgaccccuuccugggcguguacuaccacaagaacaacaagagcuggauggagagcgaguuccggguguacagcagcgcuaacaauugcaccuucgaguacgucagccagcccuuccugauggaccucgagggcaagcagggcaacuucaagaaccugcgggaguucguguucaagaacaucgauggcuacuucaagaucuacagcaagcacacccccaucaaccuggugcgggaccugccccagggauucagcgugcuggagccucugguggaccugcccaucggcaucaacaucaccagguuccagacccugcuggcccugcaccggagcuaccugacccccggcgacagcagcagcggcuggaccgccggcgccgccgccuacuacgugggcuaccugcagccacggaccuuccugcugaaguacaacgagaacggcaccaucaccgacgcaguggacugcgcccuggacccccugagcgagaccaagugcacccuaaagagcuucaccguggagaagggcaucuaccagaccagcaacuuccgggugcagcccacugagagcaucgugcgguuccccaacauuaccaaccugugucccuucggcgagguguucaacgccacccgguucgccagcguguacgccuggaaccggaagcggaucagcaacugcguggccgacuacagcgugcuguacaacagcgccagcuucagcaccuucaagugcuacggcgugagcccuaccaagcugaacgaccugugcuucaccaacguguacgccgacagcuucgugauccggggcgacgaggugcggcagaucgcucccggccagaccggcaagaucgccgacuacaacuacaagcugcccgacgacuucaccggcugcgugaucgccuggaacagcaacaaccuggacagcaaggugggcggcaacuacaacuaccuguuccggcuguuccguaagagcaaccugaagccauuugagcgggacaucagcaccgagaucuaccaggccggcaacacccccugcaacgguguggagggcuucaacugcuacuucccccugcagagcuacggcuuccagcccaccaacggcgugggcuaccagcccuaccgggugguggugcugagcuucgagcugcugcacgcccccgccaccgugugcggcccuaaaaagagcaccaaccuggugaagaacaagugcgugaauuucaacuucaacggccugaccggcaccggcgugcugaccgagagcaacaagaaguuccugcccuuccagcaguucggccgggauaucgccgacaccaccgacgccgugcgggacccccagacccuggagauccuggacaucaccccaugcagcuucggcggcgugagcgucaucacccccggcacaaacaccagcaaccagguggcagugcuguaccagggagugaacugcaccgaggugcccguggccauccacgccgaccagcugacccccaccuggcggguguacagcaccggcagcaacguguuccagacccgggccggcugccugaucggcgccgagcacgugaacaacagcuacgagugcgacauccccaucggcgccggcaucugcgcuuccuaccagacccagaccaacagcccccggcgggcccggagcguggccagccagagcgugaucgccuacaccaugagcuuaggcgccgagaacagcguggccuacagcaacaacagcaucgccaucccuaccaacuucaccaucagcgugaccaccgagauccugcccgugagcaugaccaagaccagcguggacuguaccauguacauaugcggcgacagcaccgagugcagcaaccugcugcugcaguacggcagcuucugcacccagcugaaccgggcgcugaccggcaucgccguggagcaggacaagaacacccaagagguguucgcccaggugaagcagaucuacaagacucccccaaucaaggacuucggcggcuucaacuucagccagauccugcccgaccccagcaagcccagcaagcggagcuucaucgaggaccugcuguucaacaaggugacccuggccgacgccggcuucaucaagcaguacggcgacugccugggggauaucgccgcccgggaccugaucugcgcucagaaguucaacggccugaccgugcugcccccucugcugaccgacgagaugaucgcccaguacaccagcgcccugcuugccggcaccaucaccagcggcuggaccuucggcgccggcgccgcacugcagauccccuucgccaugcagauggccuaccgguucaacggcaucggcgugacccagaacgugcuguacgagaaccagaagcugaucgccaaccaguucaacagcgccaucggcaagauccaggacagccugagcagcaccgccagcgcccugggcaagcugcaggacguggugaaccagaacgcccaggcucugaacacccuggugaagcagcugagcagcaauuuuggcgccaucagcagcgugcugaacgacauccugucaaggcuggaucccccagaggccgaggugcagaucgaccggcugaucaccggccggcugcagagccugcagaccuacgugacccagcagcugauccgggccgccgagauccgggccagcgccaaccuggccgcaaccaagaugagcgagugcgugcugggccagagcaagcggguggacuucugcggcaagggcuaccaccugaugagcuucccccagagcgcuccccacggcgugguguuccuccacgucacauacgugcccgcccaggagaagaacuucaccaccgcccccgccaucugccacgacggcaaggcccacuucccccgggagggaguguucgugagcaacggcacccacugguucgugacccagcggaacuucuacgagccucagauuaucaccaccgacaacaccuucgugagcggcaacugcgacguggugaucggcaucgugaacaacaccguguacgacccccugcagcccgagcuggacagcuucaaggaggagcuggacaaguacuucaagaaccacaccagcccagacguggaccugggcgacaucagcggcaucaacgccagcguggugaacauccagaaggagaucgaccggcugaacgagguggccaagaaccugaacgagagccugaucgaccugcaggagcugggcaaguacgagcaguacaucaaguggcccugguacaucuggcugggcuucaucgccggccugaucgccaucgugauggugaccaucaugcugugcugcaugaccagcugcuguagcugccugaagggcugcugcagcugcggcagcugcugcaaguucgacgaggacgacagcgagcccgugcugaagggcgugaagcugcacuacaccugaggacuagucccuguucccagagcccacuuuuuuuucuuuuuuugaaauaaaauagccugucuuucagaucuaaaaaaaaaaaaaaaaaaaaaaaaaaaaaaaaaaaaaaaaaaaaaaaaaaaaaaaaaaaaaaaaaaaaaaaaaaaaaaaaaaaaaaaaaaaaaaaaaaaa

SEQ ID NO: 24902 - RNA, 4064 nt, Artificial Sequence
  SARS-CoV-2/Wuhan/WIV05/2019__EPI_ISL_402128 spike protein mRNA gc (1-1273)(K986P_V987P_H69del_V70del_Y453F_D614G_I692V_M1229I)
aggagagucccgcagucggcguccagcggcucugcuuguucgugugugugucguugcaggccuuauucaagcuuaccauguucguguuccuggugcugcugccccuggugagcagccagugcgugaaccugaccacccggacccagcugcccccugccuacaccaacagcuucacccggggcguguacuaccccgacaagguguuccggagcagcgugcugcacagcacccaggaccuguuccugcccuucuucagcaacgugaccugguuccacgccaucagcggcaccaacggcaccaagcgguucgacaacccagugcugcccuucaacgacggcguguacuucgccagcaccgagaagucaaacaucauccggggcuggaucuucggcaccacccuggacagcaagacacagagccugcugaucgugaacaacgccaccaacguggugaucaaggugugcgaguuucaguucugcaacgaccccuuccugggcguguacuaccacaagaacaacaagagcuggauggagagcgaguuccggguguacagcagcgcuaacaauugcaccuucgaguacgucagccagcccuuccugauggaccucgagggcaagcagggcaacuucaagaaccugcgggaguucguguucaagaacaucgauggcuacuucaagaucuacagcaagcacacccccaucaaccuggugcgggaccugccccagggauucagcgcccuggagccucugguggaccugcccaucggcaucaacaucaccagguuccagacccugcuggcccugcaccggagcuaccugacccccggcgacagcagcagcggcuggaccgccggcgccgccgcauacuacgugggcuaccugcagccacggaccuuccugcugaaguacaacgagaacggcaccaucaccgacgccguggacugcgcccuggacccccugagcgagaccaagugcacccuaaagagcuucaccguggagaagggcaucuaccagaccagcaacuuccgggugcagcccacugagagcaucgugcgguuccccaacauuaccaaccugugucccuucggcgagguguucaacgccacccgguucgccagcguguacgccuggaaccggaagcggaucagcaacugcguggccgacuacagcgugcuguacaacagcgccagcuucagcaccuucaagugcuacggcgugagcccuaccaagcugaacgaccugugcuucaccaacguguacgcugacagcuucgugauccggggcgacgaggugcggcagaucgcccccggccagaccggcaagaucgccgacuacaacuacaagcugcccgacgacuucaccggcugcgugaucgccuggaacagcaacaaccuggacagcaaggugggcggcaacuacaacuaccuguuccggcuguuccguaagagcaaccugaagccauuugagcgggacaucagcaccgagaucuaccaggccggcagcacccccugcaacgguguggagggcuucaacugcuacuucccccugcagagcuacggcuuccagcccaccaacggcgugggcuaccagcccuaccgggugguggugcugagcuucgagcugcugcacgcccccgccaccgugugcggcccuaaaaagagcaccaaccuggugaagaacaagugcgugaacuucaauuucaacggccugaccggcaccggcgugcugaccgagagcaacaagaaguuccugcccuuccagcaguucggccgggauaucgccgacaccaccgacgcagugcgggacccccagacccuggagauccuggacaucaccccaugcagcuucggcggcgugagcgugaucacccccggcacaaacaccagcaaccaggucgccgugcuguaccagggagugaacugcaccgaggugcccguggccauccacgccgaccagcugacccccaccuggcggguguacagcaccggcagcaacguguuccagacccgggccggcugccugaucggcgccgagcacgugaacaacuccuacgagugcgacauccccaucggcgcuggcaucugcgccagcuaccagacccagaccaacagcccccggcgggcccggagcguggccagccagagcgugaucgccuacaccaugagcuuaggcgccgagaacagcguggccuacagcaacaacagcaucgcgaucccuaccaacuucaccaucagcgugaccaccgagauccugcccgugagcaugaccaagaccagcguggacuguaccauguacauaugcggcgacagcaccgagugcagcaaccugcugcugcaguacggcagcuucugcacccagcugaaccgggcccugaccggcaucgccguggagcaggacaagaacacccaagagguguucgcccaggugaagcagaucuacaagacucccccaaucaaggacuucggcggcuucaacuucagccagauccugcccgaccccagcaagcccagcaagcggagcuucaucgaggaccugcuguucaacaaggugacccuggccgacgccggcuucaucaagcaguacggcgacugccugggggauaucgccgcucgggaccugaucugcgcccagaaguucaacggccugaccgugcugcccccucugcugaccgacgagaugaucgcccaguacaccagcgcccugcuugccggcaccaucaccagcggcuggaccuucggcgccggcgcagcccugcagauccccuucgccaugcagauggccuaccgguucaacggcaucggcgugacccagaacgugcuguacgagaaccagaagcugaucgccaaccaguucaacagcgccaucggcaagauccaggacagccugagcagcaccgccagcgcccugggcaagcugcaggacguggugaaccagaacgcucaggcccugaacacccuggugaagcagcugagcagcaacuuuggcgccaucagcucagugcugaaugacauccugagcaggcuggaucccccagaggccgaggugcagaucgaccggcugaucaccggccggcugcagagccugcagaccuacgugacccagcagcugauccgggccgccgagauccgggccagcgccaaccuggcagccaccaagaugagcgagugcgugcugggccagagcaagcggguggacuucugcggcaagggcuaccaccugaugagcuucccccagagcgcuccccacggcgugguguuccuccacgugacauacguccccgcccaggagaagaacuucaccaccgcccccgccaucugccacgacggcaaggcccacuucccccgggagggaguguucgugagcaacggcacccacugguucgugacccagcggaacuucuacgagccucagauuaucaccaccgacaacaccuucgugagcggcaacugcgacguggugaucggcaucgugaacaacaccguguacgacccccugcagcccgagcuggacagcuucaaggaggagcuggacaaguacuucaagaaccacaccagcccagacguggaccugggcgacaucagcggcaucaacgccagcguggugaacauccagaaggagaucgaccggcugaacgagguggccaagaaccugaacgagagccugaucgaccugcaggagcugggcaaguacgagcaguacaucaaguggcccugguacaucuggcugggcuucaucgccggccugaucgccaucgugaucgugaccaucaugcugugcugcaugaccagcugcuguagcugccugaagggcugcugcagcugcggcagcugcugcaaguucgacgaggacgacagcgagcccgugcugaagggcgugaagcugcacuacaccugaggacuagucccuguucccagagcccacuuuuuuuucuuuuuuugaaauaaaauagccugucuuucagaucuaaaaaaaaaaaaaaaaaaaaaaaaaaaaaaaaaaaaaaaaaaaaaaaaaaaaaaaaaaaaaaaaaaaaaaaaaaaaaaaaaaaaaaaaaaaaaaaaaaaa

SEQ ID NO: 24903 - RNA, 4061 nt, Artificial Sequence
  SARS-CoV-2/Wuhan/WIV05/2019__EPI_ISL_402128 spike protein mRNA gc (1-1273)(K986P_V987P_K986P_V987P_H69del_V70del_Y144del_N501Y_A570 D_D614G_P681H_T716I_S982A_D1118H)
aggagagucccgcagucggcguccagcggcucugcuuguucgugugugugucguugcaggccuuauucaagcuuaccauguucguguuccuggugcugcugccccuggugagcagccagugcgugaaccugaccacccggacccagcugcccccugccuacaccaacagcuucacccggggcguguacuaccccgacaagguguuccggagcagcgugcugcacagcacccaggaccuguuccugcccuucuucagcaacgugaccugguuccacgccaucagcggcaccaacggcaccaagcgguucgacaacccagugcugcccuucaacgacggcguguacuucgccagcaccgagaagucaaacaucauccggggcuggaucuucggcaccacccuggacagcaagacacagagccugcugaucgugaacaacgccaccaacguggugaucaaggugugcgaguuucaguucugcaacgaccccuuccugggcguguaccacaagaacaacaagagcuggauggagagcgaguuccggguguacagcagcgcuaacaauugcaccuucgaguacgucagccagcccuuccugauggaccucgagggcaagcagggcaacuucaagaaccugcgggaguucguguucaagaacaucgauggcuacuucaagaucuacagcaagcacacccccaucaaccuggugcgggaccugccccagggauucagcgcccuggagccucugguggaccugcccaucggcaucaacaucaccagguuccagacccugcuggcccugcaccggagcuaccugacccccggcgacagcagcagcggcuggaccgccggcgccgccgcauacuacgugggcuaccugcagccacggaccuuccugcugaaguacaacgagaacggcaccaucaccgacgccguggacugcgcccuggacccccugagcgagaccaagugcacccuaaagagcuucaccguggagaagggcaucuaccagaccagcaacuuccgggugcagcccacugagagcaucgugcgguuccccaacauuaccaaccugugucccuucggcgagguguucaacgccacccgguucgccagcguguacgccuggaaccggaagcggaucagcaacugcguggccgacuacagcgugcuguacaacagcgccagcuucagcaccuucaagugcuacggcgugagcccuaccaagcugaacgaccugugcuucaccaacguguacgcugacagcuucgugauccggggcgacgaggugcggcagaucgcccccggccagaccggcaagaucgccgacuacaacuacaagcugcccgacgacuucaccggcugcgugaucgccuggaacagcaacaaccuggacagcaaggugggcggcaacuacaacuaccuguaccggcuguuccguaagagcaaccugaagccauucgagcgggacaucagcaccgagaucuaccaggccggcagcacccccugcaacgguguggagggcuuuaacugcuacuucccccugcagagcuacggcuuccagcccaccuacggcgugggcuaccagcccuaccgggugguggugcugagcuucgagcugcugcacgcccccgccaccgugugcggcccuaaaaagagcaccaaccuggugaagaacaagugcgugaacuucaacuucaauggccugaccggcaccggcgugcugaccgagagcaacaagaaguuccugcccuuccagcaguucggccgggauaucgacgacaccaccgacgccgugcgggacccccagacccuggagauccuggacaucaccccaugcagcuucggcggcgugagcgugaucacccccggcacaaacaccagcaaccaggucgcagugcuguaccagggagugaacugcaccgaggugcccguggccauccacgccgaccagcugacccccaccuggcggguguacagcaccggcagcaacguguuccagacccgggccggcugccugaucggcgccgagcacgugaacaacuccuacgagugcgacauccccaucggcgccggcaucugcgcuagcuaccagacccagaccaacagccaccggcgggcccggagcguggccagccagagcaucaucgccuacaccaugagcuuaggcgccgagaacagcguggccuacagcaacaacagcaucgccauccccaucaacuucaccauaagcgugaccaccgagauccugccugugagcaugaccaagaccagcguggacuguaccauguacaucugcggcgacagcaccgagugcagcaaccugcugcugcaguacggcagcuucugcacccagcugaaccgggcgcugaccggcaucgccguggagcaggacaagaacacccaagagguguucgcccaggugaagcagaucuacaagaccccacccaucaaggacuucggcggcuucaacuucagccagauccugcccgaccccagcaagcccagcaagcggagcuucaucgaggaccugcuguucaacaaggugacucuggccgacgccggcuucaucaagcaguacggcgauugccugggggacaucgccgcccgggaccugaucugcgcucagaaguucaacggccugaccgugcugccuccccugcugaccgacgagaugaucgcccaguacaccagcgcccugcuugccggcaccaucaccagcggcuggaccuucggcgccggcgccgcacugcagauccccuucgccaugcagauggccuaccgguucaacggcaucggcgugacccagaacgugcuguacgagaaccagaagcugaucgccaaccaguucaacagcgccaucggcaagauccaggacagccugagcagcaccgccagcgcccugggcaagcugcaggacguggugaaccagaacgcccaggcucugaacacccuggugaagcagcugagcagcaacuucggcgccaucagcucagugcugaacgacauccuggccaggcuggacccacccgaggccgaggugcagaucgaccggcugaucaccggccggcugcagagccugcagaccuacgugacccagcagcugauccgggccgccgagauucgggccagcgccaaucuggcagccaccaagaugagcgagugcgugcugggccagagcaagcggguggacuuuugcggcaagggcuaccaccugaugagcuucccccagagcgcuccccacggcgugguguuccuccacgugaccuacgugcccgcccaggagaagaacuucacaaccgcccccgccaucugccacgacggcaaggcccacuucccccgggagggagucuucgugagcaacggcacccacugguucgugacccagcggaacuucuacgagccccagaucaucaccacccacaacaccuucgugagcggcaacugcgacguggugaucggcaucgugaacaacaccguguacgacccucugcagcccgagcuggacagcuucaaggaggagcuggacaaguacuucaagaaccacaccagccccgacguggaucugggcgacaucagcggcaucaacgccagcguggugaacauccagaaggagaucgaccggcugaacgagguggccaagaaccugaacgagagccugaucgaccugcaggagcugggcaaguacgagcaguacaucaaguggccaugguacaucuggcugggcuucaucgccggccugaucgccaucgugauggugaccaucaugcugugcugcaugaccagcugcuguagcugccugaagggcugcugcagcugcggcagcugcugcaaguucgacgaggacgacagcgagcccgugcugaagggcgugaagcugcacuacaccugaggacuagucccuguucccagagcccacuuuuuuuucuuuuuuugaaauaaaauagccugucuuucagaucuaaaaaaaaaaaaaaaaaaaaaaaaaaaaaaaaaaaaaaaaaaaaaaaaaaaaaaaaaaaaaaaaaaaaaaaaaaaaaaaaaaaaaaaaaaaaaaaaaaaa

SEQ ID NO: 24904 - RNA, 4070 nt, Artificial Sequence
  SARS-CoV-2/Wuhan/WIV05/2019__EPI_ISL_402128 spike protein mRNA gc (1-1273)(K986P_V987P_K986P_V987P_K417N_E484K_N501Y_D614G)
aggagagucccgcagucggcguccagcggcucugcuuguucgugugugugucguugcaggccuuauucaagcuuaccauguucguguuccuggugcugcugccccuggugagcagccagugcgugaaccugaccacccggacccagcugcccccugccuacaccaacagcuucacccggggcguguacuaccccgacaagguguuccggagcagcgugcugcacagcacccaggaccuguuccugcccuucuucagcaacgugaccugguuccacgccauccacgugagcggcaccaacggcaccaagcgguucgacaacccagugcugcccuucaacgacggcguguacuucgccagcaccgagaagucaaacaucauccggggcuggaucuucggcaccacccuggacagcaagacacagagccugcugaucgugaacaacgccaccaacguggugaucaaggugugcgaguuucaguucugcaacgaccccuuccugggcguguacuaccacaagaacaacaagagcuggauggagagcgaguuccgggucuacagcagcgcuaacaauugcaccuucgaguacgugagccagcccuuccugauggaccucgagggcaagcagggcaacuucaagaaccugcgggaguucguguucaagaacaucgauggcuacuucaagaucuacagcaagcacacccccaucaaccuggugcgggaccugccccagggauucagcgcccuggagccucugguggaccugcccaucggcaucaacaucaccagguuccagacccugcuggcccugcaccggagcuaccugacccccggcgacagcagcagcggcuggaccgccggcgccgccgcauacuacgugggcuaccugcagccacggaccuuccugcugaaguacaacgagaacggcaccaucaccgacgccguggacugcgcccuggacccccugagcgagaccaagugcacccuaaagagcuucaccguggagaagggcaucuaccagaccagcaacuuccgggugcagcccacugagagcaucgugcgguuccccaacauuaccaaccugugucccuucggcgagguguucaacgccacccgguucgccagcguguacgccuggaaccggaagcggaucagcaacugcguggccgacuacagcgugcuguacaacagcgccagcuucagcaccuucaagugcuacggcgugagcccuaccaagcugaacgaccugugcuucaccaacguguacgcugacagcuucgugauccggggcgacgaggugcggcagaucgcccccggccagaccggcaacaucgccgacuacaacuacaagcugcccgacgacuucaccggcugcgugaucgccuggaacagcaacaaccuggacagcaaggugggcggcaacuacaacuaccuguaccggcuguuccguaagagcaaccugaagccauucgagcgggacaucagcaccgagaucuaccaggccggcagcacccccugcaacggugugaagggcuuuaacugcuacuucccccugcagagcuacggcuuccagcccaccuacggcgugggcuaccagcccuaccgggugguggugcugagcuucgagcugcugcacgcccccgccaccgugugcggcccuaaaaagagcaccaaccuggugaagaacaagugcgugaacuucaauuucaacggccugaccggcaccggcgugcugaccgagagcaacaagaaguuccugcccuuccagcaguucggccgggauaucgccgacaccaccgacgcagugcgggacccccagacccuggagauccuggacaucaccccaugcagcuucggcggcgugagcgucaucacccccggcacaaacaccagcaaccagguggccgugcuguaccagggagugaacugcaccgaggugcccguggccauccacgccgaccagcugacccccaccuggcggguguacagcaccggcagcaacguguuccagacccgggccggcugccugaucggcgccgagcacgugaacaacuccuacgagugcgacauccccaucggcgcuggcaucugcgccagcuaccagacccagaccaacagcccccggcgggcccggagcguggccagccagagcaucaucgccuacaccaugagcuuaggcgccgagaacagcguggccuacagcaacaacagcaucgcgaucccuaccaacuucaccaucagcgugaccaccgagauacugcccgugagcaugaccaagaccagcguggacuguaccauguacaucugcggcgacagcaccgagugcagcaaccugcugcugcaguacggcagcuucugcacccagcugaaccgggcccugaccggcaucgccguggagcaggacaagaacacccaagagguguucgcccaggugaagcagaucuacaagacucccccaaucaaggacuucggcggcuucaacuucagccagauccugcccgaccccagcaagcccagcaagcggagcuucaucgaggaccugcuguucaacaaggugacccuggccgacgccggcuucaucaagcaguacggcgacugccugggggauaucgccgcucgggaccugaucugcgcccagaaguucaacggccugaccgugcugcccccucugcugaccgacgagaugaucgcccaguacaccagcgcccugcuugccggcaccaucaccagcggcuggaccuucggcgccggcgcagcccugcagauccccuucgccaugcagauggccuaccgguucaacggcaucggcgugacccagaacgugcuguacgagaaccagaagcugaucgccaaccaguucaacagcgccaucggcaagauccaggacagccugagcagcaccgccagcgcccugggcaagcugcaggacguggugaaccagaacgcucaggcccugaacacccuggugaagcagcugagcagcaacuucggcgccaucagcucagugcugaaugacauccugagcaggcuggaucccccagaggccgaggugcagaucgaccggcugaucaccggccggcugcagagccugcagaccuacgugacccagcagcugauccgggccgccgagauccgggccagcgccaaccuggcagccaccaagaugagcgagugcgugcugggccagagcaagcggguggacuuuugcggcaagggcuaccaccugaugagcuucccccagagcgcuccccacggcgugguguuccuccacgugacauacguccccgcccaggagaagaacuucaccaccgcccccgccauuugccacgacggcaaggcccacuucccccgggagggaguguucgugagcaacggcacccacugguucgugacccagcggaacuucuacgagccucagaucaucaccaccgacaacaccuucgugagcggcaacugcgacguggugaucggcaucgugaacaacaccguguacgacccccugcagcccgagcuggacagcuucaaggaggagcuggacaaguacuucaagaaccacaccagcccagacguggaccugggcgacaucagcggcaucaacgccagcguggugaacauccagaaggagaucgaccggcugaacgagguggccaagaaccugaacgagagccugaucgaccugcaggagcugggcaaguacgagcaguacaucaaguggcccugguacaucuggcugggcuucaucgccggccugaucgccaucgugauggugaccaucaugcugugcugcaugaccagcugcuguagcugccugaagggcugcugcagcugcggcagcugcugcaaguucgacgaggacgacagcgagcccgugcugaagggcgugaagcugcacuacaccugaggacuagucccuguucccagagcccacuuuuuuuucuuuuuuugaaauaaaauagccugucuuucagaucuaaaaaaaaaaaaaaaaaaaaaaaaaaaaaaaaaaaaaaaaaaaaaaaaaaaaaaaaaaaaaaaaaaaaaaaaaaaaaaaaaaaaaaaaaaaaaaaaaaaa

SEQ ID NO: 24905 - RNA, 4061 nt, Artificial Sequence
  SARS-CoV-2/Wuhan/WIV05/2019__EPI_ISL_402128 spike protein mRNA gc (1-1273)(K986P_V987P_K986P_V987P_L18F_D80A_D215G_L242del_A243del_ L244del_R246I_K417N_E484K_N501Y_D614G_A701V)
aggagagucccgcagucggcguccagcggcucugcuuguucgugugugugucguugcaggccuuauucaagcuuaccauguucguguuccuggugcugcugccccuggugagcagccagugcgugaacuucaccacccggacccagcugcccccugccuacaccaacagcuucacccggggcguguacuaccccgacaagguguuccggagcagcgugcugcacagcacccaggaccuguuccugcccuucuucagcaacgugaccugguuccacgccauccacgugagcggcaccaacggcaccaagcgguucgccaacccagugcugcccuucaacgacggcguguacuucgccagcaccgagaagucaaacaucauccggggcuggaucuuuggcaccacccuggacagcaagacacagagccugcugaucgugaacaacgcuaccaacguggugaucaaggugugcgaguuccaguucugcaacgaccccuuccugggcguguacuaccacaagaacaacaagagcuggauggagagcgaguuccgggucuacagcagcgccaacaauugcaccuucgaguacgugagccagcccuuccugauggaccuggagggcaagcagggcaacuucaagaaccuccgggaguucguguucaagaacaucgacggcuacuucaagaucuacagcaagcacacccccaucaaccuggugcggggacugccccagggcuucagcgcccuggagccucugguggaucugcccaucggcaucaacaucaccagguuccagacccugcacaucagcuaccugacccccggcgacagcagcagcggcuggaccgccggcgccgccgcauacuacgugggcuaccugcagccacggaccuuccugcugaaguacaacgagaacggcaccaucaccgacgccguggacugcgcccuggacccccugagcgagaccaagugcacccuuaagagcuucaccguggagaagggcaucuaccagaccagcaacuuccgggugcagcccacugagagcauugugcgguuccccaacaucaccaaccugugucccuucggcgagguguucaacgccacccgguucgccagcguguacgccuggaaccggaagcggaucagcaacugcguggccgacuacagcgugcuguacaacagcgccagcuucagcaccuucaagugcuacggcgugagcccuaccaagcugaacgaccugugcuucaccaacguguacgcugacagcuucgugauccggggcgacgaggugcggcagaucgcccccggccagaccggcaacaucgccgacuacaacuacaagcugcccgacgacuucaccggcugcgugaucgccuggaacagcaacaaccuggacagcaaggugggcggcaacuacaacuaccuguaccggcuauuccguaagagcaaccugaagccauuugagcgggacaucagcaccgagaucuaccaggccgguagcacccccugcaacggcgugaagggcuucaacugcuacuucccccugcagagcuacggcuuccagcccaccuacggcgugggcuaccagcccuaccgggugguggugcugagcuucgagcugcugcacgcccccgccaccgugugcggcccuaaaaagagcaccaaccuggugaagaacaagugcgugaacuucaauuucaacggccugaccggcaccggcgugcugaccgagagcaacaagaaguuccugcccuuccagcaguucggccgggacaucgccgacaccaccgaugcagugcgggacccccagacccuggagauccuggacaucaccccaugcagcuucggcggcgugagcgucaucacccccggaacaaacaccagcaaccagguggccgugcuguaccagggcgugaacugcaccgaggugcccguggccauccacgccgaccagcugacccccaccuggcggguguacagcaccggcagcaacguguuccagacccgggccggcugccugaucggcgccgagcacgugaacaacuccuacgagugcgacauccccaucggcgcuggcaucugcgccagcuaccagacccagaccaacagcccccggcgggcccggagcguggccagccagagcaucaucgccuacaccaugagccugggcguggagaacagcguggccuacagcaacaacagcaucgccaucccuaccaacuucaccauaagcgugaccaccgagauccugcccgugagcaugaccaagaccagcguggacuguaccauguacaucugcggcgacagcaccgagugcagcaaccuguuacugcaguacggcagcuucugcacccagcugaaccgggcgcugaccggcaucgccguggagcaggacaagaacacccaagagguguucgcccaggugaagcagaucuacaagacucccccaaucaaggacuucggcggcuucaacuucagccagauccugcccgaccccagcaagcccagcaagcggagcuucaucgaggaccugcuguucaacaaggugacccuggccgacgccggcuucaucaagcaguacggggacugccugggcgacaucgccgcccgggaccugaucugcgcucagaaguucaacggccugaccgugcugcccccucugcugaccgaugagaugaucgcccaguacaccagcgcccugcuggccggcaccaucaccagcggcuggaccuucggcgccggcgccgcacugcagauccccuucgccaugcagauggccuaccgguucaacggcaucggcgugacccagaacgugcuguacgagaaccagaagcugaucgccaaccaguucaacagcgccaucggcaagauccaggacagccugagcagcaccgccagcgcccugggcaagcugcaggacguggugaaccagaacgcccaggcucugaacacccuggugaagcagcugagcagcaacuuuggcgccaucagcucagugcugaaugacauccugagccggcuggaucccccagaggccgaggugcagaucgacaggcugaucaccggccggcugcagagccugcagaccuacgugacccagcagcugauccgggccgccgagauucgggccagcgccaaccuggccgcaaccaagaugagcgagugcgugcugggccagagcaagcggguggacuucugcggcaagggcuaccaccugaugagcuucccccagagcgcuccccacggcgugguguuccugcacgucacauacgugcccgcccaggagaagaacuucaccaccgcccccgccaucugccacgacggaaaggcccacuucccccgggagggcguguucgugagcaacggcacccacugguucgugacccagcggaacuucuacgagccucagaucaucaccaccgacaacaccuucgugagcggcaacugcgacguggugaucggcaucgugaacaacaccguguacgacccccugcagcccgagcuggacagcuucaaggaggagcucgacaaguacuucaagaaccacaccagcccagacguggaccugggcgacaucagcggcaucaacgccagcguggugaacauccagaaggagaucgaccggcugaacgagguggccaagaaccugaacgagagccugaucgaccugcaggagcugggcaaguacgagcaguacaucaaguggcccugguacaucuggcugggcuucaucgccggccugaucgccaucgugauggugaccaucaugcugugcugcaugaccagcugcuguagcugccugaagggcugcugcagcugcggcagcugcugcaaguucgacgaggacgacagcgagcccgugcugaagggcgugaagcugcacuacaccugaggacuagucccuguucccagagcccacuuuuuuuucuuuuuuugaaauaaaauagccugucuuucagaucuaaaaaaaaaaaaaaaaaaaaaaaaaaaaaaaaaaaaaaaaaaaaaaaaaaaaaaaaaaaaaaaaaaaaaaaaaaaaaaaaaaaaaaaaaaaaaaaaaaaa

SEQ ID NO: 24906 - RNA, 4070 nt, Artificial Sequence
  SARS-CoV-2/Wuhan/WIV05/2019__EPI_ISL_402128 spike protein mRNA gc (1-1273)(K986P_V987P_K986P_V987P_E484K_D614G)
aggagagucccgcagucggcguccagcggcucugcuuguucgugugugugucguugcaggccuuauucaagcuuaccauguucguguuccuggugcugcugccccuggugagcagccagugcgugaaccugaccacccggacccagcugcccccugccuacaccaacagcuucacccggggcguguacuaccccgacaagguguuccggagcagcgugcugcacagcacccaggaccuguuccugcccuucuucagcaacgugaccugguuccacgccauccacgugagcggcaccaacggcaccaagcgguucgacaacccagugcugcccuucaacgacggcguguacuucgccagcaccgagaagucaaacaucauccggggcuggaucuucggcaccacccuggacagcaagacacagagccugcugaucgugaacaacgccaccaacguggugaucaaggugugcgaguuucaguucugcaacgaccccuuccugggcguguacuaccacaagaacaacaagagcuggauggagagcgaguuccgggucuacagcagcgcuaacaauugcaccuucgaguacgugagccagcccuuccugauggaccucgagggcaagcagggcaacuucaagaaccugcgggaguucguguucaagaacaucgauggcuacuucaagaucuacagcaagcacacccccaucaaccuggugcgggaccugccccagggauucagcgcccuggagccucugguggaccugcccaucggcaucaacaucaccagguuccagacccugcuggcccugcaccggagcuaccugacccccggcgacagcagcagcggcuggaccgccggcgccgccgcauacuacgugggcuaccugcagccacggaccuuccugcugaaguacaacgagaacggcaccaucaccgacgccguggacugcgcccuggacccccugagcgagaccaagugcacccuaaagagcuucaccguggagaagggcaucuaccagaccagcaacuuccgggugcagcccacugagagcaucgugcgguuccccaacauuaccaaccugugucccuucggcgagguguucaacgccacccgguucgccagcguguacgccuggaaccggaagcggaucagcaacugcguggccgacuacagcgugcuguacaacagcgccagcuucagcaccuucaagugcuacggcgugagcccuaccaagcugaacgaccugugcuucaccaacguguacgcugacagcuucgugauccggggcgacgaggugcggcagaucgcccccggccagaccggcaagaucgccgacuacaacuacaagcugcccgacgacuucaccggcugcgugaucgccuggaacagcaacaaccuggacagcaaggugggcggcaacuacaacuaccuguaccggcuguuccguaagagcaaccugaagccauucgagcgggacaucagcaccgagaucuaccaggccggcagcacccccugcaacggugugaagggcuuuaacugcuacuucccccugcagagcuacggcuuccagcccaccaacggcgugggcuaccagcccuaccgggugguggugcugagcuucgagcugcugcacgcccccgccaccgugugcggcccuaaaaagagcaccaaccuggugaagaacaagugcgugaacuucaauuucaacggccugaccggcaccggcgugcugaccgagagcaacaagaaguuccugcccuuccagcaguucggccgggauaucgccgacaccaccgacgcagugcgggacccccagacccuggagauccuggacaucaccccaugcagcuucggcggcgugagcgucaucacccccggcacaaacaccagcaaccagguggccgugcuguaccagggagugaacugcaccgaggugcccguggccauccacgccgaccagcugacccccaccuggcggguguacagcaccggcagcaacguguuccagacccgggccggcugccugaucggcgccgagcacgugaacaacuccuacgagugcgacauccccaucggcgcuggcaucugcgccagcuaccagacccagaccaacagcccccggcgggcccggagcguggccagccagagcaucaucgccuacaccaugagcuuaggcgccgagaacagcguggccuacagcaacaacagcaucgcgaucccuaccaacuucaccaucagcgugaccaccgagauacugcccgugagcaugaccaagaccagcguggacuguaccauguacaucugcggcgacagcaccgagugcagcaaccugcugcugcaguacggcagcuucugcacccagcugaaccgggcccugaccggcaucgccguggagcaggacaagaacacccaagagguguucgcccaggugaagcagaucuacaagacucccccaaucaaggacuucggcggcuucaacuucagccagauccugcccgaccccagcaagcccagcaagcggagcuucaucgaggaccugcuguucaacaaggugacccuggccgacgccggcuucaucaagcaguacggcgacugccugggggauaucgccgcucgggaccugaucugcgcccagaaguucaacggccugaccgugcugcccccucugcugaccgacgagaugaucgcccaguacaccagcgcccugcuugccggcaccaucaccagcggcuggaccuucggcgccggcgcagcccugcagauccccuucgccaugcagauggccuaccgguucaacggcaucggcgugacccagaacgugcuguacgagaaccagaagcugaucgccaaccaguucaacagcgccaucggcaagauccaggacagccugagcagcaccgccagcgcccugggcaagcugcaggacguggugaaccagaacgcucaggcccugaacacccuggugaagcagcugagcagcaacuucggcgccaucagcucagugcugaaugacauccugagcaggcuggaucccccagaggccgaggugcagaucgaccggcugaucaccggccggcugcagagccugcagaccuacgugacccagcagcugauccgggccgccgagauccgggccagcgccaaccuggcagccaccaagaugagcgagugcgugcugggccagagcaagcggguggacuuuugcggcaagggcuaccaccugaugagcuucccccagagcgcuccccacggcgugguguuccuccacgugacauacguccccgcccaggagaagaacuucaccaccgcccccgccauuugccacgacggcaaggcccacuucccccgggagggaguguucgugagcaacggcacccacugguucgugacccagcggaacuucuacgagccucagaucaucaccaccgacaacaccuucgugagcggcaacugcgacguggugaucggcaucgugaacaacaccguguacgacccccugcagcccgagcuggacagcuucaaggaggagcuggacaaguacuucaagaaccacaccagcccagacguggaccugggcgacaucagcggcaucaacgccagcguggugaacauccagaaggagaucgaccggcugaacgagguggccaagaaccugaacgagagccugaucgaccugcaggagcugggcaaguacgagcaguacaucaaguggcccugguacaucuggcugggcuucaucgccggccugaucgccaucgugauggugaccaucaugcugugcugcaugaccagcugcuguagcugccugaagggcugcugcagcugcggcagcugcugcaaguucgacgaggacgacagcgagcccgugcugaagggcgugaagcugcacuacaccugaggacuagucccuguucccagagcccacuuuuuuuucuuuuuuugaaauaaaauagccugucuuucagaucuaaaaaaaaaaaaaaaaaaaaaaaaaaaaaaaaaaaaaaaaaaaaaaaaaaaaaaaaaaaaaaaaaaaaaaaaaaaaaaaaaaaaaaaaaaaaaaaaaaaa

SEQ ID NO: 24907 - RNA, 4070 nt, Artificial Sequence
  SARS-CoV-2/Wuhan/WIV05/2019__EPI_ISL_402128 spike protein mRNA gc (1-1273)(K986P_V987P_K986P_V987P_L18F_T20N_P26S_D138Y_R190S_K417T _E484K_N501Y_D614G_H655Y_T1027I)
aggagagucccgcagucggcguccagcggcucugcuuguucgugugugugucguugcaggccuuauucaagcuuaccauguucguguuccuggugcugcugccccuggugagcagccagugcgugaacuucaccaaccggacccagcugcccagcgccuacaccaacagcuucacccggggcguguacuacccugacaagguguuccggagcagcgugcugcacagcacccaggaccuguuccugcccuucuucagcaacgugaccugguuccacgccauccacgugagcggcaccaacggcaccaagcgguucgacaaccccgugcugccauucaacgacggcguguacuucgccagcaccgagaagucaaacaucauccggggcuggaucuuuggcaccacccuggacagcaagacccagagccugcugaucgugaacaacgccacaaacguggugaucaaggugugcgaguuccaguucugcaacuaccccuuccugggcguguacuaccacaagaacaacaagagcuggauggagagcgaguuccgggucuacagcagcgcuaauaacugcaccuucgaguacgugagccagcccuuccugauggaccuggagggcaagcagggcaacuucaagaaccucagcgaguucguguucaagaacaucgacggcuacuucaagaucuacagcaagcacacccccaucaaccuggugcgggaucugccccagggauucagcgcccuggagccccugguggaccugccuaucggcaucaacaucacccgguuccagacccugcuggcccugcacaggagcuaccugacccccggcgacagcagcagcggcuggaccgccggcgccgccgcauacuacgugggcuaccugcagccccggaccuuccugcugaaguacaacgagaacggcaccaucaccgacgccguggacugcgcccuggacccacugagcgagaccaagugcacccuaaagagcuucaccguggagaagggcaucuaccagaccagcaacuuccgggugcagcccaccgagagcaucgugcgguuccccaacauuacuaaccugugucccuucggcgagguguucaacgccacccgguucgccagcguguacgccuggaaccggaagcggaucagcaacugcguggccgacuacagcgugcuguacaacagcgccagcuucagcaccuucaagugcuacggcgugagccccaccaagcugaacgaccugugcuucaccaacguguacgcugacagcuucgugauccggggcgacgaggugcggcagaucgccccuggccagaccggcaccaucgccgacuacaacuacaagcugcccgacgacuucaccggcugcgugaucgccuggaacagcaacaaccuggacagcaaggugggcggcaacuacaacuaccuguaccggcuguuccguaagagcaaccugaagcccuuugagcgggacaucagcaccgagaucuaccaggccggcagcaccccaugcaacggugugaagggcuucaacugcuacuucccccugcagagcuacggcuuccagcccaccuacggcgugggcuaccagcccuaccgggugguggugcugagcuucgagcugcugcacgcccccgccaccgugugcggccccaaaaagagcaccaaccuggugaagaacaagugcgugaacuucaauuucaacggccugaccggcaccggcgugcugaccgagagcaacaagaaguuccugccuuuccagcaguucggccgggacaucgccgauaccaccgacgcagugcgggacccccagacccuggagauccuggacaucacccccugcagcuucggcggcgugagcgucaucaccccaggcacaaacaccagcaaccagguggccgugcuguaccagggagugaacugcaccgaggugcccguggccauccacgccgaccagcugacccccaccuggcggguguacuccaccggcagcaacguguuccagacccgggccggcugccugaucggcgccgaguacgugaacaacagcuacgagugcgacauccccaucggcgcuggcaucugcgccagcuaccagacccagaccaacagcccccggcgggcccggagcguggccagccagagcaucaucgccuacaccaugagccugggcgccgagaacagcguggccuacagcaacaacagcaucgcgauccccaccaacuucaccaucagcgugaccaccgagauauuaccugugagcaugaccaagaccagcguggacuguaccauguacaucugcggcgacagcaccgagugcagcaaccugcugcugcaguacggcagcuucugcacccagcugaaccgggcccugaccggcaucgccguggagcaggacaagaacacccaagagguguucgcccaggugaagcagaucuacaagacuccacccaucaaggacuucggcggcuucaacuucagccagauccugcccgaccccagcaagcccagcaagcggagcuucaucgaggaccugcuguucaacaaggugacccuggccgacgccggcuucaucaagcaguacggcgacugccugggggacaucgccgcucgggaucugaucugcgcccagaaguucaacggccugaccgugcugccuccccugcugaccgacgagaugaucgcccaguacaccagcgcccugcuggccggcaccaucaccagcggcuggaccuucggcgccggcgcagcccuucagauccccuucgccaugcagauggccuaccgguucaacggcaucggcgugacccagaacgugcuguacgagaaccagaagcugaucgccaaccaguucaacagcgccaucggcaagauccaggacagccugagcagcaccgccagcgcccugggcaagcugcaggacguggugaaccagaacgcucaggcccugaacacccuggugaagcagcugagcucaaacuuuggcgccaucagcagcgugcugaaugacauccugagccggcuggacccacccgaggccgaggugcagaucgacaggcugaucaccggccggcugcagagccugcagaccuacgugacccagcagcugauccgggccgccgagauccgggccagcgccaaccuggcagccauuaagaugagcgagugcgugcugggccagagcaagcggguggacuucugcggcaagggcuaccaccugaugagcuucccccagagcgcuccccacggcgugguguuccugcacgugaccuacguccccgcccaggagaagaacuucacaaccgcccccgccaucugccacgacggcaaggcccacuucccccgggagggaguguucgugagcaacggcacccacugguucgugacccagcggaacuucuacgagccccagaucaucaccaccgacaacaccuucgugagcggcaacugcgacguggugaucggcaucgugaacaacaccguguacgacccucuccagcccgagcuggacagcuucaaggaggagcuggacaaguacuucaagaaccacaccagccccgacguggaccugggcgauaucagcggcaucaacgccagcguggugaacauccagaaggagaucgaccggcugaacgagguggccaagaaccugaacgagagccugaucgaccugcaggagcugggcaaguacgagcaguacaucaaguggccaugguacaucuggcugggcuucaucgccggccugaucgccaucgugauggugaccaucaugcugugcugcaugaccagcugcuguagcugccugaagggcugcugcagcugcggcagcugcugcaaguucgacgaggacgacagcgagcccgugcugaagggcgugaagcugcacuacaccugaggacuagucccuguucccagagcccacuuuuuuuucuuuuuuugaaauaaaauagccugucuuucagaucuaaaaaaaaaaaaaaaaaaaaaaaaaaaaaaaaaaaaaaaaaaaaaaaaaaaaaaaaaaaaaaaaaaaaaaaaaaaaaaaaaaaaaaaaaaaaaaaaaaaa

SEQ ID NO: 24908 - RNA, 4070 nt, Artificial Sequence
  SARS-CoV-2/Wuhan/WIV05/2019__EPI_ISL_402128 spike protein mRNA gc (1-1273)(K986P_V987P_K986P_V987P_S13I_W152C_L452R_D614G)
aggagagucccgcagucggcguccagcggcucugcuuguucgugugugugucguugcaggccuuauucaagcuuaccauguucguguuccuggugcugcugccccuggugagcauccagugcgugaaccugaccacccggacccagcugcccccugccuacaccaacagcuucacccggggcguguacuaccccgacaagguguuccggagcagcgugcugcacagcacccaggaccuguuccugcccuucuucagcaacgugaccugguuccacgccauccacgugagcggcaccaacggcaccaagcgguucgacaacccagugcugcccuucaacgacggcguguacuucgccagcaccgagaagucaaacaucauccggggcuggaucuucggcaccacccuggacagcaagacacagagccugcugaucgugaacaacgccaccaacguggugaucaaggugugcgaguuucaguucugcaacgaccccuuccugggcguguacuaccacaagaacaacaagagcugcauggagagcgaguuccgggucuacagcagcgcuaacaauugcaccuucgaguacgugagccagcccuuccugauggaccucgagggcaagcagggcaacuucaagaaccugcgggaguucguguucaagaacaucgauggcuacuucaagaucuacagcaagcacacccccaucaaccuggugcgggaccugccccagggauucagcgcccuggagccucugguggaccugcccaucggcaucaacaucaccagguuccagacccugcuggcccugcaccggagcuaccugacccccggcgacagcagcagcggcuggaccgccggcgccgccgcauacuacgugggcuaccugcagccacggaccuuccugcugaaguacaacgagaacggcaccaucaccgacgccguggacugcgcccuggacccccugagcgagaccaaguguacccuaaagagcuucaccguggagaagggcaucuaccagaccagcaacuuccgggugcagcccacugagagcauugugcgguuccccaacaucaccaaccugugccccuucggcgagguguucaacgccacccgguucgccagcguguacgccuggaaccggaagcggaucagcaacugcguggccgacuacagcgugcuguacaacagcgccagcuucagcaccuucaagugcuacggcgugagcccuaccaagcugaacgaccugugcuucaccaacguguacgcugacagcuucgugauccggggcgacgaggugcggcagaucgcccccggccagaccggcaagaucgccgacuacaacuacaagcugcccgacgacuucaccggcugcgugaucgccuggaacagcaacaaccuggacagcaaggugggcggcaacuacaacuaccgguaccggcuguuccguaagagcaaccugaagccauucgagcgggacaucagcaccgagaucuaccaggccggcagcacccccugcaacgguguggagggcuuuaacugcuacuucccccugcagagcuacggcuuccagcccaccaacggcgugggcuaccagcccuaccgggugguggugcugagcuucgagcugcugcacgcccccgccaccgugugcggcccuaaaaagagcaccaaccuggugaagaacaagugcgugaacuucaauuucaacggccugaccggcaccggcgugcugaccgagagcaacaagaaguuccugcccuuccagcaguucggccgggauaucgccgacaccaccgacgcagugcgggacccccagacccuggagauccuggacaucaccccaugcagcuucggcggcgugagcgucaucacccccggcacaaacaccagcaaccagguggccgugcuguaccagggagugaacugcaccgaggugcccguggccauccacgccgaccagcugacccccaccuggcggguguacagcaccggcagcaacguguuccagacccgggccggcugccugaucggcgccgagcacgugaacaacagcuacgagugcgacauccccaucggcgcuggcaucugugccuccuaccagacccagaccaacagcccccggcgggcccggagcguggccagccagagcaucaucgccuacaccaugagccugggcgccgagaacagcguggccuacagcaacaacagcaucgcgaucccuaccaacuucaccauaagcgugaccaccgagaucuuacccgugagcaugaccaagaccagcguggacugcaccauguacaucugcggcgacagcaccgagugcagcaaccugcugcugcaguacggcagcuucugcacccagcugaaccgggcccugaccggcaucgccguggagcaggacaagaacacccaagagguguucgcccaggugaagcagaucuacaagacucccccaaucaaggacuucggcggcuucaacuucagccagauccugcccgaccccagcaagcccagcaagcggagcuucaucgaggaccugcuguucaacaaggugacccuggccgacgccggcuucaucaagcaguacggcgacugccugggggauaucgccgcucgggaccugaucugcgcccagaaguucaacggccugaccgugcugcccccucugcugaccgacgagaugaucgcccaguacaccagcgcccugcuggccggcaccaucaccagcggcuggaccuucggcgccggcgcagcccuucagauccccuucgccaugcagauggccuacagguucaacggcaucggcgugacccagaacgugcuguacgagaaccagaagcugaucgccaaccaguucaacagcgccaucggcaagauccaggacagccugagcagcaccgccagcgcccugggcaagcugcaggacguggugaaccagaacgcucaggcccugaacacccuggugaagcagcugagcagcaacuucggcgccaucagcagcgugcugaaugacauccugucacggcuggaucccccagaggccgaggugcagaucgaccggcugaucaccggccggcugcagagccugcagaccuacgugacccagcagcugauccgggccgccgagauucgggccagcgccaaccuggcagccaccaagaugagcgagugcgugcugggccagagcaagcggguggacuuuugcggcaagggcuaccaccugaugagcuucccccagagcgcuccccacggcgugguguuccugcacgugacauacguccccgcccaggagaagaacuucaccaccgcccccgccaucugccacgacggcaaggcccacuucccccgggagggaguguucgugagcaacggcacccacugguucgugacccagcggaacuucuacgagccucagaucaucaccaccgacaacaccuucgugagcggcaacugcgacguggugaucggcaucgugaacaacaccguguacgacccccuccagcccgagcuggacagcuucaaggaggagcuggacaaguacuucaagaaccacaccagcccagacguggaccugggcgacaucagcggcaucaacgccagcguggugaacauccagaaggagaucgaccggcugaacgagguggccaagaaccugaacgagagccugaucgaccugcaggagcugggcaaguacgagcaguacaucaaguggcccugguacaucuggcugggcuucaucgccggccugaucgccaucgugauggugaccaucaugcugugcugcaugaccagcuguugcagcugccugaagggcugcugcagcugcggcagcugcugcaaguucgacgaggacgacagcgagcccgugcugaagggcgugaagcugcacuacaccugaggacuagucccuguucccagagcccacuuuuuuuucuuuuuuugaaauaaaauagccugucuuucagaucuaaaaaaaaaaaaaaaaaaaaaaaaaaaaaaaaaaaaaaaaaaaaaaaaaaaaaaaaaaaaaaaaaaaaaaaaaaaaaaaaaaaaaaaaaaaaaaaaaaaa

SEQ ID NO: 24909 - RNA, 4070 nt, Artificial Sequence
  SARS-CoV-2/Wuhan/WIV05/2019__EPI_ISL_402128 spike protein mRNA gc mod (1-1273)(K986P_V987P)
aggagagucccgcagucggcguccagcggcucugcuuguucgugugugugucguugcaggccuuauucaagcuuaccauguucguguuucuggugcugcugccccugguguccagccagugugugaaccugaccaccagaacacagcugccuccagccuacaccaacagcuucaccagaggcguguacuaccccgacaagguguucagauccagcgugcugcacucuacccaggaccuguuccugccuuucuucagcaacgugaccugguuccacgccauccacguguccggcaccaauggcaccaagagauucgacaaccccgugcugcccuucaacgacgggguguacuuugccagcaccgagaaguccaacaucaucagaggcuggaucuucggcaccacacuggacagcaagacccagagccugcugaucgugaacaacgccaccaacguggucaucaaagugugcgaguuccaguucugcaacgaccccuuccugggcgucuacuaccacaagaacaacaagagcuggauggaaagcgaguuccggguguacagcagcgccaacaacugcaccuucgaguacgugucccagccuuuccugauggaccuggaaggcaagcagggcaacuucaagaaccugcgcgaguucguguucaagaacaucgacggcuacuucaaaaucuacagcaagcacaccccuaucaaccucgugcgggaucugccucagggcuucucugcucuggaaccccugguggaucugcccaucggcaucaacaucacccgguuucagacacugcuggcccugcacagaagcuaccugacaccuggcgauagcagcagcggauggacagcuggugccgccgcuuacuaugugggcuaccugcagccuagaaccuuccugcugaaguacaacgagaacggcaccaucaccgacgccguggauugugcucuggauccucugagcgagacaaagugcacccugaaguccuucaccguggaaaagggcaucuaccagaccagcaacuuccgggugcagcccaccgaauccaucgugcgguuccccaauaucaccaaucugugccccuucggcgagguguucaaugccaccagauucgccucuguguacgccuggaaccggaagcggaucagcaauugcguggccgacuacuccgugcuguacaacuccgccagcuucagcaccuucaagugcuacggcguguccccuaccaagcugaacgaccugugcuucacaaacguguacgccgacagcuucgugauccggggagaugaagugcggcagauugccccuggacagacaggcaagaucgccgacuacaacuacaagcugcccgacgacuucaccggcugugugauugccuggaacagcaacaaccuggacuccaaagucggcggcaacuacaauuaccuguaccggcuguuccggaaguccaaucugaagcccuucgagcgggacaucagcaccgaaaucuaucaggccggcagcaccccuugcaacggcguggaaggcuucaacugcuacuucccacugcaguccuacggcuuucagcccacaaauggcgugggcuaucagcccuacagagugguggugcugagcuucgaacugcugcaugcuccugccacagugugcggcccuaagaaaagcaccaaucucgugaagaacaaaugcgugaacuucaacuucaacggccugaccggcaccggcgugcugacagagagcaacaagaaguuccugccauuccagcaguuuggccgggauaucgccgauaccacagacgccguuagagauccccagacacuggaaauccuggacaucaccccaugcagcuucggcggagugucugugaucaccccuggcaccaacaccagcaaucagguggcagugcuguaccaggacgugaacuguaccgaagugcccguggccauucacgccgaucagcugacaccuacauggcggguguacuccaccggcagcaauguguuucagaccagagccggcugucugaucggagccgagcacgugaacaauagcuacgagugcgacauccccaucggcgcuggcaucugugccagcuaccagacacagacaaacagccccagacgggcuagaagcguggccagccagagcaucauugccuacacaaugucucugggcgccgagaacagcguggccuacuccaacaacucuaucgcuauccccaccaacuucaccaucagcgugaccaccgagauccugccuguguccaugaccaagaccagcguggacugcaccauguacaucugcggcgauuccaccgagugcuccaaccugcugcugcaguacggcagcuucugcacccagcugaauagagcccugacagggaucgccguggaacaggacaagaacacccaagagguguucgcccaagugaagcaaaucuacaagaccccuccuaucaaggacuucggcggcuucaauuucagccagauucugcccgauccuagcaagcccagcaagcggagcuucaucgaggaccugcuguucaacaaagugacacuggccgacgccggcuucaucaagcaguauggcgauugucugggcgacauugccgccagggaucugauuugcgcccagaaguuuaacggacugacagugcugccuccucugcugaccgaugagaugaucgcccaguacacaucugcccugcuggccggcacaaucacaagcggcuggacauuuggagcuggcgccgcucugcagauccccuuugcuaugcagauggccuaccgguucaacggcaucggagugacccagaaugugcuguacgagaaccagaagcugaucgccaaccaguucaacagcgccaucggcaagauccaggacagccugagcagcacagcaagcgcccugggaaagcugcaggacguggucaaccagaaugcccaggcacugaacacccuggucaagcagcuguccuccaacuucggcgccaucagcucugugcugaacgauauccugagcagacuggacccuccugaggccgaggugcagaucgacagacugaucacaggcagacugcagagccuccagacauacgugacccagcagcugaucagagccgccgagauuagagccucugccaaucuggccgccaccaagaugucugagugugugcugggccagagcaagagaguggacuuuugcggcaagggcuaccaccugaugagcuucccucagucugccccucacggcgugguguuucugcacgugacauaugugcccgcucaagagaagaauuucaccaccgcuccagccaucugccacgacggcaaagcccacuuuccuagagaaggcguguucguguccaacggcacccauugguucgugacacagcggaacuucuacgagccccagaucaucaccaccgacaacaccuucgugucuggcaacugcgacguugugaucggcauugugaacaauaccguguacgacccucugcagcccgagcuggacagcuucaaagaggaacuggacaaguacuuuaagaaccacacaagccccgacguggaccugggcgauaucagcggaaucaaugccagcgucgugaacauccagaaagagaucgaccggcugaacgagguggccaagaaucugaacgagagccugaucgaccugcaagaacuggggaaguacgagcaguacaucaaguggcccugguacaucuggcugggcuuuaucgccggacugauugccaucgugauggucacaaucaugcuguguugcaugaccagcugcuguagcugccugaagggcuguuguagcuguggcagcugcugcaaguucgacgaggacgauucugagcccgugcugaagggcgugaaacugcacuacaccugaggacuagucccuguucccagagcccacuuuuuuuucuuuuuuugaaauaaaauagccugucuuucagaucuaaaaaaaaaaaaaaaaaaaaaaaaaaaaaaaaaaaaaaaaaaaaaaaaaaaaaaaaaaaaaaaaaaaaaaaaaaaaaaaaaaaaaaaaaaaaaaaaaaaa

SEQ ID NO: 24910 - RNA, 4070 nt, Artificial Sequence
  SARS-CoV-2/Wuhan/WIV05/2019__EPI_ISL_402128 spike protein mRNA gc mod (1-1273)(K986P_V987P_ D614G)
aggagagucccgcagucggcguccagcggcucugcuuguucgugugugugucguugcaggccuuauucaagcuuaccauguucguguuucuggugcugcugccccugguguccagccagugugugaaccugaccaccagaacacagcugccuccagccuacaccaacagcuucaccagaggcguguacuaccccgacaagguguucagauccagcgugcugcacucuacccaggaccuguuccugccuuucuucagcaacgugaccugguuccacgccauccacguguccggcaccaauggcaccaagagauucgacaaccccgugcugcccuucaacgacgggguguacuuugccagcaccgagaaguccaacaucaucagaggcuggaucuucggcaccacacuggacagcaagacccagagccugcugaucgugaacaacgccaccaacguggucaucaaagugugcgaguuccaguucugcaacgaccccuuccugggcgucuacuaccacaagaacaacaagagcuggauggaaagcgaguuccggguguacagcagcgccaacaacugcaccuucgaguacgugucccagccuuuccugauggaccuggaaggcaagcagggcaacuucaagaaccugcgcgaguucguguucaagaacaucgacggcuacuucaaaaucuacagcaagcacaccccuaucaaccucgugcgggaucugccucagggcuucucugcucuggaaccccugguggaucugcccaucggcaucaacaucacccgguuucagacacugcuggcccugcacagaagcuaccugacaccuggcgauagcagcagcggauggacagcuggugccgccgcuuacuaugugggcuaccugcagccuagaaccuuccugcugaaguacaacgagaacggcaccaucaccgacgccguggauugugcucuggauccucugagcgagacaaagugcacccugaaguccuucaccguggaaaagggcaucuaccagaccagcaacuuccgggugcagcccaccgaauccaucgugcgguuccccaauaucaccaaucugugccccuucggcgagguguucaaugccaccagauucgccucuguguacgccuggaaccggaagcggaucagcaauugcguggccgacuacuccgugcuguacaacuccgccagcuucagcaccuucaagugcuacggcguguccccuaccaagcugaacgaccugugcuucacaaacguguacgccgacagcuucgugauccggggagaugaagugcggcagauugccccuggacagacaggcaagaucgccgacuacaacuacaagcugcccgacgacuucaccggcugugugauugccuggaacagcaacaaccuggacuccaaagucggcggcaacuacaauuaccuguaccggcuguuccggaaguccaaucugaagcccuucgagcgggacaucagcaccgaaaucuaucaggccggcagcaccccuugcaacggcguggaaggcuucaacugcuacuucccacugcaguccuacggcuuucagcccacaaauggcgugggcuaucagcccuacagagugguggugcugagcuucgaacugcugcaugcuccugccacagugugcggcccuaagaaaagcaccaaucucgugaagaacaaaugcgugaacuucaacuucaacggccugaccggcaccggcgugcugacagagagcaacaagaaguuccugccauuccagcaguuuggccgggauaucgccgauaccacagacgccguuagagauccccagacacuggaaauccuggacaucaccccaugcagcuucggcggagugucugugaucaccccuggcaccaacaccagcaaucagguggcagugcuguaccagggcgugaacuguaccgaagugcccguggccauucacgccgaucagcugacaccuacauggcggguguacuccaccggcagcaauguguuucagaccagagccggcugucugaucggagccgagcacgugaacaauagcuacgagugcgacauccccaucggcgcuggcaucugugccagcuaccagacacagacaaacagccccagacgggcuagaagcguggccagccagagcaucauugccuacacaaugucucugggcgccgagaacagcguggccuacuccaacaacucuaucgcuauccccaccaacuucaccaucagcgugaccaccgagauccugccuguguccaugaccaagaccagcguggacugcaccauguacaucugcggcgauuccaccgagugcuccaaccugcugcugcaguacggcagcuucugcacccagcugaauagagcccugacagggaucgccguggaacaggacaagaacacccaagagguguucgcccaagugaagcaaaucuacaagaccccuccuaucaaggacuucggcggcuucaauuucagccagauucugcccgauccuagcaagcccagcaagcggagcuucaucgaggaccugcuguucaacaaagugacacuggccgacgccggcuucaucaagcaguauggcgauugucugggcgacauugccgccagggaucugauuugcgcccagaaguuuaacggacugacagugcugccuccucugcugaccgaugagaugaucgcccaguacacaucugcccugcuggccggcacaaucacaagcggcuggacauuuggagcuggcgccgcucugcagauccccuuugcuaugcagauggccuaccgguucaacggcaucggagugacccagaaugugcuguacgagaaccagaagcugaucgccaaccaguucaacagcgccaucggcaagauccaggacagccugagcagcacagcaagcgcccugggaaagcugcaggacguggucaaccagaaugcccaggcacugaacacccuggucaagcagcuguccuccaacuucggcgccaucagcucugugcugaacgauauccugagcagacuggacccuccugaggccgaggugcagaucgacagacugaucacaggcagacugcagagccuccagacauacgugacccagcagcugaucagagccgccgagauuagagccucugccaaucuggccgccaccaagaugucugagugugugcugggccagagcaagagaguggacuuuugcggcaagggcuaccaccugaugagcuucccucagucugccccucacggcgugguguuucugcacgugacauaugugcccgcucaagagaagaauuucaccaccgcuccagccaucugccacgacggcaaagcccacuuuccuagagaaggcguguucguguccaacggcacccauugguucgugacacagcggaacuucuacgagccccagaucaucaccaccgacaacaccuucgugucuggcaacugcgacguugugaucggcauugugaacaauaccguguacgacccucugcagcccgagcuggacagcuucaaagaggaacuggacaaguacuuuaagaaccacacaagccccgacguggaccugggcgauaucagcggaaucaaugccagcgucgugaacauccagaaagagaucgaccggcugaacgagguggccaagaaucugaacgagagccugaucgaccugcaagaacuggggaaguacgagcaguacaucaaguggcccugguacaucuggcugggcuuuaucgccggacugauugccaucgugauggucacaaucaugcuguguugcaugaccagcugcuguagcugccugaagggcuguuguagcuguggcagcugcugcaaguucgacgaggacgauucugagcccgugcugaagggcgugaaacugcacuacaccugaggacuagucccuguucccagagcccacuuuuuuuucuuuuuuugaaauaaaauagccugucuuucagaucuaaaaaaaaaaaaaaaaaaaaaaaaaaaaaaaaaaaaaaaaaaaaaaaaaaaaaaaaaaaaaaaaaaaaaaaaaaaaaaaaaaaaaaaaaaaaaaaaaaaa

SEQ ID NO: 24911 - RNA, 4070 nt, Artificial Sequence
  SARS-CoV-2/Wuhan/WIV05/2019__EPI_ISL_402128 spike protein mRNA gc mod (1-1273)(K986P_V987P_A222V_D614G)
aggagagucccgcagucggcguccagcggcucugcuuguucgugugugugucguugcaggccuuauucaagcuuaccauguucguguuucuggugcugcugccccugguguccagccagugugugaaccugaccaccagaacacagcugccuccagccuacaccaacagcuucaccagaggcguguacuaccccgacaagguguucagauccagcgugcugcacucuacccaggaccuguuccugccuuucuucagcaacgugaccugguuccacgccauccacguguccggcaccaauggcaccaagagauucgacaaccccgugcugcccuucaacgacgggguguacuuugccagcaccgagaaguccaacaucaucagaggcuggaucuucggcaccacacuggacagcaagacccagagccugcugaucgugaacaacgccaccaacguggucaucaaagugugcgaguuccaguucugcaacgaccccuuccugggcgucuacuaccacaagaacaacaagagcuggauggaaagcgaguuccggguguacagcagcgccaacaacugcaccuucgaguacgugucccagccuuuccugauggaccuggaaggcaagcagggcaacuucaagaaccugcgcgaguucguguucaagaacaucgacggcuacuucaaaaucuacagcaagcacaccccuaucaaccucgugcgggaucugccucagggcuucucugugcuggaaccccugguggaucugcccaucggcaucaacaucacccgguuucagacacugcuggcccugcacagaagcuaccugacaccuggcgauagcagcagcggauggacagcuggugccgccgcuuacuaugugggcuaccugcagccuagaaccuuccugcugaaguacaacgagaacggcaccaucaccgacgccguggauugugcucuggauccucugagcgagacaaagugcacccugaaguccuucaccguggaaaagggcaucuaccagaccagcaacuuccgggugcagcccaccgaauccaucgugcgguuccccaauaucaccaaucugugccccuucggcgagguguucaaugccaccagauucgccucuguguacgccuggaaccggaagcggaucagcaauugcguggccgacuacuccgugcuguacaacuccgccagcuucagcaccuucaagugcuacggcguguccccuaccaagcugaacgaccugugcuucacaaacguguacgccgacagcuucgugauccggggagaugaagugcggcagauugccccuggacagacaggcaagaucgccgacuacaacuacaagcugcccgacgacuucaccggcugugugauugccuggaacagcaacaaccuggacuccaaagucggcggcaacuacaauuaccuguaccggcuguuccggaaguccaaucugaagcccuucgagcgggacaucagcaccgaaaucuaucaggccggcagcaccccuugcaacggcguggaaggcuucaacugcuacuucccacugcaguccuacggcuuucagcccacaaauggcgugggcuaucagcccuacagagugguggugcugagcuucgaacugcugcaugcuccugccacagugugcggcccuaagaaaagcaccaaucucgugaagaacaaaugcgugaacuucaacuucaacggccugaccggcaccggcgugcugacagagagcaacaagaaguuccugccauuccagcaguuuggccgggauaucgccgauaccacagacgccguuagagauccccagacacuggaaauccuggacaucaccccaugcagcuucggcggagugucugugaucaccccuggcaccaacaccagcaaucagguggcagugcuguaccagggcgugaacuguaccgaagugcccguggccauucacgccgaucagcugacaccuacauggcggguguacuccaccggcagcaauguguuucagaccagagccggcugucugaucggagccgagcacgugaacaauagcuacgagugcgacauccccaucggcgcuggcaucugugccagcuaccagacacagacaaacagccccagacgggcuagaagcguggccagccagagcaucauugccuacacaaugucucugggcgccgagaacagcguggccuacuccaacaacucuaucgcuauccccaccaacuucaccaucagcgugaccaccgagauccugccuguguccaugaccaagaccagcguggacugcaccauguacaucugcggcgauuccaccgagugcuccaaccugcugcugcaguacggcagcuucugcacccagcugaauagagcccugacagggaucgccguggaacaggacaagaacacccaagagguguucgcccaagugaagcaaaucuacaagaccccuccuaucaaggacuucggcggcuucaauuucagccagauucugcccgauccuagcaagcccagcaagcggagcuucaucgaggaccugcuguucaacaaagugacacuggccgacgccggcuucaucaagcaguauggcgauugucugggcgacauugccgccagggaucugauuugcgcccagaaguuuaacggacugacagugcugccuccucugcugaccgaugagaugaucgcccaguacacaucugcccugcuggccggcacaaucacaagcggcuggacauuuggagcuggcgccgcucugcagauccccuuugcuaugcagauggccuaccgguucaacggcaucggagugacccagaaugugcuguacgagaaccagaagcugaucgccaaccaguucaacagcgccaucggcaagauccaggacagccugagcagcacagcaagcgcccugggaaagcugcaggacguggucaaccagaaugcccaggcacugaacacccuggucaagcagcuguccuccaacuucggcgccaucagcucugugcugaacgauauccugagcagacuggacccuccugaggccgaggugcagaucgacagacugaucacaggcagacugcagagccuccagacauacgugacccagcagcugaucagagccgccgagauuagagccucugccaaucuggccgccaccaagaugucugagugugugcugggccagagcaagagaguggacuuuugcggcaagggcuaccaccugaugagcuucccucagucugccccucacggcgugguguuucugcacgugacauaugugcccgcucaagagaagaauuucaccaccgcuccagccaucugccacgacggcaaagcccacuuuccuagagaaggcguguucguguccaacggcacccauugguucgugacacagcggaacuucuacgagccccagaucaucaccaccgacaacaccuucgugucuggcaacugcgacguugugaucggcauugugaacaauaccguguacgacccucugcagcccgagcuggacagcuucaaagaggaacuggacaaguacuuuaagaaccacacaagccccgacguggaccugggcgauaucagcggaaucaaugccagcgucgugaacauccagaaagagaucgaccggcugaacgagguggccaagaaucugaacgagagccugaucgaccugcaagaacuggggaaguacgagcaguacaucaaguggcccugguacaucuggcugggcuuuaucgccggacugauugccaucgugauggucacaaucaugcuguguugcaugaccagcugcuguagcugccugaagggcuguuguagcuguggcagcugcugcaaguucgacgaggacgauucugagcccgugcugaagggcgugaaacugcacuacaccugaggacuagucccuguucccagagcccacuuuuuuuucuuuuuuugaaauaaaauagccugucuuucagaucuaaaaaaaaaaaaaaaaaaaaaaaaaaaaaaaaaaaaaaaaaaaaaaaaaaaaaaaaaaaaaaaaaaaaaaaaaaaaaaaaaaaaaaaaaaaaaaaaaaaa

SEQ ID NO: 24912 - RNA, 4070 nt, Artificial Sequence
  SARS-CoV-2/Wuhan/WIV05/2019__EPI_ISL_402128 spike protein mRNA gc mod (1-1273)(K986P_V987P_N439K_D614G)
aggagagucccgcagucggcguccagcggcucugcuuguucgugugugugucguugcaggccuuauucaagcuuaccauguucguguuucuggugcugcugccccugguguccagccagugugugaaccugaccaccagaacacagcugccuccagccuacaccaacagcuucaccagaggcguguacuaccccgacaagguguucagauccagcgugcugcacucuacccaggaccuguuccugccuuucuucagcaacgugaccugguuccacgccauccacguguccggcaccaauggcaccaagagauucgacaaccccgugcugcccuucaacgacgggguguacuuugccagcaccgagaaguccaacaucaucagaggcuggaucuucggcaccacacuggacagcaagacccagagccugcugaucgugaacaacgccaccaacguggucaucaaagugugcgaguuccaguucugcaacgaccccuuccugggcgucuacuaccacaagaacaacaagagcuggauggaaagcgaguuccggguguacagcagcgccaacaacugcaccuucgaguacgugucccagccuuuccugauggaccuggaaggcaagcagggcaacuucaagaaccugcgcgaguucguguucaagaacaucgacggcuacuucaaaaucuacagcaagcacaccccuaucaaccucgugcgggaucugccucagggcuucucugcucuggaaccccugguggaucugcccaucggcaucaacaucacccgguuucagacacugcuggcccugcacagaagcuaccugacaccuggcgauagcagcagcggauggacagcuggugccgccgcuuacuaugugggcuaccugcagccuagaaccuuccugcugaaguacaacgagaacggcaccaucaccgacgccguggauugugcucuggauccucugagcgagacaaagugcacccugaaguccuucaccguggaaaagggcaucuaccagaccagcaacuuccgggugcagcccaccgaauccaucgugcgguuccccaauaucaccaaucugugccccuucggcgagguguucaaugccaccagauucgccucuguguacgccuggaaccggaagcggaucagcaauugcguggccgacuacuccgugcuguacaacuccgccagcuucagcaccuucaagugcuacggcguguccccuaccaagcugaacgaccugugcuucacaaacguguacgccgacagcuucgugauccggggagaugaagugcggcagauugccccuggacagacaggcaagaucgccgacuacaacuacaagcugcccgacgacuucaccggcugugugauugccuggaacagcaagaaccuggacuccaaagucggcggcaacuacaauuaccuguaccggcuguuccggaaguccaaucugaagcccuucgagcgggacaucagcaccgaaaucuaucaggccggcagcaccccuugcaacggcguggaaggcuucaacugcuacuucccacugcaguccuacggcuuucagcccacaaauggcgugggcuaucagcccuacagagugguggugcugagcuucgaacugcugcaugcuccugccacagugugcggcccuaagaaaagcaccaaucucgugaagaacaaaugcgugaacuucaacuucaacggccugaccggcaccggcgugcugacagagagcaacaagaaguuccugccauuccagcaguuuggccgggauaucgccgauaccacagacgccguuagagauccccagacacuggaaauccuggacaucaccccaugcagcuucggcggagugucugugaucaccccuggcaccaacaccagcaaucagguggcagugcuguaccagggcgugaacuguaccgaagugcccguggccauucacgccgaucagcugacaccuacauggcggguguacuccaccggcagcaauguguuucagaccagagccggcugucugaucggagccgagcacgugaacaauagcuacgagugcgacauccccaucggcgcuggcaucugugccagcuaccagacacagacaaacagccccagacgggcuagaagcguggccagccagagcaucauugccuacacaaugucucugggcgccgagaacagcguggccuacuccaacaacucuaucgcuauccccaccaacuucaccaucagcgugaccaccgagauccugccuguguccaugaccaagaccagcguggacugcaccauguacaucugcggcgauuccaccgagugcuccaaccugcugcugcaguacggcagcuucugcacccagcugaauagagcccugacagggaucgccguggaacaggacaagaacacccaagagguguucgcccaagugaagcaaaucuacaagaccccuccuaucaaggacuucggcggcuucaauuucagccagauucugcccgauccuagcaagcccagcaagcggagcuucaucgaggaccugcuguucaacaaagugacacuggccgacgccggcuucaucaagcaguauggcgauugucugggcgacauugccgccagggaucugauuugcgcccagaaguuuaacggacugacagugcugccuccucugcugaccgaugagaugaucgcccaguacacaucugcccugcuggccggcacaaucacaagcggcuggacauuuggagcuggcgccgcucugcagauccccuuugcuaugcagauggccuaccgguucaacggcaucggagugacccagaaugugcuguacgagaaccagaagcugaucgccaaccaguucaacagcgccaucggcaagauccaggacagccugagcagcacagcaagcgcccugggaaagcugcaggacguggucaaccagaaugcccaggcacugaacacccuggucaagcagcuguccuccaacuucggcgccaucagcucugugcugaacgauauccugagcagacuggacccuccugaggccgaggugcagaucgacagacugaucacaggcagacugcagagccuccagacauacgugacccagcagcugaucagagccgccgagauuagagccucugccaaucuggccgccaccaagaugucugagugugugcugggccagagcaagagaguggacuuuugcggcaagggcuaccaccugaugagcuucccucagucugccccucacggcgugguguuucugcacgugacauaugugcccgcucaagagaagaauuucaccaccgcuccagccaucugccacgacggcaaagcccacuuuccuagagaaggcguguucguguccaacggcacccauugguucgugacacagcggaacuucuacgagccccagaucaucaccaccgacaacaccuucgugucuggcaacugcgacguugugaucggcauugugaacaauaccguguacgacccucugcagcccgagcuggacagcuucaaagaggaacuggacaaguacuuuaagaaccacacaagccccgacguggaccugggcgauaucagcggaaucaaugccagcgucgugaacauccagaaagagaucgaccggcugaacgagguggccaagaaucugaacgagagccugaucgaccugcaagaacuggggaaguacgagcaguacaucaaguggcccugguacaucuggcugggcuuuaucgccggacugauugccaucgugauggucacaaucaugcuguguugcaugaccagcugcuguagcugccugaagggcuguuguagcuguggcagcugcugcaaguucgacgaggacgauucugagcccgugcugaagggcgugaaacugcacuacaccugaggacuagucccuguucccagagcccacuuuuuuuucuuuuuuugaaauaaaauagccugucuuucagaucuaaaaaaaaaaaaaaaaaaaaaaaaaaaaaaaaaaaaaaaaaaaaaaaaaaaaaaaaaaaaaaaaaaaaaaaaaaaaaaaaaaaaaaaaaaaaaaaaaaaa

SEQ ID NO: 24913 - RNA, 4070 nt, Artificial Sequence
  SARS-CoV-2/Wuhan/WIV05/2019__EPI_ISL_402128 spike protein mRNA gc mod (1-1273)(K986P_V987P_S477N_D614G)
aggagagucccgcagucggcguccagcggcucugcuuguucgugugugugucguugcaggccuuauucaagcuuaccauguucguguuucuggugcugcugccccugguguccagccagugugugaaccugaccaccagaacacagcugccuccagccuacaccaacagcuucaccagaggcguguacuaccccgacaagguguucagauccagcgugcugcacucuacccaggaccuguuccugccuuucuucagcaacgugaccugguuccacgccauccacguguccggcaccaauggcaccaagagauucgacaaccccgugcugcccuucaacgacgggguguacuuugccagcaccgagaaguccaacaucaucagaggcuggaucuucggcaccacacuggacagcaagacccagagccugcugaucgugaacaacgccaccaacguggucaucaaagugugcgaguuccaguucugcaacgaccccuuccugggcgucuacuaccacaagaacaacaagagcuggauggaaagcgaguuccggguguacagcagcgccaacaacugcaccuucgaguacgugucccagccuuuccugauggaccuggaaggcaagcagggcaacuucaagaaccugcgcgaguucguguucaagaacaucgacggcuacuucaaaaucuacagcaagcacaccccuaucaaccucgugcgggaucugccucagggcuucucugcucuggaaccccugguggaucugcccaucggcaucaacaucacccgguuucagacacugcuggcccugcacagaagcuaccugacaccuggcgauagcagcagcggauggacagcuggugccgccgcuuacuaugugggcuaccugcagccuagaaccuuccugcugaaguacaacgagaacggcaccaucaccgacgccguggauugugcucuggauccucugagcgagacaaagugcacccugaaguccuucaccguggaaaagggcaucuaccagaccagcaacuuccgggugcagcccaccgaauccaucgugcgguuccccaauaucaccaaucugugccccuucggcgagguguucaaugccaccagauucgccucuguguacgccuggaaccggaagcggaucagcaauugcguggccgacuacuccgugcuguacaacuccgccagcuucagcaccuucaagugcuacggcguguccccuaccaagcugaacgaccugugcuucacaaacguguacgccgacagcuucgugauccggggagaugaagugcggcagauugccccuggacagacaggcaagaucgccgacuacaacuacaagcugcccgacgacuucaccggcugugugauugccuggaacagcaacaaccuggacuccaaagucggcggcaacuacaauuaccuguaccggcuguuccggaaguccaaucugaagcccuucgagcgggacaucagcaccgaaaucuaucaggccggcaacaccccuugcaacggcguggaaggcuucaacugcuacuucccacugcaguccuacggcuuucagcccacaaauggcgugggcuaucagcccuacagagugguggugcugagcuucgaacugcugcaugcuccugccacagugugcggcccuaagaaaagcaccaaucucgugaagaacaaaugcgugaacuucaacuucaacggccugaccggcaccggcgugcugacagagagcaacaagaaguuccugccauuccagcaguuuggccgggauaucgccgauaccacagacgccguuagagauccccagacacuggaaauccuggacaucaccccaugcagcuucggcggagugucugugaucaccccuggcaccaacaccagcaaucagguggcagugcuguaccagggcgugaacuguaccgaagugcccguggccauucacgccgaucagcugacaccuacauggcggguguacuccaccggcagcaauguguuucagaccagagccggcugucugaucggagccgagcacgugaacaauagcuacgagugcgacauccccaucggcgcuggcaucugugccagcuaccagacacagacaaacagccccagacgggcuagaagcguggccagccagagcaucauugccuacacaaugucucugggcgccgagaacagcguggccuacuccaacaacucuaucgcuauccccaccaacuucaccaucagcgugaccaccgagauccugccuguguccaugaccaagaccagcguggacugcaccauguacaucugcggcgauuccaccgagugcuccaaccugcugcugcaguacggcagcuucugcacccagcugaauagagcccugacagggaucgccguggaacaggacaagaacacccaagagguguucgcccaagugaagcaaaucuacaagaccccuccuaucaaggacuucggcggcuucaauuucagccagauucugcccgauccuagcaagcccagcaagcggagcuucaucgaggaccugcuguucaacaaagugacacuggccgacgccggcuucaucaagcaguauggcgauugucugggcgacauugccgccagggaucugauuugcgcccagaaguuuaacggacugacagugcugccuccucugcugaccgaugagaugaucgcccaguacacaucugcccugcuggccggcacaaucacaagcggcuggacauuuggagcuggcgccgcucugcagauccccuuugcuaugcagauggccuaccgguucaacggcaucggagugacccagaaugugcuguacgagaaccagaagcugaucgccaaccaguucaacagcgccaucggcaagauccaggacagccugagcagcacagcaagcgcccugggaaagcugcaggacguggucaaccagaaugcccaggcacugaacacccuggucaagcagcuguccuccaacuucggcgccaucagcucugugcugaacgauauccugagcagacuggacccuccugaggccgaggugcagaucgacagacugaucacaggcagacugcagagccuccagacauacgugacccagcagcugaucagagccgccgagauuagagccucugccaaucuggccgccaccaagaugucugagugugugcugggccagagcaagagaguggacuuuugcggcaagggcuaccaccugaugagcuucccucagucugccccucacggcgugguguuucugcacgugacauaugugcccgcucaagagaagaauuucaccaccgcuccagccaucugccacgacggcaaagcccacuuuccuagagaaggcguguucguguccaacggcacccauugguucgugacacagcggaacuucuacgagccccagaucaucaccaccgacaacaccuucgugucuggcaacugcgacguugugaucggcauugugaacaauaccguguacgacccucugcagcccgagcuggacagcuucaaagaggaacuggacaaguacuuuaagaaccacacaagccccgacguggaccugggcgauaucagcggaaucaaugccagcgucgugaacauccagaaagagaucgaccggcugaacgagguggccaagaaucugaacgagagccugaucgaccugcaagaacuggggaaguacgagcaguacaucaaguggcccugguacaucuggcugggcuuuaucgccggacugauugccaucgugauggucacaaucaugcuguguugcaugaccagcugcuguagcugccugaagggcuguuguagcuguggcagcugcugcaaguucgacgaggacgauucugagcccgugcugaagggcgugaaacugcacuacaccugaggacuagucccuguucccagagcccacuuuuuuuucuuuuuuugaaauaaaauagccugucuuucagaucuaaaaaaaaaaaaaaaaaaaaaaaaaaaaaaaaaaaaaaaaaaaaaaaaaaaaaaaaaaaaaaaaaaaaaaaaaaaaaaaaaaaaaaaaaaaaaaaaaaaa

SEQ ID NO: 24914 - RNA, 4070 nt, Artificial Sequence
  SARS-CoV-2/Wuhan/WIV05/2019__EPI_ISL_402128 spike protein mRNA gc mod (1-1273)(K986P_V987P_N501Y_D614G)
aggagagucccgcagucggcguccagcggcucugcuuguucgugugugugucguugcaggccuuauucaagcuuaccauguucguguuucuggugcugcugccccugguguccagccagugugugaaccugaccaccagaacacagcugccuccagccuacaccaacagcuucaccagaggcguguacuaccccgacaagguguucagauccagcgugcugcacucuacccaggaccuguuccugccuuucuucagcaacgugaccugguuccacgccauccacguguccggcaccaauggcaccaagagauucgacaaccccgugcugcccuucaacgacgggguguacuuugccagcaccgagaaguccaacaucaucagaggcuggaucuucggcaccacacuggacagcaagacccagagccugcugaucgugaacaacgccaccaacguggucaucaaagugugcgaguuccaguucugcaacgaccccuuccugggcgucuacuaccacaagaacaacaagagcuggauggaaagcgaguuccggguguacagcagcgccaacaacugcaccuucgaguacgugucccagccuuuccugauggaccuggaaggcaagcagggcaacuucaagaaccugcgcgaguucguguucaagaacaucgacggcuacuucaaaaucuacagcaagcacaccccuaucaaccucgugcgggaucugccucagggcuucucugcucuggaaccccugguggaucugcccaucggcaucaacaucacccgguuucagacacugcuggcccugcacagaagcuaccugacaccuggcgauagcagcagcggauggacagcuggugccgccgcuuacuaugugggcuaccugcagccuagaaccuuccugcugaaguacaacgagaacggcaccaucaccgacgccguggauugugcucuggauccucugagcgagacaaagugcacccugaaguccuucaccguggaaaagggcaucuaccagaccagcaacuuccgggugcagcccaccgaauccaucgugcgguuccccaauaucaccaaucugugccccuucggcgagguguucaaugccaccagauucgccucuguguacgccuggaaccggaagcggaucagcaauugcguggccgacuacuccgugcuguacaacuccgccagcuucagcaccuucaagugcuacggcguguccccuaccaagcugaacgaccugugcuucacaaacguguacgccgacagcuucgugauccggggagaugaagugcggcagauugccccuggacagacaggcaagaucgccgacuacaacuacaagcugcccgacgacuucaccggcugugugauugccuggaacagcaacaaccuggacuccaaagucggcggcaacuacaauuaccuguaccggcuguuccggaaguccaaucugaagcccuucgagcgggacaucagcaccgaaaucuaucaggccggcagcaccccuugcaacggcguggaaggcuucaacugcuacuucccacugcaguccuacggcuuucagcccacauacggcgugggcuaucagcccuacagagugguggugcugagcuucgaacugcugcaugcuccugccacagugugcggcccuaagaaaagcaccaaucucgugaagaacaaaugcgugaacuucaacuucaacggccugaccggcaccggcgugcugacagagagcaacaagaaguuccugccauuccagcaguuuggccgggauaucgccgauaccacagacgccguuagagauccccagacacuggaaauccuggacaucaccccaugcagcuucggcggagugucugugaucaccccuggcaccaacaccagcaaucagguggcagugcuguaccagggcgugaacuguaccgaagugcccguggccauucacgccgaucagcugacaccuacauggcggguguacuccaccggcagcaauguguuucagaccagagccggcugucugaucggagccgagcacgugaacaauagcuacgagugcgacauccccaucggcgcuggcaucugugccagcuaccagacacagacaaacagccccagacgggcuagaagcguggccagccagagcaucauugccuacacaaugucucugggcgccgagaacagcguggccuacuccaacaacucuaucgcuauccccaccaacuucaccaucagcgugaccaccgagauccugccuguguccaugaccaagaccagcguggacugcaccauguacaucugcggcgauuccaccgagugcuccaaccugcugcugcaguacggcagcuucugcacccagcugaauagagcccugacagggaucgccguggaacaggacaagaacacccaagagguguucgcccaagugaagcaaaucuacaagaccccuccuaucaaggacuucggcggcuucaauuucagccagauucugcccgauccuagcaagcccagcaagcggagcuucaucgaggaccugcuguucaacaaagugacacuggccgacgccggcuucaucaagcaguauggcgauugucugggcgacauugccgccagggaucugauuugcgcccagaaguuuaacggacugacagugcugccuccucugcugaccgaugagaugaucgcccaguacacaucugcccugcuggccggcacaaucacaagcggcuggacauuuggagcuggcgccgcucugcagauccccuuugcuaugcagauggccuaccgguucaacggcaucggagugacccagaaugugcuguacgagaaccagaagcugaucgccaaccaguucaacagcgccaucggcaagauccaggacagccugagcagcacagcaagcgcccugggaaagcugcaggacguggucaaccagaaugcccaggcacugaacacccuggucaagcagcuguccuccaacuucggcgccaucagcucugugcugaacgauauccugagcagacuggacccuccugaggccgaggugcagaucgacagacugaucacaggcagacugcagagccuccagacauacgugacccagcagcugaucagagccgccgagauuagagccucugccaaucuggccgccaccaagaugucugagugugugcugggccagagcaagagaguggacuuuugcggcaagggcuaccaccugaugagcuucccucagucugccccucacggcgugguguuucugcacgugacauaugugcccgcucaagagaagaauuucaccaccgcuccagccaucugccacgacggcaaagcccacuuuccuagagaaggcguguucguguccaacggcacccauugguucgugacacagcggaacuucuacgagccccagaucaucaccaccgacaacaccuucgugucuggcaacugcgacguugugaucggcauugugaacaauaccguguacgacccucugcagcccgagcuggacagcuucaaagaggaacuggacaaguacuuuaagaaccacacaagccccgacguggaccugggcgauaucagcggaaucaaugccagcgucgugaacauccagaaagagaucgaccggcugaacgagguggccaagaaucugaacgagagccugaucgaccugcaagaacuggggaaguacgagcaguacaucaaguggcccugguacaucuggcugggcuuuaucgccggacugauugccaucgugauggucacaaucaugcuguguugcaugaccagcugcuguagcugccugaagggcuguuguagcuguggcagcugcugcaaguucgacgaggacgauucugagcccgugcugaagggcgugaaacugcacuacaccugaggacuagucccuguucccagagcccacuuuuuuuucuuuuuuugaaauaaaauagccugucuuucagaucuaaaaaaaaaaaaaaaaaaaaaaaaaaaaaaaaaaaaaaaaaaaaaaaaaaaaaaaaaaaaaaaaaaaaaaaaaaaaaaaaaaaaaaaaaaaaaaaaaaaa

SEQ ID NO: 24915 - RNA, 4064 nt, Artificial Sequence
  SARS-CoV-2/Wuhan/WIV05/2019__EPI_ISL_402128 spike protein mRNA gc mod (1-1273)(K986P_V987P_H69del_V70del_D614G)
aggagagucccgcagucggcguccagcggcucugcuuguucgugugugugucguugcaggccuuauucaagcuuaccauguucguguuucuggugcugcugccccugguguccagccagugugugaaccugaccaccagaacacagcugccuccagccuacaccaacagcuucaccagaggcguguacuaccccgacaagguguucagauccagcgugcugcacucuacccaggaccuguuccugccuuucuucagcaacgugaccugguuccacgccaucuccggcaccaauggcaccaagagauucgacaaccccgugcugcccuucaacgacgggguguacuuugccagcaccgagaaguccaacaucaucagaggcuggaucuucggcaccacacuggacagcaagacccagagccugcugaucgugaacaacgccaccaacguggucaucaaagugugcgaguuccaguucugcaacgaccccuuccugggcgucuacuaccacaagaacaacaagagcuggauggaaagcgaguuccggguguacagcagcgccaacaacugcaccuucgaguacgugucccagccuuuccugauggaccuggaaggcaagcagggcaacuucaagaaccugcgcgaguucguguucaagaacaucgacggcuacuucaaaaucuacagcaagcacaccccuaucaaccucgugcgggaucugccucagggcuucucugcucuggaaccccugguggaucugcccaucggcaucaacaucacccgguuucagacacugcuggcccugcacagaagcuaccugacaccuggcgauagcagcagcggauggacagcuggugccgccgcuuacuaugugggcuaccugcagccuagaaccuuccugcugaaguacaacgagaacggcaccaucaccgacgccguggauugugcucuggauccucugagcgagacaaagugcacccugaaguccuucaccguggaaaagggcaucuaccagaccagcaacuuccgggugcagcccaccgaauccaucgugcgguuccccaauaucaccaaucugugccccuucggcgagguguucaaugccaccagauucgccucuguguacgccuggaaccggaagcggaucagcaauugcguggccgacuacuccgugcuguacaacuccgccagcuucagcaccuucaagugcuacggcguguccccuaccaagcugaacgaccugugcuucacaaacguguacgccgacagcuucgugauccggggagaugaagugcggcagauugccccuggacagacaggcaagaucgccgacuacaacuacaagcugcccgacgacuucaccggcugugugauugccuggaacagcaacaaccuggacuccaaagucggcggcaacuacaauuaccuguaccggcuguuccggaaguccaaucugaagcccuucgagcgggacaucagcaccgaaaucuaucaggccggcagcaccccuugcaacggcguggaaggcuucaacugcuacuucccacugcaguccuacggcuuucagcccacaaauggcgugggcuaucagcccuacagagugguggugcugagcuucgaacugcugcaugcuccugccacagugugcggcccuaagaaaagcaccaaucucgugaagaacaaaugcgugaacuucaacuucaacggccugaccggcaccggcgugcugacagagagcaacaagaaguuccugccauuccagcaguuuggccgggauaucgccgauaccacagacgccguuagagauccccagacacuggaaauccuggacaucaccccaugcagcuucggcggagugucugugaucaccccuggcaccaacaccagcaaucagguggcagugcuguaccagggcgugaacuguaccgaagugcccguggccauucacgccgaucagcugacaccuacauggcggguguacuccaccggcagcaauguguuucagaccagagccggcugucugaucggagccgagcacgugaacaauagcuacgagugcgacauccccaucggcgcuggcaucugugccagcuaccagacacagacaaacagccccagacgggcuagaagcguggccagccagagcaucauugccuacacaaugucucugggcgccgagaacagcguggccuacuccaacaacucuaucgcuauccccaccaacuucaccaucagcgugaccaccgagauccugccuguguccaugaccaagaccagcguggacugcaccauguacaucugcggcgauuccaccgagugcuccaaccugcugcugcaguacggcagcuucugcacccagcugaauagagcccugacagggaucgccguggaacaggacaagaacacccaagagguguucgcccaagugaagcaaaucuacaagaccccuccuaucaaggacuucggcggcuucaauuucagccagauucugcccgauccuagcaagcccagcaagcggagcuucaucgaggaccugcuguucaacaaagugacacuggccgacgccggcuucaucaagcaguauggcgauugucugggcgacauugccgccagggaucugauuugcgcccagaaguuuaacggacugacagugcugccuccucugcugaccgaugagaugaucgcccaguacacaucugcccugcuggccggcacaaucacaagcggcuggacauuuggagcuggcgccgcucugcagauccccuuugcuaugcagauggccuaccgguucaacggcaucggagugacccagaaugugcuguacgagaaccagaagcugaucgccaaccaguucaacagcgccaucggcaagauccaggacagccugagcagcacagcaagcgcccugggaaagcugcaggacguggucaaccagaaugcccaggcacugaacacccuggucaagcagcuguccuccaacuucggcgccaucagcucugugcugaacgauauccugagcagacuggacccuccugaggccgaggugcagaucgacagacugaucacaggcagacugcagagccuccagacauacgugacccagcagcugaucagagccgccgagauuagagccucugccaaucuggccgccaccaagaugucugagugugugcugggccagagcaagagaguggacuuuugcggcaagggcuaccaccugaugagcuucccucagucugccccucacggcgugguguuucugcacgugacauaugugcccgcucaagagaagaauuucaccaccgcuccagccaucugccacgacggcaaagcccacuuuccuagagaaggcguguucguguccaacggcacccauugguucgugacacagcggaacuucuacgagccccagaucaucaccaccgacaacaccuucgugucuggcaacugcgacguugugaucggcauugugaacaauaccguguacgacccucugcagcccgagcuggacagcuucaaagaggaacuggacaaguacuuuaagaaccacacaagccccgacguggaccugggcgauaucagcggaaucaaugccagcgucgugaacauccagaaagagaucgaccggcugaacgagguggccaagaaucugaacgagagccugaucgaccugcaagaacuggggaaguacgagcaguacaucaaguggcccugguacaucuggcugggcuuuaucgccggacugauugccaucgugauggucacaaucaugcuguguugcaugaccagcugcuguagcugccugaagggcuguuguagcuguggcagcugcugcaaguucgacgaggacgauucugagcccgugcugaagggcgugaaacugcacuacaccugaggacuagucccuguucccagagcccacuuuuuuuucuuuuuuugaaauaaaauagccugucuuucagaucuaaaaaaaaaaaaaaaaaaaaaaaaaaaaaaaaaaaaaaaaaaaaaaaaaaaaaaaaaaaaaaaaaaaaaaaaaaaaaaaaaaaaaaaaaaaaaaaaaaaa

SEQ ID NO: 24916 - RNA, 4070 nt, Artificial Sequence
  SARS-CoV-2/Wuhan/WIV05/2019__EPI_ISL_402128 spike protein mRNA gc mod (1-1273)(K986P_V987P_Y453F_D614G)
aggagagucccgcagucggcguccagcggcucugcuuguucgugugugugucguugcaggccuuauucaagcuuaccauguucguguuucuggugcugcugccccugguguccagccagugugugaaccugaccaccagaacacagcugccuccagccuacaccaacagcuucaccagaggcguguacuaccccgacaagguguucagauccagcgugcugcacucuacccaggaccuguuccugccuuucuucagcaacgugaccugguuccacgccauccacguguccggcaccaauggcaccaagagauucgacaaccccgugcugcccuucaacgacgggguguacuuugccagcaccgagaaguccaacaucaucagaggcuggaucuucggcaccacacuggacagcaagacccagagccugcugaucgugaacaacgccaccaacguggucaucaaagugugcgaguuccaguucugcaacgaccccuuccugggcgucuacuaccacaagaacaacaagagcuggauggaaagcgaguuccggguguacagcagcgccaacaacugcaccuucgaguacgugucccagccuuuccugauggaccuggaaggcaagcagggcaacuucaagaaccugcgcgaguucguguucaagaacaucgacggcuacuucaaaaucuacagcaagcacaccccuaucaaccucgugcgggaucugccucagggcuucucugcucuggaaccccugguggaucugcccaucggcaucaacaucacccgguuucagacacugcuggcccugcacagaagcuaccugacaccuggcgauagcagcagcggauggacagcuggugccgccgcuuacuaugugggcuaccugcagccuagaaccuuccugcugaaguacaacgagaacggcaccaucaccgacgccguggauugugcucuggauccucugagcgagacaaagugcacccugaaguccuucaccguggaaaagggcaucuaccagaccagcaacuuccgggugcagcccaccgaauccaucgugcgguuccccaauaucaccaaucugugccccuucggcgagguguucaaugccaccagauucgccucuguguacgccuggaaccggaagcggaucagcaauugcguggccgacuacuccgugcuguacaacuccgccagcuucagcaccuucaagugcuacggcguguccccuaccaagcugaacgaccugugcuucacaaacguguacgccgacagcuucgugauccggggagaugaagugcggcagauugccccuggacagacaggcaagaucgccgacuacaacuacaagcugcccgacgacuucaccggcugugugauugccuggaacagcaacaaccuggacuccaaagucggcggcaacuacaauuaccuguuccggcuguuccggaaguccaaucugaagcccuucgagcgggacaucagcaccgaaaucuaucaggccggcagcaccccuugcaacggcguggaaggcuucaacugcuacuucccacugcaguccuacggcuuucagcccacaaauggcgugggcuaucagcccuacagagugguggugcugagcuucgaacugcugcaugcuccugccacagugugcggcccuaagaaaagcaccaaucucgugaagaacaaaugcgugaacuucaacuucaacggccugaccggcaccggcgugcugacagagagcaacaagaaguuccugccauuccagcaguuuggccgggauaucgccgauaccacagacgccguuagagauccccagacacuggaaauccuggacaucaccccaugcagcuucggcggagugucugugaucaccccuggcaccaacaccagcaaucagguggcagugcuguaccagggcgugaacuguaccgaagugcccguggccauucacgccgaucagcugacaccuacauggcggguguacuccaccggcagcaauguguuucagaccagagccggcugucugaucggagccgagcacgugaacaauagcuacgagugcgacauccccaucggcgcuggcaucugugccagcuaccagacacagacaaacagccccagacgggcuagaagcguggccagccagagcaucauugccuacacaaugucucugggcgccgagaacagcguggccuacuccaacaacucuaucgcuauccccaccaacuucaccaucagcgugaccaccgagauccugccuguguccaugaccaagaccagcguggacugcaccauguacaucugcggcgauuccaccgagugcuccaaccugcugcugcaguacggcagcuucugcacccagcugaauagagcccugacagggaucgccguggaacaggacaagaacacccaagagguguucgcccaagugaagcaaaucuacaagaccccuccuaucaaggacuucggcggcuucaauuucagccagauucugcccgauccuagcaagcccagcaagcggagcuucaucgaggaccugcuguucaacaaagugacacuggccgacgccggcuucaucaagcaguauggcgauugucugggcgacauugccgccagggaucugauuugcgcccagaaguuuaacggacugacagugcugccuccucugcugaccgaugagaugaucgcccaguacacaucugcccugcuggccggcacaaucacaagcggcuggacauuuggagcuggcgccgcucugcagauccccuuugcuaugcagauggccuaccgguucaacggcaucggagugacccagaaugugcuguacgagaaccagaagcugaucgccaaccaguucaacagcgccaucggcaagauccaggacagccugagcagcacagcaagcgcccugggaaagcugcaggacguggucaaccagaaugcccaggcacugaacacccuggucaagcagcuguccuccaacuucggcgccaucagcucugugcugaacgauauccugagcagacuggacccuccugaggccgaggugcagaucgacagacugaucacaggcagacugcagagccuccagacauacgugacccagcagcugaucagagccgccgagauuagagccucugccaaucuggccgccaccaagaugucugagugugugcugggccagagcaagagaguggacuuuugcggcaagggcuaccaccugaugagcuucccucagucugccccucacggcgugguguuucugcacgugacauaugugcccgcucaagagaagaauuucaccaccgcuccagccaucugccacgacggcaaagcccacuuuccuagagaaggcguguucguguccaacggcacccauugguucgugacacagcggaacuucuacgagccccagaucaucaccaccgacaacaccuucgugucuggcaacugcgacguugugaucggcauugugaacaauaccguguacgacccucugcagcccgagcuggacagcuucaaagaggaacuggacaaguacuuuaagaaccacacaagccccgacguggaccugggcgauaucagcggaaucaaugccagcgucgugaacauccagaaagagaucgaccggcugaacgagguggccaagaaucugaacgagagccugaucgaccugcaagaacuggggaaguacgagcaguacaucaaguggcccugguacaucuggcugggcuuuaucgccggacugauugccaucgugauggucacaaucaugcuguguugcaugaccagcugcuguagcugccugaagggcuguuguagcuguggcagcugcugcaaguucgacgaggacgauucugagcccgugcugaagggcgugaaacugcacuacaccugaggacuagucccuguucccagagcccacuuuuuuuucuuuuuuugaaauaaaauagccugucuuucagaucuaaaaaaaaaaaaaaaaaaaaaaaaaaaaaaaaaaaaaaaaaaaaaaaaaaaaaaaaaaaaaaaaaaaaaaaaaaaaaaaaaaaaaaaaaaaaaaaaaaaa

SEQ ID NO: 24917 - RNA, 4070 nt, Artificial Sequence
  SARS-CoV-2/Wuhan/WIV05/2019__EPI_ISL_402128 spike protein mRNA gc mod (1-1273)(K986P_V987P_D614G_I692V)
aggagagucccgcagucggcguccagcggcucugcuuguucgugugugugucguugcaggccuuauucaagcuuaccauguucguguuucuggugcugcugccccugguguccagccagugugugaaccugaccaccagaacacagcugccuccagccuacaccaacagcuucaccagaggcguguacuaccccgacaagguguucagauccagcgugcugcacucuacccaggaccuguuccugccuuucuucagcaacgugaccugguuccacgccauccacguguccggcaccaauggcaccaagagauucgacaaccccgugcugcccuucaacgacgggguguacuuugccagcaccgagaaguccaacaucaucagaggcuggaucuucggcaccacacuggacagcaagacccagagccugcugaucgugaacaacgccaccaacguggucaucaaagugugcgaguuccaguucugcaacgaccccuuccugggcgucuacuaccacaagaacaacaagagcuggauggaaagcgaguuccggguguacagcagcgccaacaacugcaccuucgaguacgugucccagccuuuccugauggaccuggaaggcaagcagggcaacuucaagaaccugcgcgaguucguguucaagaacaucgacggcuacuucaaaaucuacagcaagcacaccccuaucaaccucgugcgggaucugccucagggcuucucugcucuggaaccccugguggaucugcccaucggcaucaacaucacccgguuucagacacugcuggcccugcacagaagcuaccugacaccuggcgauagcagcagcggauggacagcuggugccgccgcuuacuaugugggcuaccugcagccuagaaccuuccugcugaaguacaacgagaacggcaccaucaccgacgccguggauugugcucuggauccucugagcgagacaaagugcacccugaaguccuucaccguggaaaagggcaucuaccagaccagcaacuuccgggugcagcccaccgaauccaucgugcgguuccccaauaucaccaaucugugccccuucggcgagguguucaaugccaccagauucgccucuguguacgccuggaaccggaagcggaucagcaauugcguggccgacuacuccgugcuguacaacuccgccagcuucagcaccuucaagugcuacggcguguccccuaccaagcugaacgaccugugcuucacaaacguguacgccgacagcuucgugauccggggagaugaagugcggcagauugccccuggacagacaggcaagaucgccgacuacaacuacaagcugcccgacgacuucaccggcugugugauugccuggaacagcaacaaccuggacuccaaagucggcggcaacuacaauuaccuguaccggcuguuccggaaguccaaucugaagcccuucgagcgggacaucagcaccgaaaucuaucaggccggcagcaccccuugcaacggcguggaaggcuucaacugcuacuucccacugcaguccuacggcuuucagcccacaaauggcgugggcuaucagcccuacagagugguggugcugagcuucgaacugcugcaugcuccugccacagugugcggcccuaagaaaagcaccaaucucgugaagaacaaaugcgugaacuucaacuucaacggccugaccggcaccggcgugcugacagagagcaacaagaaguuccugccauuccagcaguuuggccgggauaucgccgauaccacagacgccguuagagauccccagacacuggaaauccuggacaucaccccaugcagcuucggcggagugucugugaucaccccuggcaccaacaccagcaaucagguggcagugcuguaccagggcgugaacuguaccgaagugcccguggccauucacgccgaucagcugacaccuacauggcggguguacuccaccggcagcaauguguuucagaccagagccggcugucugaucggagccgagcacgugaacaauagcuacgagugcgacauccccaucggcgcuggcaucugugccagcuaccagacacagacaaacagccccagacgggcuagaagcguggccagccagagcgugauugccuacacaaugucucugggcgccgagaacagcguggccuacuccaacaacucuaucgcuauccccaccaacuucaccaucagcgugaccaccgagauccugccuguguccaugaccaagaccagcguggacugcaccauguacaucugcggcgauuccaccgagugcuccaaccugcugcugcaguacggcagcuucugcacccagcugaauagagcccugacagggaucgccguggaacaggacaagaacacccaagagguguucgcccaagugaagcaaaucuacaagaccccuccuaucaaggacuucggcggcuucaauuucagccagauucugcccgauccuagcaagcccagcaagcggagcuucaucgaggaccugcuguucaacaaagugacacuggccgacgccggcuucaucaagcaguauggcgauugucugggcgacauugccgccagggaucugauuugcgcccagaaguuuaacggacugacagugcugccuccucugcugaccgaugagaugaucgcccaguacacaucugcccugcuggccggcacaaucacaagcggcuggacauuuggagcuggcgccgcucugcagauccccuuugcuaugcagauggccuaccgguucaacggcaucggagugacccagaaugugcuguacgagaaccagaagcugaucgccaaccaguucaacagcgccaucggcaagauccaggacagccugagcagcacagcaagcgcccugggaaagcugcaggacguggucaaccagaaugcccaggcacugaacacccuggucaagcagcuguccuccaacuucggcgccaucagcucugugcugaacgauauccugagcagacuggacccuccugaggccgaggugcagaucgacagacugaucacaggcagacugcagagccuccagacauacgugacccagcagcugaucagagccgccgagauuagagccucugccaaucuggccgccaccaagaugucugagugugugcugggccagagcaagagaguggacuuuugcggcaagggcuaccaccugaugagcuucccucagucugccccucacggcgugguguuucugcacgugacauaugugcccgcucaagagaagaauuucaccaccgcuccagccaucugccacgacggcaaagcccacuuuccuagagaaggcguguucguguccaacggcacccauugguucgugacacagcggaacuucuacgagccccagaucaucaccaccgacaacaccuucgugucuggcaacugcgacguugugaucggcauugugaacaauaccguguacgacccucugcagcccgagcuggacagcuucaaagaggaacuggacaaguacuuuaagaaccacacaagccccgacguggaccugggcgauaucagcggaaucaaugccagcgucgugaacauccagaaagagaucgaccggcugaacgagguggccaagaaucugaacgagagccugaucgaccugcaagaacuggggaaguacgagcaguacaucaaguggcccugguacaucuggcugggcuuuaucgccggacugauugccaucgugauggucacaaucaugcuguguugcaugaccagcugcuguagcugccugaagggcuguuguagcuguggcagcugcugcaaguucgacgaggacgauucugagcccgugcugaagggcgugaaacugcacuacaccugaggacuagucccuguucccagagcccacuuuuuuuucuuuuuuugaaauaaaauagccugucuuucagaucuaaaaaaaaaaaaaaaaaaaaaaaaaaaaaaaaaaaaaaaaaaaaaaaaaaaaaaaaaaaaaaaaaaaaaaaaaaaaaaaaaaaaaaaaaaaaaaaaaaaa

SEQ ID NO: 24918 - RNA, 4070 nt, Artificial Sequence
  SARS-CoV-2/Wuhan/WIV05/2019__EPI_ISL_402128 spike protein mRNA gc mod (1-1273)(K986P_V987P_D614G_M1229I)
aggagagucccgcagucggcguccagcggcucugcuuguucgugugugugucguugcaggccuuauucaagcuuaccauguucguguuucuggugcugcugccccugguguccagccagugugugaaccugaccaccagaacacagcugccuccagccuacaccaacagcuucaccagaggcguguacuaccccgacaagguguucagauccagcgugcugcacucuacccaggaccuguuccugccuuucuucagcaacgugaccugguuccacgccauccacguguccggcaccaauggcaccaagagauucgacaaccccgugcugcccuucaacgacgggguguacuuugccagcaccgagaaguccaacaucaucagaggcuggaucuucggcaccacacuggacagcaagacccagagccugcugaucgugaacaacgccaccaacguggucaucaaagugugcgaguuccaguucugcaacgaccccuuccugggcgucuacuaccacaagaacaacaagagcuggauggaaagcgaguuccggguguacagcagcgccaacaacugcaccuucgaguacgugucccagccuuuccugauggaccuggaaggcaagcagggcaacuucaagaaccugcgcgaguucguguucaagaacaucgacggcuacuucaaaaucuacagcaagcacaccccuaucaaccucgugcgggaucugccucagggcuucucugcucuggaaccccugguggaucugcccaucggcaucaacaucacccgguuucagacacugcuggcccugcacagaagcuaccugacaccuggcgauagcagcagcggauggacagcuggugccgccgcuuacuaugugggcuaccugcagccuagaaccuuccugcugaaguacaacgagaacggcaccaucaccgacgccguggauugugcucuggauccucugagcgagacaaagugcacccugaaguccuucaccguggaaaagggcaucuaccagaccagcaacuuccgggugcagcccaccgaauccaucgugcgguuccccaauaucaccaaucugugccccuucggcgagguguucaaugccaccagauucgccucuguguacgccuggaaccggaagcggaucagcaauugcguggccgacuacuccgugcuguacaacuccgccagcuucagcaccuucaagugcuacggcguguccccuaccaagcugaacgaccugugcuucacaaacguguacgccgacagcuucgugauccggggagaugaagugcggcagauugccccuggacagacaggcaagaucgccgacuacaacuacaagcugcccgacgacuucaccggcugugugauugccuggaacagcaacaaccuggacuccaaagucggcggcaacuacaauuaccuguaccggcuguuccggaaguccaaucugaagcccuucgagcgggacaucagcaccgaaaucuaucaggccggcagcaccccuugcaacggcguggaaggcuucaacugcuacuucccacugcaguccuacggcuuucagcccacaaauggcgugggcuaucagcccuacagagugguggugcugagcuucgaacugcugcaugcuccugccacagugugcggcccuaagaaaagcaccaaucucgugaagaacaaaugcgugaacuucaacuucaacggccugaccggcaccggcgugcugacagagagcaacaagaaguuccugccauuccagcaguuuggccgggauaucgccgauaccacagacgccguuagagauccccagacacuggaaauccuggacaucaccccaugcagcuucggcggagugucugugaucaccccuggcaccaacaccagcaaucagguggcagugcuguaccagggcgugaacuguaccgaagugcccguggccauucacgccgaucagcugacaccuacauggcggguguacuccaccggcagcaauguguuucagaccagagccggcugucugaucggagccgagcacgugaacaauagcuacgagugcgacauccccaucggcgcuggcaucugugccagcuaccagacacagacaaacagccccagacgggcuagaagcguggccagccagagcaucauugccuacacaaugucucugggcgccgagaacagcguggccuacuccaacaacucuaucgcuauccccaccaacuucaccaucagcgugaccaccgagauccugccuguguccaugaccaagaccagcguggacugcaccauguacaucugcggcgauuccaccgagugcuccaaccugcugcugcaguacggcagcuucugcacccagcugaauagagcccugacagggaucgccguggaacaggacaagaacacccaagagguguucgcccaagugaagcaaaucuacaagaccccuccuaucaaggacuucggcggcuucaauuucagccagauucugcccgauccuagcaagcccagcaagcggagcuucaucgaggaccugcuguucaacaaagugacacuggccgacgccggcuucaucaagcaguauggcgauugucugggcgacauugccgccagggaucugauuugcgcccagaaguuuaacggacugacagugcugccuccucugcugaccgaugagaugaucgcccaguacacaucugcccugcuggccggcacaaucacaagcggcuggacauuuggagcuggcgccgcucugcagauccccuuugcuaugcagauggccuaccgguucaacggcaucggagugacccagaaugugcuguacgagaaccagaagcugaucgccaaccaguucaacagcgccaucggcaagauccaggacagccugagcagcacagcaagcgcccugggaaagcugcaggacguggucaaccagaaugcccaggcacugaacacccuggucaagcagcuguccuccaacuucggcgccaucagcucugugcugaacgauauccugagcagacuggacccuccugaggccgaggugcagaucgacagacugaucacaggcagacugcagagccuccagacauacgugacccagcagcugaucagagccgccgagauuagagccucugccaaucuggccgccaccaagaugucugagugugugcugggccagagcaagagaguggacuuuugcggcaagggcuaccaccugaugagcuucccucagucugccccucacggcgugguguuucugcacgugacauaugugcccgcucaagagaagaauuucaccaccgcuccagccaucugccacgacggcaaagcccacuuuccuagagaaggcguguucguguccaacggcacccauugguucgugacacagcggaacuucuacgagccccagaucaucaccaccgacaacaccuucgugucuggcaacugcgacguugugaucggcauugugaacaauaccguguacgacccucugcagcccgagcuggacagcuucaaagaggaacuggacaaguacuuuaagaaccacacaagccccgacguggaccugggcgauaucagcggaaucaaugccagcgucgugaacauccagaaagagaucgaccggcugaacgagguggccaagaaucugaacgagagccugaucgaccugcaagaacuggggaaguacgagcaguacaucaaguggcccugguacaucuggcugggcuuuaucgccggacugauugccaucgugaucgucacaaucaugcuguguugcaugaccagcugcuguagcugccugaagggcuguuguagcuguggcagcugcugcaaguucgacgaggacgauucugagcccgugcugaagggcgugaaacugcacuacaccugaggacuagucccuguucccagagcccacuuuuuuuucuuuuuuugaaauaaaauagccugucuuucagaucuaaaaaaaaaaaaaaaaaaaaaaaaaaaaaaaaaaaaaaaaaaaaaaaaaaaaaaaaaaaaaaaaaaaaaaaaaaaaaaaaaaaaaaaaaaaaaaaaaaaa

SEQ ID NO: 24919 - RNA, 4064 nt, Artificial Sequence
  SARS-CoV-2/Wuhan/WIV05/2019__EPI_ISL_402128 spike protein mRNA gc mod (1-1273)(K986P_V987P_H69del_V70del_A222V_Y453F_S477N_D614G_I692V)
aggagagucccgcagucggcguccagcggcucugcuuguucgugugugugucguugcaggccuuauucaagcuuaccauguucguguuucuggugcugcugccccugguguccagccagugugugaaccugaccaccagaacacagcugccuccagccuacaccaacagcuucaccagaggcguguacuaccccgacaagguguucagauccagcgugcugcacucuacccaggaccuguuccugccuuucuucagcaacgugaccugguuccacgccaucuccggcaccaauggcaccaagagauucgacaaccccgugcugcccuucaacgacgggguguacuuugccagcaccgagaaguccaacaucaucagaggcuggaucuucggcaccacacuggacagcaagacccagagccugcugaucgugaacaacgccaccaacguggucaucaaagugugcgaguuccaguucugcaacgaccccuuccugggcgucuacuaccacaagaacaacaagagcuggauggaaagcgaguuccggguguacagcagcgccaacaacugcaccuucgaguacgugucccagccuuuccugauggaccuggaaggcaagcagggcaacuucaagaaccugcgcgaguucguguucaagaacaucgacggcuacuucaaaaucuacagcaagcacaccccuaucaaccucgugcgggaucugccucagggcuucucugugcuggaaccccugguggaucugcccaucggcaucaacaucacccgguuucagacacugcuggcccugcacagaagcuaccugacaccuggcgauagcagcagcggauggacagcuggugccgccgcuuacuaugugggcuaccugcagccuagaaccuuccugcugaaguacaacgagaacggcaccaucaccgacgccguggauugugcucuggauccucugagcgagacaaagugcacccugaaguccuucaccguggaaaagggcaucuaccagaccagcaacuuccgggugcagcccaccgaauccaucgugcgguuccccaauaucaccaaucugugccccuucggcgagguguucaaugccaccagauucgccucuguguacgccuggaaccggaagcggaucagcaauugcguggccgacuacuccgugcuguacaacuccgccagcuucagcaccuucaagugcuacggcguguccccuaccaagcugaacgaccugugcuucacaaacguguacgccgacagcuucgugauccggggagaugaagugcggcagauugccccuggacagacaggcaagaucgccgacuacaacuacaagcugcccgacgacuucaccggcugugugauugccuggaacagcaacaaccuggacuccaaagucggcggcaacuacaauuaccuguuccggcuguuccggaaguccaaucugaagcccuucgagcgggacaucagcaccgaaaucuaucaggccggcaacaccccuugcaacggcguggaaggcuucaacugcuacuucccacugcaguccuacggcuuucagcccacaaauggcgugggcuaucagcccuacagagugguggugcugagcuucgaacugcugcaugcuccugccacagugugcggcccuaagaaaagcaccaaucucgugaagaacaaaugcgugaacuucaacuucaacggccugaccggcaccggcgugcugacagagagcaacaagaaguuccugccauuccagcaguuuggccgggauaucgccgauaccacagacgccguuagagauccccagacacuggaaauccuggacaucaccccaugcagcuucggcggagugucugugaucaccccuggcaccaacaccagcaaucagguggcagugcuguaccagggcgugaacuguaccgaagugcccguggccauucacgccgaucagcugacaccuacauggcggguguacuccaccggcagcaauguguuucagaccagagccggcugucugaucggagccgagcacgugaacaauagcuacgagugcgacauccccaucggcgcuggcaucugugccagcuaccagacacagacaaacagccccagacgggcuagaagcguggccagccagagcgugauugccuacacaaugucucugggcgccgagaacagcguggccuacuccaacaacucuaucgcuauccccaccaacuucaccaucagcgugaccaccgagauccugccuguguccaugaccaagaccagcguggacugcaccauguacaucugcggcgauuccaccgagugcuccaaccugcugcugcaguacggcagcuucugcacccagcugaauagagcccugacagggaucgccguggaacaggacaagaacacccaagagguguucgcccaagugaagcaaaucuacaagaccccuccuaucaaggacuucggcggcuucaauuucagccagauucugcccgauccuagcaagcccagcaagcggagcuucaucgaggaccugcuguucaacaaagugacacuggccgacgccggcuucaucaagcaguauggcgauugucugggcgacauugccgccagggaucugauuugcgcccagaaguuuaacggacugacagugcugccuccucugcugaccgaugagaugaucgcccaguacacaucugcccugcuggccggcacaaucacaagcggcuggacauuuggagcuggcgccgcucugcagauccccuuugcuaugcagauggccuaccgguucaacggcaucggagugacccagaaugugcuguacgagaaccagaagcugaucgccaaccaguucaacagcgccaucggcaagauccaggacagccugagcagcacagcaagcgcccugggaaagcugcaggacguggucaaccagaaugcccaggcacugaacacccuggucaagcagcuguccuccaacuucggcgccaucagcucugugcugaacgauauccugagcagacuggacccuccugaggccgaggugcagaucgacagacugaucacaggcagacugcagagccuccagacauacgugacccagcagcugaucagagccgccgagauuagagccucugccaaucuggccgccaccaagaugucugagugugugcugggccagagcaagagaguggacuuuugcggcaagggcuaccaccugaugagcuucccucagucugccccucacggcgugguguuucugcacgugacauaugugcccgcucaagagaagaauuucaccaccgcuccagccaucugccacgacggcaaagcccacuuuccuagagaaggcguguucguguccaacggcacccauugguucgugacacagcggaacuucuacgagccccagaucaucaccaccgacaacaccuucgugucuggcaacugcgacguugugaucggcauugugaacaauaccguguacgacccucugcagcccgagcuggacagcuucaaagaggaacuggacaaguacuuuaagaaccacacaagccccgacguggaccugggcgauaucagcggaaucaaugccagcgucgugaacauccagaaagagaucgaccggcugaacgagguggccaagaaucugaacgagagccugaucgaccugcaagaacuggggaaguacgagcaguacaucaaguggcccugguacaucuggcugggcuuuaucgccggacugauugccaucgugauggucacaaucaugcuguguugcaugaccagcugcuguagcugccugaagggcuguuguagcuguggcagcugcugcaaguucgacgaggacgauucugagcccgugcugaagggcgugaaacugcacuacaccugaggacuagucccuguucccagagcccacuuuuuuuucuuuuuuugaaauaaaauagccugucuuucagaucuaaaaaaaaaaaaaaaaaaaaaaaaaaaaaaaaaaaaaaaaaaaaaaaaaaaaaaaaaaaaaaaaaaaaaaaaaaaaaaaaaaaaaaaaaaaaaaaaaaaa

SEQ ID NO: 24920 - RNA, 4064 nt, Artificial Sequence
  SARS-CoV-2/Wuhan/WIV05/2019__EPI_ISL_402128 spike protein mRNA gc mod (1-1273)(K986P_V987P_H69del_V70del_Y453F_D614G_I692V_M1229I)
aggagagucccgcagucggcguccagcggcucugcuuguucgugugugugucguugcaggccuuauucaagcuuaccauguucguguuucuggugcugcugccccugguguccagccagugugugaaccugaccaccagaacacagcugccuccagccuacaccaacagcuucaccagaggcguguacuaccccgacaagguguucagauccagcgugcugcacucuacccaggaccuguuccugccuuucuucagcaacgugaccugguuccacgccaucuccggcaccaauggcaccaagagauucgacaaccccgugcugcccuucaacgacgggguguacuuugccagcaccgagaaguccaacaucaucagaggcuggaucuucggcaccacacuggacagcaagacccagagccugcugaucgugaacaacgccaccaacguggucaucaaagugugcgaguuccaguucugcaacgaccccuuccugggcgucuacuaccacaagaacaacaagagcuggauggaaagcgaguuccggguguacagcagcgccaacaacugcaccuucgaguacgugucccagccuuuccugauggaccuggaaggcaagcagggcaacuucaagaaccugcgcgaguucguguucaagaacaucgacggcuacuucaaaaucuacagcaagcacaccccuaucaaccucgugcgggaucugccucagggcuucucugcucuggaaccccugguggaucugcccaucggcaucaacaucacccgguuucagacacugcuggcccugcacagaagcuaccugacaccuggcgauagcagcagcggauggacagcuggugccgccgcuuacuaugugggcuaccugcagccuagaaccuuccugcugaaguacaacgagaacggcaccaucaccgacgccguggauugugcucuggauccucugagcgagacaaagugcacccugaaguccuucaccguggaaaagggcaucuaccagaccagcaacuuccgggugcagcccaccgaauccaucgugcgguuccccaauaucaccaaucugugccccuucggcgagguguucaaugccaccagauucgccucuguguacgccuggaaccggaagcggaucagcaauugcguggccgacuacuccgugcuguacaacuccgccagcuucagcaccuucaagugcuacggcguguccccuaccaagcugaacgaccugugcuucacaaacguguacgccgacagcuucgugauccggggagaugaagugcggcagauugccccuggacagacaggcaagaucgccgacuacaacuacaagcugcccgacgacuucaccggcugugugauugccuggaacagcaacaaccuggacuccaaagucggcggcaacuacaauuaccuguuccggcuguuccggaaguccaaucugaagcccuucgagcgggacaucagcaccgaaaucuaucaggccggcagcaccccuugcaacggcguggaaggcuucaacugcuacuucccacugcaguccuacggcuuucagcccacaaauggcgugggcuaucagcccuacagagugguggugcugagcuucgaacugcugcaugcuccugccacagugugcggcccuaagaaaagcaccaaucucgugaagaacaaaugcgugaacuucaacuucaacggccugaccggcaccggcgugcugacagagagcaacaagaaguuccugccauuccagcaguuuggccgggauaucgccgauaccacagacgccguuagagauccccagacacuggaaauccuggacaucaccccaugcagcuucggcggagugucugugaucaccccuggcaccaacaccagcaaucagguggcagugcuguaccagggcgugaacuguaccgaagugcccguggccauucacgccgaucagcugacaccuacauggcggguguacuccaccggcagcaauguguuucagaccagagccggcugucugaucggagccgagcacgugaacaauagcuacgagugcgacauccccaucggcgcuggcaucugugccagcuaccagacacagacaaacagccccagacgggcuagaagcguggccagccagagcgugauugccuacacaaugucucugggcgccgagaacagcguggccuacuccaacaacucuaucgcuauccccaccaacuucaccaucagcgugaccaccgagauccugccuguguccaugaccaagaccagcguggacugcaccauguacaucugcggcgauuccaccgagugcuccaaccugcugcugcaguacggcagcuucugcacccagcugaauagagcccugacagggaucgccguggaacaggacaagaacacccaagagguguucgcccaagugaagcaaaucuacaagaccccuccuaucaaggacuucggcggcuucaauuucagccagauucugcccgauccuagcaagcccagcaagcggagcuucaucgaggaccugcuguucaacaaagugacacuggccgacgccggcuucaucaagcaguauggcgauugucugggcgacauugccgccagggaucugauuugcgcccagaaguuuaacggacugacagugcugccuccucugcugaccgaugagaugaucgcccaguacacaucugcccugcuggccggcacaaucacaagcggcuggacauuuggagcuggcgccgcucugcagauccccuuugcuaugcagauggccuaccgguucaacggcaucggagugacccagaaugugcuguacgagaaccagaagcugaucgccaaccaguucaacagcgccaucggcaagauccaggacagccugagcagcacagcaagcgcccugggaaagcugcaggacguggucaaccagaaugcccaggcacugaacacccuggucaagcagcuguccuccaacuucggcgccaucagcucugugcugaacgauauccugagcagacuggacccuccugaggccgaggugcagaucgacagacugaucacaggcagacugcagagccuccagacauacgugacccagcagcugaucagagccgccgagauuagagccucugccaaucuggccgccaccaagaugucugagugugugcugggccagagcaagagaguggacuuuugcggcaagggcuaccaccugaugagcuucccucagucugccccucacggcgugguguuucugcacgugacauaugugcccgcucaagagaagaauuucaccaccgcuccagccaucugccacgacggcaaagcccacuuuccuagagaaggcguguucguguccaacggcacccauugguucgugacacagcggaacuucuacgagccccagaucaucaccaccgacaacaccuucgugucuggcaacugcgacguugugaucggcauugugaacaauaccguguacgacccucugcagcccgagcuggacagcuucaaagaggaacuggacaaguacuuuaagaaccacacaagccccgacguggaccugggcgauaucagcggaaucaaugccagcgucgugaacauccagaaagagaucgaccggcugaacgagguggccaagaaucugaacgagagccugaucgaccugcaagaacuggggaaguacgagcaguacaucaaguggcccugguacaucuggcugggcuuuaucgccggacugauugccaucgugaucgucacaaucaugcuguguugcaugaccagcugcuguagcugccugaagggcuguuguagcuguggcagcugcugcaaguucgacgaggacgauucugagcccgugcugaagggcgugaaacugcacuacaccugaggacuagucccuguucccagagcccacuuuuuuuucuuuuuuugaaauaaaauagccugucuuucagaucuaaaaaaaaaaaaaaaaaaaaaaaaaaaaaaaaaaaaaaaaaaaaaaaaaaaaaaaaaaaaaaaaaaaaaaaaaaaaaaaaaaaaaaaaaaaaaaaaaaaa

SEQ ID NO: 24921 - RNA, 4061 nt, Artificial Sequence
  SARS-CoV-2/Wuhan/WIV05/2019__EPI_ISL_402128 spike protein mRNA gc mod (1-1273)(K986P_V987P_K986P_V987P_H69del_V70del_Y144del_N501Y_A570 D_D614G_P681H_T716I_S982A_D1118H)
aggagagucccgcagucggcguccagcggcucugcuuguucgugugugugucguugcaggccuuauucaagcuuaccauguucguguuucuggugcugcugccccugguguccagccagugugugaaccugaccaccagaacacagcugccuccagccuacaccaacagcuucaccagaggcguguacuaccccgacaagguguucagauccagcgugcugcacucuacccaggaccuguuccugccuuucuucagcaacgugaccugguuccacgccaucuccggcaccaauggcaccaagagauucgacaaccccgugcugcccuucaacgacgggguguacuuugccagcaccgagaaguccaacaucaucagaggcuggaucuucggcaccacacuggacagcaagacccagagccugcugaucgugaacaacgccaccaacguggucaucaaagugugcgaguuccaguucugcaacgaccccuuccugggcgucuaccacaagaacaacaagagcuggauggaaagcgaguuccggguguacagcagcgccaacaacugcaccuucgaguacgugucccagccuuuccugauggaccuggaaggcaagcagggcaacuucaagaaccugcgcgaguucguguucaagaacaucgacggcuacuucaaaaucuacagcaagcacaccccuaucaaccucgugcgggaucugccucagggcuucucugcucuggaaccccugguggaucugcccaucggcaucaacaucacccgguuucagacacugcuggcccugcacagaagcuaccugacaccuggcgauagcagcagcggauggacagcuggugccgccgcuuacuaugugggcuaccugcagccuagaaccuuccugcugaaguacaacgagaacggcaccaucaccgacgccguggauugugcucuggauccucugagcgagacaaagugcacccugaaguccuucaccguggaaaagggcaucuaccagaccagcaacuuccgggugcagcccaccgaauccaucgugcgguuccccaauaucaccaaucugugccccuucggcgagguguucaaugccaccagauucgccucuguguacgccuggaaccggaagcggaucagcaauugcguggccgacuacuccgugcuguacaacuccgccagcuucagcaccuucaagugcuacggcguguccccuaccaagcugaacgaccugugcuucacaaacguguacgccgacagcuucgugauccggggagaugaagugcggcagauugccccuggacagacaggcaagaucgccgacuacaacuacaagcugcccgacgacuucaccggcugugugauugccuggaacagcaacaaccuggacuccaaagucggcggcaacuacaauuaccuguaccggcuguuccggaaguccaaucugaagcccuucgagcgggacaucagcaccgaaaucuaucaggccggcagcaccccuugcaacggcguggaaggcuucaacugcuacuucccacugcaguccuacggcuuucagcccacauacggcgugggcuaucagcccuacagagugguggugcugagcuucgaacugcugcaugcuccugccacagugugcggcccuaagaaaagcaccaaucucgugaagaacaaaugcgugaacuucaacuucaacggccugaccggcaccggcgugcugacagagagcaacaagaaguuccugccauuccagcaguuuggccgggauaucgacgauaccacagacgccguuagagauccccagacacuggaaauccuggacaucaccccaugcagcuucggcggagugucugugaucaccccuggcaccaacaccagcaaucagguggcagugcuguaccagggcgugaacuguaccgaagugcccguggccauucacgccgaucagcugacaccuacauggcggguguacuccaccggcagcaauguguuucagaccagagccggcugucugaucggagccgagcacgugaacaauagcuacgagugcgacauccccaucggcgcuggcaucugugccagcuaccagacacagacaaacagccacagacgggcuagaagcguggccagccagagcaucauugccuacacaaugucucugggcgccgagaacagcguggccuacuccaacaacucuaucgcuauccccaucaacuucaccaucagcgugaccaccgagauccugccuguguccaugaccaagaccagcguggacugcaccauguacaucugcggcgauuccaccgagugcuccaaccugcugcugcaguacggcagcuucugcacccagcugaauagagcccugacagggaucgccguggaacaggacaagaacacccaagagguguucgcccaagugaagcaaaucuacaagaccccuccuaucaaggacuucggcggcuucaauuucagccagauucugcccgauccuagcaagcccagcaagcggagcuucaucgaggaccugcuguucaacaaagugacacuggccgacgccggcuucaucaagcaguauggcgauugucugggcgacauugccgccagggaucugauuugcgcccagaaguuuaacggacugacagugcugccuccucugcugaccgaugagaugaucgcccaguacacaucugcccugcuggccggcacaaucacaagcggcuggacauuuggagcuggcgccgcucugcagauccccuuugcuaugcagauggccuaccgguucaacggcaucggagugacccagaaugugcuguacgagaaccagaagcugaucgccaaccaguucaacagcgccaucggcaagauccaggacagccugagcagcacagcaagcgcccugggaaagcugcaggacguggucaaccagaaugcccaggcacugaacacccuggucaagcagcuguccuccaacuucggcgccaucagcucugugcugaacgauauccuggccagacuggacccuccugaggccgaggugcagaucgacagacugaucacaggcagacugcagagccuccagacauacgugacccagcagcugaucagagccgccgagauuagagccucugccaaucuggccgccaccaagaugucugagugugugcugggccagagcaagagaguggacuuuugcggcaagggcuaccaccugaugagcuucccucagucugccccucacggcgugguguuucugcacgugacauaugugcccgcucaagagaagaauuucaccaccgcuccagccaucugccacgacggcaaagcccacuuuccuagagaaggcguguucguguccaacggcacccauugguucgugacacagcggaacuucuacgagccccagaucaucaccacccacaacaccuucgugucuggcaacugcgacguugugaucggcauugugaacaauaccguguacgacccucugcagcccgagcuggacagcuucaaagaggaacuggacaaguacuuuaagaaccacacaagccccgacguggaccugggcgauaucagcggaaucaaugccagcgucgugaacauccagaaagagaucgaccggcugaacgagguggccaagaaucugaacgagagccugaucgaccugcaagaacuggggaaguacgagcaguacaucaaguggcccugguacaucuggcugggcuuuaucgccggacugauugccaucgugauggucacaaucaugcuguguugcaugaccagcugcuguagcugccugaagggcuguuguagcuguggcagcugcugcaaguucgacgaggacgauucugagcccgugcugaagggcgugaaacugcacuacaccugaggacuagucccuguucccagagcccacuuuuuuuucuuuuuuugaaauaaaauagccugucuuucagaucuaaaaaaaaaaaaaaaaaaaaaaaaaaaaaaaaaaaaaaaaaaaaaaaaaaaaaaaaaaaaaaaaaaaaaaaaaaaaaaaaaaaaaaaaaaaaaaaaaaaa

SEQ ID NO: 24922 - RNA, 4070 nt, Artificial Sequence
  SARS-CoV-2/Wuhan/WIV05/2019__EPI_ISL_402128 spike protein mRNA gc mod (1-1273)(K986P_V987P_K986P_V987P_K417N_E484K_N501Y_D614G)
aggagagucccgcagucggcguccagcggcucugcuuguucgugugugugucguugcaggccuuauucaagcuuaccauguucguguuucuggugcugcugccccugguguccagccagugugugaaccugaccaccagaacacagcugccuccagccuacaccaacagcuucaccagaggcguguacuaccccgacaagguguucagauccagcgugcugcacucuacccaggaccuguuccugccuuucuucagcaacgugaccugguuccacgccauccacguguccggcaccaauggcaccaagagauucgacaaccccgugcugcccuucaacgacgggguguacuuugccagcaccgagaaguccaacaucaucagaggcuggaucuucggcaccacacuggacagcaagacccagagccugcugaucgugaacaacgccaccaacguggucaucaaagugugcgaguuccaguucugcaacgaccccuuccugggcgucuacuaccacaagaacaacaagagcuggauggaaagcgaguuccggguguacagcagcgccaacaacugcaccuucgaguacgugucccagccuuuccugauggaccuggaaggcaagcagggcaacuucaagaaccugcgcgaguucguguucaagaacaucgacggcuacuucaaaaucuacagcaagcacaccccuaucaaccucgugcgggaucugccucagggcuucucugcucuggaaccccugguggaucugcccaucggcaucaacaucacccgguuucagacacugcuggcccugcacagaagcuaccugacaccuggcgauagcagcagcggauggacagcuggugccgccgcuuacuaugugggcuaccugcagccuagaaccuuccugcugaaguacaacgagaacggcaccaucaccgacgccguggauugugcucuggauccucugagcgagacaaagugcacccugaaguccuucaccguggaaaagggcaucuaccagaccagcaacuuccgggugcagcccaccgaauccaucgugcgguuccccaauaucaccaaucugugccccuucggcgagguguucaaugccaccagauucgccucuguguacgccuggaaccggaagcggaucagcaauugcguggccgacuacuccgugcuguacaacuccgccagcuucagcaccuucaagugcuacggcguguccccuaccaagcugaacgaccugugcuucacaaacguguacgccgacagcuucgugauccggggagaugaagugcggcagauugccccuggacagacaggcaacaucgccgacuacaacuacaagcugcccgacgacuucaccggcugugugauugccuggaacagcaacaaccuggacuccaaagucggcggcaacuacaauuaccuguaccggcuguuccggaaguccaaucugaagcccuucgagcgggacaucagcaccgaaaucuaucaggccggcagcaccccuugcaacggcgugaagggcuucaacugcuacuucccacugcaguccuacggcuuucagcccacauacggcgugggcuaucagcccuacagagugguggugcugagcuucgaacugcugcaugcuccugccacagugugcggcccuaagaaaagcaccaaucucgugaagaacaaaugcgugaacuucaacuucaacggccugaccggcaccggcgugcugacagagagcaacaagaaguuccugccauuccagcaguuuggccgggauaucgccgauaccacagacgccguuagagauccccagacacuggaaauccuggacaucaccccaugcagcuucggcggagugucugugaucaccccuggcaccaacaccagcaaucagguggcagugcuguaccagggcgugaacuguaccgaagugcccguggccauucacgccgaucagcugacaccuacauggcggguguacuccaccggcagcaauguguuucagaccagagccggcugucugaucggagccgagcacgugaacaauagcuacgagugcgacauccccaucggcgcuggcaucugugccagcuaccagacacagacaaacagccccagacgggcuagaagcguggccagccagagcaucauugccuacacaaugucucugggcgccgagaacagcguggccuacuccaacaacucuaucgcuauccccaccaacuucaccaucagcgugaccaccgagauccugccuguguccaugaccaagaccagcguggacugcaccauguacaucugcggcgauuccaccgagugcuccaaccugcugcugcaguacggcagcuucugcacccagcugaauagagcccugacagggaucgccguggaacaggacaagaacacccaagagguguucgcccaagugaagcaaaucuacaagaccccuccuaucaaggacuucggcggcuucaauuucagccagauucugcccgauccuagcaagcccagcaagcggagcuucaucgaggaccugcuguucaacaaagugacacuggccgacgccggcuucaucaagcaguauggcgauugucugggcgacauugccgccagggaucugauuugcgcccagaaguuuaacggacugacagugcugccuccucugcugaccgaugagaugaucgcccaguacacaucugcccugcuggccggcacaaucacaagcggcuggacauuuggagcuggcgccgcucugcagauccccuuugcuaugcagauggccuaccgguucaacggcaucggagugacccagaaugugcuguacgagaaccagaagcugaucgccaaccaguucaacagcgccaucggcaagauccaggacagccugagcagcacagcaagcgcccugggaaagcugcaggacguggucaaccagaaugcccaggcacugaacacccuggucaagcagcuguccuccaacuucggcgccaucagcucugugcugaacgauauccugagcagacuggacccuccugaggccgaggugcagaucgacagacugaucacaggcagacugcagagccuccagacauacgugacccagcagcugaucagagccgccgagauuagagccucugccaaucuggccgccaccaagaugucugagugugugcugggccagagcaagagaguggacuuuugcggcaagggcuaccaccugaugagcuucccucagucugccccucacggcgugguguuucugcacgugacauaugugcccgcucaagagaagaauuucaccaccgcuccagccaucugccacgacggcaaagcccacuuuccuagagaaggcguguucguguccaacggcacccauugguucgugacacagcggaacuucuacgagccccagaucaucaccaccgacaacaccuucgugucuggcaacugcgacguugugaucggcauugugaacaauaccguguacgacccucugcagcccgagcuggacagcuucaaagaggaacuggacaaguacuuuaagaaccacacaagccccgacguggaccugggcgauaucagcggaaucaaugccagcgucgugaacauccagaaagagaucgaccggcugaacgagguggccaagaaucugaacgagagccugaucgaccugcaagaacuggggaaguacgagcaguacaucaaguggcccugguacaucuggcugggcuuuaucgccggacugauugccaucgugauggucacaaucaugcuguguugcaugaccagcugcuguagcugccugaagggcuguuguagcuguggcagcugcugcaaguucgacgaggacgauucugagcccgugcugaagggcgugaaacugcacuacaccugaggacuagucccuguucccagagcccacuuuuuuuucuuuuuuugaaauaaaauagccugucuuucagaucuaaaaaaaaaaaaaaaaaaaaaaaaaaaaaaaaaaaaaaaaaaaaaaaaaaaaaaaaaaaaaaaaaaaaaaaaaaaaaaaaaaaaaaaaaaaaaaaaaaaa

SEQ ID NO: 24923 - RNA, 4061 nt, Artificial Sequence
  SARS-CoV-2/Wuhan/WIV05/2019__EPI_ISL_402128 spike protein mRNA gc mod (1-1273)(K986P_V987P_K986P_V987P_L18F_D80A_D215G_L242del_A243del_ L244del_R246I_K417N_E484K_N501Y_D614G_A701V)
aggagagucccgcagucggcguccagcggcucugcuuguucgugugugugucguugcaggccuuauucaagcuuaccauguucguguuucuggugcugcugccccugguguccagccagugugugaacuucaccaccagaacacagcugccuccagccuacaccaacagcuucaccagaggcguguacuaccccgacaagguguucagauccagcgugcugcacucuacccaggaccuguuccugccuuucuucagcaacgugaccugguuccacgccauccacguguccggcaccaauggcaccaagagauucgccaaccccgugcugcccuucaacgacgggguguacuuugccagcaccgagaaguccaacaucaucagaggcuggaucuucggcaccacacuggacagcaagacccagagccugcugaucgugaacaacgccaccaacguggucaucaaagugugcgaguuccaguucugcaacgaccccuuccugggcgucuacuaccacaagaacaacaagagcuggauggaaagcgaguuccggguguacagcagcgccaacaacugcaccuucgaguacgugucccagccuuuccugauggaccuggaaggcaagcagggcaacuucaagaaccugcgcgaguucguguucaagaacaucgacggcuacuucaaaaucuacagcaagcacaccccuaucaaccucgugcggggccugccucagggcuucucugcucuggaaccccugguggaucugcccaucggcaucaacaucacccgguuucagacacugcacaucagcuaccugacaccuggcgauagcagcagcggauggacagcuggugccgccgcuuacuaugugggcuaccugcagccuagaaccuuccugcugaaguacaacgagaacggcaccaucaccgacgccguggauugugcucuggauccucugagcgagacaaagugcacccugaaguccuucaccguggaaaagggcaucuaccagaccagcaacuuccgggugcagcccaccgaauccaucgugcgguuccccaauaucaccaaucugugccccuucggcgagguguucaaugccaccagauucgccucuguguacgccuggaaccggaagcggaucagcaauugcguggccgacuacuccgugcuguacaacuccgccagcuucagcaccuucaagugcuacggcguguccccuaccaagcugaacgaccugugcuucacaaacguguacgccgacagcuucgugauccggggagaugaagugcggcagauugccccuggacagacaggcaacaucgccgacuacaacuacaagcugcccgacgacuucaccggcugugugauugccuggaacagcaacaaccuggacuccaaagucggcggcaacuacaauuaccuguaccggcuguuccggaaguccaaucugaagcccuucgagcgggacaucagcaccgaaaucuaucaggccggcagcaccccuugcaacggcgugaagggcuucaacugcuacuucccacugcaguccuacggcuuucagcccacauacggcgugggcuaucagcccuacagagugguggugcugagcuucgaacugcugcaugcuccugccacagugugcggcccuaagaaaagcaccaaucucgugaagaacaaaugcgugaacuucaacuucaacggccugaccggcaccggcgugcugacagagagcaacaagaaguuccugccauuccagcaguuuggccgggauaucgccgauaccacagacgccguuagagauccccagacacuggaaauccuggacaucaccccaugcagcuucggcggagugucugugaucaccccuggcaccaacaccagcaaucagguggcagugcuguaccagggcgugaacuguaccgaagugcccguggccauucacgccgaucagcugacaccuacauggcggguguacuccaccggcagcaauguguuucagaccagagccggcugucugaucggagccgagcacgugaacaauagcuacgagugcgacauccccaucggcgcuggcaucugugccagcuaccagacacagacaaacagccccagacgggcuagaagcguggccagccagagcaucauugccuacacaaugucucugggcguggagaacagcguggccuacuccaacaacucuaucgcuauccccaccaacuucaccaucagcgugaccaccgagauccugccuguguccaugaccaagaccagcguggacugcaccauguacaucugcggcgauuccaccgagugcuccaaccugcugcugcaguacggcagcuucugcacccagcugaauagagcccugacagggaucgccguggaacaggacaagaacacccaagagguguucgcccaagugaagcaaaucuacaagaccccuccuaucaaggacuucggcggcuucaauuucagccagauucugcccgauccuagcaagcccagcaagcggagcuucaucgaggaccugcuguucaacaaagugacacuggccgacgccggcuucaucaagcaguauggcgauugucugggcgacauugccgccagggaucugauuugcgcccagaaguuuaacggacugacagugcugccuccucugcugaccgaugagaugaucgcccaguacacaucugcccugcuggccggcacaaucacaagcggcuggacauuuggagcuggcgccgcucugcagauccccuuugcuaugcagauggccuaccgguucaacggcaucggagugacccagaaugugcuguacgagaaccagaagcugaucgccaaccaguucaacagcgccaucggcaagauccaggacagccugagcagcacagcaagcgcccugggaaagcugcaggacguggucaaccagaaugcccaggcacugaacacccuggucaagcagcuguccuccaacuucggcgccaucagcucugugcugaacgauauccugagcagacuggacccuccugaggccgaggugcagaucgacagacugaucacaggcagacugcagagccuccagacauacgugacccagcagcugaucagagccgccgagauuagagccucugccaaucuggccgccaccaagaugucugagugugugcugggccagagcaagagaguggacuuuugcggcaagggcuaccaccugaugagcuucccucagucugccccucacggcgugguguuucugcacgugacauaugugcccgcucaagagaagaauuucaccaccgcuccagccaucugccacgacggcaaagcccacuuuccuagagaaggcguguucguguccaacggcacccauugguucgugacacagcggaacuucuacgagccccagaucaucaccaccgacaacaccuucgugucuggcaacugcgacguugugaucggcauugugaacaauaccguguacgacccucugcagcccgagcuggacagcuucaaagaggaacuggacaaguacuuuaagaaccacacaagccccgacguggaccugggcgauaucagcggaaucaaugccagcgucgugaacauccagaaagagaucgaccggcugaacgagguggccaagaaucugaacgagagccugaucgaccugcaagaacuggggaaguacgagcaguacaucaaguggcccugguacaucuggcugggcuuuaucgccggacugauugccaucgugauggucacaaucaugcuguguugcaugaccagcugcuguagcugccugaagggcuguuguagcuguggcagcugcugcaaguucgacgaggacgauucugagcccgugcugaagggcgugaaacugcacuacaccugaggacuagucccuguucccagagcccacuuuuuuuucuuuuuuugaaauaaaauagccugucuuucagaucuaaaaaaaaaaaaaaaaaaaaaaaaaaaaaaaaaaaaaaaaaaaaaaaaaaaaaaaaaaaaaaaaaaaaaaaaaaaaaaaaaaaaaaaaaaaaaaaaaaaa

SEQ ID NO: 24924 - RNA, 4070 nt, Artificial Sequence
  SARS-CoV-2/Wuhan/WIV05/2019__EPI_ISL_402128 spike protein mRNA gc mod (1-1273)(K986P_V987P_K986P_V987P_E484K_D614G)
aggagagucccgcagucggcguccagcggcucugcuuguucgugugugugucguugcaggccuuauucaagcuuaccauguucguguuucuggugcugcugccccugguguccagccagugugugaaccugaccaccagaacacagcugccuccagccuacaccaacagcuucaccagaggcguguacuaccccgacaagguguucagauccagcgugcugcacucuacccaggaccuguuccugccuuucuucagcaacgugaccugguuccacgccauccacguguccggcaccaauggcaccaagagauucgacaaccccgugcugcccuucaacgacgggguguacuuugccagcaccgagaaguccaacaucaucagaggcuggaucuucggcaccacacuggacagcaagacccagagccugcugaucgugaacaacgccaccaacguggucaucaaagugugcgaguuccaguucugcaacgaccccuuccugggcgucuacuaccacaagaacaacaagagcuggauggaaagcgaguuccggguguacagcagcgccaacaacugcaccuucgaguacgugucccagccuuuccugauggaccuggaaggcaagcagggcaacuucaagaaccugcgcgaguucguguucaagaacaucgacggcuacuucaaaaucuacagcaagcacaccccuaucaaccucgugcgggaucugccucagggcuucucugcucuggaaccccugguggaucugcccaucggcaucaacaucacccgguuucagacacugcuggcccugcacagaagcuaccugacaccuggcgauagcagcagcggauggacagcuggugccgccgcuuacuaugugggcuaccugcagccuagaaccuuccugcugaaguacaacgagaacggcaccaucaccgacgccguggauugugcucuggauccucugagcgagacaaagugcacccugaaguccuucaccguggaaaagggcaucuaccagaccagcaacuuccgggugcagcccaccgaauccaucgugcgguuccccaauaucaccaaucugugccccuucggcgagguguucaaugccaccagauucgccucuguguacgccuggaaccggaagcggaucagcaauugcguggccgacuacuccgugcuguacaacuccgccagcuucagcaccuucaagugcuacggcguguccccuaccaagcugaacgaccugugcuucacaaacguguacgccgacagcuucgugauccggggagaugaagugcggcagauugccccuggacagacaggcaagaucgccgacuacaacuacaagcugcccgacgacuucaccggcugugugauugccuggaacagcaacaaccuggacuccaaagucggcggcaacuacaauuaccuguaccggcuguuccggaaguccaaucugaagcccuucgagcgggacaucagcaccgaaaucuaucaggccggcagcaccccuugcaacggcgugaagggcuucaacugcuacuucccacugcaguccuacggcuuucagcccacaaauggcgugggcuaucagcccuacagagugguggugcugagcuucgaacugcugcaugcuccugccacagugugcggcccuaagaaaagcaccaaucucgugaagaacaaaugcgugaacuucaacuucaacggccugaccggcaccggcgugcugacagagagcaacaagaaguuccugccauuccagcaguuuggccgggauaucgccgauaccacagacgccguuagagauccccagacacuggaaauccuggacaucaccccaugcagcuucggcggagugucugugaucaccccuggcaccaacaccagcaaucagguggcagugcuguaccagggcgugaacuguaccgaagugcccguggccauucacgccgaucagcugacaccuacauggcggguguacuccaccggcagcaauguguuucagaccagagccggcugucugaucggagccgagcacgugaacaauagcuacgagugcgacauccccaucggcgcuggcaucugugccagcuaccagacacagacaaacagccccagacgggcuagaagcguggccagccagagcaucauugccuacacaaugucucugggcgccgagaacagcguggccuacuccaacaacucuaucgcuauccccaccaacuucaccaucagcgugaccaccgagauccugccuguguccaugaccaagaccagcguggacugcaccauguacaucugcggcgauuccaccgagugcuccaaccugcugcugcaguacggcagcuucugcacccagcugaauagagcccugacagggaucgccguggaacaggacaagaacacccaagagguguucgcccaagugaagcaaaucuacaagaccccuccuaucaaggacuucggcggcuucaauuucagccagauucugcccgauccuagcaagcccagcaagcggagcuucaucgaggaccugcuguucaacaaagugacacuggccgacgccggcuucaucaagcaguauggcgauugucugggcgacauugccgccagggaucugauuugcgcccagaaguuuaacggacugacagugcugccuccucugcugaccgaugagaugaucgcccaguacacaucugcccugcuggccggcacaaucacaagcggcuggacauuuggagcuggcgccgcucugcagauccccuuugcuaugcagauggccuaccgguucaacggcaucggagugacccagaaugugcuguacgagaaccagaagcugaucgccaaccaguucaacagcgccaucggcaagauccaggacagccugagcagcacagcaagcgcccugggaaagcugcaggacguggucaaccagaaugcccaggcacugaacacccuggucaagcagcuguccuccaacuucggcgccaucagcucugugcugaacgauauccugagcagacuggacccuccugaggccgaggugcagaucgacagacugaucacaggcagacugcagagccuccagacauacgugacccagcagcugaucagagccgccgagauuagagccucugccaaucuggccgccaccaagaugucugagugugugcugggccagagcaagagaguggacuuuugcggcaagggcuaccaccugaugagcuucccucagucugccccucacggcgugguguuucugcacgugacauaugugcccgcucaagagaagaauuucaccaccgcuccagccaucugccacgacggcaaagcccacuuuccuagagaaggcguguucguguccaacggcacccauugguucgugacacagcggaacuucuacgagccccagaucaucaccaccgacaacaccuucgugucuggcaacugcgacguugugaucggcauugugaacaauaccguguacgacccucugcagcccgagcuggacagcuucaaagaggaacuggacaaguacuuuaagaaccacacaagccccgacguggaccugggcgauaucagcggaaucaaugccagcgucgugaacauccagaaagagaucgaccggcugaacgagguggccaagaaucugaacgagagccugaucgaccugcaagaacuggggaaguacgagcaguacaucaaguggcccugguacaucuggcugggcuuuaucgccggacugauugccaucgugauggucacaaucaugcuguguugcaugaccagcugcuguagcugccugaagggcuguuguagcuguggcagcugcugcaaguucgacgaggacgauucugagcccgugcugaagggcgugaaacugcacuacaccugaggacuagucccuguucccagagcccacuuuuuuuucuuuuuuugaaauaaaauagccugucuuucagaucuaaaaaaaaaaaaaaaaaaaaaaaaaaaaaaaaaaaaaaaaaaaaaaaaaaaaaaaaaaaaaaaaaaaaaaaaaaaaaaaaaaaaaaaaaaaaaaaaaaaa

SEQ ID NO: 24925 - RNA, 4070 nt, Artificial Sequence
  SARS-CoV-2/Wuhan/WIV05/2019__EPI_ISL_402128 spike protein mRNA gc mod (1-1273)(K986P_V987P_K986P_V987P_L18F_T20N_P26S_D138Y_R190S_K417T _E484K_N501Y_D614G_H655Y_T1027I)
aggagagucccgcagucggcguccagcggcucugcuuguucgugugugugucguugcaggccuuauucaagcuuaccauguucguguuucuggugcugcugccccugguguccagccagugugugaacuucaccaacagaacacagcugccuagcgccuacaccaacagcuucaccagaggcguguacuaccccgacaagguguucagauccagcgugcugcacucuacccaggaccuguuccugccuuucuucagcaacgugaccugguuccacgccauccacguguccggcaccaauggcaccaagagauucgacaaccccgugcugcccuucaacgacgggguguacuuugccagcaccgagaaguccaacaucaucagaggcuggaucuucggcaccacacuggacagcaagacccagagccugcugaucgugaacaacgccaccaacguggucaucaaagugugcgaguuccaguucugcaacuaccccuuccugggcgucuacuaccacaagaacaacaagagcuggauggaaagcgaguuccggguguacagcagcgccaacaacugcaccuucgaguacgugucccagccuuuccugauggaccuggaaggcaagcagggcaacuucaagaaccugagcgaguucguguucaagaacaucgacggcuacuucaaaaucuacagcaagcacaccccuaucaaccucgugcgggaucugccucagggcuucucugcucuggaaccccugguggaucugcccaucggcaucaacaucacccgguuucagacacugcuggcccugcacagaagcuaccugacaccuggcgauagcagcagcggauggacagcuggugccgccgcuuacuaugugggcuaccugcagccuagaaccuuccugcugaaguacaacgagaacggcaccaucaccgacgccguggauugugcucuggauccucugagcgagacaaagugcacccugaaguccuucaccguggaaaagggcaucuaccagaccagcaacuuccgggugcagcccaccgaauccaucgugcgguuccccaauaucaccaaucugugccccuucggcgagguguucaaugccaccagauucgccucuguguacgccuggaaccggaagcggaucagcaauugcguggccgacuacuccgugcuguacaacuccgccagcuucagcaccuucaagugcuacggcguguccccuaccaagcugaacgaccugugcuucacaaacguguacgccgacagcuucgugauccggggagaugaagugcggcagauugccccuggacagacaggcaccaucgccgacuacaacuacaagcugcccgacgacuucaccggcugugugauugccuggaacagcaacaaccuggacuccaaagucggcggcaacuacaauuaccuguaccggcuguuccggaaguccaaucugaagcccuucgagcgggacaucagcaccgaaaucuaucaggccggcagcaccccuugcaacggcgugaagggcuucaacugcuacuucccacugcaguccuacggcuuucagcccacauacggcgugggcuaucagcccuacagagugguggugcugagcuucgaacugcugcaugcuccugccacagugugcggcccuaagaaaagcaccaaucucgugaagaacaaaugcgugaacuucaacuucaacggccugaccggcaccggcgugcugacagagagcaacaagaaguuccugccauuccagcaguuuggccgggauaucgccgauaccacagacgccguuagagauccccagacacuggaaauccuggacaucaccccaugcagcuucggcggagugucugugaucaccccuggcaccaacaccagcaaucagguggcagugcuguaccagggcgugaacuguaccgaagugcccguggccauucacgccgaucagcugacaccuacauggcggguguacuccaccggcagcaauguguuucagaccagagccggcugucugaucggagccgaguacgugaacaauagcuacgagugcgacauccccaucggcgcuggcaucugugccagcuaccagacacagacaaacagccccagacgggcuagaagcguggccagccagagcaucauugccuacacaaugucucugggcgccgagaacagcguggccuacuccaacaacucuaucgcuauccccaccaacuucaccaucagcgugaccaccgagauccugccuguguccaugaccaagaccagcguggacugcaccauguacaucugcggcgauuccaccgagugcuccaaccugcugcugcaguacggcagcuucugcacccagcugaauagagcccugacagggaucgccguggaacaggacaagaacacccaagagguguucgcccaagugaagcaaaucuacaagaccccuccuaucaaggacuucggcggcuucaauuucagccagauucugcccgauccuagcaagcccagcaagcggagcuucaucgaggaccugcuguucaacaaagugacacuggccgacgccggcuucaucaagcaguauggcgauugucugggcgacauugccgccagggaucugauuugcgcccagaaguuuaacggacugacagugcugccuccucugcugaccgaugagaugaucgcccaguacacaucugcccugcuggccggcacaaucacaagcggcuggacauuuggagcuggcgccgcucugcagauccccuuugcuaugcagauggccuaccgguucaacggcaucggagugacccagaaugugcuguacgagaaccagaagcugaucgccaaccaguucaacagcgccaucggcaagauccaggacagccugagcagcacagcaagcgcccugggaaagcugcaggacguggucaaccagaaugcccaggcacugaacacccuggucaagcagcuguccuccaacuucggcgccaucagcucugugcugaacgauauccugagcagacuggacccuccugaggccgaggugcagaucgacagacugaucacaggcagacugcagagccuccagacauacgugacccagcagcugaucagagccgccgagauuagagccucugccaaucuggccgccaucaagaugucugagugugugcugggccagagcaagagaguggacuuuugcggcaagggcuaccaccugaugagcuucccucagucugccccucacggcgugguguuucugcacgugacauaugugcccgcucaagagaagaauuucaccaccgcuccagccaucugccacgacggcaaagcccacuuuccuagagaaggcguguucguguccaacggcacccauugguucgugacacagcggaacuucuacgagccccagaucaucaccaccgacaacaccuucgugucuggcaacugcgacguugugaucggcauugugaacaauaccguguacgacccucugcagcccgagcuggacagcuucaaagaggaacuggacaaguacuuuaagaaccacacaagccccgacguggaccugggcgauaucagcggaaucaaugccagcgucgugaacauccagaaagagaucgaccggcugaacgagguggccaagaaucugaacgagagccugaucgaccugcaagaacuggggaaguacgagcaguacaucaaguggcccugguacaucuggcugggcuuuaucgccggacugauugccaucgugauggucacaaucaugcuguguugcaugaccagcugcuguagcugccugaagggcuguuguagcuguggcagcugcugcaaguucgacgaggacgauucugagcccgugcugaagggcgugaaacugcacuacaccugaggacuagucccuguucccagagcccacuuuuuuuucuuuuuuugaaauaaaauagccugucuuucagaucuaaaaaaaaaaaaaaaaaaaaaaaaaaaaaaaaaaaaaaaaaaaaaaaaaaaaaaaaaaaaaaaaaaaaaaaaaaaaaaaaaaaaaaaaaaaaaaaaaaaa

SEQ ID NO: 24926 - RNA, 4070 nt, Artificial Sequence
  SARS-CoV-2/Wuhan/WIV05/2019__EPI_ISL_402128 spike protein mRNA gc mod (1-1273)(K986P_V987P_K986P_V987P_S13I_W152C_L452R_D614G)
aggagagucccgcagucggcguccagcggcucugcuuguucgugugugugucguugcaggccuuauucaagcuuaccauguucguguuucuggugcugcugccccugguguccauccagugugugaaccugaccaccagaacacagcugccuccagccuacaccaacagcuucaccagaggcguguacuaccccgacaagguguucagauccagcgugcugcacucuacccaggaccuguuccugccuuucuucagcaacgugaccugguuccacgccauccacguguccggcaccaauggcaccaagagauucgacaaccccgugcugcccuucaacgacgggguguacuuugccagcaccgagaaguccaacaucaucagaggcuggaucuucggcaccacacuggacagcaagacccagagccugcugaucgugaacaacgccaccaacguggucaucaaagugugcgaguuccaguucugcaacgaccccuuccugggcgucuacuaccacaagaacaacaagagcugcauggaaagcgaguuccggguguacagcagcgccaacaacugcaccuucgaguacgugucccagccuuuccugauggaccuggaaggcaagcagggcaacuucaagaaccugcgcgaguucguguucaagaacaucgacggcuacuucaaaaucuacagcaagcacaccccuaucaaccucgugcgggaucugccucagggcuucucugcucuggaaccccugguggaucugcccaucggcaucaacaucacccgguuucagacacugcuggcccugcacagaagcuaccugacaccuggcgauagcagcagcggauggacagcuggugccgccgcuuacuaugugggcuaccugcagccuagaaccuuccugcugaaguacaacgagaacggcaccaucaccgacgccguggauugugcucuggauccucugagcgagacaaagugcacccugaaguccuucaccguggaaaagggcaucuaccagaccagcaacuuccgggugcagcccaccgaauccaucgugcgguuccccaauaucaccaaucugugccccuucggcgagguguucaaugccaccagauucgccucuguguacgccuggaaccggaagcggaucagcaauugcguggccgacuacuccgugcuguacaacuccgccagcuucagcaccuucaagugcuacggcguguccccuaccaagcugaacgaccugugcuucacaaacguguacgccgacagcuucgugauccggggagaugaagugcggcagauugccccuggacagacaggcaagaucgccgacuacaacuacaagcugcccgacgacuucaccggcugugugauugccuggaacagcaacaaccuggacuccaaagucggcggcaacuacaauuaccgcuaccggcuguuccggaaguccaaucugaagcccuucgagcgggacaucagcaccgaaaucuaucaggccggcagcaccccuugcaacggcguggaaggcuucaacugcuacuucccacugcaguccuacggcuuucagcccacaaauggcgugggcuaucagcccuacagagugguggugcugagcuucgaacugcugcaugcuccugccacagugugcggcccuaagaaaagcaccaaucucgugaagaacaaaugcgugaacuucaacuucaacggccugaccggcaccggcgugcugacagagagcaacaagaaguuccugccauuccagcaguuuggccgggauaucgccgauaccacagacgccguuagagauccccagacacuggaaauccuggacaucaccccaugcagcuucggcggagugucugugaucaccccuggcaccaacaccagcaaucagguggcagugcuguaccagggcgugaacuguaccgaagugcccguggccauucacgccgaucagcugacaccuacauggcggguguacuccaccggcagcaauguguuucagaccagagccggcugucugaucggagccgagcacgugaacaauagcuacgagugcgacauccccaucggcgcuggcaucugugccagcuaccagacacagacaaacagccccagacgggcuagaagcguggccagccagagcaucauugccuacacaaugucucugggcgccgagaacagcguggccuacuccaacaacucuaucgcuauccccaccaacuucaccaucagcgugaccaccgagauccugccuguguccaugaccaagaccagcguggacugcaccauguacaucugcggcgauuccaccgagugcuccaaccugcugcugcaguacggcagcuucugcacccagcugaauagagcccugacagggaucgccguggaacaggacaagaacacccaagagguguucgcccaagugaagcaaaucuacaagaccccuccuaucaaggacuucggcggcuucaauuucagccagauucugcccgauccuagcaagcccagcaagcggagcuucaucgaggaccugcuguucaacaaagugacacuggccgacgccggcuucaucaagcaguauggcgauugucugggcgacauugccgccagggaucugauuugcgcccagaaguuuaacggacugacagugcugccuccucugcugaccgaugagaugaucgcccaguacacaucugcccugcuggccggcacaaucacaagcggcuggacauuuggagcuggcgccgcucugcagauccccuuugcuaugcagauggccuaccgguucaacggcaucggagugacccagaaugugcuguacgagaaccagaagcugaucgccaaccaguucaacagcgccaucggcaagauccaggacagccugagcagcacagcaagcgcccugggaaagcugcaggacguggucaaccagaaugcccaggcacugaacacccuggucaagcagcuguccuccaacuucggcgccaucagcucugugcugaacgauauccugagcagacuggacccuccugaggccgaggugcagaucgacagacugaucacaggcagacugcagagccuccagacauacgugacccagcagcugaucagagccgccgagauuagagccucugccaaucuggccgccaccaagaugucugagugugugcugggccagagcaagagaguggacuuuugcggcaagggcuaccaccugaugagcuucccucagucugccccucacggcgugguguuucugcacgugacauaugugcccgcucaagagaagaauuucaccaccgcuccagccaucugccacgacggcaaagcccacuuuccuagagaaggcguguucguguccaacggcacccauugguucgugacacagcggaacuucuacgagccccagaucaucaccaccgacaacaccuucgugucuggcaacugcgacguugugaucggcauugugaacaauaccguguacgacccucugcagcccgagcuggacagcuucaaagaggaacuggacaaguacuuuaagaaccacacaagccccgacguggaccugggcgauaucagcggaaucaaugccagcgucgugaacauccagaaagagaucgaccggcugaacgagguggccaagaaucugaacgagagccugaucgaccugcaagaacuggggaaguacgagcaguacaucaaguggcccugguacaucuggcugggcuuuaucgccggacugauugccaucgugauggucacaaucaugcuguguugcaugaccagcugcuguagcugccugaagggcuguuguagcuguggcagcugcugcaaguucgacgaggacgauucugagcccgugcugaagggcgugaaacugcacuacaccugaggacuagucccuguucccagagcccacuuuuuuuucuuuuuuugaaauaaaauagccugucuuucagaucuaaaaaaaaaaaaaaaaaaaaaaaaaaaaaaaaaaaaaaaaaaaaaaaaaaaaaaaaaaaaaaaaaaaaaaaaaaaaaaaaaaaaaaaaaaaaaaaaaaaa

SEQ ID NO: 24927 - RNA, 4070 nt, Artificial Sequence
  SARS-CoV-2/Wuhan/WIV05/2019__EPI_ISL_402128 spike protein mRNA gc mod (1-1273)(K986P_V987P)
aggagagucccgcagucggcguccagcggcucugcuuguucgugugugugucguugcaggccuuauucaagcuuaccauguucguguuccuggugcugcugccucugguguccagccagugugugaaccugaccaccagaacacagcugccuccagccuacaccaacagcuuuaccagaggcguguacuaccccgacaagguguucagauccagcgugcugcacucuacccaggaccuguuccugccuuucuucagcaacgugaccugguuccacgccauccacguguccggcaccaauggcaccaagagauucgacaaccccgugcugcccuucaacgacgggguguacuuugccagcaccgagaaguccaacaucaucagaggcuggaucuucggcaccacacuggacagcaagacccagagccugcugaucgugaacaacgccaccaacguggucaucaaagugugcgaguuccaguucugcaacgaccccuuccugggcgucuacuaccacaagaacaacaagagcuggauggaaagcgaguuccggguguacagcagcgccaacaacugcaccuucgaguacgugucccagccuuuccugauggaccuggaaggcaagcagggcaacuucaagaaccugcgcgaguucguguuuaagaacaucgacggcuacuucaagaucuacagcaagcacaccccuaucaaccucgugcgggaucugccucagggcuucucugcucuggaaccccugguggaucugcccaucggcaucaacaucacccgguuucagacacugcuggcccugcacagaagcuaccugacaccuggcgauagcagcagcggauggacagcuggugccgccgcuuacuaugugggcuaccugcagccuagaaccuuccugcugaaguacaacgagaacggcaccaucaccgacgccguggauugugcucuggauccucugagcgagacaaagugcacccugaaguccuucaccguggaaaagggcaucuaccagaccagcaacuuccgggugcagcccaccgaauccaucgugcgguuccccaauaucaccaaucugugccccuucggcgagguguucaaugccaccagauucgccucuguguacgccuggaaccggaagcggaucagcaauugcguggccgacuacuccgugcuguacaacuccgccagcuucagcaccuucaagugcuacggcguguccccuaccaagcugaacgaccugugcuucacaaacguguacgccgacagcuucgugauccggggagaugaagugcggcagauugccccuggacagacaggcaagaucgccgacuacaacuacaagcugcccgacgacuucaccggcugugugauugccuggaacagcaacaaccuggacuccaaagucggcggcaacuacaauuaccuguaccggcuguuccggaaguccaaucugaagcccuucgagcgggacaucuccaccgagaucuaucaggccggcagcaccccuuguaacggcguggaaggcuucaacugcuacuucccacugcaguccuacggcuuucagcccacaaauggcgugggcuaucagcccuacagagugguggugcugagcuucgaacugcugcaugccccugccacagugugcggcccuaagaaaagcaccaaucucgugaagaacaaaugcgugaacuucaacuucaacggccugaccggcaccggcgugcugacagagagcaacaagaaguuccugccauuccagcaguuuggccgggauaucgccgauaccacagacgccguuagagauccccagacacuggaaauccuggacaucaccccuugcagcuucggcggagugucugugaucaccccuggcaccaacaccagcaaucagguggcagugcuguaccaggacgugaacuguaccgaagugcccguggccauucacgccgaucagcugacaccuacauggcggguguacuccaccggcagcaauguguuucagaccagagccggcugucugaucggagccgagcacgugaacaauagcuacgagugcgacauccccaucggcgcuggaaucugcgccagcuaccagacacagacaaacagcccucggagagccagaagcguggccagccagagcaucauugccuacacaaugucucugggcgccgagaacagcguggccuacuccaacaacucuaucgcuauccccaccaacuucaccaucagcgugaccacagagauccugccuguguccaugaccaagaccagcguggacugcaccauguacaucugcggcgauuccaccgagugcuccaaccugcugcugcaguacggcagcuucugcacccagcugaauagagcccugacagggaucgccguggaacaggacaagaacacccaagagguguucgcccaagugaagcagaucuacaagaccccuccuaucaaggacuucggcggcuucaauuucagccagauucugcccgauccuagcaagcccagcaagcggagcuucaucgaggaccugcuguucaacaaagugacacuggccgacgccggcuucaucaagcaguauggcgauugucugggcgacauugccgccagggaucugauuugcgcccagaaguuuaacggacugacagugcugccuccucugcugaccgaugagaugaucgcccaguacacaucugcccugcuggccggcacaaucacaagcggcuggacauuuggagcaggcgccgcucugcagauccccuuugcuaugcagauggccuaccgguucaacggcaucggagugacccagaaugugcuguacgagaaccagaagcugaucgccaaccaguucaacagcgccaucggcaagauccaggacagccugagcagcacagcaagcgcccugggaaagcugcaggacguggucaaccagaaugcccaggcacugaacacccuggucaagcagcuguccuccaacuucggcgccaucagcucugugcugaacgauauccugagcagacuggacccuccugaggccgaggugcagaucgacagacugaucacaggcagacugcagagccuccagacauacgugacccagcagcugaucagagccgccgagauuagagccucugccaaucuggccgccaccaagaugucugagugugugcugggccagagcaagagaguggacuuuugcggcaagggcuaccaccugaugagcuucccucagucugccccucacggcgugguguuucugcacgugacauaugugcccgcucaagagaagaauuucaccaccgcuccagccaucugccacgacggcaaagcccacuuuccuagagaaggcguguucguguccaacggcacccauugguucgugacacagcggaacuucuacgagccccagaucaucaccaccgacaacaccuucgugucuggcaacugcgacgucgugaucggcauugugaacaauaccguguacgacccucugcagcccgagcuggacagcuucaaagaggaacuggacaaguacuuuaagaaccacacaagccccgacguggaccugggcgauaucagcggaaucaaugccagcgucgugaacauccagaaagagaucgaccggcugaacgagguggccaagaaucugaacgagagccugaucgaccugcaagaacuggggaaguacgagcaguacaucaaguggcccugguacaucuggcugggcuuuaucgccggacugauugccaucgugauggucacaaucaugcuguguugcaugaccagcugcuguagcugccugaagggcuguuguagcuguggcagcugcugcaaguucgacgaggacgauucugagcccgugcugaagggcgugaaacugcacuacacaugaggacuagucccuguucccagagcccacuuuuuuuucuuuuuuugaaauaaaauagccugucuuucagaucuaaaaaaaaaaaaaaaaaaaaaaaaaaaaaaaaaaaaaaaaaaaaaaaaaaaaaaaaaaaaaaaaaaaaaaaaaaaaaaaaaaaaaaaaaaaaaaaaaaaa

SEQ ID NO: 24928 - RNA, 4070 nt, Artificial Sequence
  SARS-CoV-2/Wuhan/WIV05/2019__EPI_ISL_402128 spike protein mRNA gc mod (1-1273)(K986P_V987P_ D614G)
aggagagucccgcagucggcguccagcggcucugcuuguucgugugugugucguugcaggccuuauucaagcuuaccauguucguguuccuggugcugcugccucugguguccagccagugugugaaccugaccaccagaacacagcugccuccagccuacaccaacagcuuuaccagaggcguguacuaccccgacaagguguucagauccagcgugcugcacucuacccaggaccuguuccugccuuucuucagcaacgugaccugguuccacgccauccacguguccggcaccaauggcaccaagagauucgacaaccccgugcugcccuucaacgacgggguguacuuugccagcaccgagaaguccaacaucaucagaggcuggaucuucggcaccacacuggacagcaagacccagagccugcugaucgugaacaacgccaccaacguggucaucaaagugugcgaguuccaguucugcaacgaccccuuccugggcgucuacuaccacaagaacaacaagagcuggauggaaagcgaguuccggguguacagcagcgccaacaacugcaccuucgaguacgugucccagccuuuccugauggaccuggaaggcaagcagggcaacuucaagaaccugcgcgaguucguguuuaagaacaucgacggcuacuucaagaucuacagcaagcacaccccuaucaaccucgugcgggaucugccucagggcuucucugcucuggaaccccugguggaucugcccaucggcaucaacaucacccgguuucagacacugcuggcccugcacagaagcuaccugacaccuggcgauagcagcagcggauggacagcuggugccgccgcuuacuaugugggcuaccugcagccuagaaccuuccugcugaaguacaacgagaacggcaccaucaccgacgccguggauugugcucuggauccucugagcgagacaaagugcacccugaaguccuucaccguggaaaagggcaucuaccagaccagcaacuuccgggugcagcccaccgaauccaucgugcgguuccccaauaucaccaaucugugccccuucggcgagguguucaaugccaccagauucgccucuguguacgccuggaaccggaagcggaucagcaauugcguggccgacuacuccgugcuguacaacuccgccagcuucagcaccuucaagugcuacggcguguccccuaccaagcugaacgaccugugcuucacaaacguguacgccgacagcuucgugauccggggagaugaagugcggcagauugccccuggacagacaggcaagaucgccgacuacaacuacaagcugcccgacgacuucaccggcugugugauugccuggaacagcaacaaccuggacuccaaagucggcggcaacuacaauuaccuguaccggcuguuccggaaguccaaucugaagcccuucgagcgggacaucuccaccgagaucuaucaggccggcagcaccccuuguaacggcguggaaggcuucaacugcuacuucccacugcaguccuacggcuuucagcccacaaauggcgugggcuaucagcccuacagagugguggugcugagcuucgaacugcugcaugccccugccacagugugcggcccuaagaaaagcaccaaucucgugaagaacaaaugcgugaacuucaacuucaacggccugaccggcaccggcgugcugacagagagcaacaagaaguuccugccauuccagcaguuuggccgggauaucgccgauaccacagacgccguuagagauccccagacacuggaaauccuggacaucaccccuugcagcuucggcggagugucugugaucaccccuggcaccaacaccagcaaucagguggcagugcuguaccagggcgugaacuguaccgaagugcccguggccauucacgccgaucagcugacaccuacauggcggguguacuccaccggcagcaauguguuucagaccagagccggcugucugaucggagccgagcacgugaacaauagcuacgagugcgacauccccaucggcgcuggaaucugcgccagcuaccagacacagacaaacagcccucggagagccagaagcguggccagccagagcaucauugccuacacaaugucucugggcgccgagaacagcguggccuacuccaacaacucuaucgcuauccccaccaacuucaccaucagcgugaccacagagauccugccuguguccaugaccaagaccagcguggacugcaccauguacaucugcggcgauuccaccgagugcuccaaccugcugcugcaguacggcagcuucugcacccagcugaauagagcccugacagggaucgccguggaacaggacaagaacacccaagagguguucgcccaagugaagcagaucuacaagaccccuccuaucaaggacuucggcggcuucaauuucagccagauucugcccgauccuagcaagcccagcaagcggagcuucaucgaggaccugcuguucaacaaagugacacuggccgacgccggcuucaucaagcaguauggcgauugucugggcgacauugccgccagggaucugauuugcgcccagaaguuuaacggacugacagugcugccuccucugcugaccgaugagaugaucgcccaguacacaucugcccugcuggccggcacaaucacaagcggcuggacauuuggagcaggcgccgcucugcagauccccuuugcuaugcagauggccuaccgguucaacggcaucggagugacccagaaugugcuguacgagaaccagaagcugaucgccaaccaguucaacagcgccaucggcaagauccaggacagccugagcagcacagcaagcgcccugggaaagcugcaggacguggucaaccagaaugcccaggcacugaacacccuggucaagcagcuguccuccaacuucggcgccaucagcucugugcugaacgauauccugagcagacuggacccuccugaggccgaggugcagaucgacagacugaucacaggcagacugcagagccuccagacauacgugacccagcagcugaucagagccgccgagauuagagccucugccaaucuggccgccaccaagaugucugagugugugcugggccagagcaagagaguggacuuuugcggcaagggcuaccaccugaugagcuucccucagucugccccucacggcgugguguuucugcacgugacauaugugcccgcucaagagaagaauuucaccaccgcuccagccaucugccacgacggcaaagcccacuuuccuagagaaggcguguucguguccaacggcacccauugguucgugacacagcggaacuucuacgagccccagaucaucaccaccgacaacaccuucgugucuggcaacugcgacgucgugaucggcauugugaacaauaccguguacgacccucugcagcccgagcuggacagcuucaaagaggaacuggacaaguacuuuaagaaccacacaagccccgacguggaccugggcgauaucagcggaaucaaugccagcgucgugaacauccagaaagagaucgaccggcugaacgagguggccaagaaucugaacgagagccugaucgaccugcaagaacuggggaaguacgagcaguacaucaaguggcccugguacaucuggcugggcuuuaucgccggacugauugccaucgugauggucacaaucaugcuguguugcaugaccagcugcuguagcugccugaagggcuguuguagcuguggcagcugcugcaaguucgacgaggacgauucugagcccgugcugaagggcgugaaacugcacuacacaugaggacuagucccuguucccagagcccacuuuuuuuucuuuuuuugaaauaaaauagccugucuuucagaucuaaaaaaaaaaaaaaaaaaaaaaaaaaaaaaaaaaaaaaaaaaaaaaaaaaaaaaaaaaaaaaaaaaaaaaaaaaaaaaaaaaaaaaaaaaaaaaaaaaaa

SEQ ID NO: 24929 - RNA, 4070 nt, Artificial Sequence
  SARS-CoV-2/Wuhan/WIV05/2019__EPI_ISL_402128 spike protein mRNA gc mod (1-1273)(K986P_V987P_A222V_D614G)
aggagagucccgcagucggcguccagcggcucugcuuguucgugugugugucguugcaggccuuauucaagcuuaccauguucguguuccuggugcugcugccucugguguccagccagugugugaaccugaccaccagaacacagcugccuccagccuacaccaacagcuuuaccagaggcguguacuaccccgacaagguguucagauccagcgugcugcacucuacccaggaccuguuccugccuuucuucagcaacgugaccugguuccacgccauccacguguccggcaccaauggcaccaagagauucgacaaccccgugcugcccuucaacgacgggguguacuuugccagcaccgagaaguccaacaucaucagaggcuggaucuucggcaccacacuggacagcaagacccagagccugcugaucgugaacaacgccaccaacguggucaucaaagugugcgaguuccaguucugcaacgaccccuuccugggcgucuacuaccacaagaacaacaagagcuggauggaaagcgaguuccggguguacagcagcgccaacaacugcaccuucgaguacgugucccagccuuuccugauggaccuggaaggcaagcagggcaacuucaagaaccugcgcgaguucguguuuaagaacaucgacggcuacuucaagaucuacagcaagcacaccccuaucaaccucgugcgggaucugccucagggcuucucugugcuggaaccccugguggaucugcccaucggcaucaacaucacccgguuucagacacugcuggcccugcacagaagcuaccugacaccuggcgauagcagcagcggauggacagcuggugccgccgcuuacuaugugggcuaccugcagccuagaaccuuccugcugaaguacaacgagaacggcaccaucaccgacgccguggauugugcucuggauccucugagcgagacaaagugcacccugaaguccuucaccguggaaaagggcaucuaccagaccagcaacuuccgggugcagcccaccgaauccaucgugcgguuccccaauaucaccaaucugugccccuucggcgagguguucaaugccaccagauucgccucuguguacgccuggaaccggaagcggaucagcaauugcguggccgacuacuccgugcuguacaacuccgccagcuucagcaccuucaagugcuacggcguguccccuaccaagcugaacgaccugugcuucacaaacguguacgccgacagcuucgugauccggggagaugaagugcggcagauugccccuggacagacaggcaagaucgccgacuacaacuacaagcugcccgacgacuucaccggcugugugauugccuggaacagcaacaaccuggacuccaaagucggcggcaacuacaauuaccuguaccggcuguuccggaaguccaaucugaagcccuucgagcgggacaucuccaccgagaucuaucaggccggcagcaccccuuguaacggcguggaaggcuucaacugcuacuucccacugcaguccuacggcuuucagcccacaaauggcgugggcuaucagcccuacagagugguggugcugagcuucgaacugcugcaugccccugccacagugugcggcccuaagaaaagcaccaaucucgugaagaacaaaugcgugaacuucaacuucaacggccugaccggcaccggcgugcugacagagagcaacaagaaguuccugccauuccagcaguuuggccgggauaucgccgauaccacagacgccguuagagauccccagacacuggaaauccuggacaucaccccuugcagcuucggcggagugucugugaucaccccuggcaccaacaccagcaaucagguggcagugcuguaccagggcgugaacuguaccgaagugcccguggccauucacgccgaucagcugacaccuacauggcggguguacuccaccggcagcaauguguuucagaccagagccggcugucugaucggagccgagcacgugaacaauagcuacgagugcgacauccccaucggcgcuggaaucugcgccagcuaccagacacagacaaacagcccucggagagccagaagcguggccagccagagcaucauugccuacacaaugucucugggcgccgagaacagcguggccuacuccaacaacucuaucgcuauccccaccaacuucaccaucagcgugaccacagagauccugccuguguccaugaccaagaccagcguggacugcaccauguacaucugcggcgauuccaccgagugcuccaaccugcugcugcaguacggcagcuucugcacccagcugaauagagcccugacagggaucgccguggaacaggacaagaacacccaagagguguucgcccaagugaagcagaucuacaagaccccuccuaucaaggacuucggcggcuucaauuucagccagauucugcccgauccuagcaagcccagcaagcggagcuucaucgaggaccugcuguucaacaaagugacacuggccgacgccggcuucaucaagcaguauggcgauugucugggcgacauugccgccagggaucugauuugcgcccagaaguuuaacggacugacagugcugccuccucugcugaccgaugagaugaucgcccaguacacaucugcccugcuggccggcacaaucacaagcggcuggacauuuggagcaggcgccgcucugcagauccccuuugcuaugcagauggccuaccgguucaacggcaucggagugacccagaaugugcuguacgagaaccagaagcugaucgccaaccaguucaacagcgccaucggcaagauccaggacagccugagcagcacagcaagcgcccugggaaagcugcaggacguggucaaccagaaugcccaggcacugaacacccuggucaagcagcuguccuccaacuucggcgccaucagcucugugcugaacgauauccugagcagacuggacccuccugaggccgaggugcagaucgacagacugaucacaggcagacugcagagccuccagacauacgugacccagcagcugaucagagccgccgagauuagagccucugccaaucuggccgccaccaagaugucugagugugugcugggccagagcaagagaguggacuuuugcggcaagggcuaccaccugaugagcuucccucagucugccccucacggcgugguguuucugcacgugacauaugugcccgcucaagagaagaauuucaccaccgcuccagccaucugccacgacggcaaagcccacuuuccuagagaaggcguguucguguccaacggcacccauugguucgugacacagcggaacuucuacgagccccagaucaucaccaccgacaacaccuucgugucuggcaacugcgacgucgugaucggcauugugaacaauaccguguacgacccucugcagcccgagcuggacagcuucaaagaggaacuggacaaguacuuuaagaaccacacaagccccgacguggaccugggcgauaucagcggaaucaaugccagcgucgugaacauccagaaagagaucgaccggcugaacgagguggccaagaaucugaacgagagccugaucgaccugcaagaacuggggaaguacgagcaguacaucaaguggcccugguacaucuggcugggcuuuaucgccggacugauugccaucgugauggucacaaucaugcuguguugcaugaccagcugcuguagcugccugaagggcuguuguagcuguggcagcugcugcaaguucgacgaggacgauucugagcccgugcugaagggcgugaaacugcacuacacaugaggacuagucccuguucccagagcccacuuuuuuuucuuuuuuugaaauaaaauagccugucuuucagaucuaaaaaaaaaaaaaaaaaaaaaaaaaaaaaaaaaaaaaaaaaaaaaaaaaaaaaaaaaaaaaaaaaaaaaaaaaaaaaaaaaaaaaaaaaaaaaaaaaaaa

SEQ ID NO: 24930 - RNA, 4070 nt, Artificial Sequence
  SARS-CoV-2/Wuhan/WIV05/2019__EPI_ISL_402128 spike protein mRNA gc mod (1-1273)(K986P_V987P_N439K_D614G)
aggagagucccgcagucggcguccagcggcucugcuuguucgugugugugucguugcaggccuuauucaagcuuaccauguucguguuccuggugcugcugccucugguguccagccagugugugaaccugaccaccagaacacagcugccuccagccuacaccaacagcuuuaccagaggcguguacuaccccgacaagguguucagauccagcgugcugcacucuacccaggaccuguuccugccuuucuucagcaacgugaccugguuccacgccauccacguguccggcaccaauggcaccaagagauucgacaaccccgugcugcccuucaacgacgggguguacuuugccagcaccgagaaguccaacaucaucagaggcuggaucuucggcaccacacuggacagcaagacccagagccugcugaucgugaacaacgccaccaacguggucaucaaagugugcgaguuccaguucugcaacgaccccuuccugggcgucuacuaccacaagaacaacaagagcuggauggaaagcgaguuccggguguacagcagcgccaacaacugcaccuucgaguacgugucccagccuuuccugauggaccuggaaggcaagcagggcaacuucaagaaccugcgcgaguucguguuuaagaacaucgacggcuacuucaagaucuacagcaagcacaccccuaucaaccucgugcgggaucugccucagggcuucucugcucuggaaccccugguggaucugcccaucggcaucaacaucacccgguuucagacacugcuggcccugcacagaagcuaccugacaccuggcgauagcagcagcggauggacagcuggugccgccgcuuacuaugugggcuaccugcagccuagaaccuuccugcugaaguacaacgagaacggcaccaucaccgacgccguggauugugcucuggauccucugagcgagacaaagugcacccugaaguccuucaccguggaaaagggcaucuaccagaccagcaacuuccgggugcagcccaccgaauccaucgugcgguuccccaauaucaccaaucugugccccuucggcgagguguucaaugccaccagauucgccucuguguacgccuggaaccggaagcggaucagcaauugcguggccgacuacuccgugcuguacaacuccgccagcuucagcaccuucaagugcuacggcguguccccuaccaagcugaacgaccugugcuucacaaacguguacgccgacagcuucgugauccggggagaugaagugcggcagauugccccuggacagacaggcaagaucgccgacuacaacuacaagcugcccgacgacuucaccggcugugugauugccuggaacagcaagaaccuggacuccaaagucggcggcaacuacaauuaccuguaccggcuguuccggaaguccaaucugaagcccuucgagcgggacaucuccaccgagaucuaucaggccggcagcaccccuuguaacggcguggaaggcuucaacugcuacuucccacugcaguccuacggcuuucagcccacaaauggcgugggcuaucagcccuacagagugguggugcugagcuucgaacugcugcaugccccugccacagugugcggcccuaagaaaagcaccaaucucgugaagaacaaaugcgugaacuucaacuucaacggccugaccggcaccggcgugcugacagagagcaacaagaaguuccugccauuccagcaguuuggccgggauaucgccgauaccacagacgccguuagagauccccagacacuggaaauccuggacaucaccccuugcagcuucggcggagugucugugaucaccccuggcaccaacaccagcaaucagguggcagugcuguaccagggcgugaacuguaccgaagugcccguggccauucacgccgaucagcugacaccuacauggcggguguacuccaccggcagcaauguguuucagaccagagccggcugucugaucggagccgagcacgugaacaauagcuacgagugcgacauccccaucggcgcuggaaucugcgccagcuaccagacacagacaaacagcccucggagagccagaagcguggccagccagagcaucauugccuacacaaugucucugggcgccgagaacagcguggccuacuccaacaacucuaucgcuauccccaccaacuucaccaucagcgugaccacagagauccugccuguguccaugaccaagaccagcguggacugcaccauguacaucugcggcgauuccaccgagugcuccaaccugcugcugcaguacggcagcuucugcacccagcugaauagagcccugacagggaucgccguggaacaggacaagaacacccaagagguguucgcccaagugaagcagaucuacaagaccccuccuaucaaggacuucggcggcuucaauuucagccagauucugcccgauccuagcaagcccagcaagcggagcuucaucgaggaccugcuguucaacaaagugacacuggccgacgccggcuucaucaagcaguauggcgauugucugggcgacauugccgccagggaucugauuugcgcccagaaguuuaacggacugacagugcugccuccucugcugaccgaugagaugaucgcccaguacacaucugcccugcuggccggcacaaucacaagcggcuggacauuuggagcaggcgccgcucugcagauccccuuugcuaugcagauggccuaccgguucaacggcaucggagugacccagaaugugcuguacgagaaccagaagcugaucgccaaccaguucaacagcgccaucggcaagauccaggacagccugagcagcacagcaagcgcccugggaaagcugcaggacguggucaaccagaaugcccaggcacugaacacccuggucaagcagcuguccuccaacuucggcgccaucagcucugugcugaacgauauccugagcagacuggacccuccugaggccgaggugcagaucgacagacugaucacaggcagacugcagagccuccagacauacgugacccagcagcugaucagagccgccgagauuagagccucugccaaucuggccgccaccaagaugucugagugugugcugggccagagcaagagaguggacuuuugcggcaagggcuaccaccugaugagcuucccucagucugccccucacggcgugguguuucugcacgugacauaugugcccgcucaagagaagaauuucaccaccgcuccagccaucugccacgacggcaaagcccacuuuccuagagaaggcguguucguguccaacggcacccauugguucgugacacagcggaacuucuacgagccccagaucaucaccaccgacaacaccuucgugucuggcaacugcgacgucgugaucggcauugugaacaauaccguguacgacccucugcagcccgagcuggacagcuucaaagaggaacuggacaaguacuuuaagaaccacacaagccccgacguggaccugggcgauaucagcggaaucaaugccagcgucgugaacauccagaaagagaucgaccggcugaacgagguggccaagaaucugaacgagagccugaucgaccugcaagaacuggggaaguacgagcaguacaucaaguggcccugguacaucuggcugggcuuuaucgccggacugauugccaucgugauggucacaaucaugcuguguugcaugaccagcugcuguagcugccugaagggcuguuguagcuguggcagcugcugcaaguucgacgaggacgauucugagcccgugcugaagggcgugaaacugcacuacacaugaggacuagucccuguucccagagcccacuuuuuuuucuuuuuuugaaauaaaauagccugucuuucagaucuaaaaaaaaaaaaaaaaaaaaaaaaaaaaaaaaaaaaaaaaaaaaaaaaaaaaaaaaaaaaaaaaaaaaaaaaaaaaaaaaaaaaaaaaaaaaaaaaaaaa

SEQ ID NO: 24931 - RNA, 4070 nt, Artificial Sequence
  SARS-CoV-2/Wuhan/WIV05/2019__EPI_ISL_402128 spike protein mRNA gc mod (1-1273)(K986P_V987P_S477N_D614G)
aggagagucccgcagucggcguccagcggcucugcuuguucgugugugugucguugcaggccuuauucaagcuuaccauguucguguuccuggugcugcugccucugguguccagccagugugugaaccugaccaccagaacacagcugccuccagccuacaccaacagcuuuaccagaggcguguacuaccccgacaagguguucagauccagcgugcugcacucuacccaggaccuguuccugccuuucuucagcaacgugaccugguuccacgccauccacguguccggcaccaauggcaccaagagauucgacaaccccgugcugcccuucaacgacgggguguacuuugccagcaccgagaaguccaacaucaucagaggcuggaucuucggcaccacacuggacagcaagacccagagccugcugaucgugaacaacgccaccaacguggucaucaaagugugcgaguuccaguucugcaacgaccccuuccugggcgucuacuaccacaagaacaacaagagcuggauggaaagcgaguuccggguguacagcagcgccaacaacugcaccuucgaguacgugucccagccuuuccugauggaccuggaaggcaagcagggcaacuucaagaaccugcgcgaguucguguuuaagaacaucgacggcuacuucaagaucuacagcaagcacaccccuaucaaccucgugcgggaucugccucagggcuucucugcucuggaaccccugguggaucugcccaucggcaucaacaucacccgguuucagacacugcuggcccugcacagaagcuaccugacaccuggcgauagcagcagcggauggacagcuggugccgccgcuuacuaugugggcuaccugcagccuagaaccuuccugcugaaguacaacgagaacggcaccaucaccgacgccguggauugugcucuggauccucugagcgagacaaagugcacccugaaguccuucaccguggaaaagggcaucuaccagaccagcaacuuccgggugcagcccaccgaauccaucgugcgguuccccaauaucaccaaucugugccccuucggcgagguguucaaugccaccagauucgccucuguguacgccuggaaccggaagcggaucagcaauugcguggccgacuacuccgugcuguacaacuccgccagcuucagcaccuucaagugcuacggcguguccccuaccaagcugaacgaccugugcuucacaaacguguacgccgacagcuucgugauccggggagaugaagugcggcagauugccccuggacagacaggcaagaucgccgacuacaacuacaagcugcccgacgacuucaccggcugugugauugccuggaacagcaacaaccuggacuccaaagucggcggcaacuacaauuaccuguaccggcuguuccggaaguccaaucugaagcccuucgagcgggacaucuccaccgagaucuaucaggccggcaacaccccuuguaacggcguggaaggcuucaacugcuacuucccacugcaguccuacggcuuucagcccacaaauggcgugggcuaucagcccuacagagugguggugcugagcuucgaacugcugcaugccccugccacagugugcggcccuaagaaaagcaccaaucucgugaagaacaaaugcgugaacuucaacuucaacggccugaccggcaccggcgugcugacagagagcaacaagaaguuccugccauuccagcaguuuggccgggauaucgccgauaccacagacgccguuagagauccccagacacuggaaauccuggacaucaccccuugcagcuucggcggagugucugugaucaccccuggcaccaacaccagcaaucagguggcagugcuguaccagggcgugaacuguaccgaagugcccguggccauucacgccgaucagcugacaccuacauggcggguguacuccaccggcagcaauguguuucagaccagagccggcugucugaucggagccgagcacgugaacaauagcuacgagugcgacauccccaucggcgcuggaaucugcgccagcuaccagacacagacaaacagcccucggagagccagaagcguggccagccagagcaucauugccuacacaaugucucugggcgccgagaacagcguggccuacuccaacaacucuaucgcuauccccaccaacuucaccaucagcgugaccacagagauccugccuguguccaugaccaagaccagcguggacugcaccauguacaucugcggcgauuccaccgagugcuccaaccugcugcugcaguacggcagcuucugcacccagcugaauagagcccugacagggaucgccguggaacaggacaagaacacccaagagguguucgcccaagugaagcagaucuacaagaccccuccuaucaaggacuucggcggcuucaauuucagccagauucugcccgauccuagcaagcccagcaagcggagcuucaucgaggaccugcuguucaacaaagugacacuggccgacgccggcuucaucaagcaguauggcgauugucugggcgacauugccgccagggaucugauuugcgcccagaaguuuaacggacugacagugcugccuccucugcugaccgaugagaugaucgcccaguacacaucugcccugcuggccggcacaaucacaagcggcuggacauuuggagcaggcgccgcucugcagauccccuuugcuaugcagauggccuaccgguucaacggcaucggagugacccagaaugugcuguacgagaaccagaagcugaucgccaaccaguucaacagcgccaucggcaagauccaggacagccugagcagcacagcaagcgcccugggaaagcugcaggacguggucaaccagaaugcccaggcacugaacacccuggucaagcagcuguccuccaacuucggcgccaucagcucugugcugaacgauauccugagcagacuggacccuccugaggccgaggugcagaucgacagacugaucacaggcagacugcagagccuccagacauacgugacccagcagcugaucagagccgccgagauuagagccucugccaaucuggccgccaccaagaugucugagugugugcugggccagagcaagagaguggacuuuugcggcaagggcuaccaccugaugagcuucccucagucugccccucacggcgugguguuucugcacgugacauaugugcccgcucaagagaagaauuucaccaccgcuccagccaucugccacgacggcaaagcccacuuuccuagagaaggcguguucguguccaacggcacccauugguucgugacacagcggaacuucuacgagccccagaucaucaccaccgacaacaccuucgugucuggcaacugcgacgucgugaucggcauugugaacaauaccguguacgacccucugcagcccgagcuggacagcuucaaagaggaacuggacaaguacuuuaagaaccacacaagccccgacguggaccugggcgauaucagcggaaucaaugccagcgucgugaacauccagaaagagaucgaccggcugaacgagguggccaagaaucugaacgagagccugaucgaccugcaagaacuggggaaguacgagcaguacaucaaguggcccugguacaucuggcugggcuuuaucgccggacugauugccaucgugauggucacaaucaugcuguguugcaugaccagcugcuguagcugccugaagggcuguuguagcuguggcagcugcugcaaguucgacgaggacgauucugagcccgugcugaagggcgugaaacugcacuacacaugaggacuagucccuguucccagagcccacuuuuuuuucuuuuuuugaaauaaaauagccugucuuucagaucuaaaaaaaaaaaaaaaaaaaaaaaaaaaaaaaaaaaaaaaaaaaaaaaaaaaaaaaaaaaaaaaaaaaaaaaaaaaaaaaaaaaaaaaaaaaaaaaaaaaa

SEQ ID NO: 24932 - RNA, 4070 nt, Artificial Sequence
  SARS-CoV-2/Wuhan/WIV05/2019__EPI_ISL_402128 spike protein mRNA gc mod (1-1273)(K986P_V987P_N501Y_D614G)
aggagagucccgcagucggcguccagcggcucugcuuguucgugugugugucguugcaggccuuauucaagcuuaccauguucguguuccuggugcugcugccucugguguccagccagugugugaaccugaccaccagaacacagcugccuccagccuacaccaacagcuuuaccagaggcguguacuaccccgacaagguguucagauccagcgugcugcacucuacccaggaccuguuccugccuuucuucagcaacgugaccugguuccacgccauccacguguccggcaccaauggcaccaagagauucgacaaccccgugcugcccuucaacgacgggguguacuuugccagcaccgagaaguccaacaucaucagaggcuggaucuucggcaccacacuggacagcaagacccagagccugcugaucgugaacaacgccaccaacguggucaucaaagugugcgaguuccaguucugcaacgaccccuuccugggcgucuacuaccacaagaacaacaagagcuggauggaaagcgaguuccggguguacagcagcgccaacaacugcaccuucgaguacgugucccagccuuuccugauggaccuggaaggcaagcagggcaacuucaagaaccugcgcgaguucguguuuaagaacaucgacggcuacuucaagaucuacagcaagcacaccccuaucaaccucgugcgggaucugccucagggcuucucugcucuggaaccccugguggaucugcccaucggcaucaacaucacccgguuucagacacugcuggcccugcacagaagcuaccugacaccuggcgauagcagcagcggauggacagcuggugccgccgcuuacuaugugggcuaccugcagccuagaaccuuccugcugaaguacaacgagaacggcaccaucaccgacgccguggauugugcucuggauccucugagcgagacaaagugcacccugaaguccuucaccguggaaaagggcaucuaccagaccagcaacuuccgggugcagcccaccgaauccaucgugcgguuccccaauaucaccaaucugugccccuucggcgagguguucaaugccaccagauucgccucuguguacgccuggaaccggaagcggaucagcaauugcguggccgacuacuccgugcuguacaacuccgccagcuucagcaccuucaagugcuacggcguguccccuaccaagcugaacgaccugugcuucacaaacguguacgccgacagcuucgugauccggggagaugaagugcggcagauugccccuggacagacaggcaagaucgccgacuacaacuacaagcugcccgacgacuucaccggcugugugauugccuggaacagcaacaaccuggacuccaaagucggcggcaacuacaauuaccuguaccggcuguuccggaaguccaaucugaagcccuucgagcgggacaucuccaccgagaucuaucaggccggcagcaccccuuguaacggcguggaaggcuucaacugcuacuucccacugcaguccuacggcuuucagcccacauacggcgugggcuaucagcccuacagagugguggugcugagcuucgaacugcugcaugccccugccacagugugcggcccuaagaaaagcaccaaucucgugaagaacaaaugcgugaacuucaacuucaacggccugaccggcaccggcgugcugacagagagcaacaagaaguuccugccauuccagcaguuuggccgggauaucgccgauaccacagacgccguuagagauccccagacacuggaaauccuggacaucaccccuugcagcuucggcggagugucugugaucaccccuggcaccaacaccagcaaucagguggcagugcuguaccagggcgugaacuguaccgaagugcccguggccauucacgccgaucagcugacaccuacauggcggguguacuccaccggcagcaauguguuucagaccagagccggcugucugaucggagccgagcacgugaacaauagcuacgagugcgacauccccaucggcgcuggaaucugcgccagcuaccagacacagacaaacagcccucggagagccagaagcguggccagccagagcaucauugccuacacaaugucucugggcgccgagaacagcguggccuacuccaacaacucuaucgcuauccccaccaacuucaccaucagcgugaccacagagauccugccuguguccaugaccaagaccagcguggacugcaccauguacaucugcggcgauuccaccgagugcuccaaccugcugcugcaguacggcagcuucugcacccagcugaauagagcccugacagggaucgccguggaacaggacaagaacacccaagagguguucgcccaagugaagcagaucuacaagaccccuccuaucaaggacuucggcggcuucaauuucagccagauucugcccgauccuagcaagcccagcaagcggagcuucaucgaggaccugcuguucaacaaagugacacuggccgacgccggcuucaucaagcaguauggcgauugucugggcgacauugccgccagggaucugauuugcgcccagaaguuuaacggacugacagugcugccuccucugcugaccgaugagaugaucgcccaguacacaucugcccugcuggccggcacaaucacaagcggcuggacauuuggagcaggcgccgcucugcagauccccuuugcuaugcagauggccuaccgguucaacggcaucggagugacccagaaugugcuguacgagaaccagaagcugaucgccaaccaguucaacagcgccaucggcaagauccaggacagccugagcagcacagcaagcgcccugggaaagcugcaggacguggucaaccagaaugcccaggcacugaacacccuggucaagcagcuguccuccaacuucggcgccaucagcucugugcugaacgauauccugagcagacuggacccuccugaggccgaggugcagaucgacagacugaucacaggcagacugcagagccuccagacauacgugacccagcagcugaucagagccgccgagauuagagccucugccaaucuggccgccaccaagaugucugagugugugcugggccagagcaagagaguggacuuuugcggcaagggcuaccaccugaugagcuucccucagucugccccucacggcgugguguuucugcacgugacauaugugcccgcucaagagaagaauuucaccaccgcuccagccaucugccacgacggcaaagcccacuuuccuagagaaggcguguucguguccaacggcacccauugguucgugacacagcggaacuucuacgagccccagaucaucaccaccgacaacaccuucgugucuggcaacugcgacgucgugaucggcauugugaacaauaccguguacgacccucugcagcccgagcuggacagcuucaaagaggaacuggacaaguacuuuaagaaccacacaagccccgacguggaccugggcgauaucagcggaaucaaugccagcgucgugaacauccagaaagagaucgaccggcugaacgagguggccaagaaucugaacgagagccugaucgaccugcaagaacuggggaaguacgagcaguacaucaaguggcccugguacaucuggcugggcuuuaucgccggacugauugccaucgugauggucacaaucaugcuguguugcaugaccagcugcuguagcugccugaagggcuguuguagcuguggcagcugcugcaaguucgacgaggacgauucugagcccgugcugaagggcgugaaacugcacuacacaugaggacuagucccuguucccagagcccacuuuuuuuucuuuuuuugaaauaaaauagccugucuuucagaucuaaaaaaaaaaaaaaaaaaaaaaaaaaaaaaaaaaaaaaaaaaaaaaaaaaaaaaaaaaaaaaaaaaaaaaaaaaaaaaaaaaaaaaaaaaaaaaaaaaaa

SEQ ID NO: 24933 - RNA, 4064 nt, Artificial Sequence
  SARS-CoV-2/Wuhan/WIV05/2019__EPI_ISL_402128 spike protein mRNA gc mod (1-1273)(K986P_V987P_H69del_V70del_D614G)
aggagagucccgcagucggcguccagcggcucugcuuguucgugugugugucguugcaggccuuauucaagcuuaccauguucguguuccuggugcugcugccucugguguccagccagugugugaaccugaccaccagaacacagcugccuccagccuacaccaacagcuuuaccagaggcguguacuaccccgacaagguguucagauccagcgugcugcacucuacccaggaccuguuccugccuuucuucagcaacgugaccugguuccacgccaucuccggcaccaauggcaccaagagauucgacaaccccgugcugcccuucaacgacgggguguacuuugccagcaccgagaaguccaacaucaucagaggcuggaucuucggcaccacacuggacagcaagacccagagccugcugaucgugaacaacgccaccaacguggucaucaaagugugcgaguuccaguucugcaacgaccccuuccugggcgucuacuaccacaagaacaacaagagcuggauggaaagcgaguuccggguguacagcagcgccaacaacugcaccuucgaguacgugucccagccuuuccugauggaccuggaaggcaagcagggcaacuucaagaaccugcgcgaguucguguuuaagaacaucgacggcuacuucaagaucuacagcaagcacaccccuaucaaccucgugcgggaucugccucagggcuucucugcucuggaaccccugguggaucugcccaucggcaucaacaucacccgguuucagacacugcuggcccugcacagaagcuaccugacaccuggcgauagcagcagcggauggacagcuggugccgccgcuuacuaugugggcuaccugcagccuagaaccuuccugcugaaguacaacgagaacggcaccaucaccgacgccguggauugugcucuggauccucugagcgagacaaagugcacccugaaguccuucaccguggaaaagggcaucuaccagaccagcaacuuccgggugcagcccaccgaauccaucgugcgguuccccaauaucaccaaucugugccccuucggcgagguguucaaugccaccagauucgccucuguguacgccuggaaccggaagcggaucagcaauugcguggccgacuacuccgugcuguacaacuccgccagcuucagcaccuucaagugcuacggcguguccccuaccaagcugaacgaccugugcuucacaaacguguacgccgacagcuucgugauccggggagaugaagugcggcagauugccccuggacagacaggcaagaucgccgacuacaacuacaagcugcccgacgacuucaccggcugugugauugccuggaacagcaacaaccuggacuccaaagucggcggcaacuacaauuaccuguaccggcuguuccggaaguccaaucugaagcccuucgagcgggacaucuccaccgagaucuaucaggccggcagcaccccuuguaacggcguggaaggcuucaacugcuacuucccacugcaguccuacggcuuucagcccacaaauggcgugggcuaucagcccuacagagugguggugcugagcuucgaacugcugcaugccccugccacagugugcggcccuaagaaaagcaccaaucucgugaagaacaaaugcgugaacuucaacuucaacggccugaccggcaccggcgugcugacagagagcaacaagaaguuccugccauuccagcaguuuggccgggauaucgccgauaccacagacgccguuagagauccccagacacuggaaauccuggacaucaccccuugcagcuucggcggagugucugugaucaccccuggcaccaacaccagcaaucagguggcagugcuguaccagggcgugaacuguaccgaagugcccguggccauucacgccgaucagcugacaccuacauggcggguguacuccaccggcagcaauguguuucagaccagagccggcugucugaucggagccgagcacgugaacaauagcuacgagugcgacauccccaucggcgcuggaaucugcgccagcuaccagacacagacaaacagcccucggagagccagaagcguggccagccagagcaucauugccuacacaaugucucugggcgccgagaacagcguggccuacuccaacaacucuaucgcuauccccaccaacuucaccaucagcgugaccacagagauccugccuguguccaugaccaagaccagcguggacugcaccauguacaucugcggcgauuccaccgagugcuccaaccugcugcugcaguacggcagcuucugcacccagcugaauagagcccugacagggaucgccguggaacaggacaagaacacccaagagguguucgcccaagugaagcagaucuacaagaccccuccuaucaaggacuucggcggcuucaauuucagccagauucugcccgauccuagcaagcccagcaagcggagcuucaucgaggaccugcuguucaacaaagugacacuggccgacgccggcuucaucaagcaguauggcgauugucugggcgacauugccgccagggaucugauuugcgcccagaaguuuaacggacugacagugcugccuccucugcugaccgaugagaugaucgcccaguacacaucugcccugcuggccggcacaaucacaagcggcuggacauuuggagcaggcgccgcucugcagauccccuuugcuaugcagauggccuaccgguucaacggcaucggagugacccagaaugugcuguacgagaaccagaagcugaucgccaaccaguucaacagcgccaucggcaagauccaggacagccugagcagcacagcaagcgcccugggaaagcugcaggacguggucaaccagaaugcccaggcacugaacacccuggucaagcagcuguccuccaacuucggcgccaucagcucugugcugaacgauauccugagcagacuggacccuccugaggccgaggugcagaucgacagacugaucacaggcagacugcagagccuccagacauacgugacccagcagcugaucagagccgccgagauuagagccucugccaaucuggccgccaccaagaugucugagugugugcugggccagagcaagagaguggacuuuugcggcaagggcuaccaccugaugagcuucccucagucugccccucacggcgugguguuucugcacgugacauaugugcccgcucaagagaagaauuucaccaccgcuccagccaucugccacgacggcaaagcccacuuuccuagagaaggcguguucguguccaacggcacccauugguucgugacacagcggaacuucuacgagccccagaucaucaccaccgacaacaccuucgugucuggcaacugcgacgucgugaucggcauugugaacaauaccguguacgacccucugcagcccgagcuggacagcuucaaagaggaacuggacaaguacuuuaagaaccacacaagccccgacguggaccugggcgauaucagcggaaucaaugccagcgucgugaacauccagaaagagaucgaccggcugaacgagguggccaagaaucugaacgagagccugaucgaccugcaagaacuggggaaguacgagcaguacaucaaguggcccugguacaucuggcugggcuuuaucgccggacugauugccaucgugauggucacaaucaugcuguguugcaugaccagcugcuguagcugccugaagggcuguuguagcuguggcagcugcugcaaguucgacgaggacgauucugagcccgugcugaagggcgugaaacugcacuacacaugaggacuagucccuguucccagagcccacuuuuuuuucuuuuuuugaaauaaaauagccugucuuucagaucuaaaaaaaaaaaaaaaaaaaaaaaaaaaaaaaaaaaaaaaaaaaaaaaaaaaaaaaaaaaaaaaaaaaaaaaaaaaaaaaaaaaaaaaaaaaaaaaaaaaa

SEQ ID NO: 24934 - RNA, 4070 nt, Artificial Sequence
  SARS-CoV-2/Wuhan/WIV05/2019__EPI_ISL_402128 spike protein mRNA gc mod (1-1273)(K986P_V987P_Y453F_D614G)
aggagagucccgcagucggcguccagcggcucugcuuguucgugugugugucguugcaggccuuauucaagcuuaccauguucguguuccuggugcugcugccucugguguccagccagugugugaaccugaccaccagaacacagcugccuccagccuacaccaacagcuuuaccagaggcguguacuaccccgacaagguguucagauccagcgugcugcacucuacccaggaccuguuccugccuuucuucagcaacgugaccugguuccacgccauccacguguccggcaccaauggcaccaagagauucgacaaccccgugcugcccuucaacgacgggguguacuuugccagcaccgagaaguccaacaucaucagaggcuggaucuucggcaccacacuggacagcaagacccagagccugcugaucgugaacaacgccaccaacguggucaucaaagugugcgaguuccaguucugcaacgaccccuuccugggcgucuacuaccacaagaacaacaagagcuggauggaaagcgaguuccggguguacagcagcgccaacaacugcaccuucgaguacgugucccagccuuuccugauggaccuggaaggcaagcagggcaacuucaagaaccugcgcgaguucguguuuaagaacaucgacggcuacuucaagaucuacagcaagcacaccccuaucaaccucgugcgggaucugccucagggcuucucugcucuggaaccccugguggaucugcccaucggcaucaacaucacccgguuucagacacugcuggcccugcacagaagcuaccugacaccuggcgauagcagcagcggauggacagcuggugccgccgcuuacuaugugggcuaccugcagccuagaaccuuccugcugaaguacaacgagaacggcaccaucaccgacgccguggauugugcucuggauccucugagcgagacaaagugcacccugaaguccuucaccguggaaaagggcaucuaccagaccagcaacuuccgggugcagcccaccgaauccaucgugcgguuccccaauaucaccaaucugugccccuucggcgagguguucaaugccaccagauucgccucuguguacgccuggaaccggaagcggaucagcaauugcguggccgacuacuccgugcuguacaacuccgccagcuucagcaccuucaagugcuacggcguguccccuaccaagcugaacgaccugugcuucacaaacguguacgccgacagcuucgugauccggggagaugaagugcggcagauugccccuggacagacaggcaagaucgccgacuacaacuacaagcugcccgacgacuucaccggcugugugauugccuggaacagcaacaaccuggacuccaaagucggcggcaacuacaauuaccuguuccggcuguuccggaaguccaaucugaagcccuucgagcgggacaucuccaccgagaucuaucaggccggcagcaccccuuguaacggcguggaaggcuucaacugcuacuucccacugcaguccuacggcuuucagcccacaaauggcgugggcuaucagcccuacagagugguggugcugagcuucgaacugcugcaugccccugccacagugugcggcccuaagaaaagcaccaaucucgugaagaacaaaugcgugaacuucaacuucaacggccugaccggcaccggcgugcugacagagagcaacaagaaguuccugccauuccagcaguuuggccgggauaucgccgauaccacagacgccguuagagauccccagacacuggaaauccuggacaucaccccuugcagcuucggcggagugucugugaucaccccuggcaccaacaccagcaaucagguggcagugcuguaccagggcgugaacuguaccgaagugcccguggccauucacgccgaucagcugacaccuacauggcggguguacuccaccggcagcaauguguuucagaccagagccggcugucugaucggagccgagcacgugaacaauagcuacgagugcgacauccccaucggcgcuggaaucugcgccagcuaccagacacagacaaacagcccucggagagccagaagcguggccagccagagcaucauugccuacacaaugucucugggcgccgagaacagcguggccuacuccaacaacucuaucgcuauccccaccaacuucaccaucagcgugaccacagagauccugccuguguccaugaccaagaccagcguggacugcaccauguacaucugcggcgauuccaccgagugcuccaaccugcugcugcaguacggcagcuucugcacccagcugaauagagcccugacagggaucgccguggaacaggacaagaacacccaagagguguucgcccaagugaagcagaucuacaagaccccuccuaucaaggacuucggcggcuucaauuucagccagauucugcccgauccuagcaagcccagcaagcggagcuucaucgaggaccugcuguucaacaaagugacacuggccgacgccggcuucaucaagcaguauggcgauugucugggcgacauugccgccagggaucugauuugcgcccagaaguuuaacggacugacagugcugccuccucugcugaccgaugagaugaucgcccaguacacaucugcccugcuggccggcacaaucacaagcggcuggacauuuggagcaggcgccgcucugcagauccccuuugcuaugcagauggccuaccgguucaacggcaucggagugacccagaaugugcuguacgagaaccagaagcugaucgccaaccaguucaacagcgccaucggcaagauccaggacagccugagcagcacagcaagcgcccugggaaagcugcaggacguggucaaccagaaugcccaggcacugaacacccuggucaagcagcuguccuccaacuucggcgccaucagcucugugcugaacgauauccugagcagacuggacccuccugaggccgaggugcagaucgacagacugaucacaggcagacugcagagccuccagacauacgugacccagcagcugaucagagccgccgagauuagagccucugccaaucuggccgccaccaagaugucugagugugugcugggccagagcaagagaguggacuuuugcggcaagggcuaccaccugaugagcuucccucagucugccccucacggcgugguguuucugcacgugacauaugugcccgcucaagagaagaauuucaccaccgcuccagccaucugccacgacggcaaagcccacuuuccuagagaaggcguguucguguccaacggcacccauugguucgugacacagcggaacuucuacgagccccagaucaucaccaccgacaacaccuucgugucuggcaacugcgacgucgugaucggcauugugaacaauaccguguacgacccucugcagcccgagcuggacagcuucaaagaggaacuggacaaguacuuuaagaaccacacaagccccgacguggaccugggcgauaucagcggaaucaaugccagcgucgugaacauccagaaagagaucgaccggcugaacgagguggccaagaaucugaacgagagccugaucgaccugcaagaacuggggaaguacgagcaguacaucaaguggcccugguacaucuggcugggcuuuaucgccggacugauugccaucgugauggucacaaucaugcuguguugcaugaccagcugcuguagcugccugaagggcuguuguagcuguggcagcugcugcaaguucgacgaggacgauucugagcccgugcugaagggcgugaaacugcacuacacaugaggacuagucccuguucccagagcccacuuuuuuuucuuuuuuugaaauaaaauagccugucuuucagaucuaaaaaaaaaaaaaaaaaaaaaaaaaaaaaaaaaaaaaaaaaaaaaaaaaaaaaaaaaaaaaaaaaaaaaaaaaaaaaaaaaaaaaaaaaaaaaaaaaaaa

SEQ ID NO: 24935 - RNA, 4070 nt, Artificial Sequence
  SARS-CoV-2/Wuhan/WIV05/2019__EPI_ISL_402128 spike protein mRNA gc mod (1-1273)(K986P_V987P_D614G_I692V)
aggagagucccgcagucggcguccagcggcucugcuuguucgugugugugucguugcaggccuuauucaagcuuaccauguucguguuccuggugcugcugccucugguguccagccagugugugaaccugaccaccagaacacagcugccuccagccuacaccaacagcuuuaccagaggcguguacuaccccgacaagguguucagauccagcgugcugcacucuacccaggaccuguuccugccuuucuucagcaacgugaccugguuccacgccauccacguguccggcaccaauggcaccaagagauucgacaaccccgugcugcccuucaacgacgggguguacuuugccagcaccgagaaguccaacaucaucagaggcuggaucuucggcaccacacuggacagcaagacccagagccugcugaucgugaacaacgccaccaacguggucaucaaagugugcgaguuccaguucugcaacgaccccuuccugggcgucuacuaccacaagaacaacaagagcuggauggaaagcgaguuccggguguacagcagcgccaacaacugcaccuucgaguacgugucccagccuuuccugauggaccuggaaggcaagcagggcaacuucaagaaccugcgcgaguucguguuuaagaacaucgacggcuacuucaagaucuacagcaagcacaccccuaucaaccucgugcgggaucugccucagggcuucucugcucuggaaccccugguggaucugcccaucggcaucaacaucacccgguuucagacacugcuggcccugcacagaagcuaccugacaccuggcgauagcagcagcggauggacagcuggugccgccgcuuacuaugugggcuaccugcagccuagaaccuuccugcugaaguacaacgagaacggcaccaucaccgacgccguggauugugcucuggauccucugagcgagacaaagugcacccugaaguccuucaccguggaaaagggcaucuaccagaccagcaacuuccgggugcagcccaccgaauccaucgugcgguuccccaauaucaccaaucugugccccuucggcgagguguucaaugccaccagauucgccucuguguacgccuggaaccggaagcggaucagcaauugcguggccgacuacuccgugcuguacaacuccgccagcuucagcaccuucaagugcuacggcguguccccuaccaagcugaacgaccugugcuucacaaacguguacgccgacagcuucgugauccggggagaugaagugcggcagauugccccuggacagacaggcaagaucgccgacuacaacuacaagcugcccgacgacuucaccggcugugugauugccuggaacagcaacaaccuggacuccaaagucggcggcaacuacaauuaccuguaccggcuguuccggaaguccaaucugaagcccuucgagcgggacaucuccaccgagaucuaucaggccggcagcaccccuuguaacggcguggaaggcuucaacugcuacuucccacugcaguccuacggcuuucagcccacaaauggcgugggcuaucagcccuacagagugguggugcugagcuucgaacugcugcaugccccugccacagugugcggcccuaagaaaagcaccaaucucgugaagaacaaaugcgugaacuucaacuucaacggccugaccggcaccggcgugcugacagagagcaacaagaaguuccugccauuccagcaguuuggccgggauaucgccgauaccacagacgccguuagagauccccagacacuggaaauccuggacaucaccccuugcagcuucggcggagugucugugaucaccccuggcaccaacaccagcaaucagguggcagugcuguaccagggcgugaacuguaccgaagugcccguggccauucacgccgaucagcugacaccuacauggcggguguacuccaccggcagcaauguguuucagaccagagccggcugucugaucggagccgagcacgugaacaauagcuacgagugcgacauccccaucggcgcuggaaucugcgccagcuaccagacacagacaaacagcccucggagagccagaagcguggccagccagagcgugauugccuacacaaugucucugggcgccgagaacagcguggccuacuccaacaacucuaucgcuauccccaccaacuucaccaucagcgugaccacagagauccugccuguguccaugaccaagaccagcguggacugcaccauguacaucugcggcgauuccaccgagugcuccaaccugcugcugcaguacggcagcuucugcacccagcugaauagagcccugacagggaucgccguggaacaggacaagaacacccaagagguguucgcccaagugaagcagaucuacaagaccccuccuaucaaggacuucggcggcuucaauuucagccagauucugcccgauccuagcaagcccagcaagcggagcuucaucgaggaccugcuguucaacaaagugacacuggccgacgccggcuucaucaagcaguauggcgauugucugggcgacauugccgccagggaucugauuugcgcccagaaguuuaacggacugacagugcugccuccucugcugaccgaugagaugaucgcccaguacacaucugcccugcuggccggcacaaucacaagcggcuggacauuuggagcaggcgccgcucugcagauccccuuugcuaugcagauggccuaccgguucaacggcaucggagugacccagaaugugcuguacgagaaccagaagcugaucgccaaccaguucaacagcgccaucggcaagauccaggacagccugagcagcacagcaagcgcccugggaaagcugcaggacguggucaaccagaaugcccaggcacugaacacccuggucaagcagcuguccuccaacuucggcgccaucagcucugugcugaacgauauccugagcagacuggacccuccugaggccgaggugcagaucgacagacugaucacaggcagacugcagagccuccagacauacgugacccagcagcugaucagagccgccgagauuagagccucugccaaucuggccgccaccaagaugucugagugugugcugggccagagcaagagaguggacuuuugcggcaagggcuaccaccugaugagcuucccucagucugccccucacggcgugguguuucugcacgugacauaugugcccgcucaagagaagaauuucaccaccgcuccagccaucugccacgacggcaaagcccacuuuccuagagaaggcguguucguguccaacggcacccauugguucgugacacagcggaacuucuacgagccccagaucaucaccaccgacaacaccuucgugucuggcaacugcgacgucgugaucggcauugugaacaauaccguguacgacccucugcagcccgagcuggacagcuucaaagaggaacuggacaaguacuuuaagaaccacacaagccccgacguggaccugggcgauaucagcggaaucaaugccagcgucgugaacauccagaaagagaucgaccggcugaacgagguggccaagaaucugaacgagagccugaucgaccugcaagaacuggggaaguacgagcaguacaucaaguggcccugguacaucuggcugggcuuuaucgccggacugauugccaucgugauggucacaaucaugcuguguugcaugaccagcugcuguagcugccugaagggcuguuguagcuguggcagcugcugcaaguucgacgaggacgauucugagcccgugcugaagggcgugaaacugcacuacacaugaggacuagucccuguucccagagcccacuuuuuuuucuuuuuuugaaauaaaauagccugucuuucagaucuaaaaaaaaaaaaaaaaaaaaaaaaaaaaaaaaaaaaaaaaaaaaaaaaaaaaaaaaaaaaaaaaaaaaaaaaaaaaaaaaaaaaaaaaaaaaaaaaaaaa

SEQ ID NO: 24936 - RNA, 4070 nt, Artificial Sequence
  SARS-CoV-2/Wuhan/WIV05/2019__EPI_ISL_402128 spike protein mRNA gc mod (1-1273)(K986P_V987P_D614G_M1229I)
aggagagucccgcagucggcguccagcggcucugcuuguucgugugugugucguugcaggccuuauucaagcuuaccauguucguguuccuggugcugcugccucugguguccagccagugugugaaccugaccaccagaacacagcugccuccagccuacaccaacagcuuuaccagaggcguguacuaccccgacaagguguucagauccagcgugcugcacucuacccaggaccuguuccugccuuucuucagcaacgugaccugguuccacgccauccacguguccggcaccaauggcaccaagagauucgacaaccccgugcugcccuucaacgacgggguguacuuugccagcaccgagaaguccaacaucaucagaggcuggaucuucggcaccacacuggacagcaagacccagagccugcugaucgugaacaacgccaccaacguggucaucaaagugugcgaguuccaguucugcaacgaccccuuccugggcgucuacuaccacaagaacaacaagagcuggauggaaagcgaguuccggguguacagcagcgccaacaacugcaccuucgaguacgugucccagccuuuccugauggaccuggaaggcaagcagggcaacuucaagaaccugcgcgaguucguguuuaagaacaucgacggcuacuucaagaucuacagcaagcacaccccuaucaaccucgugcgggaucugccucagggcuucucugcucuggaaccccugguggaucugcccaucggcaucaacaucacccgguuucagacacugcuggcccugcacagaagcuaccugacaccuggcgauagcagcagcggauggacagcuggugccgccgcuuacuaugugggcuaccugcagccuagaaccuuccugcugaaguacaacgagaacggcaccaucaccgacgccguggauugugcucuggauccucugagcgagacaaagugcacccugaaguccuucaccguggaaaagggcaucuaccagaccagcaacuuccgggugcagcccaccgaauccaucgugcgguuccccaauaucaccaaucugugccccuucggcgagguguucaaugccaccagauucgccucuguguacgccuggaaccggaagcggaucagcaauugcguggccgacuacuccgugcuguacaacuccgccagcuucagcaccuucaagugcuacggcguguccccuaccaagcugaacgaccugugcuucacaaacguguacgccgacagcuucgugauccggggagaugaagugcggcagauugccccuggacagacaggcaagaucgccgacuacaacuacaagcugcccgacgacuucaccggcugugugauugccuggaacagcaacaaccuggacuccaaagucggcggcaacuacaauuaccuguaccggcuguuccggaaguccaaucugaagcccuucgagcgggacaucuccaccgagaucuaucaggccggcagcaccccuuguaacggcguggaaggcuucaacugcuacuucccacugcaguccuacggcuuucagcccacaaauggcgugggcuaucagcccuacagagugguggugcugagcuucgaacugcugcaugccccugccacagugugcggcccuaagaaaagcaccaaucucgugaagaacaaaugcgugaacuucaacuucaacggccugaccggcaccggcgugcugacagagagcaacaagaaguuccugccauuccagcaguuuggccgggauaucgccgauaccacagacgccguuagagauccccagacacuggaaauccuggacaucaccccuugcagcuucggcggagugucugugaucaccccuggcaccaacaccagcaaucagguggcagugcuguaccagggcgugaacuguaccgaagugcccguggccauucacgccgaucagcugacaccuacauggcggguguacuccaccggcagcaauguguuucagaccagagccggcugucugaucggagccgagcacgugaacaauagcuacgagugcgacauccccaucggcgcuggaaucugcgccagcuaccagacacagacaaacagcccucggagagccagaagcguggccagccagagcaucauugccuacacaaugucucugggcgccgagaacagcguggccuacuccaacaacucuaucgcuauccccaccaacuucaccaucagcgugaccacagagauccugccuguguccaugaccaagaccagcguggacugcaccauguacaucugcggcgauuccaccgagugcuccaaccugcugcugcaguacggcagcuucugcacccagcugaauagagcccugacagggaucgccguggaacaggacaagaacacccaagagguguucgcccaagugaagcagaucuacaagaccccuccuaucaaggacuucggcggcuucaauuucagccagauucugcccgauccuagcaagcccagcaagcggagcuucaucgaggaccugcuguucaacaaagugacacuggccgacgccggcuucaucaagcaguauggcgauugucugggcgacauugccgccagggaucugauuugcgcccagaaguuuaacggacugacagugcugccuccucugcugaccgaugagaugaucgcccaguacacaucugcccugcuggccggcacaaucacaagcggcuggacauuuggagcaggcgccgcucugcagauccccuuugcuaugcagauggccuaccgguucaacggcaucggagugacccagaaugugcuguacgagaaccagaagcugaucgccaaccaguucaacagcgccaucggcaagauccaggacagccugagcagcacagcaagcgcccugggaaagcugcaggacguggucaaccagaaugcccaggcacugaacacccuggucaagcagcuguccuccaacuucggcgccaucagcucugugcugaacgauauccugagcagacuggacccuccugaggccgaggugcagaucgacagacugaucacaggcagacugcagagccuccagacauacgugacccagcagcugaucagagccgccgagauuagagccucugccaaucuggccgccaccaagaugucugagugugugcugggccagagcaagagaguggacuuuugcggcaagggcuaccaccugaugagcuucccucagucugccccucacggcgugguguuucugcacgugacauaugugcccgcucaagagaagaauuucaccaccgcuccagccaucugccacgacggcaaagcccacuuuccuagagaaggcguguucguguccaacggcacccauugguucgugacacagcggaacuucuacgagccccagaucaucaccaccgacaacaccuucgugucuggcaacugcgacgucgugaucggcauugugaacaauaccguguacgacccucugcagcccgagcuggacagcuucaaagaggaacuggacaaguacuuuaagaaccacacaagccccgacguggaccugggcgauaucagcggaaucaaugccagcgucgugaacauccagaaagagaucgaccggcugaacgagguggccaagaaucugaacgagagccugaucgaccugcaagaacuggggaaguacgagcaguacaucaaguggcccugguacaucuggcugggcuuuaucgccggacugauugccaucgugaucgucacaaucaugcuguguugcaugaccagcugcuguagcugccugaagggcuguuguagcuguggcagcugcugcaaguucgacgaggacgauucugagcccgugcugaagggcgugaaacugcacuacacaugaggacuagucccuguucccagagcccacuuuuuuuucuuuuuuugaaauaaaauagccugucuuucagaucuaaaaaaaaaaaaaaaaaaaaaaaaaaaaaaaaaaaaaaaaaaaaaaaaaaaaaaaaaaaaaaaaaaaaaaaaaaaaaaaaaaaaaaaaaaaaaaaaaaaa

SEQ ID NO: 24937 - RNA, 4064 nt, Artificial Sequence
  SARS-CoV-2/Wuhan/WIV05/2019__EPI_ISL_402128 spike protein mRNA gc mod (1-1273)(K986P_V987P_H69del_V70del_A222V_Y453F_S477N_D614G_I692V)
aggagagucccgcagucggcguccagcggcucugcuuguucgugugugugucguugcaggccuuauucaagcuuaccauguucguguuccuggugcugcugccucugguguccagccagugugugaaccugaccaccagaacacagcugccuccagccuacaccaacagcuuuaccagaggcguguacuaccccgacaagguguucagauccagcgugcugcacucuacccaggaccuguuccugccuuucuucagcaacgugaccugguuccacgccaucuccggcaccaauggcaccaagagauucgacaaccccgugcugcccuucaacgacgggguguacuuugccagcaccgagaaguccaacaucaucagaggcuggaucuucggcaccacacuggacagcaagacccagagccugcugaucgugaacaacgccaccaacguggucaucaaagugugcgaguuccaguucugcaacgaccccuuccugggcgucuacuaccacaagaacaacaagagcuggauggaaagcgaguuccggguguacagcagcgccaacaacugcaccuucgaguacgugucccagccuuuccugauggaccuggaaggcaagcagggcaacuucaagaaccugcgcgaguucguguuuaagaacaucgacggcuacuucaagaucuacagcaagcacaccccuaucaaccucgugcgggaucugccucagggcuucucugugcuggaaccccugguggaucugcccaucggcaucaacaucacccgguuucagacacugcuggcccugcacagaagcuaccugacaccuggcgauagcagcagcggauggacagcuggugccgccgcuuacuaugugggcuaccugcagccuagaaccuuccugcugaaguacaacgagaacggcaccaucaccgacgccguggauugugcucuggauccucugagcgagacaaagugcacccugaaguccuucaccguggaaaagggcaucuaccagaccagcaacuuccgggugcagcccaccgaauccaucgugcgguuccccaauaucaccaaucugugccccuucggcgagguguucaaugccaccagauucgccucuguguacgccuggaaccggaagcggaucagcaauugcguggccgacuacuccgugcuguacaacuccgccagcuucagcaccuucaagugcuacggcguguccccuaccaagcugaacgaccugugcuucacaaacguguacgccgacagcuucgugauccggggagaugaagugcggcagauugccccuggacagacaggcaagaucgccgacuacaacuacaagcugcccgacgacuucaccggcugugugauugccuggaacagcaacaaccuggacuccaaagucggcggcaacuacaauuaccuguuccggcuguuccggaaguccaaucugaagcccuucgagcgggacaucuccaccgagaucuaucaggccggcaacaccccuuguaacggcguggaaggcuucaacugcuacuucccacugcaguccuacggcuuucagcccacaaauggcgugggcuaucagcccuacagagugguggugcugagcuucgaacugcugcaugccccugccacagugugcggcccuaagaaaagcaccaaucucgugaagaacaaaugcgugaacuucaacuucaacggccugaccggcaccggcgugcugacagagagcaacaagaaguuccugccauuccagcaguuuggccgggauaucgccgauaccacagacgccguuagagauccccagacacuggaaauccuggacaucaccccuugcagcuucggcggagugucugugaucaccccuggcaccaacaccagcaaucagguggcagugcuguaccagggcgugaacuguaccgaagugcccguggccauucacgccgaucagcugacaccuacauggcggguguacuccaccggcagcaauguguuucagaccagagccggcugucugaucggagccgagcacgugaacaauagcuacgagugcgacauccccaucggcgcuggaaucugcgccagcuaccagacacagacaaacagcccucggagagccagaagcguggccagccagagcgugauugccuacacaaugucucugggcgccgagaacagcguggccuacuccaacaacucuaucgcuauccccaccaacuucaccaucagcgugaccacagagauccugccuguguccaugaccaagaccagcguggacugcaccauguacaucugcggcgauuccaccgagugcuccaaccugcugcugcaguacggcagcuucugcacccagcugaauagagcccugacagggaucgccguggaacaggacaagaacacccaagagguguucgcccaagugaagcagaucuacaagaccccuccuaucaaggacuucggcggcuucaauuucagccagauucugcccgauccuagcaagcccagcaagcggagcuucaucgaggaccugcuguucaacaaagugacacuggccgacgccggcuucaucaagcaguauggcgauugucugggcgacauugccgccagggaucugauuugcgcccagaaguuuaacggacugacagugcugccuccucugcugaccgaugagaugaucgcccaguacacaucugcccugcuggccggcacaaucacaagcggcuggacauuuggagcaggcgccgcucugcagauccccuuugcuaugcagauggccuaccgguucaacggcaucggagugacccagaaugugcuguacgagaaccagaagcugaucgccaaccaguucaacagcgccaucggcaagauccaggacagccugagcagcacagcaagcgcccugggaaagcugcaggacguggucaaccagaaugcccaggcacugaacacccuggucaagcagcuguccuccaacuucggcgccaucagcucugugcugaacgauauccugagcagacuggacccuccugaggccgaggugcagaucgacagacugaucacaggcagacugcagagccuccagacauacgugacccagcagcugaucagagccgccgagauuagagccucugccaaucuggccgccaccaagaugucugagugugugcugggccagagcaagagaguggacuuuugcggcaagggcuaccaccugaugagcuucccucagucugccccucacggcgugguguuucugcacgugacauaugugcccgcucaagagaagaauuucaccaccgcuccagccaucugccacgacggcaaagcccacuuuccuagagaaggcguguucguguccaacggcacccauugguucgugacacagcggaacuucuacgagccccagaucaucaccaccgacaacaccuucgugucuggcaacugcgacgucgugaucggcauugugaacaauaccguguacgacccucugcagcccgagcuggacagcuucaaagaggaacuggacaaguacuuuaagaaccacacaagccccgacguggaccugggcgauaucagcggaaucaaugccagcgucgugaacauccagaaagagaucgaccggcugaacgagguggccaagaaucugaacgagagccugaucgaccugcaagaacuggggaaguacgagcaguacaucaaguggcccugguacaucuggcugggcuuuaucgccggacugauugccaucgugauggucacaaucaugcuguguugcaugaccagcugcuguagcugccugaagggcuguuguagcuguggcagcugcugcaaguucgacgaggacgauucugagcccgugcugaagggcgugaaacugcacuacacaugaggacuagucccuguucccagagcccacuuuuuuuucuuuuuuugaaauaaaauagccugucuuucagaucuaaaaaaaaaaaaaaaaaaaaaaaaaaaaaaaaaaaaaaaaaaaaaaaaaaaaaaaaaaaaaaaaaaaaaaaaaaaaaaaaaaaaaaaaaaaaaaaaaaaa

SEQ ID NO: 24938 - RNA, 4064 nt, Artificial Sequence
  SARS-CoV-2/Wuhan/WIV05/2019__EPI_ISL_402128 spike protein mRNA gc mod (1-1273)(K986P_V987P_H69del_V70del_Y453F_D614G_I692V_M1229I)
aggagagucccgcagucggcguccagcggcucugcuuguucgugugugugucguugcaggccuuauucaagcuuaccauguucguguuccuggugcugcugccucugguguccagccagugugugaaccugaccaccagaacacagcugccuccagccuacaccaacagcuuuaccagaggcguguacuaccccgacaagguguucagauccagcgugcugcacucuacccaggaccuguuccugccuuucuucagcaacgugaccugguuccacgccaucuccggcaccaauggcaccaagagauucgacaaccccgugcugcccuucaacgacgggguguacuuugccagcaccgagaaguccaacaucaucagaggcuggaucuucggcaccacacuggacagcaagacccagagccugcugaucgugaacaacgccaccaacguggucaucaaagugugcgaguuccaguucugcaacgaccccuuccugggcgucuacuaccacaagaacaacaagagcuggauggaaagcgaguuccggguguacagcagcgccaacaacugcaccuucgaguacgugucccagccuuuccugauggaccuggaaggcaagcagggcaacuucaagaaccugcgcgaguucguguuuaagaacaucgacggcuacuucaagaucuacagcaagcacaccccuaucaaccucgugcgggaucugccucagggcuucucugcucuggaaccccugguggaucugcccaucggcaucaacaucacccgguuucagacacugcuggcccugcacagaagcuaccugacaccuggcgauagcagcagcggauggacagcuggugccgccgcuuacuaugugggcuaccugcagccuagaaccuuccugcugaaguacaacgagaacggcaccaucaccgacgccguggauugugcucuggauccucugagcgagacaaagugcacccugaaguccuucaccguggaaaagggcaucuaccagaccagcaacuuccgggugcagcccaccgaauccaucgugcgguuccccaauaucaccaaucugugccccuucggcgagguguucaaugccaccagauucgccucuguguacgccuggaaccggaagcggaucagcaauugcguggccgacuacuccgugcuguacaacuccgccagcuucagcaccuucaagugcuacggcguguccccuaccaagcugaacgaccugugcuucacaaacguguacgccgacagcuucgugauccggggagaugaagugcggcagauugccccuggacagacaggcaagaucgccgacuacaacuacaagcugcccgacgacuucaccggcugugugauugccuggaacagcaacaaccuggacuccaaagucggcggcaacuacaauuaccuguuccggcuguuccggaaguccaaucugaagcccuucgagcgggacaucuccaccgagaucuaucaggccggcagcaccccuuguaacggcguggaaggcuucaacugcuacuucccacugcaguccuacggcuuucagcccacaaauggcgugggcuaucagcccuacagagugguggugcugagcuucgaacugcugcaugccccugccacagugugcggcccuaagaaaagcaccaaucucgugaagaacaaaugcgugaacuucaacuucaacggccugaccggcaccggcgugcugacagagagcaacaagaaguuccugccauuccagcaguuuggccgggauaucgccgauaccacagacgccguuagagauccccagacacuggaaauccuggacaucaccccuugcagcuucggcggagugucugugaucaccccuggcaccaacaccagcaaucagguggcagugcuguaccagggcgugaacuguaccgaagugcccguggccauucacgccgaucagcugacaccuacauggcggguguacuccaccggcagcaauguguuucagaccagagccggcugucugaucggagccgagcacgugaacaauagcuacgagugcgacauccccaucggcgcuggaaucugcgccagcuaccagacacagacaaacagcccucggagagccagaagcguggccagccagagcgugauugccuacacaaugucucugggcgccgagaacagcguggccuacuccaacaacucuaucgcuauccccaccaacuucaccaucagcgugaccacagagauccugccuguguccaugaccaagaccagcguggacugcaccauguacaucugcggcgauuccaccgagugcuccaaccugcugcugcaguacggcagcuucugcacccagcugaauagagcccugacagggaucgccguggaacaggacaagaacacccaagagguguucgcccaagugaagcagaucuacaagaccccuccuaucaaggacuucggcggcuucaauuucagccagauucugcccgauccuagcaagcccagcaagcggagcuucaucgaggaccugcuguucaacaaagugacacuggccgacgccggcuucaucaagcaguauggcgauugucugggcgacauugccgccagggaucugauuugcgcccagaaguuuaacggacugacagugcugccuccucugcugaccgaugagaugaucgcccaguacacaucugcccugcuggccggcacaaucacaagcggcuggacauuuggagcaggcgccgcucugcagauccccuuugcuaugcagauggccuaccgguucaacggcaucggagugacccagaaugugcuguacgagaaccagaagcugaucgccaaccaguucaacagcgccaucggcaagauccaggacagccugagcagcacagcaagcgcccugggaaagcugcaggacguggucaaccagaaugcccaggcacugaacacccuggucaagcagcuguccuccaacuucggcgccaucagcucugugcugaacgauauccugagcagacuggacccuccugaggccgaggugcagaucgacagacugaucacaggcagacugcagagccuccagacauacgugacccagcagcugaucagagccgccgagauuagagccucugccaaucuggccgccaccaagaugucugagugugugcugggccagagcaagagaguggacuuuugcggcaagggcuaccaccugaugagcuucccucagucugccccucacggcgugguguuucugcacgugacauaugugcccgcucaagagaagaauuucaccaccgcuccagccaucugccacgacggcaaagcccacuuuccuagagaaggcguguucguguccaacggcacccauugguucgugacacagcggaacuucuacgagccccagaucaucaccaccgacaacaccuucgugucuggcaacugcgacgucgugaucggcauugugaacaauaccguguacgacccucugcagcccgagcuggacagcuucaaagaggaacuggacaaguacuuuaagaaccacacaagccccgacguggaccugggcgauaucagcggaaucaaugccagcgucgugaacauccagaaagagaucgaccggcugaacgagguggccaagaaucugaacgagagccugaucgaccugcaagaacuggggaaguacgagcaguacaucaaguggcccugguacaucuggcugggcuuuaucgccggacugauugccaucgugaucgucacaaucaugcuguguugcaugaccagcugcuguagcugccugaagggcuguuguagcuguggcagcugcugcaaguucgacgaggacgauucugagcccgugcugaagggcgugaaacugcacuacacaugaggacuagucccuguucccagagcccacuuuuuuuucuuuuuuugaaauaaaauagccugucuuucagaucuaaaaaaaaaaaaaaaaaaaaaaaaaaaaaaaaaaaaaaaaaaaaaaaaaaaaaaaaaaaaaaaaaaaaaaaaaaaaaaaaaaaaaaaaaaaaaaaaaaaa

SEQ ID NO: 24939 - RNA, 4061 nt, Artificial Sequence
  SARS-CoV-2/Wuhan/WIV05/2019__EPI_ISL_402128 spike protein mRNA gc mod (1-1273)(K986P_V987P_K986P_V987P_H69del_V70del_Y144del_N501Y_A570 D_D614G_P681H_T716I_S982A_D1118H)
aggagagucccgcagucggcguccagcggcucugcuuguucgugugugugucguugcaggccuuauucaagcuuaccauguucguguuccuggugcugcugccucugguguccagccagugugugaaccugaccaccagaacacagcugccuccagccuacaccaacagcuuuaccagaggcguguacuaccccgacaagguguucagauccagcgugcugcacucuacccaggaccuguuccugccuuucuucagcaacgugaccugguuccacgccaucuccggcaccaauggcaccaagagauucgacaaccccgugcugcccuucaacgacgggguguacuuugccagcaccgagaaguccaacaucaucagaggcuggaucuucggcaccacacuggacagcaagacccagagccugcugaucgugaacaacgccaccaacguggucaucaaagugugcgaguuccaguucugcaacgaccccuuccugggcgucuaccacaagaacaacaagagcuggauggaaagcgaguuccggguguacagcagcgccaacaacugcaccuucgaguacgugucccagccuuuccugauggaccuggaaggcaagcagggcaacuucaagaaccugcgcgaguucguguuuaagaacaucgacggcuacuucaagaucuacagcaagcacaccccuaucaaccucgugcgggaucugccucagggcuucucugcucuggaaccccugguggaucugcccaucggcaucaacaucacccgguuucagacacugcuggcccugcacagaagcuaccugacaccuggcgauagcagcagcggauggacagcuggugccgccgcuuacuaugugggcuaccugcagccuagaaccuuccugcugaaguacaacgagaacggcaccaucaccgacgccguggauugugcucuggauccucugagcgagacaaagugcacccugaaguccuucaccguggaaaagggcaucuaccagaccagcaacuuccgggugcagcccaccgaauccaucgugcgguuccccaauaucaccaaucugugccccuucggcgagguguucaaugccaccagauucgccucuguguacgccuggaaccggaagcggaucagcaauugcguggccgacuacuccgugcuguacaacuccgccagcuucagcaccuucaagugcuacggcguguccccuaccaagcugaacgaccugugcuucacaaacguguacgccgacagcuucgugauccggggagaugaagugcggcagauugccccuggacagacaggcaagaucgccgacuacaacuacaagcugcccgacgacuucaccggcugugugauugccuggaacagcaacaaccuggacuccaaagucggcggcaacuacaauuaccuguaccggcuguuccggaaguccaaucugaagcccuucgagcgggacaucuccaccgagaucuaucaggccggcagcaccccuuguaacggcguggaaggcuucaacugcuacuucccacugcaguccuacggcuuucagcccacauacggcgugggcuaucagcccuacagagugguggugcugagcuucgaacugcugcaugccccugccacagugugcggcccuaagaaaagcaccaaucucgugaagaacaaaugcgugaacuucaacuucaacggccugaccggcaccggcgugcugacagagagcaacaagaaguuccugccauuccagcaguuuggccgggauaucgacgauaccacagacgccguuagagauccccagacacuggaaauccuggacaucaccccuugcagcuucggcggagugucugugaucaccccuggcaccaacaccagcaaucagguggcagugcuguaccagggcgugaacuguaccgaagugcccguggccauucacgccgaucagcugacaccuacauggcggguguacuccaccggcagcaauguguuucagaccagagccggcugucugaucggagccgagcacgugaacaauagcuacgagugcgacauccccaucggcgcuggaaucugcgccagcuaccagacacagacaaacagccaccggagagccagaagcguggccagccagagcaucauugccuacacaaugucucugggcgccgagaacagcguggccuacuccaacaacucuaucgcuauccccaucaacuucaccaucagcgugaccacagagauccugccuguguccaugaccaagaccagcguggacugcaccauguacaucugcggcgauuccaccgagugcuccaaccugcugcugcaguacggcagcuucugcacccagcugaauagagcccugacagggaucgccguggaacaggacaagaacacccaagagguguucgcccaagugaagcagaucuacaagaccccuccuaucaaggacuucggcggcuucaauuucagccagauucugcccgauccuagcaagcccagcaagcggagcuucaucgaggaccugcuguucaacaaagugacacuggccgacgccggcuucaucaagcaguauggcgauugucugggcgacauugccgccagggaucugauuugcgcccagaaguuuaacggacugacagugcugccuccucugcugaccgaugagaugaucgcccaguacacaucugcccugcuggccggcacaaucacaagcggcuggacauuuggagcaggcgccgcucugcagauccccuuugcuaugcagauggccuaccgguucaacggcaucggagugacccagaaugugcuguacgagaaccagaagcugaucgccaaccaguucaacagcgccaucggcaagauccaggacagccugagcagcacagcaagcgcccugggaaagcugcaggacguggucaaccagaaugcccaggcacugaacacccuggucaagcagcuguccuccaacuucggcgccaucagcucugugcugaacgauauccuggccagacuggacccuccugaggccgaggugcagaucgacagacugaucacaggcagacugcagagccuccagacauacgugacccagcagcugaucagagccgccgagauuagagccucugccaaucuggccgccaccaagaugucugagugugugcugggccagagcaagagaguggacuuuugcggcaagggcuaccaccugaugagcuucccucagucugccccucacggcgugguguuucugcacgugacauaugugcccgcucaagagaagaauuucaccaccgcuccagccaucugccacgacggcaaagcccacuuuccuagagaaggcguguucguguccaacggcacccauugguucgugacacagcggaacuucuacgagccccagaucaucaccacccacaacaccuucgugucuggcaacugcgacgucgugaucggcauugugaacaauaccguguacgacccucugcagcccgagcuggacagcuucaaagaggaacuggacaaguacuuuaagaaccacacaagccccgacguggaccugggcgauaucagcggaaucaaugccagcgucgugaacauccagaaagagaucgaccggcugaacgagguggccaagaaucugaacgagagccugaucgaccugcaagaacuggggaaguacgagcaguacaucaaguggcccugguacaucuggcugggcuuuaucgccggacugauugccaucgugauggucacaaucaugcuguguugcaugaccagcugcuguagcugccugaagggcuguuguagcuguggcagcugcugcaaguucgacgaggacgauucugagcccgugcugaagggcgugaaacugcacuacacaugaggacuagucccuguucccagagcccacuuuuuuuucuuuuuuugaaauaaaauagccugucuuucagaucuaaaaaaaaaaaaaaaaaaaaaaaaaaaaaaaaaaaaaaaaaaaaaaaaaaaaaaaaaaaaaaaaaaaaaaaaaaaaaaaaaaaaaaaaaaaaaaaaaaaa

SEQ ID NO: 24940 - RNA, 4070 nt, Artificial Sequence
  SARS-CoV-2/Wuhan/WIV05/2019__EPI_ISL_402128 spike protein mRNA gc mod (1-1273)(K986P_V987P_K986P_V987P_K417N_E484K_N501Y_D614G)
aggagagucccgcagucggcguccagcggcucugcuuguucgugugugugucguugcaggccuuauucaagcuuaccauguucguguuccuggugcugcugccucugguguccagccagugugugaaccugaccaccagaacacagcugccuccagccuacaccaacagcuuuaccagaggcguguacuaccccgacaagguguucagauccagcgugcugcacucuacccaggaccuguuccugccuuucuucagcaacgugaccugguuccacgccauccacguguccggcaccaauggcaccaagagauucgacaaccccgugcugcccuucaacgacgggguguacuuugccagcaccgagaaguccaacaucaucagaggcuggaucuucggcaccacacuggacagcaagacccagagccugcugaucgugaacaacgccaccaacguggucaucaaagugugcgaguuccaguucugcaacgaccccuuccugggcgucuacuaccacaagaacaacaagagcuggauggaaagcgaguuccggguguacagcagcgccaacaacugcaccuucgaguacgugucccagccuuuccugauggaccuggaaggcaagcagggcaacuucaagaaccugcgcgaguucguguuuaagaacaucgacggcuacuucaagaucuacagcaagcacaccccuaucaaccucgugcgggaucugccucagggcuucucugcucuggaaccccugguggaucugcccaucggcaucaacaucacccgguuucagacacugcuggcccugcacagaagcuaccugacaccuggcgauagcagcagcggauggacagcuggugccgccgcuuacuaugugggcuaccugcagccuagaaccuuccugcugaaguacaacgagaacggcaccaucaccgacgccguggauugugcucuggauccucugagcgagacaaagugcacccugaaguccuucaccguggaaaagggcaucuaccagaccagcaacuuccgggugcagcccaccgaauccaucgugcgguuccccaauaucaccaaucugugccccuucggcgagguguucaaugccaccagauucgccucuguguacgccuggaaccggaagcggaucagcaauugcguggccgacuacuccgugcuguacaacuccgccagcuucagcaccuucaagugcuacggcguguccccuaccaagcugaacgaccugugcuucacaaacguguacgccgacagcuucgugauccggggagaugaagugcggcagauugccccuggacagacaggcaacaucgccgacuacaacuacaagcugcccgacgacuucaccggcugugugauugccuggaacagcaacaaccuggacuccaaagucggcggcaacuacaauuaccuguaccggcuguuccggaaguccaaucugaagcccuucgagcgggacaucuccaccgagaucuaucaggccggcagcaccccuuguaacggcgugaagggcuucaacugcuacuucccacugcaguccuacggcuuucagcccacauacggcgugggcuaucagcccuacagagugguggugcugagcuucgaacugcugcaugccccugccacagugugcggcccuaagaaaagcaccaaucucgugaagaacaaaugcgugaacuucaacuucaacggccugaccggcaccggcgugcugacagagagcaacaagaaguuccugccauuccagcaguuuggccgggauaucgccgauaccacagacgccguuagagauccccagacacuggaaauccuggacaucaccccuugcagcuucggcggagugucugugaucaccccuggcaccaacaccagcaaucagguggcagugcuguaccagggcgugaacuguaccgaagugcccguggccauucacgccgaucagcugacaccuacauggcggguguacuccaccggcagcaauguguuucagaccagagccggcugucugaucggagccgagcacgugaacaauagcuacgagugcgacauccccaucggcgcuggaaucugcgccagcuaccagacacagacaaacagcccucggagagccagaagcguggccagccagagcaucauugccuacacaaugucucugggcgccgagaacagcguggccuacuccaacaacucuaucgcuauccccaccaacuucaccaucagcgugaccacagagauccugccuguguccaugaccaagaccagcguggacugcaccauguacaucugcggcgauuccaccgagugcuccaaccugcugcugcaguacggcagcuucugcacccagcugaauagagcccugacagggaucgccguggaacaggacaagaacacccaagagguguucgcccaagugaagcagaucuacaagaccccuccuaucaaggacuucggcggcuucaauuucagccagauucugcccgauccuagcaagcccagcaagcggagcuucaucgaggaccugcuguucaacaaagugacacuggccgacgccggcuucaucaagcaguauggcgauugucugggcgacauugccgccagggaucugauuugcgcccagaaguuuaacggacugacagugcugccuccucugcugaccgaugagaugaucgcccaguacacaucugcccugcuggccggcacaaucacaagcggcuggacauuuggagcaggcgccgcucugcagauccccuuugcuaugcagauggccuaccgguucaacggcaucggagugacccagaaugugcuguacgagaaccagaagcugaucgccaaccaguucaacagcgccaucggcaagauccaggacagccugagcagcacagcaagcgcccugggaaagcugcaggacguggucaaccagaaugcccaggcacugaacacccuggucaagcagcuguccuccaacuucggcgccaucagcucugugcugaacgauauccugagcagacuggacccuccugaggccgaggugcagaucgacagacugaucacaggcagacugcagagccuccagacauacgugacccagcagcugaucagagccgccgagauuagagccucugccaaucuggccgccaccaagaugucugagugugugcugggccagagcaagagaguggacuuuugcggcaagggcuaccaccugaugagcuucccucagucugccccucacggcgugguguuucugcacgugacauaugugcccgcucaagagaagaauuucaccaccgcuccagccaucugccacgacggcaaagcccacuuuccuagagaaggcguguucguguccaacggcacccauugguucgugacacagcggaacuucuacgagccccagaucaucaccaccgacaacaccuucgugucuggcaacugcgacgucgugaucggcauugugaacaauaccguguacgacccucugcagcccgagcuggacagcuucaaagaggaacuggacaaguacuuuaagaaccacacaagccccgacguggaccugggcgauaucagcggaaucaaugccagcgucgugaacauccagaaagagaucgaccggcugaacgagguggccaagaaucugaacgagagccugaucgaccugcaagaacuggggaaguacgagcaguacaucaaguggcccugguacaucuggcugggcuuuaucgccggacugauugccaucgugauggucacaaucaugcuguguugcaugaccagcugcuguagcugccugaagggcuguuguagcuguggcagcugcugcaaguucgacgaggacgauucugagcccgugcugaagggcgugaaacugcacuacacaugaggacuagucccuguucccagagcccacuuuuuuuucuuuuuuugaaauaaaauagccugucuuucagaucuaaaaaaaaaaaaaaaaaaaaaaaaaaaaaaaaaaaaaaaaaaaaaaaaaaaaaaaaaaaaaaaaaaaaaaaaaaaaaaaaaaaaaaaaaaaaaaaaaaaa

SEQ ID NO: 24941 - RNA, 4061 nt, Artificial Sequence
  SARS-CoV-2/Wuhan/WIV05/2019__EPI_ISL_402128 spike protein mRNA gc mod (1-1273)(K986P_V987P_K986P_V987P_L18F_D80A_D215G_L242del_A243del_ L244del_R246I_K417N_E484K_N501Y_D614G_A701V)
aggagagucccgcagucggcguccagcggcucugcuuguucgugugugugucguugcaggccuuauucaagcuuaccauguucguguuccuggugcugcugccucugguguccagccagugugugaacuucaccaccagaacacagcugccuccagccuacaccaacagcuuuaccagaggcguguacuaccccgacaagguguucagauccagcgugcugcacucuacccaggaccuguuccugccuuucuucagcaacgugaccugguuccacgccauccacguguccggcaccaauggcaccaagagauucgccaaccccgugcugcccuucaacgacgggguguacuuugccagcaccgagaaguccaacaucaucagaggcuggaucuucggcaccacacuggacagcaagacccagagccugcugaucgugaacaacgccaccaacguggucaucaaagugugcgaguuccaguucugcaacgaccccuuccugggcgucuacuaccacaagaacaacaagagcuggauggaaagcgaguuccggguguacagcagcgccaacaacugcaccuucgaguacgugucccagccuuuccugauggaccuggaaggcaagcagggcaacuucaagaaccugcgcgaguucguguuuaagaacaucgacggcuacuucaagaucuacagcaagcacaccccuaucaaccucgugcggggccugccucagggcuucucugcucuggaaccccugguggaucugcccaucggcaucaacaucacccgguuucagacacugcacaucagcuaccugacaccuggcgauagcagcagcggauggacagcuggugccgccgcuuacuaugugggcuaccugcagccuagaaccuuccugcugaaguacaacgagaacggcaccaucaccgacgccguggauugugcucuggauccucugagcgagacaaagugcacccugaaguccuucaccguggaaaagggcaucuaccagaccagcaacuuccgggugcagcccaccgaauccaucgugcgguuccccaauaucaccaaucugugccccuucggcgagguguucaaugccaccagauucgccucuguguacgccuggaaccggaagcggaucagcaauugcguggccgacuacuccgugcuguacaacuccgccagcuucagcaccuucaagugcuacggcguguccccuaccaagcugaacgaccugugcuucacaaacguguacgccgacagcuucgugauccggggagaugaagugcggcagauugccccuggacagacaggcaacaucgccgacuacaacuacaagcugcccgacgacuucaccggcugugugauugccuggaacagcaacaaccuggacuccaaagucggcggcaacuacaauuaccuguaccggcuguuccggaaguccaaucugaagcccuucgagcgggacaucuccaccgagaucuaucaggccggcagcaccccuuguaacggcgugaagggcuucaacugcuacuucccacugcaguccuacggcuuucagcccacauacggcgugggcuaucagcccuacagagugguggugcugagcuucgaacugcugcaugccccugccacagugugcggcccuaagaaaagcaccaaucucgugaagaacaaaugcgugaacuucaacuucaacggccugaccggcaccggcgugcugacagagagcaacaagaaguuccugccauuccagcaguuuggccgggauaucgccgauaccacagacgccguuagagauccccagacacuggaaauccuggacaucaccccuugcagcuucggcggagugucugugaucaccccuggcaccaacaccagcaaucagguggcagugcuguaccagggcgugaacuguaccgaagugcccguggccauucacgccgaucagcugacaccuacauggcggguguacuccaccggcagcaauguguuucagaccagagccggcugucugaucggagccgagcacgugaacaauagcuacgagugcgacauccccaucggcgcuggaaucugcgccagcuaccagacacagacaaacagcccucggagagccagaagcguggccagccagagcaucauugccuacacaaugucucugggcguggagaacagcguggccuacuccaacaacucuaucgcuauccccaccaacuucaccaucagcgugaccacagagauccugccuguguccaugaccaagaccagcguggacugcaccauguacaucugcggcgauuccaccgagugcuccaaccugcugcugcaguacggcagcuucugcacccagcugaauagagcccugacagggaucgccguggaacaggacaagaacacccaagagguguucgcccaagugaagcagaucuacaagaccccuccuaucaaggacuucggcggcuucaauuucagccagauucugcccgauccuagcaagcccagcaagcggagcuucaucgaggaccugcuguucaacaaagugacacuggccgacgccggcuucaucaagcaguauggcgauugucugggcgacauugccgccagggaucugauuugcgcccagaaguuuaacggacugacagugcugccuccucugcugaccgaugagaugaucgcccaguacacaucugcccugcuggccggcacaaucacaagcggcuggacauuuggagcaggcgccgcucugcagauccccuuugcuaugcagauggccuaccgguucaacggcaucggagugacccagaaugugcuguacgagaaccagaagcugaucgccaaccaguucaacagcgccaucggcaagauccaggacagccugagcagcacagcaagcgcccugggaaagcugcaggacguggucaaccagaaugcccaggcacugaacacccuggucaagcagcuguccuccaacuucggcgccaucagcucugugcugaacgauauccugagcagacuggacccuccugaggccgaggugcagaucgacagacugaucacaggcagacugcagagccuccagacauacgugacccagcagcugaucagagccgccgagauuagagccucugccaaucuggccgccaccaagaugucugagugugugcugggccagagcaagagaguggacuuuugcggcaagggcuaccaccugaugagcuucccucagucugccccucacggcgugguguuucugcacgugacauaugugcccgcucaagagaagaauuucaccaccgcuccagccaucugccacgacggcaaagcccacuuuccuagagaaggcguguucguguccaacggcacccauugguucgugacacagcggaacuucuacgagccccagaucaucaccaccgacaacaccuucgugucuggcaacugcgacgucgugaucggcauugugaacaauaccguguacgacccucugcagcccgagcuggacagcuucaaagaggaacuggacaaguacuuuaagaaccacacaagccccgacguggaccugggcgauaucagcggaaucaaugccagcgucgugaacauccagaaagagaucgaccggcugaacgagguggccaagaaucugaacgagagccugaucgaccugcaagaacuggggaaguacgagcaguacaucaaguggcccugguacaucuggcugggcuuuaucgccggacugauugccaucgugauggucacaaucaugcuguguugcaugaccagcugcuguagcugccugaagggcuguuguagcuguggcagcugcugcaaguucgacgaggacgauucugagcccgugcugaagggcgugaaacugcacuacacaugaggacuagucccuguucccagagcccacuuuuuuuucuuuuuuugaaauaaaauagccugucuuucagaucuaaaaaaaaaaaaaaaaaaaaaaaaaaaaaaaaaaaaaaaaaaaaaaaaaaaaaaaaaaaaaaaaaaaaaaaaaaaaaaaaaaaaaaaaaaaaaaaaaaaa

SEQ ID NO: 24942 - RNA, 4070 nt, Artificial Sequence
  SARS-CoV-2/Wuhan/WIV05/2019__EPI_ISL_402128 spike protein mRNA gc mod (1-1273)(K986P_V987P_K986P_V987P_E484K_D614G)
aggagagucccgcagucggcguccagcggcucugcuuguucgugugugugucguugcaggccuuauucaagcuuaccauguucguguuccuggugcugcugccucugguguccagccagugugugaaccugaccaccagaacacagcugccuccagccuacaccaacagcuuuaccagaggcguguacuaccccgacaagguguucagauccagcgugcugcacucuacccaggaccuguuccugccuuucuucagcaacgugaccugguuccacgccauccacguguccggcaccaauggcaccaagagauucgacaaccccgugcugcccuucaacgacgggguguacuuugccagcaccgagaaguccaacaucaucagaggcuggaucuucggcaccacacuggacagcaagacccagagccugcugaucgugaacaacgccaccaacguggucaucaaagugugcgaguuccaguucugcaacgaccccuuccugggcgucuacuaccacaagaacaacaagagcuggauggaaagcgaguuccggguguacagcagcgccaacaacugcaccuucgaguacgugucccagccuuuccugauggaccuggaaggcaagcagggcaacuucaagaaccugcgcgaguucguguuuaagaacaucgacggcuacuucaagaucuacagcaagcacaccccuaucaaccucgugcgggaucugccucagggcuucucugcucuggaaccccugguggaucugcccaucggcaucaacaucacccgguuucagacacugcuggcccugcacagaagcuaccugacaccuggcgauagcagcagcggauggacagcuggugccgccgcuuacuaugugggcuaccugcagccuagaaccuuccugcugaaguacaacgagaacggcaccaucaccgacgccguggauugugcucuggauccucugagcgagacaaagugcacccugaaguccuucaccguggaaaagggcaucuaccagaccagcaacuuccgggugcagcccaccgaauccaucgugcgguuccccaauaucaccaaucugugccccuucggcgagguguucaaugccaccagauucgccucuguguacgccuggaaccggaagcggaucagcaauugcguggccgacuacuccgugcuguacaacuccgccagcuucagcaccuucaagugcuacggcguguccccuaccaagcugaacgaccugugcuucacaaacguguacgccgacagcuucgugauccggggagaugaagugcggcagauugccccuggacagacaggcaagaucgccgacuacaacuacaagcugcccgacgacuucaccggcugugugauugccuggaacagcaacaaccuggacuccaaagucggcggcaacuacaauuaccuguaccggcuguuccggaaguccaaucugaagcccuucgagcgggacaucuccaccgagaucuaucaggccggcagcaccccuuguaacggcgugaagggcuucaacugcuacuucccacugcaguccuacggcuuucagcccacaaauggcgugggcuaucagcccuacagagugguggugcugagcuucgaacugcugcaugccccugccacagugugcggcccuaagaaaagcaccaaucucgugaagaacaaaugcgugaacuucaacuucaacggccugaccggcaccggcgugcugacagagagcaacaagaaguuccugccauuccagcaguuuggccgggauaucgccgauaccacagacgccguuagagauccccagacacuggaaauccuggacaucaccccuugcagcuucggcggagugucugugaucaccccuggcaccaacaccagcaaucagguggcagugcuguaccagggcgugaacuguaccgaagugcccguggccauucacgccgaucagcugacaccuacauggcggguguacuccaccggcagcaauguguuucagaccagagccggcugucugaucggagccgagcacgugaacaauagcuacgagugcgacauccccaucggcgcuggaaucugcgccagcuaccagacacagacaaacagcccucggagagccagaagcguggccagccagagcaucauugccuacacaaugucucugggcgccgagaacagcguggccuacuccaacaacucuaucgcuauccccaccaacuucaccaucagcgugaccacagagauccugccuguguccaugaccaagaccagcguggacugcaccauguacaucugcggcgauuccaccgagugcuccaaccugcugcugcaguacggcagcuucugcacccagcugaauagagcccugacagggaucgccguggaacaggacaagaacacccaagagguguucgcccaagugaagcagaucuacaagaccccuccuaucaaggacuucggcggcuucaauuucagccagauucugcccgauccuagcaagcccagcaagcggagcuucaucgaggaccugcuguucaacaaagugacacuggccgacgccggcuucaucaagcaguauggcgauugucugggcgacauugccgccagggaucugauuugcgcccagaaguuuaacggacugacagugcugccuccucugcugaccgaugagaugaucgcccaguacacaucugcccugcuggccggcacaaucacaagcggcuggacauuuggagcaggcgccgcucugcagauccccuuugcuaugcagauggccuaccgguucaacggcaucggagugacccagaaugugcuguacgagaaccagaagcugaucgccaaccaguucaacagcgccaucggcaagauccaggacagccugagcagcacagcaagcgcccugggaaagcugcaggacguggucaaccagaaugcccaggcacugaacacccuggucaagcagcuguccuccaacuucggcgccaucagcucugugcugaacgauauccugagcagacuggacccuccugaggccgaggugcagaucgacagacugaucacaggcagacugcagagccuccagacauacgugacccagcagcugaucagagccgccgagauuagagccucugccaaucuggccgccaccaagaugucugagugugugcugggccagagcaagagaguggacuuuugcggcaagggcuaccaccugaugagcuucccucagucugccccucacggcgugguguuucugcacgugacauaugugcccgcucaagagaagaauuucaccaccgcuccagccaucugccacgacggcaaagcccacuuuccuagagaaggcguguucguguccaacggcacccauugguucgugacacagcggaacuucuacgagccccagaucaucaccaccgacaacaccuucgugucuggcaacugcgacgucgugaucggcauugugaacaauaccguguacgacccucugcagcccgagcuggacagcuucaaagaggaacuggacaaguacuuuaagaaccacacaagccccgacguggaccugggcgauaucagcggaaucaaugccagcgucgugaacauccagaaagagaucgaccggcugaacgagguggccaagaaucugaacgagagccugaucgaccugcaagaacuggggaaguacgagcaguacaucaaguggcccugguacaucuggcugggcuuuaucgccggacugauugccaucgugauggucacaaucaugcuguguugcaugaccagcugcuguagcugccugaagggcuguuguagcuguggcagcugcugcaaguucgacgaggacgauucugagcccgugcugaagggcgugaaacugcacuacacaugaggacuagucccuguucccagagcccacuuuuuuuucuuuuuuugaaauaaaauagccugucuuucagaucuaaaaaaaaaaaaaaaaaaaaaaaaaaaaaaaaaaaaaaaaaaaaaaaaaaaaaaaaaaaaaaaaaaaaaaaaaaaaaaaaaaaaaaaaaaaaaaaaaaaa

SEQ ID NO: 24943 - RNA, 4070 nt, Artificial Sequence
  SARS-CoV-2/Wuhan/WIV05/2019__EPI_ISL_402128 spike protein mRNA gc mod (1-1273)(K986P_V987P_K986P_V987P_L18F_T20N_P26S_D138Y_R190S_K417T _E484K_N501Y_D614G_H655Y_T1027I)
aggagagucccgcagucggcguccagcggcucugcuuguucgugugugugucguugcaggccuuauucaagcuuaccauguucguguuccuggugcugcugccucugguguccagccagugugugaacuucaccaacagaacacagcugccuagcgccuacaccaacagcuuuaccagaggcguguacuaccccgacaagguguucagauccagcgugcugcacucuacccaggaccuguuccugccuuucuucagcaacgugaccugguuccacgccauccacguguccggcaccaauggcaccaagagauucgacaaccccgugcugcccuucaacgacgggguguacuuugccagcaccgagaaguccaacaucaucagaggcuggaucuucggcaccacacuggacagcaagacccagagccugcugaucgugaacaacgccaccaacguggucaucaaagugugcgaguuccaguucugcaacuaccccuuccugggcgucuacuaccacaagaacaacaagagcuggauggaaagcgaguuccggguguacagcagcgccaacaacugcaccuucgaguacgugucccagccuuuccugauggaccuggaaggcaagcagggcaacuucaagaaccugagcgaguucguguuuaagaacaucgacggcuacuucaagaucuacagcaagcacaccccuaucaaccucgugcgggaucugccucagggcuucucugcucuggaaccccugguggaucugcccaucggcaucaacaucacccgguuucagacacugcuggcccugcacagaagcuaccugacaccuggcgauagcagcagcggauggacagcuggugccgccgcuuacuaugugggcuaccugcagccuagaaccuuccugcugaaguacaacgagaacggcaccaucaccgacgccguggauugugcucuggauccucugagcgagacaaagugcacccugaaguccuucaccguggaaaagggcaucuaccagaccagcaacuuccgggugcagcccaccgaauccaucgugcgguuccccaauaucaccaaucugugccccuucggcgagguguucaaugccaccagauucgccucuguguacgccuggaaccggaagcggaucagcaauugcguggccgacuacuccgugcuguacaacuccgccagcuucagcaccuucaagugcuacggcguguccccuaccaagcugaacgaccugugcuucacaaacguguacgccgacagcuucgugauccggggagaugaagugcggcagauugccccuggacagacaggcaccaucgccgacuacaacuacaagcugcccgacgacuucaccggcugugugauugccuggaacagcaacaaccuggacuccaaagucggcggcaacuacaauuaccuguaccggcuguuccggaaguccaaucugaagcccuucgagcgggacaucuccaccgagaucuaucaggccggcagcaccccuuguaacggcgugaagggcuucaacugcuacuucccacugcaguccuacggcuuucagcccacauacggcgugggcuaucagcccuacagagugguggugcugagcuucgaacugcugcaugccccugccacagugugcggcccuaagaaaagcaccaaucucgugaagaacaaaugcgugaacuucaacuucaacggccugaccggcaccggcgugcugacagagagcaacaagaaguuccugccauuccagcaguuuggccgggauaucgccgauaccacagacgccguuagagauccccagacacuggaaauccuggacaucaccccuugcagcuucggcggagugucugugaucaccccuggcaccaacaccagcaaucagguggcagugcuguaccagggcgugaacuguaccgaagugcccguggccauucacgccgaucagcugacaccuacauggcggguguacuccaccggcagcaauguguuucagaccagagccggcugucugaucggagccgaguacgugaacaauagcuacgagugcgacauccccaucggcgcuggaaucugcgccagcuaccagacacagacaaacagcccucggagagccagaagcguggccagccagagcaucauugccuacacaaugucucugggcgccgagaacagcguggccuacuccaacaacucuaucgcuauccccaccaacuucaccaucagcgugaccacagagauccugccuguguccaugaccaagaccagcguggacugcaccauguacaucugcggcgauuccaccgagugcuccaaccugcugcugcaguacggcagcuucugcacccagcugaauagagcccugacagggaucgccguggaacaggacaagaacacccaagagguguucgcccaagugaagcagaucuacaagaccccuccuaucaaggacuucggcggcuucaauuucagccagauucugcccgauccuagcaagcccagcaagcggagcuucaucgaggaccugcuguucaacaaagugacacuggccgacgccggcuucaucaagcaguauggcgauugucugggcgacauugccgccagggaucugauuugcgcccagaaguuuaacggacugacagugcugccuccucugcugaccgaugagaugaucgcccaguacacaucugcccugcuggccggcacaaucacaagcggcuggacauuuggagcaggcgccgcucugcagauccccuuugcuaugcagauggccuaccgguucaacggcaucggagugacccagaaugugcuguacgagaaccagaagcugaucgccaaccaguucaacagcgccaucggcaagauccaggacagccugagcagcacagcaagcgcccugggaaagcugcaggacguggucaaccagaaugcccaggcacugaacacccuggucaagcagcuguccuccaacuucggcgccaucagcucugugcugaacgauauccugagcagacuggacccuccugaggccgaggugcagaucgacagacugaucacaggcagacugcagagccuccagacauacgugacccagcagcugaucagagccgccgagauuagagccucugccaaucuggccgccaucaagaugucugagugugugcugggccagagcaagagaguggacuuuugcggcaagggcuaccaccugaugagcuucccucagucugccccucacggcgugguguuucugcacgugacauaugugcccgcucaagagaagaauuucaccaccgcuccagccaucugccacgacggcaaagcccacuuuccuagagaaggcguguucguguccaacggcacccauugguucgugacacagcggaacuucuacgagccccagaucaucaccaccgacaacaccuucgugucuggcaacugcgacgucgugaucggcauugugaacaauaccguguacgacccucugcagcccgagcuggacagcuucaaagaggaacuggacaaguacuuuaagaaccacacaagccccgacguggaccugggcgauaucagcggaaucaaugccagcgucgugaacauccagaaagagaucgaccggcugaacgagguggccaagaaucugaacgagagccugaucgaccugcaagaacuggggaaguacgagcaguacaucaaguggcccugguacaucuggcugggcuuuaucgccggacugauugccaucgugauggucacaaucaugcuguguugcaugaccagcugcuguagcugccugaagggcuguuguagcuguggcagcugcugcaaguucgacgaggacgauucugagcccgugcugaagggcgugaaacugcacuacacaugaggacuagucccuguucccagagcccacuuuuuuuucuuuuuuugaaauaaaauagccugucuuucagaucuaaaaaaaaaaaaaaaaaaaaaaaaaaaaaaaaaaaaaaaaaaaaaaaaaaaaaaaaaaaaaaaaaaaaaaaaaaaaaaaaaaaaaaaaaaaaaaaaaaaa

SEQ ID NO: 24944 - RNA, 4070 nt, Artificial Sequence
  SARS-CoV-2/Wuhan/WIV05/2019__EPI_ISL_402128 spike protein mRNA gc mod (1-1273)(K986P_V987P_K986P_V987P_S13I_W152C_L452R_D614G)
aggagagucccgcagucggcguccagcggcucugcuuguucgugugugugucguugcaggccuuauucaagcuuaccauguucguguuccuggugcugcugccucugguguccauccagugugugaaccugaccaccagaacacagcugccuccagccuacaccaacagcuuuaccagaggcguguacuaccccgacaagguguucagauccagcgugcugcacucuacccaggaccuguuccugccuuucuucagcaacgugaccugguuccacgccauccacguguccggcaccaauggcaccaagagauucgacaaccccgugcugcccuucaacgacgggguguacuuugccagcaccgagaaguccaacaucaucagaggcuggaucuucggcaccacacuggacagcaagacccagagccugcugaucgugaacaacgccaccaacguggucaucaaagugugcgaguuccaguucugcaacgaccccuuccugggcgucuacuaccacaagaacaacaagagcugcauggaaagcgaguuccggguguacagcagcgccaacaacugcaccuucgaguacgugucccagccuuuccugauggaccuggaaggcaagcagggcaacuucaagaaccugcgcgaguucguguuuaagaacaucgacggcuacuucaagaucuacagcaagcacaccccuaucaaccucgugcgggaucugccucagggcuucucugcucuggaaccccugguggaucugcccaucggcaucaacaucacccgguuucagacacugcuggcccugcacagaagcuaccugacaccuggcgauagcagcagcggauggacagcuggugccgccgcuuacuaugugggcuaccugcagccuagaaccuuccugcugaaguacaacgagaacggcaccaucaccgacgccguggauugugcucuggauccucugagcgagacaaagugcacccugaaguccuucaccguggaaaagggcaucuaccagaccagcaacuuccgggugcagcccaccgaauccaucgugcgguuccccaauaucaccaaucugugccccuucggcgagguguucaaugccaccagauucgccucuguguacgccuggaaccggaagcggaucagcaauugcguggccgacuacuccgugcuguacaacuccgccagcuucagcaccuucaagugcuacggcguguccccuaccaagcugaacgaccugugcuucacaaacguguacgccgacagcuucgugauccggggagaugaagugcggcagauugccccuggacagacaggcaagaucgccgacuacaacuacaagcugcccgacgacuucaccggcugugugauugccuggaacagcaacaaccuggacuccaaagucggcggcaacuacaauuaccgcuaccggcuguuccggaaguccaaucugaagcccuucgagcgggacaucuccaccgagaucuaucaggccggcagcaccccuuguaacggcguggaaggcuucaacugcuacuucccacugcaguccuacggcuuucagcccacaaauggcgugggcuaucagcccuacagagugguggugcugagcuucgaacugcugcaugccccugccacagugugcggcccuaagaaaagcaccaaucucgugaagaacaaaugcgugaacuucaacuucaacggccugaccggcaccggcgugcugacagagagcaacaagaaguuccugccauuccagcaguuuggccgggauaucgccgauaccacagacgccguuagagauccccagacacuggaaauccuggacaucaccccuugcagcuucggcggagugucugugaucaccccuggcaccaacaccagcaaucagguggcagugcuguaccagggcgugaacuguaccgaagugcccguggccauucacgccgaucagcugacaccuacauggcggguguacuccaccggcagcaauguguuucagaccagagccggcugucugaucggagccgagcacgugaacaauagcuacgagugcgacauccccaucggcgcuggaaucugcgccagcuaccagacacagacaaacagcccucggagagccagaagcguggccagccagagcaucauugccuacacaaugucucugggcgccgagaacagcguggccuacuccaacaacucuaucgcuauccccaccaacuucaccaucagcgugaccacagagauccugccuguguccaugaccaagaccagcguggacugcaccauguacaucugcggcgauuccaccgagugcuccaaccugcugcugcaguacggcagcuucugcacccagcugaauagagcccugacagggaucgccguggaacaggacaagaacacccaagagguguucgcccaagugaagcagaucuacaagaccccuccuaucaaggacuucggcggcuucaauuucagccagauucugcccgauccuagcaagcccagcaagcggagcuucaucgaggaccugcuguucaacaaagugacacuggccgacgccggcuucaucaagcaguauggcgauugucugggcgacauugccgccagggaucugauuugcgcccagaaguuuaacggacugacagugcugccuccucugcugaccgaugagaugaucgcccaguacacaucugcccugcuggccggcacaaucacaagcggcuggacauuuggagcaggcgccgcucugcagauccccuuugcuaugcagauggccuaccgguucaacggcaucggagugacccagaaugugcuguacgagaaccagaagcugaucgccaaccaguucaacagcgccaucggcaagauccaggacagccugagcagcacagcaagcgcccugggaaagcugcaggacguggucaaccagaaugcccaggcacugaacacccuggucaagcagcuguccuccaacuucggcgccaucagcucugugcugaacgauauccugagcagacuggacccuccugaggccgaggugcagaucgacagacugaucacaggcagacugcagagccuccagacauacgugacccagcagcugaucagagccgccgagauuagagccucugccaaucuggccgccaccaagaugucugagugugugcugggccagagcaagagaguggacuuuugcggcaagggcuaccaccugaugagcuucccucagucugccccucacggcgugguguuucugcacgugacauaugugcccgcucaagagaagaauuucaccaccgcuccagccaucugccacgacggcaaagcccacuuuccuagagaaggcguguucguguccaacggcacccauugguucgugacacagcggaacuucuacgagccccagaucaucaccaccgacaacaccuucgugucuggcaacugcgacgucgugaucggcauugugaacaauaccguguacgacccucugcagcccgagcuggacagcuucaaagaggaacuggacaaguacuuuaagaaccacacaagccccgacguggaccugggcgauaucagcggaaucaaugccagcgucgugaacauccagaaagagaucgaccggcugaacgagguggccaagaaucugaacgagagccugaucgaccugcaagaacuggggaaguacgagcaguacaucaaguggcccugguacaucuggcugggcuuuaucgccggacugauugccaucgugauggucacaaucaugcuguguugcaugaccagcugcuguagcugccugaagggcuguuguagcuguggcagcugcugcaaguucgacgaggacgauucugagcccgugcugaagggcgugaaacugcacuacacaugaggacuagucccuguucccagagcccacuuuuuuuucuuuuuuugaaauaaaauagccugucuuucagaucuaaaaaaaaaaaaaaaaaaaaaaaaaaaaaaaaaaaaaaaaaaaaaaaaaaaaaaaaaaaaaaaaaaaaaaaaaaaaaaaaaaaaaaaaaaaaaaaaaaaa

SEQ ID NO: 24945 - RNA, 1497 nt, Artificial Sequence
  SARS-CoV-2/Wuhan/WIV05/2019__EPI_ISL_402128 spike protein mRNA gc (1-15,334-528) Ferritin construct
aggagagggcgcuuggcuugcaaggacccugagcugcggcauugaagcacacccaacccaacucgacugaagucagccucacugaaccggaucugagaaucuucucucucugggcuugccagggcucuccgaaccuagcuagcauccucuucaauuccaacuagaaagcuuaccauguucguguuccugguccuccugccccuggugagcucccagugcaaccugugccccuucggcgagguguucaacgccacccgguucgccagcgucuacgccuggaaccgcaagcggaucuccaacugcguggcggacuacagcgugcuguacaacuccgccagcuucuccacguucaagugcuacggcgucagccccaccaagcucaacgaccugugcuucaccaacguguacgccgacuccuucgugauccgcggggacgagguccggcagaucgcccccggccagaccgggaagaucgccgacuacaacuacaagcugccggacgacuucacgggcugcgugaucgcguggaacagcaacaaccucgacuccaaggucgggggcaacuacaacuaccuguaccgccuguuccgcaagagcaaccucaagcccuucgagcgggacaucuccaccgagaucuaccaggccggcagcacccccugcaacgggguggagggcuucaacugcuacuucccccugcaguccuacggguuccagccgaccaacggcgugggguaccagcccuaccggguggucgugcugagcuucgagcuccugcacgcccccgccacggugugcggccccaagggcggggguggaagcggcggggguggaagugacaucaucaagcuccugaacgagcaggucaacaaggagaugcaguccagcaaccuguacauguccaugagcuccuggugcuacacccacagccucgacggcgccgggcuguuccuguucgaccacgccgcggaggaguacgagcacgccaagaagcucaucaucuuccugaacgagaacaacgugcccgugcagcugaccuccaucagcgccccggagcacaaguucgagggccucacgcagaucuuccagaaggccuacgagcacgagcagcacaucuccgagagcaucaacaacaucguggaccacgccaucaaguccaaggaccacgcgaccuucaacuuccugcagugguacgucgccgagcagcacgaggaggaggugcuguucaaggacauccucgacaagaucgagcugaucgggaacgagaaccacggccuguaccucgccgaccaguacgugaaggggaucgccaagagccgcaaguccugaggacuagucccuguucccagagcccacuuuuuuuucuuuuuuugaaauaaaauagccugucuuucagaucuaaaaaaaaaaaaaaaaaaaaaaaaaaaaaaaaaaaaaaaaaaaaaaaaaaaaaaaaaaaaaaaaaaaaaaaaaaaaaaaaaaaaaaaaaaaaaaaaaaaa

SEQ ID NO: 24946 - RNA, 1095 nt, Artificial Sequence
  SARS-CoV-2/Wuhan/WIV05/2019__EPI_ISL_402128 spike protein mRNA gc (334-528) Foldon construct
aggagagggcgcuuggcuugcaaggacccugagcugcggcauugaagcacacccaacccaacucgacugaagucagccucacugaaccggaucugagaaucuucucucucugggcuugccagggcucuccgaaccuagcuagcauccucuucaauuccaacuagaaagcuuaccaugcccaugggcagccugcagccgcucgccacccuguaccugcucgggaugcugguggccuccguccuggcgaaccugugccccuucggcgagguguucaacgccacccgguucgccagcgucuacgccuggaaccgcaagcggaucuccaacugcguggcggacuacagcgugcuguacaacuccgccagcuucuccacguucaagugcuacggcgucagccccaccaagcucaacgaccugugcuucaccaacguguacgccgacuccuucgugauccgcggggacgagguccggcagaucgcccccggccagaccgggaagaucgccgacuacaacuacaagcugccggacgacuucacgggcugcgugaucgcguggaacagcaacaaccucgacuccaaggucgggggcaacuacaacuaccuguaccgccuguuccgcaagagcaaccucaagcccuucgagcgggacaucuccaccgagaucuaccaggccggcagcacccccugcaacgggguggagggcuucaacugcuacuucccccugcaguccuacggguuccagccgaccaacggcgugggguaccagcccuaccggguggucgugcugagcuucgagcuccugcacgcccccgccacggugugcggccccaagggcagcggcggguacauccccgaggccccgcgcgacggccaggccuacgugcggaaggacggcgaguggguccugcugagcaccuuccucugaggacuagucccuguucccagagcccacuuuuuuuucuuuuuuugaaauaaaauagccugucuuucagaucuaaaaaaaaaaaaaaaaaaaaaaaaaaaaaaaaaaaaaaaaaaaaaaaaaaaaaaaaaaaaaaaaaaaaaaaaaaaaaaaaaaaaaaaaaaaaaaaaaaaa

SEQ ID NO: 24947 - RNA, 1473 nt, Artificial Sequence
  SARS-CoV-2/Wuhan/WIV05/2019__EPI_ISL_402128 spike protein mRNA gc (1-15,334-528) LumSynth construct
aggagagggcgcuuggcuugcaaggacccugagcugcggcauugaagcacacccaacccaacucgacugaagucagccucacugaaccggaucugagaaucuucucucucugggcuugccagggcucuccgaaccuagcuagcauccucuucaauuccaacuagaaagcuuaccauguucguguuccugguccuccugccccuggugagcucccagugcaaccugugccccuucggcgagguguucaacgccacccgguucgccagcgucuacgccuggaaccgcaagcggaucuccaacugcguggcggacuacagcgugcuguacaacuccgccagcuucuccacguucaagugcuacggcgucagccccaccaagcucaacgaccugugcuucaccaacguguacgccgacuccuucgugauccgcggggacgagguccggcagaucgcccccggccagaccgggaagaucgccgacuacaacuacaagcugccggacgacuucacgggcugcgugaucgcguggaacagcaacaaccucgacuccaaggucgggggcaacuacaacuaccuguaccgccuguuccgcaagagcaaccucaagcccuucgagcgggacaucuccaccgagaucuaccaggccggcagcacccccugcaacgggguggagggcuucaacugcuacuucccccugcaguccuacggguuccagccgaccaacggcgugggguaccagcccuaccggguggucgugcugagcuucgagcuccugcacgcccccgccacggugugcggccccaagggcggcggcggcuccggaggcggagguagcgggggacagaucuacgagggcaagcugaccgccgaggggcuccgcuucggcaucguggccagccgguucaaccacgcgcuggucgaccgccugguggagggggccaucgacgccaucgugcggcacggcgggcgcgaggaggacaucacccucguccgggugcccggcuccugggagaucccgguggccgccggcgagcuggcccgcaaggaggacaucgacgcggucaucgccaucggggugcugauccggggcgccacgccccacuucgacuacaucgccagcgagguguccaaggggcucgcggaccugagccuggagcuccgcaagcccaucaccuucggcgucaucaccgccgacacccuggagcaggccaucgagcgggccgggacgaagcacggcaacaagggcugggaggccgcgcuguccgccaucgagauggccaaccucuucaagagccugcgcugaggacuagucccuguucccagagcccacuuuuuuuucuuuuuuugaaauaaaauagccugucuuucagaucuaaaaaaaaaaaaaaaaaaaaaaaaaaaaaaaaaaaaaaaaaaaaaaaaaaaaaaaaaaaaaaaaaaaaaaaaaaaaaaaaaaaaaaaaaaaaaaaaaaaa

SEQ ID NO: 24948 - RNA, 1434 nt, Artificial Sequence
  SARS-CoV-2/Wuhan/WIV05/2019__EPI_ISL_402128 spike protein mRNA gc (334-528) LumSynth construct
aggagagggcgcuuggcuugcaaggacccugagcugcggcauugaagcacacccaacccaacucgacugaagucagccucacugaaccggaucugagaaucuucucucucugggcuugccagggcucuccgaaccuagcuagcauccucuucaauuccaacuagaaagcuuaccaugcagaucuacgagggcaagcugaccgccgaggggcuccgcuucggcaucguggccagccgguucaaccacgcgcuggucgaccgccugguggagggggccaucgacgccaucgugcggcacggcgggcgcgaggaggacaucacccucguccgggugcccggcuccugggagaucccgguggccgccggcgagcuggcccgcaaggaggacaucgacgcggucaucgccaucggggugcugauccggggcgccacgccccacuucgacuacaucgccagcgagguguccaaggggcucgcggaccugagccuggagcuccgcaagcccaucaccuucggcgucaucaccgccgacacccuggagcaggccaucgagcgggccgggacgaagcacggcaacaagggcugggaggccgcgcuguccgccaucgagauggccaaccucuucaagagccugcgcggcgggggcgggagcggcgggggcggcuccgggggcgggaaccugugccccuucggcgagguguucaacgccacccgguucgccagcgucuacgccuggaaccgcaagcggaucuccaacugcguggcggacuacagcgugcuguacaacuccgccagcuucuccacguucaagugcuacggcgucagccccaccaagcucaacgaccugugcuucaccaacguguacgccgacuccuucgugauccgcggggacgagguccggcagaucgcccccggccagaccgggaagaucgccgacuacaacuacaagcugccggacgacuucacgggcugcgugaucgcguggaacagcaacaaccucgacuccaaggucgggggcaacuacaacuaccuguaccgccuguuccgcaagagcaaccucaagcccuucgagcgggacaucuccaccgagaucuaccaggccggcagcacccccugcaacgggguggagggcuucaacugcuacuucccccugcaguccuacggguuccagccgaccaacggcgugggguaccagcccuaccggguggucgugcugagcuucgagcuccugcacgcccccgccacggugugcggccccaagugaggacuagucccuguucccagagcccacuuuuuuuucuuuuuuugaaauaaaauagccugucuuucagaucuaaaaaaaaaaaaaaaaaaaaaaaaaaaaaaaaaaaaaaaaaaaaaaaaaaaaaaaaaaaaaaaaaaaaaaaaaaaaaaaaaaaaaaaaaaaaaaaaaaaa

SEQ ID NO: 24949 - RNA, 4167 nt, Artificial Sequence
  SARS-CoV-2/Wuhan/WIV05/2019__EPI_ISL_402128 spike protein mRNA gc (1-1273)
aggagagggcgcuuggcuugcaaggacccugagcugcggcauugaagcacacccaacccaacucgacugaagucagccucacugaaccggaucugagaaucuucucucucugggcuugccagggcucuccgaaccuagcuagcauccucuucaauuccaacuagaaagcuuaccauguucguguuccugguccuccugccccuggugagcucccagugcgugaaccucaccacccgcacgcagcugccgcccgccuacaccaacagcuucacccggggcgucuacuaccccgacaagguguuccgcuccagcgugcugcacuccacccaggaccucuuccugcccuucuucagcaacgucacgugguuccacgccauccacguguccgggaccaacggcaccaagcgguucgacaacccggugcugcccuucaacgacggggucuacuucgcgagcaccgagaaguccaacaucauccgcggcuggaucuucgggacgacccucgacagcaagacccagucccugcugaucgugaacaacgccaccaacguggucaucaaggugugcgaguuccaguucugcaacgaccccuuccucggcguguacuaccacaagaacaacaagagcuggauggaguccgaguuccgggucuacagcuccgccaacaacugcacguucgaguacgugagccagcccuuccugauggaccuggagggcaagcaggggaacuucaagaaccuccgcgaguucguguucaagaacaucgacggcuacuucaagaucuacuccaagcacaccccgaucaaccugguccgggaccugccccagggguucagcgcccucgagccccugguggaccugcccaucggcaucaacaucacccgcuuccagacccuccuggcccugcaccgguccuaccucacgccgggggacagcagcuccggcuggaccgcgggcgccgccgccuacuacgugggguaccugcagccccgcaccuuccugcucaaguacaacgagaacggcaccaucacggacgcggucgacugcgcccuggacccccugagcgagaccaagugcacccucaaguccuucaccguggagaaggggaucuaccagacgagcaacuuccgggugcagcccaccgaguccaucguccgcuucccgaacaucaccaaccugugccccuucggcgagguguucaacgccacccgguucgccagcgucuacgccuggaaccgcaagcggaucuccaacugcguggcggacuacagcgugcuguacaacuccgccagcuucuccacguucaagugcuacggcgucagccccaccaagcucaacgaccugugcuucaccaacguguacgccgacuccuucgugauccgcggggacgagguccggcagaucgcccccggccagaccgggaagaucgccgacuacaacuacaagcugccggacgacuucacgggcugcgugaucgcguggaacagcaacaaccucgacuccaaggucgggggcaacuacaacuaccuguaccgccuguuccgcaagagcaaccucaagcccuucgagcgggacaucuccaccgagaucuaccaggccggcagcacccccugcaacgggguggagggcuucaacugcuacuucccccugcaguccuacggguuccagccgaccaacggcgugggguaccagcccuaccggguggucgugcugagcuucgagcuccugcacgcccccgccacggugugcggccccaagaaguccaccaaccuggucaagaacaagugcgugaacuucaacuucaacggccucaccgggaccggcgugcugaccgagagcaacaagaaguuccugccguuccagcaguucgggcgcgacaucgccgacacgaccgacgcgguccgcgacccccagacccuggagauccucgacaucacccccugcagcuucggcgggguguccgugaucacgccgggcaccaacaccagcaaccaggucgccgugcuguaccaggacgugaacugcaccgagguccccguggccauccacgccgaccagcugacgcccaccuggcggguguacuccaccggcagcaacgucuuccagacccgcgccgggugccucaucggcgcggagcacgugaacaacuccuacgagugcgacauccccaucggggccggcaucugcgccagcuaccagacgcagaccaacuccccgcggcgcgcccggagcguggcgucccagagcaucaucgccuacaccaugucccugggcgccgagaacagcgucgccuacuccaacaacagcaucgccauccccaccaacuucacgaucuccgugaccaccgagauccugcccgugagcaugaccaagacgagcgucgacugcaccauguacaucugcggggacuccaccgagugcagcaaccuccugcugcaguacggcuccuucugcacccagcucaaccgcgcgcugacggggaucgccguggagcaggacaagaacacccaggagguguucgcccaggucaagcagaucuacaagacgcccccgaucaaggacuucggcggguucaacuucagccagauccugcccgaccccuccaagcccagcaagcgguccuucaucgaggaccuccuguucaacaaggugacccuggccgacgccggcuucaucaagcaguacggcgacugccucggggacaucgcggcccgcgaccugaucugcgcccagaaguucaacggccugaccgugcucccgccccugcugaccgacgagaugaucgcccaguacaccagcgcccuccuggcggggaccaucacguccggcuggaccuucggggccggcgccgcccugcagauccccuucgcgaugcagauggccuaccgguucaacggcaucggggucacccagaacgugcucuacgagaaccagaagcugaucgccaaccaguucaacagcgccaucggcaagauccaggacucccugagcuccaccgccagcgcgcucgggaagcugcaggacguggucaaccagaacgcccaggcccugaacacgcucgugaagcagcuguccagcaacuucggcgccaucuccagcgugcugaacgacauccucucccgccuggacaaggucgaggccgaggugcagaucgaccggcugaucaccgggcgccuccagagccugcagaccuacgugacccagcagcugauccgggcggccgagauccgcgccagcgccaaccucgccgcgaccaagauguccgagugcguccugggccagagcaagcggguggacuucugcggcaagggguaccaccugauguccuucccccagagcgccccgcacggcguggucuuccuccacgugacguacguccccgcccaggagaagaacuucaccaccgcccccgcgaucugccacgacgggaaggcccacuucccccgcgagggcguguucguguccaacgggacccacugguucgucacgcagcggaacuucuacgagccgcagaucaucaccaccgacaacaccuucgugagcggcaacugcgacguggucaucggcaucgugaacaacacgguguacgacccccugcagcccgagcuggacuccuucaaggaggagcucgacaaguacuucaagaaccacaccagccccgacgucgaccugggggacaucuccggcaucaacgccagcguggugaacauccagaaggagaucgaccgccugaacgaggucgccaagaaccucaacgagucccugaucgaccugcaggagcucgggaaguacgagcaguacaucaaguggccgugguacaucuggcugggcuucaucgccggccugaucgcgaucgugauggugaccaucaugcucugcugcaugaccagcugcugcuccugccugaaggggugcugcagcugcggcuccugcugcaaguucgacgaggacgacagcgagcccguccugaagggggugaagcuccacuacacgugaggacuagucccuguucccagagcccacuuuuuuuucuuuuuuugaaauaaaauagccugucuuucagaucuaaaaaaaaaaaaaaaaaaaaaaaaaaaaaaaaaaaaaaaaaaaaaaaaaaaaaaaaaaaaaaaaaaaaaaaaaaaaaaaaaaaaaaaaaaaaaaaaaaaa

SEQ ID NO: 24950 - RNA, 4167 nt, Artificial Sequence
  SARS-CoV-2/Wuhan/WIV05/2019__EPI_ISL_402128 spike protein mRNA gc (1-1273)(D614G)
aggagagggcgcuuggcuugcaaggacccugagcugcggcauugaagcacacccaacccaacucgacugaagucagccucacugaaccggaucugagaaucuucucucucugggcuugccagggcucuccgaaccuagcuagcauccucuucaauuccaacuagaaagcuuaccauguucguguuccugguccuccugccccuggugagcucccagugcgugaaccucaccacccgcacgcagcugccgcccgccuacaccaacagcuucacccggggcgucuacuaccccgacaagguguuccgcuccagcgugcugcacuccacccaggaccucuuccugcccuucuucagcaacgucacgugguuccacgccauccacguguccgggaccaacggcaccaagcgguucgacaacccggugcugcccuucaacgacggggucuacuucgcgagcaccgagaaguccaacaucauccgcggcuggaucuucgggacgacccucgacagcaagacccagucccugcugaucgugaacaacgccaccaacguggucaucaaggugugcgaguuccaguucugcaacgaccccuuccucggcguguacuaccacaagaacaacaagagcuggauggaguccgaguuccgggucuacagcuccgccaacaacugcacguucgaguacgugagccagcccuuccugauggaccuggagggcaagcaggggaacuucaagaaccuccgcgaguucguguucaagaacaucgacggcuacuucaagaucuacuccaagcacaccccgaucaaccugguccgggaccugccccagggguucagcgcccucgagccccugguggaccugcccaucggcaucaacaucacccgcuuccagacccuccuggcccugcaccgguccuaccucacgccgggggacagcagcuccggcuggaccgcgggcgccgccgccuacuacgugggguaccugcagccccgcaccuuccugcucaaguacaacgagaacggcaccaucacggacgcggucgacugcgcccuggacccccugagcgagaccaagugcacccucaaguccuucaccguggagaaggggaucuaccagacgagcaacuuccgggugcagcccaccgaguccaucguccgcuucccgaacaucaccaaccugugccccuucggcgagguguucaacgccacccgguucgccagcgucuacgccuggaaccgcaagcggaucuccaacugcguggcggacuacagcgugcuguacaacuccgccagcuucuccacguucaagugcuacggcgucagccccaccaagcucaacgaccugugcuucaccaacguguacgccgacuccuucgugauccgcggggacgagguccggcagaucgcccccggccagaccgggaagaucgccgacuacaacuacaagcugccggacgacuucacgggcugcgugaucgcguggaacagcaacaaccucgacuccaaggucgggggcaacuacaacuaccuguaccgccuguuccgcaagagcaaccucaagcccuucgagcgggacaucuccaccgagaucuaccaggccggcagcacccccugcaacgggguggagggcuucaacugcuacuucccccugcaguccuacggguuccagccgaccaacggcgugggguaccagcccuaccggguggucgugcugagcuucgagcuccugcacgcccccgccacggugugcggccccaagaaguccaccaaccuggucaagaacaagugcgugaacuucaacuucaacggccucaccgggaccggcgugcugaccgagagcaacaagaaguuccugccguuccagcaguucgggcgcgacaucgccgacacgaccgacgcgguccgcgacccccagacccuggagauccucgacaucacccccugcagcuucggcgggguguccgugaucacgccgggcaccaacaccagcaaccaggucgccgugcuguaccagggcgugaacugcaccgagguccccguggccauccacgccgaccagcugacgcccaccuggcggguguacuccaccggcagcaacgucuuccagacccgcgccgggugccucaucggcgcggagcacgugaacaacuccuacgagugcgacauccccaucggggccggcaucugcgccagcuaccagacgcagaccaacuccccgcggcgcgcccggagcguggcgucccagagcaucaucgccuacaccaugucccugggcgccgagaacagcgucgccuacuccaacaacagcaucgccauccccaccaacuucacgaucuccgugaccaccgagauccugcccgugagcaugaccaagacgagcgucgacugcaccauguacaucugcggggacuccaccgagugcagcaaccuccugcugcaguacggcuccuucugcacccagcucaaccgcgcgcugacggggaucgccguggagcaggacaagaacacccaggagguguucgcccaggucaagcagaucuacaagacgcccccgaucaaggacuucggcggguucaacuucagccagauccugcccgaccccuccaagcccagcaagcgguccuucaucgaggaccuccuguucaacaaggugacccuggccgacgccggcuucaucaagcaguacggcgacugccucggggacaucgcggcccgcgaccugaucugcgcccagaaguucaacggccugaccgugcucccgccccugcugaccgacgagaugaucgcccaguacaccagcgcccuccuggcggggaccaucacguccggcuggaccuucggggccggcgccgcccugcagauccccuucgcgaugcagauggccuaccgguucaacggcaucggggucacccagaacgugcucuacgagaaccagaagcugaucgccaaccaguucaacagcgccaucggcaagauccaggacucccugagcuccaccgccagcgcgcucgggaagcugcaggacguggucaaccagaacgcccaggcccugaacacgcucgugaagcagcuguccagcaacuucggcgccaucuccagcgugcugaacgacauccucucccgccuggacaaggucgaggccgaggugcagaucgaccggcugaucaccgggcgccuccagagccugcagaccuacgugacccagcagcugauccgggcggccgagauccgcgccagcgccaaccucgccgcgaccaagauguccgagugcguccugggccagagcaagcggguggacuucugcggcaagggguaccaccugauguccuucccccagagcgccccgcacggcguggucuuccuccacgugacguacguccccgcccaggagaagaacuucaccaccgcccccgcgaucugccacgacgggaaggcccacuucccccgcgagggcguguucguguccaacgggacccacugguucgucacgcagcggaacuucuacgagccgcagaucaucaccaccgacaacaccuucgugagcggcaacugcgacguggucaucggcaucgugaacaacacgguguacgacccccugcagcccgagcuggacuccuucaaggaggagcucgacaaguacuucaagaaccacaccagccccgacgucgaccugggggacaucuccggcaucaacgccagcguggugaacauccagaaggagaucgaccgccugaacgaggucgccaagaaccucaacgagucccugaucgaccugcaggagcucgggaaguacgagcaguacaucaaguggccgugguacaucuggcugggcuucaucgccggccugaucgcgaucgugauggugaccaucaugcucugcugcaugaccagcugcugcuccugccugaaggggugcugcagcugcggcuccugcugcaaguucgacgaggacgacagcgagcccguccugaagggggugaagcuccacuacacgugaggacuagucccuguucccagagcccacuuuuuuuucuuuuuuugaaauaaaauagccugucuuucagaucuaaaaaaaaaaaaaaaaaaaaaaaaaaaaaaaaaaaaaaaaaaaaaaaaaaaaaaaaaaaaaaaaaaaaaaaaaaaaaaaaaaaaaaaaaaaaaaaaaaaa

SEQ ID NO: 24951 - RNA, 4167 nt, Artificial Sequence
  SARS-CoV-2/Wuhan/WIV05/2019__EPI_ISL_402128 spike protein mRNA gc (1-1273)(A222V_D614G)
aggagagggcgcuuggcuugcaaggacccugagcugcggcauugaagcacacccaacccaacucgacugaagucagccucacugaaccggaucugagaaucuucucucucugggcuugccagggcucuccgaaccuagcuagcauccucuucaauuccaacuagaaagcuuaccauguucguguuccugguccuccugccccuggugagcucccagugcgugaaccucaccacccgcacgcagcugccgcccgccuacaccaacagcuucacccggggcgucuacuaccccgacaagguguuccgcuccagcgugcugcacuccacccaggaccucuuccugcccuucuucagcaacgucacgugguuccacgccauccacguguccgggaccaacggcaccaagcgguucgacaacccggugcugcccuucaacgacggggucuacuucgcgagcaccgagaaguccaacaucauccgcggcuggaucuucgggacgacccucgacagcaagacccagucccugcugaucgugaacaacgccaccaacguggucaucaaggugugcgaguuccaguucugcaacgaccccuuccucggcguguacuaccacaagaacaacaagagcuggauggaguccgaguuccgggucuacagcuccgccaacaacugcacguucgaguacgugagccagcccuuccugauggaccuggagggcaagcaggggaacuucaagaaccuccgcgaguucguguucaagaacaucgacggcuacuucaagaucuacuccaagcacaccccgaucaaccugguccgggaccugccccagggguucagcguccucgagccccugguggaccugcccaucggcaucaacaucacccgcuuccagacccuccuggcccugcaccgguccuaccucacgccgggggacagcagcuccggcuggaccgcgggcgccgccgccuacuacgugggguaccugcagccccgcaccuuccugcucaaguacaacgagaacggcaccaucacggacgcggucgacugcgcccuggacccccugagcgagaccaagugcacccucaaguccuucaccguggagaaggggaucuaccagacgagcaacuuccgggugcagcccaccgaguccaucguccgcuucccgaacaucaccaaccugugccccuucggcgagguguucaacgccacccgguucgccagcgucuacgccuggaaccgcaagcggaucuccaacugcguggcggacuacagcgugcuguacaacuccgccagcuucuccacguucaagugcuacggcgucagccccaccaagcucaacgaccugugcuucaccaacguguacgccgacuccuucgugauccgcggggacgagguccggcagaucgcccccggccagaccgggaagaucgccgacuacaacuacaagcugccggacgacuucacgggcugcgugaucgcguggaacagcaacaaccucgacuccaaggucgggggcaacuacaacuaccuguaccgccuguuccgcaagagcaaccucaagcccuucgagcgggacaucuccaccgagaucuaccaggccggcagcacccccugcaacgggguggagggcuucaacugcuacuucccccugcaguccuacggguuccagccgaccaacggcgugggguaccagcccuaccggguggucgugcugagcuucgagcuccugcacgcccccgccacggugugcggccccaagaaguccaccaaccuggucaagaacaagugcgugaacuucaacuucaacggccucaccgggaccggcgugcugaccgagagcaacaagaaguuccugccguuccagcaguucgggcgcgacaucgccgacacgaccgacgcgguccgcgacccccagacccuggagauccucgacaucacccccugcagcuucggcgggguguccgugaucacgccgggcaccaacaccagcaaccaggucgccgugcuguaccagggcgugaacugcaccgagguccccguggccauccacgccgaccagcugacgcccaccuggcggguguacuccaccggcagcaacgucuuccagacccgcgccgggugccucaucggcgcggagcacgugaacaacuccuacgagugcgacauccccaucggggccggcaucugcgccagcuaccagacgcagaccaacuccccgcggcgcgcccggagcguggcgucccagagcaucaucgccuacaccaugucccugggcgccgagaacagcgucgccuacuccaacaacagcaucgccauccccaccaacuucacgaucuccgugaccaccgagauccugcccgugagcaugaccaagacgagcgucgacugcaccauguacaucugcggggacuccaccgagugcagcaaccuccugcugcaguacggcuccuucugcacccagcucaaccgcgcgcugacggggaucgccguggagcaggacaagaacacccaggagguguucgcccaggucaagcagaucuacaagacgcccccgaucaaggacuucggcggguucaacuucagccagauccugcccgaccccuccaagcccagcaagcgguccuucaucgaggaccuccuguucaacaaggugacccuggccgacgccggcuucaucaagcaguacggcgacugccucggggacaucgcggcccgcgaccugaucugcgcccagaaguucaacggccugaccgugcucccgccccugcugaccgacgagaugaucgcccaguacaccagcgcccuccuggcggggaccaucacguccggcuggaccuucggggccggcgccgcccugcagauccccuucgcgaugcagauggccuaccgguucaacggcaucggggucacccagaacgugcucuacgagaaccagaagcugaucgccaaccaguucaacagcgccaucggcaagauccaggacucccugagcuccaccgccagcgcgcucgggaagcugcaggacguggucaaccagaacgcccaggcccugaacacgcucgugaagcagcuguccagcaacuucggcgccaucuccagcgugcugaacgacauccucucccgccuggacaaggucgaggccgaggugcagaucgaccggcugaucaccgggcgccuccagagccugcagaccuacgugacccagcagcugauccgggcggccgagauccgcgccagcgccaaccucgccgcgaccaagauguccgagugcguccugggccagagcaagcggguggacuucugcggcaagggguaccaccugauguccuucccccagagcgccccgcacggcguggucuuccuccacgugacguacguccccgcccaggagaagaacuucaccaccgcccccgcgaucugccacgacgggaaggcccacuucccccgcgagggcguguucguguccaacgggacccacugguucgucacgcagcggaacuucuacgagccgcagaucaucaccaccgacaacaccuucgugagcggcaacugcgacguggucaucggcaucgugaacaacacgguguacgacccccugcagcccgagcuggacuccuucaaggaggagcucgacaaguacuucaagaaccacaccagccccgacgucgaccugggggacaucuccggcaucaacgccagcguggugaacauccagaaggagaucgaccgccugaacgaggucgccaagaaccucaacgagucccugaucgaccugcaggagcucgggaaguacgagcaguacaucaaguggccgugguacaucuggcugggcuucaucgccggccugaucgcgaucgugauggugaccaucaugcucugcugcaugaccagcugcugcuccugccugaaggggugcugcagcugcggcuccugcugcaaguucgacgaggacgacagcgagcccguccugaagggggugaagcuccacuacacgugaggacuagucccuguucccagagcccacuuuuuuuucuuuuuuugaaauaaaauagccugucuuucagaucuaaaaaaaaaaaaaaaaaaaaaaaaaaaaaaaaaaaaaaaaaaaaaaaaaaaaaaaaaaaaaaaaaaaaaaaaaaaaaaaaaaaaaaaaaaaaaaaaaaaa

SEQ ID NO: 24952 - RNA, 4167 nt, Artificial Sequence
  SARS-CoV-2/Wuhan/WIV05/2019__EPI_ISL_402128 spike protein mRNA gc (1-1273)(N439K_D614G)
aggagagggcgcuuggcuugcaaggacccugagcugcggcauugaagcacacccaacccaacucgacugaagucagccucacugaaccggaucugagaaucuucucucucugggcuugccagggcucuccgaaccuagcuagcauccucuucaauuccaacuagaaagcuuaccauguucguguuccugguccuccugccccuggugagcucccagugcgugaaccucaccacccgcacgcagcugccgcccgccuacaccaacagcuucacccggggcgucuacuaccccgacaagguguuccgcuccagcgugcugcacuccacccaggaccucuuccugcccuucuucagcaacgucacgugguuccacgccauccacguguccgggaccaacggcaccaagcgguucgacaacccggugcugcccuucaacgacggggucuacuucgcgagcaccgagaaguccaacaucauccgcggcuggaucuucgggacgacccucgacagcaagacccagucccugcugaucgugaacaacgccaccaacguggucaucaaggugugcgaguuccaguucugcaacgaccccuuccucggcguguacuaccacaagaacaacaagagcuggauggaguccgaguuccgggucuacagcuccgccaacaacugcacguucgaguacgugagccagcccuuccugauggaccuggagggcaagcaggggaacuucaagaaccuccgcgaguucguguucaagaacaucgacggcuacuucaagaucuacuccaagcacaccccgaucaaccugguccgggaccugccccagggguucagcgcccucgagccccugguggaccugcccaucggcaucaacaucacccgcuuccagacccuccuggcccugcaccgguccuaccucacgccgggggacagcagcuccggcuggaccgcgggcgccgccgccuacuacgugggguaccugcagccccgcaccuuccugcucaaguacaacgagaacggcaccaucacggacgcggucgacugcgcccuggacccccugagcgagaccaagugcacccucaaguccuucaccguggagaaggggaucuaccagacgagcaacuuccgggugcagcccaccgaguccaucguccgcuucccgaacaucaccaaccugugccccuucggcgagguguucaacgccacccgguucgccagcgucuacgccuggaaccgcaagcggaucuccaacugcguggcggacuacagcgugcuguacaacuccgccagcuucuccacguucaagugcuacggcgucagccccaccaagcucaacgaccugugcuucaccaacguguacgccgacuccuucgugauccgcggggacgagguccggcagaucgcccccggccagaccgggaagaucgccgacuacaacuacaagcugccggacgacuucacgggcugcgugaucgcguggaacagcaagaaccucgacuccaaggucgggggcaacuacaacuaccuguaccgccuguuccgcaagagcaaccucaagcccuucgagcgggacaucuccaccgagaucuaccaggccggcagcacccccugcaacgggguggagggcuucaacugcuacuucccccugcaguccuacggguuccagccgaccaacggcgugggguaccagcccuaccggguggucgugcugagcuucgagcuccugcacgcccccgccacggugugcggccccaagaaguccaccaaccuggucaagaacaagugcgugaacuucaacuucaacggccucaccgggaccggcgugcugaccgagagcaacaagaaguuccugccguuccagcaguucgggcgcgacaucgccgacacgaccgacgcgguccgcgacccccagacccuggagauccucgacaucacccccugcagcuucggcgggguguccgugaucacgccgggcaccaacaccagcaaccaggucgccgugcuguaccagggcgugaacugcaccgagguccccguggccauccacgccgaccagcugacgcccaccuggcggguguacuccaccggcagcaacgucuuccagacccgcgccgggugccucaucggcgcggagcacgugaacaacuccuacgagugcgacauccccaucggggccggcaucugcgccagcuaccagacgcagaccaacuccccgcggcgcgcccggagcguggcgucccagagcaucaucgccuacaccaugucccugggcgccgagaacagcgucgccuacuccaacaacagcaucgccauccccaccaacuucacgaucuccgugaccaccgagauccugcccgugagcaugaccaagacgagcgucgacugcaccauguacaucugcggggacuccaccgagugcagcaaccuccugcugcaguacggcuccuucugcacccagcucaaccgcgcgcugacggggaucgccguggagcaggacaagaacacccaggagguguucgcccaggucaagcagaucuacaagacgcccccgaucaaggacuucggcggguucaacuucagccagauccugcccgaccccuccaagcccagcaagcgguccuucaucgaggaccuccuguucaacaaggugacccuggccgacgccggcuucaucaagcaguacggcgacugccucggggacaucgcggcccgcgaccugaucugcgcccagaaguucaacggccugaccgugcucccgccccugcugaccgacgagaugaucgcccaguacaccagcgcccuccuggcggggaccaucacguccggcuggaccuucggggccggcgccgcccugcagauccccuucgcgaugcagauggccuaccgguucaacggcaucggggucacccagaacgugcucuacgagaaccagaagcugaucgccaaccaguucaacagcgccaucggcaagauccaggacucccugagcuccaccgccagcgcgcucgggaagcugcaggacguggucaaccagaacgcccaggcccugaacacgcucgugaagcagcuguccagcaacuucggcgccaucuccagcgugcugaacgacauccucucccgccuggacaaggucgaggccgaggugcagaucgaccggcugaucaccgggcgccuccagagccugcagaccuacgugacccagcagcugauccgggcggccgagauccgcgccagcgccaaccucgccgcgaccaagauguccgagugcguccugggccagagcaagcggguggacuucugcggcaagggguaccaccugauguccuucccccagagcgccccgcacggcguggucuuccuccacgugacguacguccccgcccaggagaagaacuucaccaccgcccccgcgaucugccacgacgggaaggcccacuucccccgcgagggcguguucguguccaacgggacccacugguucgucacgcagcggaacuucuacgagccgcagaucaucaccaccgacaacaccuucgugagcggcaacugcgacguggucaucggcaucgugaacaacacgguguacgacccccugcagcccgagcuggacuccuucaaggaggagcucgacaaguacuucaagaaccacaccagccccgacgucgaccugggggacaucuccggcaucaacgccagcguggugaacauccagaaggagaucgaccgccugaacgaggucgccaagaaccucaacgagucccugaucgaccugcaggagcucgggaaguacgagcaguacaucaaguggccgugguacaucuggcugggcuucaucgccggccugaucgcgaucgugauggugaccaucaugcucugcugcaugaccagcugcugcuccugccugaaggggugcugcagcugcggcuccugcugcaaguucgacgaggacgacagcgagcccguccugaagggggugaagcuccacuacacgugaggacuagucccuguucccagagcccacuuuuuuuucuuuuuuugaaauaaaauagccugucuuucagaucuaaaaaaaaaaaaaaaaaaaaaaaaaaaaaaaaaaaaaaaaaaaaaaaaaaaaaaaaaaaaaaaaaaaaaaaaaaaaaaaaaaaaaaaaaaaaaaaaaaaa

SEQ ID NO: 24953 - RNA, 4167 nt, Artificial Sequence
  SARS-CoV-2/Wuhan/WIV05/2019__EPI_ISL_402128 spike protein mRNA gc (1-1273)(S477N_D614G)
aggagagggcgcuuggcuugcaaggacccugagcugcggcauugaagcacacccaacccaacucgacugaagucagccucacugaaccggaucugagaaucuucucucucugggcuugccagggcucuccgaaccuagcuagcauccucuucaauuccaacuagaaagcuuaccauguucguguuccugguccuccugccccuggugagcucccagugcgugaaccucaccacccgcacgcagcugccgcccgccuacaccaacagcuucacccggggcgucuacuaccccgacaagguguuccgcuccagcgugcugcacuccacccaggaccucuuccugcccuucuucagcaacgucacgugguuccacgccauccacguguccgggaccaacggcaccaagcgguucgacaacccggugcugcccuucaacgacggggucuacuucgcgagcaccgagaaguccaacaucauccgcggcuggaucuucgggacgacccucgacagcaagacccagucccugcugaucgugaacaacgccaccaacguggucaucaaggugugcgaguuccaguucugcaacgaccccuuccucggcguguacuaccacaagaacaacaagagcuggauggaguccgaguuccgggucuacagcuccgccaacaacugcacguucgaguacgugagccagcccuuccugauggaccuggagggcaagcaggggaacuucaagaaccuccgcgaguucguguucaagaacaucgacggcuacuucaagaucuacuccaagcacaccccgaucaaccugguccgggaccugccccagggguucagcgcccucgagccccugguggaccugcccaucggcaucaacaucacccgcuuccagacccuccuggcccugcaccgguccuaccucacgccgggggacagcagcuccggcuggaccgcgggcgccgccgccuacuacgugggguaccugcagccccgcaccuuccugcucaaguacaacgagaacggcaccaucacggacgcggucgacugcgcccuggacccccugagcgagaccaagugcacccucaaguccuucaccguggagaaggggaucuaccagacgagcaacuuccgggugcagcccaccgaguccaucguccgcuucccgaacaucaccaaccugugccccuucggcgagguguucaacgccacccgguucgccagcgucuacgccuggaaccgcaagcggaucuccaacugcguggcggacuacagcgugcuguacaacuccgccagcuucuccacguucaagugcuacggcgucagccccaccaagcucaacgaccugugcuucaccaacguguacgccgacuccuucgugauccgcggggacgagguccggcagaucgcccccggccagaccgggaagaucgccgacuacaacuacaagcugccggacgacuucacgggcugcgugaucgcguggaacagcaacaaccucgacuccaaggucgggggcaacuacaacuaccuguaccgccuguuccgcaagagcaaccucaagcccuucgagcgggacaucuccaccgagaucuaccaggccggcaacacccccugcaacgggguggagggcuucaacugcuacuucccccugcaguccuacggguuccagccgaccaacggcgugggguaccagcccuaccggguggucgugcugagcuucgagcuccugcacgcccccgccacggugugcggccccaagaaguccaccaaccuggucaagaacaagugcgugaacuucaacuucaacggccucaccgggaccggcgugcugaccgagagcaacaagaaguuccugccguuccagcaguucgggcgcgacaucgccgacacgaccgacgcgguccgcgacccccagacccuggagauccucgacaucacccccugcagcuucggcgggguguccgugaucacgccgggcaccaacaccagcaaccaggucgccgugcuguaccagggcgugaacugcaccgagguccccguggccauccacgccgaccagcugacgcccaccuggcggguguacuccaccggcagcaacgucuuccagacccgcgccgggugccucaucggcgcggagcacgugaacaacuccuacgagugcgacauccccaucggggccggcaucugcgccagcuaccagacgcagaccaacuccccgcggcgcgcccggagcguggcgucccagagcaucaucgccuacaccaugucccugggcgccgagaacagcgucgccuacuccaacaacagcaucgccauccccaccaacuucacgaucuccgugaccaccgagauccugcccgugagcaugaccaagacgagcgucgacugcaccauguacaucugcggggacuccaccgagugcagcaaccuccugcugcaguacggcuccuucugcacccagcucaaccgcgcgcugacggggaucgccguggagcaggacaagaacacccaggagguguucgcccaggucaagcagaucuacaagacgcccccgaucaaggacuucggcggguucaacuucagccagauccugcccgaccccuccaagcccagcaagcgguccuucaucgaggaccuccuguucaacaaggugacccuggccgacgccggcuucaucaagcaguacggcgacugccucggggacaucgcggcccgcgaccugaucugcgcccagaaguucaacggccugaccgugcucccgccccugcugaccgacgagaugaucgcccaguacaccagcgcccuccuggcggggaccaucacguccggcuggaccuucggggccggcgccgcccugcagauccccuucgcgaugcagauggccuaccgguucaacggcaucggggucacccagaacgugcucuacgagaaccagaagcugaucgccaaccaguucaacagcgccaucggcaagauccaggacucccugagcuccaccgccagcgcgcucgggaagcugcaggacguggucaaccagaacgcccaggcccugaacacgcucgugaagcagcuguccagcaacuucggcgccaucuccagcgugcugaacgacauccucucccgccuggacaaggucgaggccgaggugcagaucgaccggcugaucaccgggcgccuccagagccugcagaccuacgugacccagcagcugauccgggcggccgagauccgcgccagcgccaaccucgccgcgaccaagauguccgagugcguccugggccagagcaagcggguggacuucugcggcaagggguaccaccugauguccuucccccagagcgccccgcacggcguggucuuccuccacgugacguacguccccgcccaggagaagaacuucaccaccgcccccgcgaucugccacgacgggaaggcccacuucccccgcgagggcguguucguguccaacgggacccacugguucgucacgcagcggaacuucuacgagccgcagaucaucaccaccgacaacaccuucgugagcggcaacugcgacguggucaucggcaucgugaacaacacgguguacgacccccugcagcccgagcuggacuccuucaaggaggagcucgacaaguacuucaagaaccacaccagccccgacgucgaccugggggacaucuccggcaucaacgccagcguggugaacauccagaaggagaucgaccgccugaacgaggucgccaagaaccucaacgagucccugaucgaccugcaggagcucgggaaguacgagcaguacaucaaguggccgugguacaucuggcugggcuucaucgccggccugaucgcgaucgugauggugaccaucaugcucugcugcaugaccagcugcugcuccugccugaaggggugcugcagcugcggcuccugcugcaaguucgacgaggacgacagcgagcccguccugaagggggugaagcuccacuacacgugaggacuagucccuguucccagagcccacuuuuuuuucuuuuuuugaaauaaaauagccugucuuucagaucuaaaaaaaaaaaaaaaaaaaaaaaaaaaaaaaaaaaaaaaaaaaaaaaaaaaaaaaaaaaaaaaaaaaaaaaaaaaaaaaaaaaaaaaaaaaaaaaaaaaa

SEQ ID NO: 24954 - RNA, 4167 nt, Artificial Sequence
  SARS-CoV-2/Wuhan/WIV05/2019__EPI_ISL_402128 spike protein mRNA gc (1-1273)(N501Y_D614G)
aggagagggcgcuuggcuugcaaggacccugagcugcggcauugaagcacacccaacccaacucgacugaagucagccucacugaaccggaucugagaaucuucucucucugggcuugccagggcucuccgaaccuagcuagcauccucuucaauuccaacuagaaagcuuaccauguucguguuccugguccuccugccccuggugagcucccagugcgugaaccucaccacccgcacgcagcugccgcccgccuacaccaacagcuucacccggggcgucuacuaccccgacaagguguuccgcuccagcgugcugcacuccacccaggaccucuuccugcccuucuucagcaacgucacgugguuccacgccauccacguguccgggaccaacggcaccaagcgguucgacaacccggugcugcccuucaacgacggggucuacuucgcgagcaccgagaaguccaacaucauccgcggcuggaucuucgggacgacccucgacagcaagacccagucccugcugaucgugaacaacgccaccaacguggucaucaaggugugcgaguuccaguucugcaacgaccccuuccucggcguguacuaccacaagaacaacaagagcuggauggaguccgaguuccgggucuacagcuccgccaacaacugcacguucgaguacgugagccagcccuuccugauggaccuggagggcaagcaggggaacuucaagaaccuccgcgaguucguguucaagaacaucgacggcuacuucaagaucuacuccaagcacaccccgaucaaccugguccgggaccugccccagggguucagcgcccucgagccccugguggaccugcccaucggcaucaacaucacccgcuuccagacccuccuggcccugcaccgguccuaccucacgccgggggacagcagcuccggcuggaccgcgggcgccgccgccuacuacgugggguaccugcagccccgcaccuuccugcucaaguacaacgagaacggcaccaucacggacgcggucgacugcgcccuggacccccugagcgagaccaagugcacccucaaguccuucaccguggagaaggggaucuaccagacgagcaacuuccgggugcagcccaccgaguccaucguccgcuucccgaacaucaccaaccugugccccuucggcgagguguucaacgccacccgguucgccagcgucuacgccuggaaccgcaagcggaucuccaacugcguggcggacuacagcgugcuguacaacuccgccagcuucuccacguucaagugcuacggcgucagccccaccaagcucaacgaccugugcuucaccaacguguacgccgacuccuucgugauccgcggggacgagguccggcagaucgcccccggccagaccgggaagaucgccgacuacaacuacaagcugccggacgacuucacgggcugcgugaucgcguggaacagcaacaaccucgacuccaaggucgggggcaacuacaacuaccuguaccgccuguuccgcaagagcaaccucaagcccuucgagcgggacaucuccaccgagaucuaccaggccggcagcacccccugcaacgggguggagggcuucaacugcuacuucccccugcaguccuacggguuccagccgaccuacggcgugggguaccagcccuaccggguggucgugcugagcuucgagcuccugcacgcccccgccacggugugcggccccaagaaguccaccaaccuggucaagaacaagugcgugaacuucaacuucaacggccucaccgggaccggcgugcugaccgagagcaacaagaaguuccugccguuccagcaguucgggcgcgacaucgccgacacgaccgacgcgguccgcgacccccagacccuggagauccucgacaucacccccugcagcuucggcgggguguccgugaucacgccgggcaccaacaccagcaaccaggucgccgugcuguaccagggcgugaacugcaccgagguccccguggccauccacgccgaccagcugacgcccaccuggcggguguacuccaccggcagcaacgucuuccagacccgcgccgggugccucaucggcgcggagcacgugaacaacuccuacgagugcgacauccccaucggggccggcaucugcgccagcuaccagacgcagaccaacuccccgcggcgcgcccggagcguggcgucccagagcaucaucgccuacaccaugucccugggcgccgagaacagcgucgccuacuccaacaacagcaucgccauccccaccaacuucacgaucuccgugaccaccgagauccugcccgugagcaugaccaagacgagcgucgacugcaccauguacaucugcggggacuccaccgagugcagcaaccuccugcugcaguacggcuccuucugcacccagcucaaccgcgcgcugacggggaucgccguggagcaggacaagaacacccaggagguguucgcccaggucaagcagaucuacaagacgcccccgaucaaggacuucggcggguucaacuucagccagauccugcccgaccccuccaagcccagcaagcgguccuucaucgaggaccuccuguucaacaaggugacccuggccgacgccggcuucaucaagcaguacggcgacugccucggggacaucgcggcccgcgaccugaucugcgcccagaaguucaacggccugaccgugcucccgccccugcugaccgacgagaugaucgcccaguacaccagcgcccuccuggcggggaccaucacguccggcuggaccuucggggccggcgccgcccugcagauccccuucgcgaugcagauggccuaccgguucaacggcaucggggucacccagaacgugcucuacgagaaccagaagcugaucgccaaccaguucaacagcgccaucggcaagauccaggacucccugagcuccaccgccagcgcgcucgggaagcugcaggacguggucaaccagaacgcccaggcccugaacacgcucgugaagcagcuguccagcaacuucggcgccaucuccagcgugcugaacgacauccucucccgccuggacaaggucgaggccgaggugcagaucgaccggcugaucaccgggcgccuccagagccugcagaccuacgugacccagcagcugauccgggcggccgagauccgcgccagcgccaaccucgccgcgaccaagauguccgagugcguccugggccagagcaagcggguggacuucugcggcaagggguaccaccugauguccuucccccagagcgccccgcacggcguggucuuccuccacgugacguacguccccgcccaggagaagaacuucaccaccgcccccgcgaucugccacgacgggaaggcccacuucccccgcgagggcguguucguguccaacgggacccacugguucgucacgcagcggaacuucuacgagccgcagaucaucaccaccgacaacaccuucgugagcggcaacugcgacguggucaucggcaucgugaacaacacgguguacgacccccugcagcccgagcuggacuccuucaaggaggagcucgacaaguacuucaagaaccacaccagccccgacgucgaccugggggacaucuccggcaucaacgccagcguggugaacauccagaaggagaucgaccgccugaacgaggucgccaagaaccucaacgagucccugaucgaccugcaggagcucgggaaguacgagcaguacaucaaguggccgugguacaucuggcugggcuucaucgccggccugaucgcgaucgugauggugaccaucaugcucugcugcaugaccagcugcugcuccugccugaaggggugcugcagcugcggcuccugcugcaaguucgacgaggacgacagcgagcccguccugaagggggugaagcuccacuacacgugaggacuagucccuguucccagagcccacuuuuuuuucuuuuuuugaaauaaaauagccugucuuucagaucuaaaaaaaaaaaaaaaaaaaaaaaaaaaaaaaaaaaaaaaaaaaaaaaaaaaaaaaaaaaaaaaaaaaaaaaaaaaaaaaaaaaaaaaaaaaaaaaaaaaa

SEQ ID NO: 24955 - RNA, 4161 nt, Artificial Sequence
  SARS-CoV-2/Wuhan/WIV05/2019__EPI_ISL_402128 spike protein mRNA gc (1-1273)(H69del_V70del_D614G)
aggagagggcgcuuggcuugcaaggacccugagcugcggcauugaagcacacccaacccaacucgacugaagucagccucacugaaccggaucugagaaucuucucucucugggcuugccagggcucuccgaaccuagcuagcauccucuucaauuccaacuagaaagcuuaccauguucguguuccugguccuccugccccuggugagcucccagugcgugaaccucaccacccgcacgcagcugccgcccgccuacaccaacagcuucacccggggcgucuacuaccccgacaagguguuccgcuccagcgugcugcacuccacccaggaccucuuccugcccuucuucagcaacgucacgugguuccacgccaucuccgggaccaacggcaccaagcgguucgacaacccggugcugcccuucaacgacggggucuacuucgcgagcaccgagaaguccaacaucauccgcggcuggaucuucgggacgacccucgacagcaagacccagucccugcugaucgugaacaacgccaccaacguggucaucaaggugugcgaguuccaguucugcaacgaccccuuccucggcguguacuaccacaagaacaacaagagcuggauggaguccgaguuccgggucuacagcuccgccaacaacugcacguucgaguacgugagccagcccuuccugauggaccuggagggcaagcaggggaacuucaagaaccuccgcgaguucguguucaagaacaucgacggcuacuucaagaucuacuccaagcacaccccgaucaaccugguccgggaccugccccagggguucagcgcccucgagccccugguggaccugcccaucggcaucaacaucacccgcuuccagacccuccuggcccugcaccgguccuaccucacgccgggggacagcagcuccggcuggaccgcgggcgccgccgccuacuacgugggguaccugcagccccgcaccuuccugcucaaguacaacgagaacggcaccaucacggacgcggucgacugcgcccuggacccccugagcgagaccaagugcacccucaaguccuucaccguggagaaggggaucuaccagacgagcaacuuccgggugcagcccaccgaguccaucguccgcuucccgaacaucaccaaccugugccccuucggcgagguguucaacgccacccgguucgccagcgucuacgccuggaaccgcaagcggaucuccaacugcguggcggacuacagcgugcuguacaacuccgccagcuucuccacguucaagugcuacggcgucagccccaccaagcucaacgaccugugcuucaccaacguguacgccgacuccuucgugauccgcggggacgagguccggcagaucgcccccggccagaccgggaagaucgccgacuacaacuacaagcugccggacgacuucacgggcugcgugaucgcguggaacagcaacaaccucgacuccaaggucgggggcaacuacaacuaccuguaccgccuguuccgcaagagcaaccucaagcccuucgagcgggacaucuccaccgagaucuaccaggccggcagcacccccugcaacgggguggagggcuucaacugcuacuucccccugcaguccuacggguuccagccgaccaacggcgugggguaccagcccuaccggguggucgugcugagcuucgagcuccugcacgcccccgccacggugugcggccccaagaaguccaccaaccuggucaagaacaagugcgugaacuucaacuucaacggccucaccgggaccggcgugcugaccgagagcaacaagaaguuccugccguuccagcaguucgggcgcgacaucgccgacacgaccgacgcgguccgcgacccccagacccuggagauccucgacaucacccccugcagcuucggcgggguguccgugaucacgccgggcaccaacaccagcaaccaggucgccgugcuguaccagggcgugaacugcaccgagguccccguggccauccacgccgaccagcugacgcccaccuggcggguguacuccaccggcagcaacgucuuccagacccgcgccgggugccucaucggcgcggagcacgugaacaacuccuacgagugcgacauccccaucggggccggcaucugcgccagcuaccagacgcagaccaacuccccgcggcgcgcccggagcguggcgucccagagcaucaucgccuacaccaugucccugggcgccgagaacagcgucgccuacuccaacaacagcaucgccauccccaccaacuucacgaucuccgugaccaccgagauccugcccgugagcaugaccaagacgagcgucgacugcaccauguacaucugcggggacuccaccgagugcagcaaccuccugcugcaguacggcuccuucugcacccagcucaaccgcgcgcugacggggaucgccguggagcaggacaagaacacccaggagguguucgcccaggucaagcagaucuacaagacgcccccgaucaaggacuucggcggguucaacuucagccagauccugcccgaccccuccaagcccagcaagcgguccuucaucgaggaccuccuguucaacaaggugacccuggccgacgccggcuucaucaagcaguacggcgacugccucggggacaucgcggcccgcgaccugaucugcgcccagaaguucaacggccugaccgugcucccgccccugcugaccgacgagaugaucgcccaguacaccagcgcccuccuggcggggaccaucacguccggcuggaccuucggggccggcgccgcccugcagauccccuucgcgaugcagauggccuaccgguucaacggcaucggggucacccagaacgugcucuacgagaaccagaagcugaucgccaaccaguucaacagcgccaucggcaagauccaggacucccugagcuccaccgccagcgcgcucgggaagcugcaggacguggucaaccagaacgcccaggcccugaacacgcucgugaagcagcuguccagcaacuucggcgccaucuccagcgugcugaacgacauccucucccgccuggacaaggucgaggccgaggugcagaucgaccggcugaucaccgggcgccuccagagccugcagaccuacgugacccagcagcugauccgggcggccgagauccgcgccagcgccaaccucgccgcgaccaagauguccgagugcguccugggccagagcaagcggguggacuucugcggcaagggguaccaccugauguccuucccccagagcgccccgcacggcguggucuuccuccacgugacguacguccccgcccaggagaagaacuucaccaccgcccccgcgaucugccacgacgggaaggcccacuucccccgcgagggcguguucguguccaacgggacccacugguucgucacgcagcggaacuucuacgagccgcagaucaucaccaccgacaacaccuucgugagcggcaacugcgacguggucaucggcaucgugaacaacacgguguacgacccccugcagcccgagcuggacuccuucaaggaggagcucgacaaguacuucaagaaccacaccagccccgacgucgaccugggggacaucuccggcaucaacgccagcguggugaacauccagaaggagaucgaccgccugaacgaggucgccaagaaccucaacgagucccugaucgaccugcaggagcucgggaaguacgagcaguacaucaaguggccgugguacaucuggcugggcuucaucgccggccugaucgcgaucgugauggugaccaucaugcucugcugcaugaccagcugcugcuccugccugaaggggugcugcagcugcggcuccugcugcaaguucgacgaggacgacagcgagcccguccugaagggggugaagcuccacuacacgugaggacuagucccuguucccagagcccacuuuuuuuucuuuuuuugaaauaaaauagccugucuuucagaucuaaaaaaaaaaaaaaaaaaaaaaaaaaaaaaaaaaaaaaaaaaaaaaaaaaaaaaaaaaaaaaaaaaaaaaaaaaaaaaaaaaaaaaaaaaaaaaaaaaaa

SEQ ID NO: 24956 - RNA, 4167 nt, Artificial Sequence
  SARS-CoV-2/Wuhan/WIV05/2019__EPI_ISL_402128 spike protein mRNA gc (1-1273)(Y453F_D614G)
aggagagggcgcuuggcuugcaaggacccugagcugcggcauugaagcacacccaacccaacucgacugaagucagccucacugaaccggaucugagaaucuucucucucugggcuugccagggcucuccgaaccuagcuagcauccucuucaauuccaacuagaaagcuuaccauguucguguuccugguccuccugccccuggugagcucccagugcgugaaccucaccacccgcacgcagcugccgcccgccuacaccaacagcuucacccggggcgucuacuaccccgacaagguguuccgcuccagcgugcugcacuccacccaggaccucuuccugcccuucuucagcaacgucacgugguuccacgccauccacguguccgggaccaacggcaccaagcgguucgacaacccggugcugcccuucaacgacggggucuacuucgcgagcaccgagaaguccaacaucauccgcggcuggaucuucgggacgacccucgacagcaagacccagucccugcugaucgugaacaacgccaccaacguggucaucaaggugugcgaguuccaguucugcaacgaccccuuccucggcguguacuaccacaagaacaacaagagcuggauggaguccgaguuccgggucuacagcuccgccaacaacugcacguucgaguacgugagccagcccuuccugauggaccuggagggcaagcaggggaacuucaagaaccuccgcgaguucguguucaagaacaucgacggcuacuucaagaucuacuccaagcacaccccgaucaaccugguccgggaccugccccagggguucagcgcccucgagccccugguggaccugcccaucggcaucaacaucacccgcuuccagacccuccuggcccugcaccgguccuaccucacgccgggggacagcagcuccggcuggaccgcgggcgccgccgccuacuacgugggguaccugcagccccgcaccuuccugcucaaguacaacgagaacggcaccaucacggacgcggucgacugcgcccuggacccccugagcgagaccaagugcacccucaaguccuucaccguggagaaggggaucuaccagacgagcaacuuccgggugcagcccaccgaguccaucguccgcuucccgaacaucaccaaccugugccccuucggcgagguguucaacgccacccgguucgccagcgucuacgccuggaaccgcaagcggaucuccaacugcguggcggacuacagcgugcuguacaacuccgccagcuucuccacguucaagugcuacggcgucagccccaccaagcucaacgaccugugcuucaccaacguguacgccgacuccuucgugauccgcggggacgagguccggcagaucgcccccggccagaccgggaagaucgccgacuacaacuacaagcugccggacgacuucacgggcugcgugaucgcguggaacagcaacaaccucgacuccaaggucgggggcaacuacaacuaccuguuccgccuguuccgcaagagcaaccucaagcccuucgagcgggacaucuccaccgagaucuaccaggccggcagcacccccugcaacgggguggagggcuucaacugcuacuucccccugcaguccuacggguuccagccgaccaacggcgugggguaccagcccuaccggguggucgugcugagcuucgagcuccugcacgcccccgccacggugugcggccccaagaaguccaccaaccuggucaagaacaagugcgugaacuucaacuucaacggccucaccgggaccggcgugcugaccgagagcaacaagaaguuccugccguuccagcaguucgggcgcgacaucgccgacacgaccgacgcgguccgcgacccccagacccuggagauccucgacaucacccccugcagcuucggcgggguguccgugaucacgccgggcaccaacaccagcaaccaggucgccgugcuguaccagggcgugaacugcaccgagguccccguggccauccacgccgaccagcugacgcccaccuggcggguguacuccaccggcagcaacgucuuccagacccgcgccgggugccucaucggcgcggagcacgugaacaacuccuacgagugcgacauccccaucggggccggcaucugcgccagcuaccagacgcagaccaacuccccgcggcgcgcccggagcguggcgucccagagcaucaucgccuacaccaugucccugggcgccgagaacagcgucgccuacuccaacaacagcaucgccauccccaccaacuucacgaucuccgugaccaccgagauccugcccgugagcaugaccaagacgagcgucgacugcaccauguacaucugcggggacuccaccgagugcagcaaccuccugcugcaguacggcuccuucugcacccagcucaaccgcgcgcugacggggaucgccguggagcaggacaagaacacccaggagguguucgcccaggucaagcagaucuacaagacgcccccgaucaaggacuucggcggguucaacuucagccagauccugcccgaccccuccaagcccagcaagcgguccuucaucgaggaccuccuguucaacaaggugacccuggccgacgccggcuucaucaagcaguacggcgacugccucggggacaucgcggcccgcgaccugaucugcgcccagaaguucaacggccugaccgugcucccgccccugcugaccgacgagaugaucgcccaguacaccagcgcccuccuggcggggaccaucacguccggcuggaccuucggggccggcgccgcccugcagauccccuucgcgaugcagauggccuaccgguucaacggcaucggggucacccagaacgugcucuacgagaaccagaagcugaucgccaaccaguucaacagcgccaucggcaagauccaggacucccugagcuccaccgccagcgcgcucgggaagcugcaggacguggucaaccagaacgcccaggcccugaacacgcucgugaagcagcuguccagcaacuucggcgccaucuccagcgugcugaacgacauccucucccgccuggacaaggucgaggccgaggugcagaucgaccggcugaucaccgggcgccuccagagccugcagaccuacgugacccagcagcugauccgggcggccgagauccgcgccagcgccaaccucgccgcgaccaagauguccgagugcguccugggccagagcaagcggguggacuucugcggcaagggguaccaccugauguccuucccccagagcgccccgcacggcguggucuuccuccacgugacguacguccccgcccaggagaagaacuucaccaccgcccccgcgaucugccacgacgggaaggcccacuucccccgcgagggcguguucguguccaacgggacccacugguucgucacgcagcggaacuucuacgagccgcagaucaucaccaccgacaacaccuucgugagcggcaacugcgacguggucaucggcaucgugaacaacacgguguacgacccccugcagcccgagcuggacuccuucaaggaggagcucgacaaguacuucaagaaccacaccagccccgacgucgaccugggggacaucuccggcaucaacgccagcguggugaacauccagaaggagaucgaccgccugaacgaggucgccaagaaccucaacgagucccugaucgaccugcaggagcucgggaaguacgagcaguacaucaaguggccgugguacaucuggcugggcuucaucgccggccugaucgcgaucgugauggugaccaucaugcucugcugcaugaccagcugcugcuccugccugaaggggugcugcagcugcggcuccugcugcaaguucgacgaggacgacagcgagcccguccugaagggggugaagcuccacuacacgugaggacuagucccuguucccagagcccacuuuuuuuucuuuuuuugaaauaaaauagccugucuuucagaucuaaaaaaaaaaaaaaaaaaaaaaaaaaaaaaaaaaaaaaaaaaaaaaaaaaaaaaaaaaaaaaaaaaaaaaaaaaaaaaaaaaaaaaaaaaaaaaaaaaaa

SEQ ID NO: 24957 - RNA, 4167 nt, Artificial Sequence
  SARS-CoV-2/Wuhan/WIV05/2019__EPI_ISL_402128 spike protein mRNA gc (1-1273)(D614G_I692V)
aggagagggcgcuuggcuugcaaggacccugagcugcggcauugaagcacacccaacccaacucgacugaagucagccucacugaaccggaucugagaaucuucucucucugggcuugccagggcucuccgaaccuagcuagcauccucuucaauuccaacuagaaagcuuaccauguucguguuccugguccuccugccccuggugagcucccagugcgugaaccucaccacccgcacgcagcugccgcccgccuacaccaacagcuucacccggggcgucuacuaccccgacaagguguuccgcuccagcgugcugcacuccacccaggaccucuuccugcccuucuucagcaacgucacgugguuccacgccauccacguguccgggaccaacggcaccaagcgguucgacaacccggugcugcccuucaacgacggggucuacuucgcgagcaccgagaaguccaacaucauccgcggcuggaucuucgggacgacccucgacagcaagacccagucccugcugaucgugaacaacgccaccaacguggucaucaaggugugcgaguuccaguucugcaacgaccccuuccucggcguguacuaccacaagaacaacaagagcuggauggaguccgaguuccgggucuacagcuccgccaacaacugcacguucgaguacgugagccagcccuuccugauggaccuggagggcaagcaggggaacuucaagaaccuccgcgaguucguguucaagaacaucgacggcuacuucaagaucuacuccaagcacaccccgaucaaccugguccgggaccugccccagggguucagcgcccucgagccccugguggaccugcccaucggcaucaacaucacccgcuuccagacccuccuggcccugcaccgguccuaccucacgccgggggacagcagcuccggcuggaccgcgggcgccgccgccuacuacgugggguaccugcagccccgcaccuuccugcucaaguacaacgagaacggcaccaucacggacgcggucgacugcgcccuggacccccugagcgagaccaagugcacccucaaguccuucaccguggagaaggggaucuaccagacgagcaacuuccgggugcagcccaccgaguccaucguccgcuucccgaacaucaccaaccugugccccuucggcgagguguucaacgccacccgguucgccagcgucuacgccuggaaccgcaagcggaucuccaacugcguggcggacuacagcgugcuguacaacuccgccagcuucuccacguucaagugcuacggcgucagccccaccaagcucaacgaccugugcuucaccaacguguacgccgacuccuucgugauccgcggggacgagguccggcagaucgcccccggccagaccgggaagaucgccgacuacaacuacaagcugccggacgacuucacgggcugcgugaucgcguggaacagcaacaaccucgacuccaaggucgggggcaacuacaacuaccuguaccgccuguuccgcaagagcaaccucaagcccuucgagcgggacaucuccaccgagaucuaccaggccggcagcacccccugcaacgggguggagggcuucaacugcuacuucccccugcaguccuacggguuccagccgaccaacggcgugggguaccagcccuaccggguggucgugcugagcuucgagcuccugcacgcccccgccacggugugcggccccaagaaguccaccaaccuggucaagaacaagugcgugaacuucaacuucaacggccucaccgggaccggcgugcugaccgagagcaacaagaaguuccugccguuccagcaguucgggcgcgacaucgccgacacgaccgacgcgguccgcgacccccagacccuggagauccucgacaucacccccugcagcuucggcgggguguccgugaucacgccgggcaccaacaccagcaaccaggucgccgugcuguaccagggcgugaacugcaccgagguccccguggccauccacgccgaccagcugacgcccaccuggcggguguacuccaccggcagcaacgucuuccagacccgcgccgggugccucaucggcgcggagcacgugaacaacuccuacgagugcgacauccccaucggggccggcaucugcgccagcuaccagacgcagaccaacuccccgcggcgcgcccggagcguggcgucccagagcgucaucgccuacaccaugucccugggcgccgagaacagcgucgccuacuccaacaacagcaucgccauccccaccaacuucacgaucuccgugaccaccgagauccugcccgugagcaugaccaagacgagcgucgacugcaccauguacaucugcggggacuccaccgagugcagcaaccuccugcugcaguacggcuccuucugcacccagcucaaccgcgcgcugacggggaucgccguggagcaggacaagaacacccaggagguguucgcccaggucaagcagaucuacaagacgcccccgaucaaggacuucggcggguucaacuucagccagauccugcccgaccccuccaagcccagcaagcgguccuucaucgaggaccuccuguucaacaaggugacccuggccgacgccggcuucaucaagcaguacggcgacugccucggggacaucgcggcccgcgaccugaucugcgcccagaaguucaacggccugaccgugcucccgccccugcugaccgacgagaugaucgcccaguacaccagcgcccuccuggcggggaccaucacguccggcuggaccuucggggccggcgccgcccugcagauccccuucgcgaugcagauggccuaccgguucaacggcaucggggucacccagaacgugcucuacgagaaccagaagcugaucgccaaccaguucaacagcgccaucggcaagauccaggacucccugagcuccaccgccagcgcgcucgggaagcugcaggacguggucaaccagaacgcccaggcccugaacacgcucgugaagcagcuguccagcaacuucggcgccaucuccagcgugcugaacgacauccucucccgccuggacaaggucgaggccgaggugcagaucgaccggcugaucaccgggcgccuccagagccugcagaccuacgugacccagcagcugauccgggcggccgagauccgcgccagcgccaaccucgccgcgaccaagauguccgagugcguccugggccagagcaagcggguggacuucugcggcaagggguaccaccugauguccuucccccagagcgccccgcacggcguggucuuccuccacgugacguacguccccgcccaggagaagaacuucaccaccgcccccgcgaucugccacgacgggaaggcccacuucccccgcgagggcguguucguguccaacgggacccacugguucgucacgcagcggaacuucuacgagccgcagaucaucaccaccgacaacaccuucgugagcggcaacugcgacguggucaucggcaucgugaacaacacgguguacgacccccugcagcccgagcuggacuccuucaaggaggagcucgacaaguacuucaagaaccacaccagccccgacgucgaccugggggacaucuccggcaucaacgccagcguggugaacauccagaaggagaucgaccgccugaacgaggucgccaagaaccucaacgagucccugaucgaccugcaggagcucgggaaguacgagcaguacaucaaguggccgugguacaucuggcugggcuucaucgccggccugaucgcgaucgugauggugaccaucaugcucugcugcaugaccagcugcugcuccugccugaaggggugcugcagcugcggcuccugcugcaaguucgacgaggacgacagcgagcccguccugaagggggugaagcuccacuacacgugaggacuagucccuguucccagagcccacuuuuuuuucuuuuuuugaaauaaaauagccugucuuucagaucuaaaaaaaaaaaaaaaaaaaaaaaaaaaaaaaaaaaaaaaaaaaaaaaaaaaaaaaaaaaaaaaaaaaaaaaaaaaaaaaaaaaaaaaaaaaaaaaaaaaa

SEQ ID NO: 24958 - RNA, 4167 nt, Artificial Sequence
  SARS-CoV-2/Wuhan/WIV05/2019__EPI_ISL_402128 spike protein mRNA gc (1-1273)(D614G_M1229I)
aggagagggcgcuuggcuugcaaggacccugagcugcggcauugaagcacacccaacccaacucgacugaagucagccucacugaaccggaucugagaaucuucucucucugggcuugccagggcucuccgaaccuagcuagcauccucuucaauuccaacuagaaagcuuaccauguucguguuccugguccuccugccccuggugagcucccagugcgugaaccucaccacccgcacgcagcugccgcccgccuacaccaacagcuucacccggggcgucuacuaccccgacaagguguuccgcuccagcgugcugcacuccacccaggaccucuuccugcccuucuucagcaacgucacgugguuccacgccauccacguguccgggaccaacggcaccaagcgguucgacaacccggugcugcccuucaacgacggggucuacuucgcgagcaccgagaaguccaacaucauccgcggcuggaucuucgggacgacccucgacagcaagacccagucccugcugaucgugaacaacgccaccaacguggucaucaaggugugcgaguuccaguucugcaacgaccccuuccucggcguguacuaccacaagaacaacaagagcuggauggaguccgaguuccgggucuacagcuccgccaacaacugcacguucgaguacgugagccagcccuuccugauggaccuggagggcaagcaggggaacuucaagaaccuccgcgaguucguguucaagaacaucgacggcuacuucaagaucuacuccaagcacaccccgaucaaccugguccgggaccugccccagggguucagcgcccucgagccccugguggaccugcccaucggcaucaacaucacccgcuuccagacccuccuggcccugcaccgguccuaccucacgccgggggacagcagcuccggcuggaccgcgggcgccgccgccuacuacgugggguaccugcagccccgcaccuuccugcucaaguacaacgagaacggcaccaucacggacgcggucgacugcgcccuggacccccugagcgagaccaagugcacccucaaguccuucaccguggagaaggggaucuaccagacgagcaacuuccgggugcagcccaccgaguccaucguccgcuucccgaacaucaccaaccugugccccuucggcgagguguucaacgccacccgguucgccagcgucuacgccuggaaccgcaagcggaucuccaacugcguggcggacuacagcgugcuguacaacuccgccagcuucuccacguucaagugcuacggcgucagccccaccaagcucaacgaccugugcuucaccaacguguacgccgacuccuucgugauccgcggggacgagguccggcagaucgcccccggccagaccgggaagaucgccgacuacaacuacaagcugccggacgacuucacgggcugcgugaucgcguggaacagcaacaaccucgacuccaaggucgggggcaacuacaacuaccuguaccgccuguuccgcaagagcaaccucaagcccuucgagcgggacaucuccaccgagaucuaccaggccggcagcacccccugcaacgggguggagggcuucaacugcuacuucccccugcaguccuacggguuccagccgaccaacggcgugggguaccagcccuaccggguggucgugcugagcuucgagcuccugcacgcccccgccacggugugcggccccaagaaguccaccaaccuggucaagaacaagugcgugaacuucaacuucaacggccucaccgggaccggcgugcugaccgagagcaacaagaaguuccugccguuccagcaguucgggcgcgacaucgccgacacgaccgacgcgguccgcgacccccagacccuggagauccucgacaucacccccugcagcuucggcgggguguccgugaucacgccgggcaccaacaccagcaaccaggucgccgugcuguaccagggcgugaacugcaccgagguccccguggccauccacgccgaccagcugacgcccaccuggcggguguacuccaccggcagcaacgucuuccagacccgcgccgggugccucaucggcgcggagcacgugaacaacuccuacgagugcgacauccccaucggggccggcaucugcgccagcuaccagacgcagaccaacuccccgcggcgcgcccggagcguggcgucccagagcaucaucgccuacaccaugucccugggcgccgagaacagcgucgccuacuccaacaacagcaucgccauccccaccaacuucacgaucuccgugaccaccgagauccugcccgugagcaugaccaagacgagcgucgacugcaccauguacaucugcggggacuccaccgagugcagcaaccuccugcugcaguacggcuccuucugcacccagcucaaccgcgcgcugacggggaucgccguggagcaggacaagaacacccaggagguguucgcccaggucaagcagaucuacaagacgcccccgaucaaggacuucggcggguucaacuucagccagauccugcccgaccccuccaagcccagcaagcgguccuucaucgaggaccuccuguucaacaaggugacccuggccgacgccggcuucaucaagcaguacggcgacugccucggggacaucgcggcccgcgaccugaucugcgcccagaaguucaacggccugaccgugcucccgccccugcugaccgacgagaugaucgcccaguacaccagcgcccuccuggcggggaccaucacguccggcuggaccuucggggccggcgccgcccugcagauccccuucgcgaugcagauggccuaccgguucaacggcaucggggucacccagaacgugcucuacgagaaccagaagcugaucgccaaccaguucaacagcgccaucggcaagauccaggacucccugagcuccaccgccagcgcgcucgggaagcugcaggacguggucaaccagaacgcccaggcccugaacacgcucgugaagcagcuguccagcaacuucggcgccaucuccagcgugcugaacgacauccucucccgccuggacaaggucgaggccgaggugcagaucgaccggcugaucaccgggcgccuccagagccugcagaccuacgugacccagcagcugauccgggcggccgagauccgcgccagcgccaaccucgccgcgaccaagauguccgagugcguccugggccagagcaagcggguggacuucugcggcaagggguaccaccugauguccuucccccagagcgccccgcacggcguggucuuccuccacgugacguacguccccgcccaggagaagaacuucaccaccgcccccgcgaucugccacgacgggaaggcccacuucccccgcgagggcguguucguguccaacgggacccacugguucgucacgcagcggaacuucuacgagccgcagaucaucaccaccgacaacaccuucgugagcggcaacugcgacguggucaucggcaucgugaacaacacgguguacgacccccugcagcccgagcuggacuccuucaaggaggagcucgacaaguacuucaagaaccacaccagccccgacgucgaccugggggacaucuccggcaucaacgccagcguggugaacauccagaaggagaucgaccgccugaacgaggucgccaagaaccucaacgagucccugaucgaccugcaggagcucgggaaguacgagcaguacaucaaguggccgugguacaucuggcugggcuucaucgccggccugaucgcgaucgugaucgugaccaucaugcucugcugcaugaccagcugcugcuccugccugaaggggugcugcagcugcggcuccugcugcaaguucgacgaggacgacagcgagcccguccugaagggggugaagcuccacuacacgugaggacuagucccuguucccagagcccacuuuuuuuucuuuuuuugaaauaaaauagccugucuuucagaucuaaaaaaaaaaaaaaaaaaaaaaaaaaaaaaaaaaaaaaaaaaaaaaaaaaaaaaaaaaaaaaaaaaaaaaaaaaaaaaaaaaaaaaaaaaaaaaaaaaaa

SEQ ID NO: 24959 - RNA, 4161 nt, Artificial Sequence
  SARS-CoV-2/Wuhan/WIV05/2019__EPI_ISL_402128 spike protein mRNA gc (1-1273)(H69del_V70del_A222V_Y453F_S477N_D614G_I692V)
aggagagggcgcuuggcuugcaaggacccugagcugcggcauugaagcacacccaacccaacucgacugaagucagccucacugaaccggaucugagaaucuucucucucugggcuugccagggcucuccgaaccuagcuagcauccucuucaauuccaacuagaaagcuuaccauguucguguuccugguccuccugccccuggugagcucccagugcgugaaccucaccacccgcacgcagcugccgcccgccuacaccaacagcuucacccggggcgucuacuaccccgacaagguguuccgcuccagcgugcugcacuccacccaggaccucuuccugcccuucuucagcaacgucacgugguuccacgccaucuccgggaccaacggcaccaagcgguucgacaacccggugcugcccuucaacgacggggucuacuucgcgagcaccgagaaguccaacaucauccgcggcuggaucuucgggacgacccucgacagcaagacccagucccugcugaucgugaacaacgccaccaacguggucaucaaggugugcgaguuccaguucugcaacgaccccuuccucggcguguacuaccacaagaacaacaagagcuggauggaguccgaguuccgggucuacagcuccgccaacaacugcacguucgaguacgugagccagcccuuccugauggaccuggagggcaagcaggggaacuucaagaaccuccgcgaguucguguucaagaacaucgacggcuacuucaagaucuacuccaagcacaccccgaucaaccugguccgggaccugccccagggguucagcguccucgagccccugguggaccugcccaucggcaucaacaucacccgcuuccagacccuccuggcccugcaccgguccuaccucacgccgggggacagcagcuccggcuggaccgcgggcgccgccgccuacuacgugggguaccugcagccccgcaccuuccugcucaaguacaacgagaacggcaccaucacggacgcggucgacugcgcccuggacccccugagcgagaccaagugcacccucaaguccuucaccguggagaaggggaucuaccagacgagcaacuuccgggugcagcccaccgaguccaucguccgcuucccgaacaucaccaaccugugccccuucggcgagguguucaacgccacccgguucgccagcgucuacgccuggaaccgcaagcggaucuccaacugcguggcggacuacagcgugcuguacaacuccgccagcuucuccacguucaagugcuacggcgucagccccaccaagcucaacgaccugugcuucaccaacguguacgccgacuccuucgugauccgcggggacgagguccggcagaucgcccccggccagaccgggaagaucgccgacuacaacuacaagcugccggacgacuucacgggcugcgugaucgcguggaacagcaacaaccucgacuccaaggucgggggcaacuacaacuaccuguuccgccuguuccgcaagagcaaccucaagcccuucgagcgggacaucuccaccgagaucuaccaggccggcaacacccccugcaacgggguggagggcuucaacugcuacuucccccugcaguccuacggguuccagccgaccaacggcgugggguaccagcccuaccggguggucgugcugagcuucgagcuccugcacgcccccgccacggugugcggccccaagaaguccaccaaccuggucaagaacaagugcgugaacuucaacuucaacggccucaccgggaccggcgugcugaccgagagcaacaagaaguuccugccguuccagcaguucgggcgcgacaucgccgacacgaccgacgcgguccgcgacccccagacccuggagauccucgacaucacccccugcagcuucggcgggguguccgugaucacgccgggcaccaacaccagcaaccaggucgccgugcuguaccagggcgugaacugcaccgagguccccguggccauccacgccgaccagcugacgcccaccuggcggguguacuccaccggcagcaacgucuuccagacccgcgccgggugccucaucggcgcggagcacgugaacaacuccuacgagugcgacauccccaucggggccggcaucugcgccagcuaccagacgcagaccaacuccccgcggcgcgcccggagcguggcgucccagagcgucaucgccuacaccaugucccugggcgccgagaacagcgucgccuacuccaacaacagcaucgccauccccaccaacuucacgaucuccgugaccaccgagauccugcccgugagcaugaccaagacgagcgucgacugcaccauguacaucugcggggacuccaccgagugcagcaaccuccugcugcaguacggcuccuucugcacccagcucaaccgcgcgcugacggggaucgccguggagcaggacaagaacacccaggagguguucgcccaggucaagcagaucuacaagacgcccccgaucaaggacuucggcggguucaacuucagccagauccugcccgaccccuccaagcccagcaagcgguccuucaucgaggaccuccuguucaacaaggugacccuggccgacgccggcuucaucaagcaguacggcgacugccucggggacaucgcggcccgcgaccugaucugcgcccagaaguucaacggccugaccgugcucccgccccugcugaccgacgagaugaucgcccaguacaccagcgcccuccuggcggggaccaucacguccggcuggaccuucggggccggcgccgcccugcagauccccuucgcgaugcagauggccuaccgguucaacggcaucggggucacccagaacgugcucuacgagaaccagaagcugaucgccaaccaguucaacagcgccaucggcaagauccaggacucccugagcuccaccgccagcgcgcucgggaagcugcaggacguggucaaccagaacgcccaggcccugaacacgcucgugaagcagcuguccagcaacuucggcgccaucuccagcgugcugaacgacauccucucccgccuggacaaggucgaggccgaggugcagaucgaccggcugaucaccgggcgccuccagagccugcagaccuacgugacccagcagcugauccgggcggccgagauccgcgccagcgccaaccucgccgcgaccaagauguccgagugcguccugggccagagcaagcggguggacuucugcggcaagggguaccaccugauguccuucccccagagcgccccgcacggcguggucuuccuccacgugacguacguccccgcccaggagaagaacuucaccaccgcccccgcgaucugccacgacgggaaggcccacuucccccgcgagggcguguucguguccaacgggacccacugguucgucacgcagcggaacuucuacgagccgcagaucaucaccaccgacaacaccuucgugagcggcaacugcgacguggucaucggcaucgugaacaacacgguguacgacccccugcagcccgagcuggacuccuucaaggaggagcucgacaaguacuucaagaaccacaccagccccgacgucgaccugggggacaucuccggcaucaacgccagcguggugaacauccagaaggagaucgaccgccugaacgaggucgccaagaaccucaacgagucccugaucgaccugcaggagcucgggaaguacgagcaguacaucaaguggccgugguacaucuggcugggcuucaucgccggccugaucgcgaucgugauggugaccaucaugcucugcugcaugaccagcugcugcuccugccugaaggggugcugcagcugcggcuccugcugcaaguucgacgaggacgacagcgagcccguccugaagggggugaagcuccacuacacgugaggacuagucccuguucccagagcccacuuuuuuuucuuuuuuugaaauaaaauagccugucuuucagaucuaaaaaaaaaaaaaaaaaaaaaaaaaaaaaaaaaaaaaaaaaaaaaaaaaaaaaaaaaaaaaaaaaaaaaaaaaaaaaaaaaaaaaaaaaaaaaaaaaaaa

SEQ ID NO: 24960 - RNA, 4161 nt, Artificial Sequence
  SARS-CoV-2/Wuhan/WIV05/2019__EPI_ISL_402128 spike protein mRNA gc (1-1273)(H69del_V70del_Y453F_D614G_I692V_M1229I)
aggagagggcgcuuggcuugcaaggacccugagcugcggcauugaagcacacccaacccaacucgacugaagucagccucacugaaccggaucugagaaucuucucucucugggcuugccagggcucuccgaaccuagcuagcauccucuucaauuccaacuagaaagcuuaccauguucguguuccugguccuccugccccuggugagcucccagugcgugaaccucaccacccgcacgcagcugccgcccgccuacaccaacagcuucacccggggcgucuacuaccccgacaagguguuccgcuccagcgugcugcacuccacccaggaccucuuccugcccuucuucagcaacgucacgugguuccacgccaucuccgggaccaacggcaccaagcgguucgacaacccggugcugcccuucaacgacggggucuacuucgcgagcaccgagaaguccaacaucauccgcggcuggaucuucgggacgacccucgacagcaagacccagucccugcugaucgugaacaacgccaccaacguggucaucaaggugugcgaguuccaguucugcaacgaccccuuccucggcguguacuaccacaagaacaacaagagcuggauggaguccgaguuccgggucuacagcuccgccaacaacugcacguucgaguacgugagccagcccuuccugauggaccuggagggcaagcaggggaacuucaagaaccuccgcgaguucguguucaagaacaucgacggcuacuucaagaucuacuccaagcacaccccgaucaaccugguccgggaccugccccagggguucagcgcccucgagccccugguggaccugcccaucggcaucaacaucacccgcuuccagacccuccuggcccugcaccgguccuaccucacgccgggggacagcagcuccggcuggaccgcgggcgccgccgccuacuacgugggguaccugcagccccgcaccuuccugcucaaguacaacgagaacggcaccaucacggacgcggucgacugcgcccuggacccccugagcgagaccaagugcacccucaaguccuucaccguggagaaggggaucuaccagacgagcaacuuccgggugcagcccaccgaguccaucguccgcuucccgaacaucaccaaccugugccccuucggcgagguguucaacgccacccgguucgccagcgucuacgccuggaaccgcaagcggaucuccaacugcguggcggacuacagcgugcuguacaacuccgccagcuucuccacguucaagugcuacggcgucagccccaccaagcucaacgaccugugcuucaccaacguguacgccgacuccuucgugauccgcggggacgagguccggcagaucgcccccggccagaccgggaagaucgccgacuacaacuacaagcugccggacgacuucacgggcugcgugaucgcguggaacagcaacaaccucgacuccaaggucgggggcaacuacaacuaccuguuccgccuguuccgcaagagcaaccucaagcccuucgagcgggacaucuccaccgagaucuaccaggccggcagcacccccugcaacgggguggagggcuucaacugcuacuucccccugcaguccuacggguuccagccgaccaacggcgugggguaccagcccuaccggguggucgugcugagcuucgagcuccugcacgcccccgccacggugugcggccccaagaaguccaccaaccuggucaagaacaagugcgugaacuucaacuucaacggccucaccgggaccggcgugcugaccgagagcaacaagaaguuccugccguuccagcaguucgggcgcgacaucgccgacacgaccgacgcgguccgcgacccccagacccuggagauccucgacaucacccccugcagcuucggcgggguguccgugaucacgccgggcaccaacaccagcaaccaggucgccgugcuguaccagggcgugaacugcaccgagguccccguggccauccacgccgaccagcugacgcccaccuggcggguguacuccaccggcagcaacgucuuccagacccgcgccgggugccucaucggcgcggagcacgugaacaacuccuacgagugcgacauccccaucggggccggcaucugcgccagcuaccagacgcagaccaacuccccgcggcgcgcccggagcguggcgucccagagcgugaucgccuacaccaugucccugggcgccgagaacagcgucgccuacuccaacaacagcaucgccauccccaccaacuucacgaucuccgugaccaccgagauccugcccgugagcaugaccaagacgagcgucgacugcaccauguacaucugcggggacuccaccgagugcagcaaccuccugcugcaguacggcuccuucugcacccagcucaaccgcgcgcugacggggaucgccguggagcaggacaagaacacccaggagguguucgcccaggucaagcagaucuacaagacgcccccgaucaaggacuucggcggguucaacuucagccagauccugcccgaccccuccaagcccagcaagcgguccuucaucgaggaccuccuguucaacaaggugacccuggccgacgccggcuucaucaagcaguacggcgacugccucggggacaucgcggcccgcgaccugaucugcgcccagaaguucaacggccugaccgugcucccgccccugcugaccgacgagaugaucgcccaguacaccagcgcccuccuggcggggaccaucacguccggcuggaccuucggggccggcgccgcccugcagauccccuucgcgaugcagauggccuaccgguucaacggcaucggggucacccagaacgugcucuacgagaaccagaagcugaucgccaaccaguucaacagcgccaucggcaagauccaggacucccugagcuccaccgccagcgcgcucgggaagcugcaggacguggucaaccagaacgcccaggcccugaacacgcucgugaagcagcuguccagcaacuucggcgccaucuccagcgugcugaacgacauccucucccgccuggacaaggucgaggccgaggugcagaucgaccggcugaucaccgggcgccuccagagccugcagaccuacgugacccagcagcugauccgggcggccgagauccgcgccagcgccaaccucgccgcgaccaagauguccgagugcguccugggccagagcaagcggguggacuucugcggcaagggguaccaccugauguccuucccccagagcgccccgcacggcguggucuuccuccacgugacguacguccccgcccaggagaagaacuucaccaccgcccccgcgaucugccacgacgggaaggcccacuucccccgcgagggcguguucguguccaacgggacccacugguucgucacgcagcggaacuucuacgagccgcagaucaucaccaccgacaacaccuucgugagcggcaacugcgacguggucaucggcaucgugaacaacacgguguacgacccccugcagcccgagcuggacuccuucaaggaggagcucgacaaguacuucaagaaccacaccagccccgacgucgaccugggggacaucuccggcaucaacgccagcguggugaacauccagaaggagaucgaccgccugaacgaggucgccaagaaccucaacgagucccugaucgaccugcaggagcucgggaaguacgagcaguacaucaaguggccgugguacaucuggcugggcuucaucgccggccugaucgcgaucgugaucgugaccaucaugcucugcugcaugaccagcugcugcuccugccugaaggggugcugcagcugcggcuccugcugcaaguucgacgaggacgacagcgagcccguccugaagggggugaagcuccacuacacgugaggacuagucccuguucccagagcccacuuuuuuuucuuuuuuugaaauaaaauagccugucuuucagaucuaaaaaaaaaaaaaaaaaaaaaaaaaaaaaaaaaaaaaaaaaaaaaaaaaaaaaaaaaaaaaaaaaaaaaaaaaaaaaaaaaaaaaaaaaaaaaaaaaaaa

SEQ ID NO: 24961 - RNA, 4158 nt, Artificial Sequence
  SARS-CoV-2/Wuhan/WIV05/2019__EPI_ISL_402128 spike protein mRNA gc (1-1273)(H69del_V70del_Y144del_N501Y_A570D_D614G_P681H_T716I_S982 A_D1118H)
aggagagggcgcuuggcuugcaaggacccugagcugcggcauugaagcacacccaacccaacucgacugaagucagccucacugaaccggaucugagaaucuucucucucugggcuugccagggcucuccgaaccuagcuagcauccucuucaauuccaacuagaaagcuuaccauguucguguuccugguccuccugccccuggugagcucccagugcgugaaccucaccacccgcacgcagcugccgcccgccuacaccaacagcuucacccggggcgucuacuaccccgacaagguguuccgcuccagcgugcugcacuccacccaggaccucuuccugcccuucuucagcaacgucacgugguuccacgccaucuccgggaccaacggcaccaagcgguucgacaacccggugcugcccuucaacgacggggucuacuucgcgagcaccgagaaguccaacaucauccgcggcuggaucuucgggacgacccucgacagcaagacccagucccugcugaucgugaacaacgccaccaacguggucaucaaggugugcgaguuccaguucugcaacgaccccuuccucggcguguaccacaagaacaacaagagcuggauggaguccgaguuccgggucuacagcuccgccaacaacugcacguucgaguacgugagccagcccuuccugauggaccuggagggcaagcaggggaacuucaagaaccuccgcgaguucguguucaagaacaucgacggcuacuucaagaucuacuccaagcacaccccgaucaaccugguccgggaccugccccagggguucagcgcccucgagccccugguggaccugcccaucggcaucaacaucacccgcuuccagacccuccuggcccugcaccgguccuaccucacgccgggggacagcagcuccggcuggaccgcgggcgccgccgccuacuacgugggguaccugcagccccgcaccuuccugcucaaguacaacgagaacggcaccaucacggacgcggucgacugcgcccuggacccccugagcgagaccaagugcacccucaaguccuucaccguggagaaggggaucuaccagacgagcaacuuccgggugcagcccaccgaguccaucguccgcuucccgaacaucaccaaccugugccccuucggcgagguguucaacgccacccgguucgccagcgucuacgccuggaaccgcaagcggaucuccaacugcguggcggacuacagcgugcuguacaacuccgccagcuucuccacguucaagugcuacggcgucagccccaccaagcucaacgaccugugcuucaccaacguguacgccgacuccuucgugauccgcggggacgagguccggcagaucgcccccggccagaccgggaagaucgccgacuacaacuacaagcugccggacgacuucacgggcugcgugaucgcguggaacagcaacaaccucgacuccaaggucgggggcaacuacaacuaccuguaccgccuguuccgcaagagcaaccucaagcccuucgagcgggacaucuccaccgagaucuaccaggccggcagcacccccugcaacgggguggagggcuucaacugcuacuucccccugcaguccuacggguuccagccgaccuacggcgugggguaccagcccuaccggguggucgugcugagcuucgagcuccugcacgcccccgccacggugugcggccccaagaaguccaccaaccuggucaagaacaagugcgugaacuucaacuucaacggccucaccgggaccggcgugcugaccgagagcaacaagaaguuccugccguuccagcaguucgggcgcgacaucgacgacacgaccgacgcgguccgcgacccccagacccuggagauccucgacaucacccccugcagcuucggcgggguguccgugaucacgccgggcaccaacaccagcaaccaggucgccgugcuguaccagggcgugaacugcaccgagguccccguggccauccacgccgaccagcugacgcccaccuggcggguguacuccaccggcagcaacgucuuccagacccgcgccgggugccucaucggcgcggagcacgugaacaacuccuacgagugcgacauccccaucggggccggcaucugcgccagcuaccagacgcagaccaacucccaccggcgcgcccggagcguggcgucccagagcaucaucgccuacaccaugucccugggcgccgagaacagcgucgccuacuccaacaacagcaucgccauccccaucaacuucacgaucuccgugaccaccgagauccugcccgugagcaugaccaagacgagcgucgacugcaccauguacaucugcggggacuccaccgagugcagcaaccuccugcugcaguacggcuccuucugcacccagcucaaccgcgcgcugacggggaucgccguggagcaggacaagaacacccaggagguguucgcccaggucaagcagaucuacaagacgcccccgaucaaggacuucggcggguucaacuucagccagauccugcccgaccccuccaagcccagcaagcgguccuucaucgaggaccuccuguucaacaaggugacccuggccgacgccggcuucaucaagcaguacggcgacugccucggggacaucgcggcccgcgaccugaucugcgcccagaaguucaacggccugaccgugcucccgccccugcugaccgacgagaugaucgcccaguacaccagcgcccuccuggcggggaccaucacguccggcuggaccuucggggccggcgccgcccugcagauccccuucgcgaugcagauggccuaccgguucaacggcaucggggucacccagaacgugcucuacgagaaccagaagcugaucgccaaccaguucaacagcgccaucggcaagauccaggacucccugagcuccaccgccagcgcgcucgggaagcugcaggacguggucaaccagaacgcccaggcccugaacacgcucgugaagcagcuguccagcaacuucggcgccaucuccagcgugcugaacgacauccucgcccgccuggacaaggucgaggccgaggugcagaucgaccggcugaucaccgggcgccuccagagccugcagaccuacgugacccagcagcugauccgggcggccgagauccgcgccagcgccaaccucgccgcgaccaagauguccgagugcguccugggccagagcaagcggguggacuucugcggcaagggguaccaccugauguccuucccccagagcgccccgcacggcguggucuuccuccacgugacguacguccccgcccaggagaagaacuucaccaccgcccccgcgaucugccacgacgggaaggcccacuucccccgcgagggcguguucguguccaacgggacccacugguucgucacgcagcggaacuucuacgagccgcagaucaucaccacccacaacaccuucgugagcggcaacugcgacguggucaucggcaucgugaacaacacgguguacgacccccugcagcccgagcuggacuccuucaaggaggagcucgacaaguacuucaagaaccacaccagccccgacgucgaccugggggacaucuccggcaucaacgccagcguggugaacauccagaaggagaucgaccgccugaacgaggucgccaagaaccucaacgagucccugaucgaccugcaggagcucgggaaguacgagcaguacaucaaguggccgugguacaucuggcugggcuucaucgccggccugaucgcgaucgugauggugaccaucaugcucugcugcaugaccagcugcugcuccugccugaaggggugcugcagcugcggcuccugcugcaaguucgacgaggacgacagcgagcccguccugaagggggugaagcuccacuacacgugaggacuagucccuguucccagagcccacuuuuuuuucuuuuuuugaaauaaaauagccugucuuucagaucuaaaaaaaaaaaaaaaaaaaaaaaaaaaaaaaaaaaaaaaaaaaaaaaaaaaaaaaaaaaaaaaaaaaaaaaaaaaaaaaaaaaaaaaaaaaaaaaaaaaa

SEQ ID NO: 24962 - RNA, 4167 nt, Artificial Sequence
  SARS-CoV-2/Wuhan/WIV05/2019__EPI_ISL_402128 spike protein mRNA gc (1-1273)(K417N_E484K_N501Y_D614G)
aggagagggcgcuuggcuugcaaggacccugagcugcggcauugaagcacacccaacccaacucgacugaagucagccucacugaaccggaucugagaaucuucucucucugggcuugccagggcucuccgaaccuagcuagcauccucuucaauuccaacuagaaagcuuaccauguucguguuccugguccuccugccccuggugagcucccagugcgugaaccucaccacccgcacgcagcugccgcccgccuacaccaacagcuucacccggggcgucuacuaccccgacaagguguuccgcuccagcgugcugcacuccacccaggaccucuuccugcccuucuucagcaacgucacgugguuccacgccauccacguguccgggaccaacggcaccaagcgguucgacaacccggugcugcccuucaacgacggggucuacuucgcgagcaccgagaaguccaacaucauccgcggcuggaucuucgggacgacccucgacagcaagacccagucccugcugaucgugaacaacgccaccaacguggucaucaaggugugcgaguuccaguucugcaacgaccccuuccucggcguguacuaccacaagaacaacaagagcuggauggaguccgaguuccgggucuacagcuccgccaacaacugcacguucgaguacgugagccagcccuuccugauggaccuggagggcaagcaggggaacuucaagaaccuccgcgaguucguguucaagaacaucgacggcuacuucaagaucuacuccaagcacaccccgaucaaccugguccgggaccugccccagggguucagcgcccucgagccccugguggaccugcccaucggcaucaacaucacccgcuuccagacccuccuggcccugcaccgguccuaccucacgccgggggacagcagcuccggcuggaccgcgggcgccgccgccuacuacgugggguaccugcagccccgcaccuuccugcucaaguacaacgagaacggcaccaucacggacgcggucgacugcgcccuggacccccugagcgagaccaagugcacccucaaguccuucaccguggagaaggggaucuaccagacgagcaacuuccgggugcagcccaccgaguccaucguccgcuucccgaacaucaccaaccugugccccuucggcgagguguucaacgccacccgguucgccagcgucuacgccuggaaccgcaagcggaucuccaacugcguggcggacuacagcgugcuguacaacuccgccagcuucuccacguucaagugcuacggcgucagccccaccaagcucaacgaccugugcuucaccaacguguacgccgacuccuucgugauccgcggggacgagguccggcagaucgcccccggccagaccgggaacaucgccgacuacaacuacaagcugccggacgacuucacgggcugcgugaucgcguggaacagcaacaaccucgacuccaaggucgggggcaacuacaacuaccuguaccgccuguuccgcaagagcaaccucaagcccuucgagcgggacaucuccaccgagaucuaccaggccggcagcacccccugcaacggggugaagggcuucaacugcuacuucccccugcaguccuacggguuccagccgaccuacggcgugggguaccagcccuaccggguggucgugcugagcuucgagcuccugcacgcccccgccacggugugcggccccaagaaguccaccaaccuggucaagaacaagugcgugaacuucaacuucaacggccucaccgggaccggcgugcugaccgagagcaacaagaaguuccugccguuccagcaguucgggcgcgacaucgccgacacgaccgacgcgguccgcgacccccagacccuggagauccucgacaucacccccugcagcuucggcgggguguccgugaucacgccgggcaccaacaccagcaaccaggucgccgugcuguaccagggcgugaacugcaccgagguccccguggccauccacgccgaccagcugacgcccaccuggcggguguacuccaccggcagcaacgucuuccagacccgcgccgggugccucaucggcgcggagcacgugaacaacuccuacgagugcgacauccccaucggggccggcaucugcgccagcuaccagacgcagaccaacuccccgcggcgcgcccggagcguggcgucccagagcaucaucgccuacaccaugucccugggcgccgagaacagcgucgccuacuccaacaacagcaucgccauccccaccaacuucacgaucuccgugaccaccgagauccugcccgugagcaugaccaagacgagcgucgacugcaccauguacaucugcggggacuccaccgagugcagcaaccuccugcugcaguacggcuccuucugcacccagcucaaccgcgcgcugacggggaucgccguggagcaggacaagaacacccaggagguguucgcccaggucaagcagaucuacaagacgcccccgaucaaggacuucggcggguucaacuucagccagauccugcccgaccccuccaagcccagcaagcgguccuucaucgaggaccuccuguucaacaaggugacccuggccgacgccggcuucaucaagcaguacggcgacugccucggggacaucgcggcccgcgaccugaucugcgcccagaaguucaacggccugaccgugcucccgccccugcugaccgacgagaugaucgcccaguacaccagcgcccuccuggcggggaccaucacguccggcuggaccuucggggccggcgccgcccugcagauccccuucgcgaugcagauggccuaccgguucaacggcaucggggucacccagaacgugcucuacgagaaccagaagcugaucgccaaccaguucaacagcgccaucggcaagauccaggacucccugagcuccaccgccagcgcgcucgggaagcugcaggacguggucaaccagaacgcccaggcccugaacacgcucgugaagcagcuguccagcaacuucggcgccaucuccagcgugcugaacgacauccucucccgccuggacaaggucgaggccgaggugcagaucgaccggcugaucaccgggcgccuccagagccugcagaccuacgugacccagcagcugauccgggcggccgagauccgcgccagcgccaaccucgccgcgaccaagauguccgagugcguccugggccagagcaagcggguggacuucugcggcaagggguaccaccugauguccuucccccagagcgccccgcacggcguggucuuccuccacgugacguacguccccgcccaggagaagaacuucaccaccgcccccgcgaucugccacgacgggaaggcccacuucccccgcgagggcguguucguguccaacgggacccacugguucgucacgcagcggaacuucuacgagccgcagaucaucaccaccgacaacaccuucgugagcggcaacugcgacguggucaucggcaucgugaacaacacgguguacgacccccugcagcccgagcuggacuccuucaaggaggagcucgacaaguacuucaagaaccacaccagccccgacgucgaccugggggacaucuccggcaucaacgccagcguggugaacauccagaaggagaucgaccgccugaacgaggucgccaagaaccucaacgagucccugaucgaccugcaggagcucgggaaguacgagcaguacaucaaguggccgugguacaucuggcugggcuucaucgccggccugaucgcgaucgugauggugaccaucaugcucugcugcaugaccagcugcugcuccugccugaaggggugcugcagcugcggcuccugcugcaaguucgacgaggacgacagcgagcccguccugaagggggugaagcuccacuacacgugaggacuagucccuguucccagagcccacuuuuuuuucuuuuuuugaaauaaaauagccugucuuucagaucuaaaaaaaaaaaaaaaaaaaaaaaaaaaaaaaaaaaaaaaaaaaaaaaaaaaaaaaaaaaaaaaaaaaaaaaaaaaaaaaaaaaaaaaaaaaaaaaaaaaa

SEQ ID NO: 24963 - RNA, 4158 nt, Artificial Sequence
  SARS-CoV-2/Wuhan/WIV05/2019__EPI_ISL_402128 spike protein mRNA gc (1-1273)(L18F_D80A_D215G_L242del_A243del_L244del_R246I_K417N_E484 K_N501Y_D614G_A701V)
aggagagggcgcuuggcuugcaaggacccugagcugcggcauugaagcacacccaacccaacucgacugaagucagccucacugaaccggaucugagaaucuucucucucugggcuugccagggcucuccgaaccuagcuagcauccucuucaauuccaacuagaaagcuuaccauguucguguuccugguccuccugccccuggugagcucccagugcgugaacuucaccacccgcacgcagcugccgcccgccuacaccaacagcuucacccggggcgucuacuaccccgacaagguguuccgcuccagcgugcugcacuccacccaggaccucuuccugcccuucuucagcaacgucacgugguuccacgccauccacguguccgggaccaacggcaccaagcgguucgccaacccggugcugcccuucaacgacggggucuacuucgcgagcaccgagaaguccaacaucauccgcggcuggaucuucgggacgacccucgacagcaagacccagucccugcugaucgugaacaacgccaccaacguggucaucaaggugugcgaguuccaguucugcaacgaccccuuccucggcguguacuaccacaagaacaacaagagcuggauggaguccgaguuccgggucuacagcuccgccaacaacugcacguucgaguacgugagccagcccuuccugauggaccuggagggcaagcaggggaacuucaagaaccuccgcgaguucguguucaagaacaucgacggcuacuucaagaucuacuccaagcacaccccgaucaaccugguccggggccugccccagggguucagcgcccucgagccccugguggaccugcccaucggcaucaacaucacccgcuuccagacccuccacaucuccuaccucacgccgggggacagcagcuccggcuggaccgcgggcgccgccgccuacuacgugggguaccugcagccccgcaccuuccugcucaaguacaacgagaacggcaccaucacggacgcggucgacugcgcccuggacccccugagcgagaccaagugcacccucaaguccuucaccguggagaaggggaucuaccagacgagcaacuuccgggugcagcccaccgaguccaucguccgcuucccgaacaucaccaaccugugccccuucggcgagguguucaacgccacccgguucgccagcgucuacgccuggaaccgcaagcggaucuccaacugcguggcggacuacagcgugcuguacaacuccgccagcuucuccacguucaagugcuacggcgucagccccaccaagcucaacgaccugugcuucaccaacguguacgccgacuccuucgugauccgcggggacgagguccggcagaucgcccccggccagaccgggaacaucgccgacuacaacuacaagcugccggacgacuucacgggcugcgugaucgcguggaacagcaacaaccucgacuccaaggucgggggcaacuacaacuaccuguaccgccuguuccgcaagagcaaccucaagcccuucgagcgggacaucuccaccgagaucuaccaggccggcagcacccccugcaacggggugaagggcuucaacugcuacuucccccugcaguccuacggguuccagccgaccuacggcgugggguaccagcccuaccggguggucgugcugagcuucgagcuccugcacgcccccgccacggugugcggccccaagaaguccaccaaccuggucaagaacaagugcgugaacuucaacuucaacggccucaccgggaccggcgugcugaccgagagcaacaagaaguuccugccguuccagcaguucgggcgcgacaucgccgacacgaccgacgcgguccgcgacccccagacccuggagauccucgacaucacccccugcagcuucggcgggguguccgugaucacgccgggcaccaacaccagcaaccaggucgccgugcuguaccagggcgugaacugcaccgagguccccguggccauccacgccgaccagcugacgcccaccuggcggguguacuccaccggcagcaacgucuuccagacccgcgccgggugccucaucggcgcggagcacgugaacaacuccuacgagugcgacauccccaucggggccggcaucugcgccagcuaccagacgcagaccaacuccccgcggcgcgcccggagcguggcgucccagagcaucaucgccuacaccaugucccugggcguggagaacagcgucgccuacuccaacaacagcaucgccauccccaccaacuucacgaucuccgugaccaccgagauccugcccgugagcaugaccaagacgagcgucgacugcaccauguacaucugcggggacuccaccgagugcagcaaccuccugcugcaguacggcuccuucugcacccagcucaaccgcgcgcugacggggaucgccguggagcaggacaagaacacccaggagguguucgcccaggucaagcagaucuacaagacgcccccgaucaaggacuucggcggguucaacuucagccagauccugcccgaccccuccaagcccagcaagcgguccuucaucgaggaccuccuguucaacaaggugacccuggccgacgccggcuucaucaagcaguacggcgacugccucggggacaucgcggcccgcgaccugaucugcgcccagaaguucaacggccugaccgugcucccgccccugcugaccgacgagaugaucgcccaguacaccagcgcccuccuggcggggaccaucacguccggcuggaccuucggggccggcgccgcccugcagauccccuucgcgaugcagauggccuaccgguucaacggcaucggggucacccagaacgugcucuacgagaaccagaagcugaucgccaaccaguucaacagcgccaucggcaagauccaggacucccugagcuccaccgccagcgcgcucgggaagcugcaggacguggucaaccagaacgcccaggcccugaacacgcucgugaagcagcuguccagcaacuucggcgccaucuccagcgugcugaacgacauccucucccgccuggacaaggucgaggccgaggugcagaucgaccggcugaucaccgggcgccuccagagccugcagaccuacgugacccagcagcugauccgggcggccgagauccgcgccagcgccaaccucgccgcgaccaagauguccgagugcguccugggccagagcaagcggguggacuucugcggcaagggguaccaccugauguccuucccccagagcgccccgcacggcguggucuuccuccacgugacguacguccccgcccaggagaagaacuucaccaccgcccccgcgaucugccacgacgggaaggcccacuucccccgcgagggcguguucguguccaacgggacccacugguucgucacgcagcggaacuucuacgagccgcagaucaucaccaccgacaacaccuucgugagcggcaacugcgacguggucaucggcaucgugaacaacacgguguacgacccccugcagcccgagcuggacuccuucaaggaggagcucgacaaguacuucaagaaccacaccagccccgacgucgaccugggggacaucuccggcaucaacgccagcguggugaacauccagaaggagaucgaccgccugaacgaggucgccaagaaccucaacgagucccugaucgaccugcaggagcucgggaaguacgagcaguacaucaaguggccgugguacaucuggcugggcuucaucgccggccugaucgcgaucgugauggugaccaucaugcucugcugcaugaccagcugcugcuccugccugaaggggugcugcagcugcggcuccugcugcaaguucgacgaggacgacagcgagcccguccugaagggggugaagcuccacuacacgugaggacuagucccuguucccagagcccacuuuuuuuucuuuuuuugaaauaaaauagccugucuuucagaucuaaaaaaaaaaaaaaaaaaaaaaaaaaaaaaaaaaaaaaaaaaaaaaaaaaaaaaaaaaaaaaaaaaaaaaaaaaaaaaaaaaaaaaaaaaaaaaaaaaaa

SEQ ID NO: 24964 - RNA, 4167 nt, Artificial Sequence
  SARS-CoV-2/Wuhan/WIV05/2019__EPI_ISL_402128 spike protein mRNA gc (1-1273)(E484K_D614G)
aggagagggcgcuuggcuugcaaggacccugagcugcggcauugaagcacacccaacccaacucgacugaagucagccucacugaaccggaucugagaaucuucucucucugggcuugccagggcucuccgaaccuagcuagcauccucuucaauuccaacuagaaagcuuaccauguucguguuccugguccuccugccccuggugagcucccagugcgugaaccucaccacccgcacgcagcugccgcccgccuacaccaacagcuucacccggggcgucuacuaccccgacaagguguuccgcuccagcgugcugcacuccacccaggaccucuuccugcccuucuucagcaacgucacgugguuccacgccauccacguguccgggaccaacggcaccaagcgguucgacaacccggugcugcccuucaacgacggggucuacuucgcgagcaccgagaaguccaacaucauccgcggcuggaucuucgggacgacccucgacagcaagacccagucccugcugaucgugaacaacgccaccaacguggucaucaaggugugcgaguuccaguucugcaacgaccccuuccucggcguguacuaccacaagaacaacaagagcuggauggaguccgaguuccgggucuacagcuccgccaacaacugcacguucgaguacgugagccagcccuuccugauggaccuggagggcaagcaggggaacuucaagaaccuccgcgaguucguguucaagaacaucgacggcuacuucaagaucuacuccaagcacaccccgaucaaccugguccgggaccugccccagggguucagcgcccucgagccccugguggaccugcccaucggcaucaacaucacccgcuuccagacccuccuggcccugcaccgguccuaccucacgccgggggacagcagcuccggcuggaccgcgggcgccgccgccuacuacgugggguaccugcagccccgcaccuuccugcucaaguacaacgagaacggcaccaucacggacgcggucgacugcgcccuggacccccugagcgagaccaagugcacccucaaguccuucaccguggagaaggggaucuaccagacgagcaacuuccgggugcagcccaccgaguccaucguccgcuucccgaacaucaccaaccugugccccuucggcgagguguucaacgccacccgguucgccagcgucuacgccuggaaccgcaagcggaucuccaacugcguggcggacuacagcgugcuguacaacuccgccagcuucuccacguucaagugcuacggcgucagccccaccaagcucaacgaccugugcuucaccaacguguacgccgacuccuucgugauccgcggggacgagguccggcagaucgcccccggccagaccgggaagaucgccgacuacaacuacaagcugccggacgacuucacgggcugcgugaucgcguggaacagcaacaaccucgacuccaaggucgggggcaacuacaacuaccuguaccgccuguuccgcaagagcaaccucaagcccuucgagcgggacaucuccaccgagaucuaccaggccggcagcacccccugcaacggggugaagggcuucaacugcuacuucccccugcaguccuacggguuccagccgaccaacggcgugggguaccagcccuaccggguggucgugcugagcuucgagcuccugcacgcccccgccacggugugcggccccaagaaguccaccaaccuggucaagaacaagugcgugaacuucaacuucaacggccucaccgggaccggcgugcugaccgagagcaacaagaaguuccugccguuccagcaguucgggcgcgacaucgccgacacgaccgacgcgguccgcgacccccagacccuggagauccucgacaucacccccugcagcuucggcgggguguccgugaucacgccgggcaccaacaccagcaaccaggucgccgugcuguaccagggcgugaacugcaccgagguccccguggccauccacgccgaccagcugacgcccaccuggcggguguacuccaccggcagcaacgucuuccagacccgcgccgggugccucaucggcgcggagcacgugaacaacuccuacgagugcgacauccccaucggggccggcaucugcgccagcuaccagacgcagaccaacuccccgcggcgcgcccggagcguggcgucccagagcaucaucgccuacaccaugucccugggcgccgagaacagcgucgccuacuccaacaacagcaucgccauccccaccaacuucacgaucuccgugaccaccgagauccugcccgugagcaugaccaagacgagcgucgacugcaccauguacaucugcggggacuccaccgagugcagcaaccuccugcugcaguacggcuccuucugcacccagcucaaccgcgcgcugacggggaucgccguggagcaggacaagaacacccaggagguguucgcccaggucaagcagaucuacaagacgcccccgaucaaggacuucggcggguucaacuucagccagauccugcccgaccccuccaagcccagcaagcgguccuucaucgaggaccuccuguucaacaaggugacccuggccgacgccggcuucaucaagcaguacggcgacugccucggggacaucgcggcccgcgaccugaucugcgcccagaaguucaacggccugaccgugcucccgccccugcugaccgacgagaugaucgcccaguacaccagcgcccuccuggcggggaccaucacguccggcuggaccuucggggccggcgccgcccugcagauccccuucgcgaugcagauggccuaccgguucaacggcaucggggucacccagaacgugcucuacgagaaccagaagcugaucgccaaccaguucaacagcgccaucggcaagauccaggacucccugagcuccaccgccagcgcgcucgggaagcugcaggacguggucaaccagaacgcccaggcccugaacacgcucgugaagcagcuguccagcaacuucggcgccaucuccagcgugcugaacgacauccucucccgccuggacaaggucgaggccgaggugcagaucgaccggcugaucaccgggcgccuccagagccugcagaccuacgugacccagcagcugauccgggcggccgagauccgcgccagcgccaaccucgccgcgaccaagauguccgagugcguccugggccagagcaagcggguggacuucugcggcaagggguaccaccugauguccuucccccagagcgccccgcacggcguggucuuccuccacgugacguacguccccgcccaggagaagaacuucaccaccgcccccgcgaucugccacgacgggaaggcccacuucccccgcgagggcguguucguguccaacgggacccacugguucgucacgcagcggaacuucuacgagccgcagaucaucaccaccgacaacaccuucgugagcggcaacugcgacguggucaucggcaucgugaacaacacgguguacgacccccugcagcccgagcuggacuccuucaaggaggagcucgacaaguacuucaagaaccacaccagccccgacgucgaccugggggacaucuccggcaucaacgccagcguggugaacauccagaaggagaucgaccgccugaacgaggucgccaagaaccucaacgagucccugaucgaccugcaggagcucgggaaguacgagcaguacaucaaguggccgugguacaucuggcugggcuucaucgccggccugaucgcgaucgugauggugaccaucaugcucugcugcaugaccagcugcugcuccugccugaaggggugcugcagcugcggcuccugcugcaaguucgacgaggacgacagcgagcccguccugaagggggugaagcuccacuacacgugaggacuagucccuguucccagagcccacuuuuuuuucuuuuuuugaaauaaaauagccugucuuucagaucuaaaaaaaaaaaaaaaaaaaaaaaaaaaaaaaaaaaaaaaaaaaaaaaaaaaaaaaaaaaaaaaaaaaaaaaaaaaaaaaaaaaaaaaaaaaaaaaaaaaa

SEQ ID NO: 24965 - RNA, 4167 nt, Artificial Sequence
  SARS-CoV-2/Wuhan/WIV05/2019__EPI_ISL_402128 spike protein mRNA gc (1-1273)(L18F_T20N_P26S_D138Y_R190S_K417T_E484K_N501Y_D614G_H655Y _T1027I)
aggagagggcgcuuggcuugcaaggacccugagcugcggcauugaagcacacccaacccaacucgacugaagucagccucacugaaccggaucugagaaucuucucucucugggcuugccagggcucuccgaaccuagcuagcauccucuucaauuccaacuagaaagcuuaccauguucguguuccugguccuccugccccuggugagcucccagugcgugaacuucaccaaccgcacgcagcugccgagcgccuacaccaacagcuucacccggggcgucuacuaccccgacaagguguuccgcuccagcgugcugcacuccacccaggaccucuuccugcccuucuucagcaacgucacgugguuccacgccauccacguguccgggaccaacggcaccaagcgguucgacaacccggugcugcccuucaacgacggggucuacuucgcgagcaccgagaaguccaacaucauccgcggcuggaucuucgggacgacccucgacagcaagacccagucccugcugaucgugaacaacgccaccaacguggucaucaaggugugcgaguuccaguucugcaacuaccccuuccucggcguguacuaccacaagaacaacaagagcuggauggaguccgaguuccgggucuacagcuccgccaacaacugcacguucgaguacgugagccagcccuuccugauggaccuggagggcaagcaggggaacuucaagaaccucagcgaguucguguucaagaacaucgacggcuacuucaagaucuacuccaagcacaccccgaucaaccugguccgggaccugccccagggguucagcgcccucgagccccugguggaccugcccaucggcaucaacaucacccgcuuccagacccuccuggcccugcaccgguccuaccucacgccgggggacagcagcuccggcuggaccgcgggcgccgccgccuacuacgugggguaccugcagccccgcaccuuccugcucaaguacaacgagaacggcaccaucacggacgcggucgacugcgcccuggacccccugagcgagaccaagugcacccucaaguccuucaccguggagaaggggaucuaccagacgagcaacuuccgggugcagcccaccgaguccaucguccgcuucccgaacaucaccaaccugugccccuucggcgagguguucaacgccacccgguucgccagcgucuacgccuggaaccgcaagcggaucuccaacugcguggcggacuacagcgugcuguacaacuccgccagcuucuccacguucaagugcuacggcgucagccccaccaagcucaacgaccugugcuucaccaacguguacgccgacuccuucgugauccgcggggacgagguccggcagaucgcccccggccagaccgggaccaucgccgacuacaacuacaagcugccggacgacuucacgggcugcgugaucgcguggaacagcaacaaccucgacuccaaggucgggggcaacuacaacuaccuguaccgccuguuccgcaagagcaaccucaagcccuucgagcgggacaucuccaccgagaucuaccaggccggcagcacccccugcaacggggugaagggcuucaacugcuacuucccccugcaguccuacggguuccagccgaccuacggcgugggguaccagcccuaccggguggucgugcugagcuucgagcuccugcacgcccccgccacggugugcggccccaagaaguccaccaaccuggucaagaacaagugcgugaacuucaacuucaacggccucaccgggaccggcgugcugaccgagagcaacaagaaguuccugccguuccagcaguucgggcgcgacaucgccgacacgaccgacgcgguccgcgacccccagacccuggagauccucgacaucacccccugcagcuucggcgggguguccgugaucacgccgggcaccaacaccagcaaccaggucgccgugcuguaccagggcgugaacugcaccgagguccccguggccauccacgccgaccagcugacgcccaccuggcggguguacuccaccggcagcaacgucuuccagacccgcgccgggugccucaucggcgcggaguacgugaacaacuccuacgagugcgacauccccaucggggccggcaucugcgccagcuaccagacgcagaccaacuccccgcggcgcgcccggagcguggcgucccagagcaucaucgccuacaccaugucccugggcgccgagaacagcgucgccuacuccaacaacagcaucgccauccccaccaacuucacgaucuccgugaccaccgagauccugcccgugagcaugaccaagacgagcgucgacugcaccauguacaucugcggggacuccaccgagugcagcaaccuccugcugcaguacggcuccuucugcacccagcucaaccgcgcgcugacggggaucgccguggagcaggacaagaacacccaggagguguucgcccaggucaagcagaucuacaagacgcccccgaucaaggacuucggcggguucaacuucagccagauccugcccgaccccuccaagcccagcaagcgguccuucaucgaggaccuccuguucaacaaggugacccuggccgacgccggcuucaucaagcaguacggcgacugccucggggacaucgcggcccgcgaccugaucugcgcccagaaguucaacggccugaccgugcucccgccccugcugaccgacgagaugaucgcccaguacaccagcgcccuccuggcggggaccaucacguccggcuggaccuucggggccggcgccgcccugcagauccccuucgcgaugcagauggccuaccgguucaacggcaucggggucacccagaacgugcucuacgagaaccagaagcugaucgccaaccaguucaacagcgccaucggcaagauccaggacucccugagcuccaccgccagcgcgcucgggaagcugcaggacguggucaaccagaacgcccaggcccugaacacgcucgugaagcagcuguccagcaacuucggcgccaucuccagcgugcugaacgacauccucucccgccuggacaaggucgaggccgaggugcagaucgaccggcugaucaccgggcgccuccagagccugcagaccuacgugacccagcagcugauccgggcggccgagauccgcgccagcgccaaccucgccgcgaucaagauguccgagugcguccugggccagagcaagcggguggacuucugcggcaagggguaccaccugauguccuucccccagagcgccccgcacggcguggucuuccuccacgugacguacguccccgcccaggagaagaacuucaccaccgcccccgcgaucugccacgacgggaaggcccacuucccccgcgagggcguguucguguccaacgggacccacugguucgucacgcagcggaacuucuacgagccgcagaucaucaccaccgacaacaccuucgugagcggcaacugcgacguggucaucggcaucgugaacaacacgguguacgacccccugcagcccgagcuggacuccuucaaggaggagcucgacaaguacuucaagaaccacaccagccccgacgucgaccugggggacaucuccggcaucaacgccagcguggugaacauccagaaggagaucgaccgccugaacgaggucgccaagaaccucaacgagucccugaucgaccugcaggagcucgggaaguacgagcaguacaucaaguggccgugguacaucuggcugggcuucaucgccggccugaucgcgaucgugauggugaccaucaugcucugcugcaugaccagcugcugcuccugccugaaggggugcugcagcugcggcuccugcugcaaguucgacgaggacgacagcgagcccguccugaagggggugaagcuccacuacacgugaggacuagucccuguucccagagcccacuuuuuuuucuuuuuuugaaauaaaauagccugucuuucagaucuaaaaaaaaaaaaaaaaaaaaaaaaaaaaaaaaaaaaaaaaaaaaaaaaaaaaaaaaaaaaaaaaaaaaaaaaaaaaaaaaaaaaaaaaaaaaaaaaaaaa

SEQ ID NO: 24966 - RNA, 4167 nt, Artificial Sequence
  SARS-CoV-2/Wuhan/WIV05/2019__EPI_ISL_402128 spike protein mRNA gc (1-1273)(S13I_W152C_L452R_D614G)
aggagagggcgcuuggcuugcaaggacccugagcugcggcauugaagcacacccaacccaacucgacugaagucagccucacugaaccggaucugagaaucuucucucucugggcuugccagggcucuccgaaccuagcuagcauccucuucaauuccaacuagaaagcuuaccauguucguguuccugguccuccugccccuggugagcauccagugcgugaaccucaccacccgcacgcagcugccgcccgccuacaccaacagcuucacccggggcgucuacuaccccgacaagguguuccgcuccagcgugcugcacuccacccaggaccucuuccugcccuucuucagcaacgucacgugguuccacgccauccacguguccgggaccaacggcaccaagcgguucgacaacccggugcugcccuucaacgacggggucuacuucgcgagcaccgagaaguccaacaucauccgcggcuggaucuucgggacgacccucgacagcaagacccagucccugcugaucgugaacaacgccaccaacguggucaucaaggugugcgaguuccaguucugcaacgaccccuuccucggcguguacuaccacaagaacaacaagagcugcauggaguccgaguuccgggucuacagcuccgccaacaacugcacguucgaguacgugagccagcccuuccugauggaccuggagggcaagcaggggaacuucaagaaccuccgcgaguucguguucaagaacaucgacggcuacuucaagaucuacuccaagcacaccccgaucaaccugguccgggaccugccccagggguucagcgcccucgagccccugguggaccugcccaucggcaucaacaucacccgcuuccagacccuccuggcccugcaccgguccuaccucacgccgggggacagcagcuccggcuggaccgcgggcgccgccgccuacuacgugggguaccugcagccccgcaccuuccugcucaaguacaacgagaacggcaccaucacggacgcggucgacugcgcccuggacccccugagcgagaccaagugcacccucaaguccuucaccguggagaaggggaucuaccagacgagcaacuuccgggugcagcccaccgaguccaucguccgcuucccgaacaucaccaaccugugccccuucggcgagguguucaacgccacccgguucgccagcgucuacgccuggaaccgcaagcggaucuccaacugcguggcggacuacagcgugcuguacaacuccgccagcuucuccacguucaagugcuacggcgucagccccaccaagcucaacgaccugugcuucaccaacguguacgccgacuccuucgugauccgcggggacgagguccggcagaucgcccccggccagaccgggaagaucgccgacuacaacuacaagcugccggacgacuucacgggcugcgugaucgcguggaacagcaacaaccucgacuccaaggucgggggcaacuacaacuaccgcuaccgccuguuccgcaagagcaaccucaagcccuucgagcgggacaucuccaccgagaucuaccaggccggcagcacccccugcaacgggguggagggcuucaacugcuacuucccccugcaguccuacggguuccagccgaccaacggcgugggguaccagcccuaccggguggucgugcugagcuucgagcuccugcacgcccccgccacggugugcggccccaagaaguccaccaaccuggucaagaacaagugcgugaacuucaacuucaacggccucaccgggaccggcgugcugaccgagagcaacaagaaguuccugccguuccagcaguucgggcgcgacaucgccgacacgaccgacgcgguccgcgacccccagacccuggagauccucgacaucacccccugcagcuucggcgggguguccgugaucacgccgggcaccaacaccagcaaccaggucgccgugcuguaccagggcgugaacugcaccgagguccccguggccauccacgccgaccagcugacgcccaccuggcggguguacuccaccggcagcaacgucuuccagacccgcgccgggugccucaucggcgcggagcacgugaacaacuccuacgagugcgacauccccaucggggccggcaucugcgccagcuaccagacgcagaccaacuccccgcggcgcgcccggagcguggcgucccagagcaucaucgccuacaccaugucccugggcgccgagaacagcgucgccuacuccaacaacagcaucgccauccccaccaacuucacgaucuccgugaccaccgagauccugcccgugagcaugaccaagacgagcgucgacugcaccauguacaucugcggggacuccaccgagugcagcaaccuccugcugcaguacggcuccuucugcacccagcucaaccgcgcgcugacggggaucgccguggagcaggacaagaacacccaggagguguucgcccaggucaagcagaucuacaagacgcccccgaucaaggacuucggcggguucaacuucagccagauccugcccgaccccuccaagcccagcaagcgguccuucaucgaggaccuccuguucaacaaggugacccuggccgacgccggcuucaucaagcaguacggcgacugccucggggacaucgcggcccgcgaccugaucugcgcccagaaguucaacggccugaccgugcucccgccccugcugaccgacgagaugaucgcccaguacaccagcgcccuccuggcggggaccaucacguccggcuggaccuucggggccggcgccgcccugcagauccccuucgcgaugcagauggccuaccgguucaacggcaucggggucacccagaacgugcucuacgagaaccagaagcugaucgccaaccaguucaacagcgccaucggcaagauccaggacucccugagcuccaccgccagcgcgcucgggaagcugcaggacguggucaaccagaacgcccaggcccugaacacgcucgugaagcagcuguccagcaacuucggcgccaucuccagcgugcugaacgacauccucucccgccuggacaaggucgaggccgaggugcagaucgaccggcugaucaccgggcgccuccagagccugcagaccuacgugacccagcagcugauccgggcggccgagauccgcgccagcgccaaccucgccgcgaccaagauguccgagugcguccugggccagagcaagcggguggacuucugcggcaagggguaccaccugauguccuucccccagagcgccccgcacggcguggucuuccuccacgugacguacguccccgcccaggagaagaacuucaccaccgcccccgcgaucugccacgacgggaaggcccacuucccccgcgagggcguguucguguccaacgggacccacugguucgucacgcagcggaacuucuacgagccgcagaucaucaccaccgacaacaccuucgugagcggcaacugcgacguggucaucggcaucgugaacaacacgguguacgacccccugcagcccgagcuggacuccuucaaggaggagcucgacaaguacuucaagaaccacaccagccccgacgucgaccugggggacaucuccggcaucaacgccagcguggugaacauccagaaggagaucgaccgccugaacgaggucgccaagaaccucaacgagucccugaucgaccugcaggagcucgggaaguacgagcaguacaucaaguggccgugguacaucuggcugggcuucaucgccggccugaucgcgaucgugauggugaccaucaugcucugcugcaugaccagcugcugcuccugccugaaggggugcugcagcugcggcuccugcugcaaguucgacgaggacgacagcgagcccguccugaagggggugaagcuccacuacacgugaggacuagucccuguucccagagcccacuuuuuuuucuuuuuuugaaauaaaauagccugucuuucagaucuaaaaaaaaaaaaaaaaaaaaaaaaaaaaaaaaaaaaaaaaaaaaaaaaaaaaaaaaaaaaaaaaaaaaaaaaaaaaaaaaaaaaaaaaaaaaaaaaaaaa

SEQ ID NO: 24967 - RNA, 4167 nt, Artificial Sequence; identical to SEQ ID NO: 24949
  SARS-CoV-2/Wuhan/WIV05/2019__EPI_ISL_402128 spike protein mRNA gc (1-1273)

SEQ ID NO: 24968 - RNA, 4167 nt, Artificial Sequence
  SARS-CoV-2/Wuhan/WIV05/2019__EPI_ISL_402128 spike protein mRNA gc (1-1273)(D614G)
aggagagggcgcuuggcuugcaaggacccugagcugcggcauugaagcacacccaacccaacucgacugaagucagccucacugaaccggaucugagaaucuucucucucugggcuugccagggcucuccgaaccuagcuagcauccucuucaauuccaacuagaaagcuuaccauguucguguuccugguccuccugccccuggugagcucccagugcgugaaccucaccacccgcacgcagcugccgcccgccuacaccaacagcuucacccggggcgucuacuaccccgacaagguguuccgcuccagcgugcugcacuccacccaggaccucuuccugcccuucuucagcaacgucacgugguuccacgccauccacguguccgggaccaacggcaccaagcgguucgacaacccggugcugcccuucaacgacggggucuacuucgcgagcaccgagaaguccaacaucauccgcggcuggaucuucgggacgacccucgacagcaagacccagucccugcugaucgugaacaacgccaccaacguggucaucaaggugugcgaguuccaguucugcaacgaccccuuccucggcguguacuaccacaagaacaacaagagcuggauggaguccgaguuccgggucuacagcuccgccaacaacugcacguucgaguacgugagccagcccuuccugauggaccuggagggcaagcaggggaacuucaagaaccuccgcgaguucguguucaagaacaucgacggcuacuucaagaucuacuccaagcacaccccgaucaaccugguccgggaccugccccagggguucagcgcccucgagccccugguggaccugcccaucggcaucaacaucacccgcuuccagacccuccuggcccugcaccgguccuaccucacgccgggggacagcagcuccggcuggaccgcgggcgccgccgccuacuacgugggguaccugcagccccgcaccuuccugcucaaguacaacgagaacggcaccaucacggacgcggucgacugcgcccuggacccccugagcgagaccaagugcacccucaaguccuucaccguggagaaggggaucuaccagacgagcaacuuccgggugcagcccaccgaguccaucguccgcuucccgaacaucaccaaccugugccccuucggcgagguguucaacgccacccgguucgccagcgucuacgccuggaaccgcaagcggaucuccaacugcguggcggacuacagcgugcuguacaacuccgccagcuucuccacguucaagugcuacggcgucagccccaccaagcucaacgaccugugcuucaccaacguguacgccgacuccuucgugauccgcggggacgagguccggcagaucgcccccggccagaccgggaagaucgccgacuacaacuacaagcugccggacgacuucacgggcugcgugaucgcguggaacagcaacaaccucgacuccaaggucgggggcaacuacaacuaccuguaccgccuguuccgcaagagcaaccucaagcccuucgagcgggacaucuccaccgagaucuaccaggccggcagcacccccugcaacgggguggagggcuucaacugcuacuucccccugcaguccuacggguuccagccgaccaacggcgugggguaccagcccuaccggguggucgugcugagcuucgagcuccugcacgcccccgccacggugugcggccccaagaaguccaccaaccuggucaagaacaagugcgugaacuucaacuucaacggccucaccgggaccggcgugcugaccgagagcaacaagaaguuccugccguuccagcaguucgggcgcgacaucgccgacacgaccgacgcgguccgcgacccccagacccuggagauccucgacaucacccccugcagcuucggcgggguguccgugaucacgccgggcaccaacaccagcaaccaggucgccgugcuguaccagggcgugaacugcaccgagguccccguggccauccacgccgaccagcugacgcccaccuggcggguguacuccaccgggagcaacgucuuccagacccgcgccggcugccucaucggggcggagcacgugaacaacuccuacgagugcgacauccccaucggcgccggcaucugcgccagcuaccagacgcagaccaacuccccgcggcgcgcccggagcguggcgucccagagcaucaucgccuacaccaugucccugggggccgagaacagcgucgccuacuccaacaacagcaucgccauccccaccaacuucacgaucuccgugaccaccgagauccugcccgugagcaugaccaagacgagcgucgacugcaccauguacaucugcggcgacuccaccgagugcagcaaccuccugcugcaguacggguccuucugcacccagcucaaccgcgcgcugacgggcaucgccguggagcaggacaagaacacccaggagguguucgcccaggucaagcagaucuacaagacgcccccgaucaaggacuucgggggcuucaacuucagccagauccugcccgaccccuccaagcccagcaagcgguccuucaucgaggaccuccuguucaacaaggugacccuggccgacgccggcuucaucaagcaguacggggacugccucggcgacaucgcggcccgcgaccugaucugcgcccagaaguucaacgggcugaccgugcucccgccccugcugaccgacgagaugaucgcccaguacaccagcgcccuccuggcgggcaccaucacguccggguggaccuucggcgccggcgccgcccugcagauccccuucgcgaugcagauggccuaccgguucaacgggaucggcgucacccagaacgugcucuacgagaaccagaagcugaucgccaaccaguucaacagcgccaucgggaagauccaggacucccugagcuccaccgccagcgcgcucggcaagcugcaggacguggucaaccagaacgcccaggcccugaacacgcucgugaagcagcuguccagcaacuucggggccaucuccagcgugcugaacgacauccucucccgccuggacaaggucgaggccgaggugcagaucgaccggcugaucaccggccgccuccagagccugcagaccuacgugacccagcagcugauccgggcggccgagauccgcgccagcgccaaccucgccgcgaccaagauguccgagugcguccugggccagagcaagcggguggacuucugcgggaagggcuaccaccugauguccuucccccagagcgccccgcacgggguggucuuccuccacgugacguacguccccgcccaggagaagaacuucaccaccgcccccgcgaucugccacgacggcaaggcccacuucccccgcgaggggguguucguguccaacggcacccacugguucgucacgcagcggaacuucuacgagccgcagaucaucaccaccgacaacaccuucgugagcggcaacugcgacguggucaucgggaucgugaacaacacgguguacgacccccugcagcccgagcuggacuccuucaaggaggagcucgacaaguacuucaagaaccacaccagccccgacgucgaccugggcgacaucuccgggaucaacgccagcguggugaacauccagaaggagaucgaccgccugaacgaggucgccaagaaccucaacgagucccugaucgaccugcaggagcucggcaaguacgagcaguacaucaaguggccgugguacaucuggcugggcuucaucgccgggcugaucgcgaucgugauggugaccaucaugcucugcugcaugaccagcugcugcuccugccugaagggcugcugcagcugcggguccugcugcaaguucgacgaggacgacagcgagcccguccugaagggcgugaagcuccacuacacgugaggacuagucccuguucccagagcccacuuuuuuuucuuuuuuugaaauaaaauagccugucuuucagaucuaaaaaaaaaaaaaaaaaaaaaaaaaaaaaaaaaaaaaaaaaaaaaaaaaaaaaaaaaaaaaaaaaaaaaaaaaaaaaaaaaaaaaaaaaaaaaaaaaaaa

SEQ ID NO: 24969 - RNA, 4167 nt, Artificial Sequence
  SARS-CoV-2/Wuhan/WIV05/2019__EPI_ISL_402128 spike protein mRNA gc (1-1273)(A222V_D614G)
aggagagggcgcuuggcuugcaaggacccugagcugcggcauugaagcacacccaacccaacucgacugaagucagccucacugaaccggaucugagaaucuucucucucugggcuugccagggcucuccgaaccuagcuagcauccucuucaauuccaacuagaaagcuuaccauguucguguuccugguccuccugccccuggugagcucccagugcgugaaccucaccacccgcacgcagcugccgcccgccuacaccaacagcuucacccggggcgucuacuaccccgacaagguguuccgcuccagcgugcugcacuccacccaggaccucuuccugcccuucuucagcaacgucacgugguuccacgccauccacguguccgggaccaacggcaccaagcgguucgacaacccggugcugcccuucaacgacggggucuacuucgcgagcaccgagaaguccaacaucauccgcggcuggaucuucgggacgacccucgacagcaagacccagucccugcugaucgugaacaacgccaccaacguggucaucaaggugugcgaguuccaguucugcaacgaccccuuccucggcguguacuaccacaagaacaacaagagcuggauggaguccgaguuccgggucuacagcuccgccaacaacugcacguucgaguacgugagccagcccuuccugauggaccuggagggcaagcaggggaacuucaagaaccuccgcgaguucguguucaagaacaucgacggcuacuucaagaucuacuccaagcacaccccgaucaaccugguccgggaccugccccagggguucagcgugcucgagccccugguggaccugcccaucggcaucaacaucacccgcuuccagacccuccuggcccugcaccgguccuaccucacgccgggggacagcagcuccggcuggaccgccggcgcggccgccuacuacgucggguaccugcagccccgcaccuuccugcucaaguacaacgagaacggcaccaucacggacgccguggacugcgcgcuggacccccugagcgagaccaagugcacccucaaguccuucaccguggagaaggggaucuaccagacgagcaacuuccggguccagcccaccgaguccaucgugcgcuucccgaacaucaccaaccugugccccuucggcgaggucuucaacgccacccgguucgccagcguguacgccuggaaccgcaagcggaucuccaacugcguggccgacuacagcguccuguacaacuccgcgagcuucuccacguucaagugcuacggcgugagccccaccaagcucaacgaccugugcuucaccaacguguacgccgacuccuucgucauccgcggggacgaggugcggcagaucgcccccggccagaccgggaagaucgccgacuacaacuacaagcugccggacgacuucacgggcugcgugaucgccuggaacagcaacaaccucgacuccaaggucgggggcaacuacaacuaccuguaccgccuguuccgcaagagcaaccucaagcccuucgagcgggacaucuccaccgagaucuaccaggcgggcagcacccccugcaacgggguggagggcuucaacugcuacuucccccugcaguccuacggguuccagccgaccaacggcgugggguaccagcccuaccgggucguggugcugagcuucgagcuccugcacgcccccgccacggucugcggccccaagaaguccaccaaccuggugaagaacaagugcgugaacuucaacuucaacggccucaccgggaccggcguccugaccgagagcaacaagaaguuccugccguuccagcaguucgggcgcgacaucgccgacacgaccgacgccgugcgcgacccccagacccuggagauccucgacaucacccccugcagcuucggcgggguguccgucaucacgccgggcaccaacaccagcaaccagguggcggugcuguaccagggcgucaacugcaccgaggugcccguggccauccacgccgaccagcugacgcccaccuggcgggucuacuccaccgggagcaacguguuccagacccgcgccggcugccucaucggggccgagcacgugaacaacuccuacgagugcgacauccccaucggcgcgggcaucugcgccagcuaccagacgcagaccaacuccccgcggcgcgcccggagcgucgccucccagagcaucaucgcguacaccaugucccugggggccgagaacagcguggccuacuccaacaacagcaucgccauccccaccaacuucacgaucuccgugaccaccgagauccugcccgucagcaugaccaagacgagcguggacugcaccauguacaucugcggcgacuccaccgagugcagcaaccuccugcugcaguacggguccuucugcacccagcucaaccgcgcccugacgggcaucgcgguggagcaggacaagaacacccaggaggucuucgcccaggugaagcagaucuacaagacgcccccgaucaaggacuucgggggcuucaacuucagccagauccugcccgaccccuccaagcccagcaagcgguccuucaucgaggaccuccuguucaacaaggugacccuggccgacgccggcuucaucaagcaguacggggacugccucggcgacaucgccgcgcgcgaccugaucugcgcccagaaguucaacgggcugaccguccucccgccccugcugaccgacgagaugaucgcccaguacaccagcgcccuccuggccggcaccaucacguccggguggaccuucggcgcgggcgccgcccugcagauccccuucgccaugcagauggcguaccgguucaacgggaucggcgugacccagaacgugcucuacgagaaccagaagcugaucgccaaccaguucaacagcgccaucgggaagauccaggacucccugagcuccaccgccagcgcccucggcaagcugcaggacgucgugaaccagaacgcgcaggcccugaacacgcucgugaagcagcuguccagcaacuucggggccaucuccagcguccugaacgacauccucucccgccuggacaagguggaggccgaggugcagaucgaccggcugaucaccggccgccuccagagccugcagaccuacgucacccagcagcugauccgggccgcggagauccgcgccagcgccaaccucgccgccaccaagauguccgagugcgugcugggccagagcaagcggguggacuucugcgggaagggcuaccaccugauguccuucccccagagcgcgccgcacggggucguguuccuccacgucacguacgugcccgcccaggagaagaacuucaccaccgcccccgccaucugccacgacggcaaggcgcacuucccccgcgaggggguguucgucuccaacggcacccacugguucgugacgcagcggaacuucuacgagccgcagaucaucaccaccgacaacaccuucgugagcggcaacugcgacgucgugaucgggaucgugaacaacacggucuacgacccccugcagcccgagcuggacuccuucaaggaggagcucgacaaguacuucaagaaccacaccagccccgacguggaccugggcgacaucuccgggaucaacgccagcguggucaacauccagaaggagaucgaccgccugaacgagguggccaagaaccucaacgagucccugaucgaccugcaggagcucggcaaguacgagcaguacaucaaguggccgugguacaucuggcugggcuucaucgccgggcugaucgccaucgugauggucaccaucaugcucugcugcaugaccagcugcugcuccugccugaagggcugcugcagcugcggguccugcugcaaguucgacgaggacgacagcgagcccgugcugaagggcgugaagcuccacuacacgugaggacuagucccuguucccagagcccacuuuuuuuucuuuuuuugaaauaaaauagccugucuuucagaucuaaaaaaaaaaaaaaaaaaaaaaaaaaaaaaaaaaaaaaaaaaaaaaaaaaaaaaaaaaaaaaaaaaaaaaaaaaaaaaaaaaaaaaaaaaaaaaaaaaaa

SEQ ID NO: 24970 - RNA, 4167 nt, Artificial Sequence
  SARS-CoV-2/Wuhan/WIV05/2019__EPI_ISL_402128 spike protein mRNA gc (1-1273)(N439K_D614G)
aggagagggcgcuuggcuugcaaggacccugagcugcggcauugaagcacacccaacccaacucgacugaagucagccucacugaaccggaucugagaaucuucucucucugggcuugccagggcucuccgaaccuagcuagcauccucuucaauuccaacuagaaagcuuaccauguucguguuccugguccuccugccccuggugagcucccagugcgugaaccucaccacccgcacgcagcugccgcccgccuacaccaacagcuucacccggggcgucuacuaccccgacaagguguuccgcuccagcgugcugcacuccacccaggaccucuuccugcccuucuucagcaacgucacgugguuccacgccauccacguguccgggaccaacggcaccaagcgguucgacaacccggugcugcccuucaacgacggggucuacuucgcgagcaccgagaaguccaacaucauccgcggcuggaucuucgggacgacccucgacagcaagacccagucccugcugaucgugaacaacgccaccaacguggucaucaaggugugcgaguuccaguucugcaacgaccccuuccucggcguguacuaccacaagaacaacaagagcuggauggaguccgaguuccgggucuacagcuccgccaacaacugcacguucgaguacgugagccagcccuuccugauggaccuggagggcaagcaggggaacuucaagaaccuccgcgaguucguguucaagaacaucgacggcuacuucaagaucuacuccaagcacaccccgaucaaccugguccgggaccugccccagggguucagcgcccucgagccccugguggaccugcccaucggcaucaacaucacccgcuuccagacccuccuggcccugcaccgguccuaccucacgccgggggacagcagcuccggcuggaccgcgggcgccgccgccuacuacgugggguaccugcagccccgcaccuuccugcucaaguacaacgagaacggcaccaucacggacgcggucgacugcgcccuggacccccugagcgagaccaagugcacccucaaguccuucaccguggagaaggggaucuaccagacgagcaacuuccgggugcagcccaccgaguccaucguccgcuucccgaacaucaccaaccugugccccuucggcgagguguucaacgccacccgguucgccagcgucuacgccuggaaccgcaagcggaucuccaacugcguggcggacuacagcgugcuguacaacuccgccagcuucuccacguucaagugcuacggcgucagccccaccaagcucaacgaccugugcuucaccaacguguacgccgacuccuucgugauccgcggggacgagguccggcagaucgcccccggccagaccgggaagaucgccgacuacaacuacaagcugccggacgacuucacgggcugcgugaucgcguggaacagcaagaaccucgacuccaaggucgggggcaacuacaacuaccuguaccgccuguuccgcaagagcaaccucaagcccuucgagcgggacaucuccaccgagaucuaccaggccggcagcacccccugcaacgggguggagggcuucaacugcuacuucccccugcaguccuacggguuccagccgaccaacggcgugggguaccagcccuaccggguggucgugcugagcuucgagcuccugcacgcccccgccacggugugcggccccaagaaguccaccaaccuggucaagaacaagugcgugaacuucaacuucaacggccucaccgggaccggcgugcugaccgagagcaacaagaaguuccugccguuccagcaguucgggcgcgacaucgccgacacgaccgacgcgguccgcgacccccagacccuggagauccucgacaucacccccugcagcuucggcgggguguccgugaucacgccgggcaccaacaccagcaaccaggucgccgugcuguaccagggcgugaacugcaccgagguccccguggccauccacgccgaccagcugacgcccaccuggcggguguacuccaccgggagcaacgucuuccagacccgcgccggcugccucaucggggcggagcacgugaacaacuccuacgagugcgacauccccaucggcgccggcaucugcgccagcuaccagacgcagaccaacuccccgcggcgcgcccggagcguggcgucccagagcaucaucgccuacaccaugucccugggggccgagaacagcgucgccuacuccaacaacagcaucgccauccccaccaacuucacgaucuccgugaccaccgagauccugcccgugagcaugaccaagacgagcgucgacugcaccauguacaucugcggcgacuccaccgagugcagcaaccuccugcugcaguacggguccuucugcacccagcucaaccgcgcgcugacgggcaucgccguggagcaggacaagaacacccaggagguguucgcccaggucaagcagaucuacaagacgcccccgaucaaggacuucgggggcuucaacuucagccagauccugcccgaccccuccaagcccagcaagcgguccuucaucgaggaccuccuguucaacaaggugacccuggccgacgccggcuucaucaagcaguacggggacugccucggcgacaucgcggcccgcgaccugaucugcgcccagaaguucaacgggcugaccgugcucccgccccugcugaccgacgagaugaucgcccaguacaccagcgcccuccuggcgggcaccaucacguccggguggaccuucggcgccggcgccgcccugcagauccccuucgcgaugcagauggccuaccgguucaacgggaucggcgucacccagaacgugcucuacgagaaccagaagcugaucgccaaccaguucaacagcgccaucgggaagauccaggacucccugagcuccaccgccagcgcgcucggcaagcugcaggacguggucaaccagaacgcccaggcccugaacacgcucgugaagcagcuguccagcaacuucggggccaucuccagcgugcugaacgacauccucucccgccuggacaaggucgaggccgaggugcagaucgaccggcugaucaccggccgccuccagagccugcagaccuacgugacccagcagcugauccgggcggccgagauccgcgccagcgccaaccucgccgcgaccaagauguccgagugcguccugggccagagcaagcggguggacuucugcgggaagggcuaccaccugauguccuucccccagagcgccccgcacgggguggucuuccuccacgugacguacguccccgcccaggagaagaacuucaccaccgcccccgcgaucugccacgacggcaaggcccacuucccccgcgaggggguguucguguccaacggcacccacugguucgucacgcagcggaacuucuacgagccgcagaucaucaccaccgacaacaccuucgugagcggcaacugcgacguggucaucgggaucgugaacaacacgguguacgacccccugcagcccgagcuggacuccuucaaggaggagcucgacaaguacuucaagaaccacaccagccccgacgucgaccugggcgacaucuccgggaucaacgccagcguggugaacauccagaaggagaucgaccgccugaacgaggucgccaagaaccucaacgagucccugaucgaccugcaggagcucggcaaguacgagcaguacaucaaguggccgugguacaucuggcugggcuucaucgccgggcugaucgcgaucgugauggugaccaucaugcucugcugcaugaccagcugcugcuccugccugaagggcugcugcagcugcggguccugcugcaaguucgacgaggacgacagcgagcccguccugaagggcgugaagcuccacuacacgugaggacuagucccuguucccagagcccacuuuuuuuucuuuuuuugaaauaaaauagccugucuuucagaucuaaaaaaaaaaaaaaaaaaaaaaaaaaaaaaaaaaaaaaaaaaaaaaaaaaaaaaaaaaaaaaaaaaaaaaaaaaaaaaaaaaaaaaaaaaaaaaaaaaaa

SEQ ID NO: 24971 - RNA, 4167 nt, Artificial Sequence
  SARS-CoV-2/Wuhan/WIV05/2019__EPI_ISL_402128 spike protein mRNA gc (1-1273)(S477N_D614G)
aggagagggcgcuuggcuugcaaggacccugagcugcggcauugaagcacacccaacccaacucgacugaagucagccucacugaaccggaucugagaaucuucucucucugggcuugccagggcucuccgaaccuagcuagcauccucuucaauuccaacuagaaagcuuaccauguucguguuccugguccuccugccccuggugagcucccagugcgugaaccucaccacccgcacgcagcugccgcccgccuacaccaacagcuucacccggggcgucuacuaccccgacaagguguuccgcuccagcgugcugcacuccacccaggaccucuuccugcccuucuucagcaacgucacgugguuccacgccauccacguguccgggaccaacggcaccaagcgguucgacaacccggugcugcccuucaacgacggggucuacuucgcgagcaccgagaaguccaacaucauccgcggcuggaucuucgggacgacccucgacagcaagacccagucccugcugaucgugaacaacgccaccaacguggucaucaaggugugcgaguuccaguucugcaacgaccccuuccucggcguguacuaccacaagaacaacaagagcuggauggaguccgaguuccgggucuacagcuccgccaacaacugcacguucgaguacgugagccagcccuuccugauggaccuggagggcaagcaggggaacuucaagaaccuccgcgaguucguguucaagaacaucgacggcuacuucaagaucuacuccaagcacaccccgaucaaccugguccgggaccugccccagggguucagcgcccucgagccccugguggaccugcccaucggcaucaacaucacccgcuuccagacccuccuggcccugcaccgguccuaccucacgccgggggacagcagcuccggcuggaccgcgggcgccgccgccuacuacgugggguaccugcagccccgcaccuuccugcucaaguacaacgagaacggcaccaucacggacgcggucgacugcgcccuggacccccugagcgagaccaagugcacccucaaguccuucaccguggagaaggggaucuaccagacgagcaacuuccgggugcagcccaccgaguccaucguccgcuucccgaacaucaccaaccugugccccuucggcgagguguucaacgccacccgguucgccagcgucuacgccuggaaccgcaagcggaucuccaacugcguggcggacuacagcgugcuguacaacuccgccagcuucuccacguucaagugcuacggcgucagccccaccaagcucaacgaccugugcuucaccaacguguacgccgacuccuucgugauccgcggggacgagguccggcagaucgcccccggccagaccgggaagaucgccgacuacaacuacaagcugccggacgacuucacgggcugcgugaucgcguggaacagcaacaaccucgacuccaaggucgggggcaacuacaacuaccuguaccgccuguuccgcaagagcaaccucaagcccuucgagcgggacaucuccaccgagaucuaccaggccggcaacacccccugcaacgggguggagggcuucaacugcuacuucccccugcagagcuacggguuccagccgaccaacggcgugggguaccagcccuaccggguggucgugcuguccuucgagcuccugcacgcccccgccacggugugcggccccaagaaguccaccaaccuggucaagaacaagugcgugaacuucaacuucaacggccucaccgggaccggcgugcugaccgagagcaacaagaaguuccugccguuccagcaguucgggcgcgacaucgccgacacgaccgacgcgguccgcgacccccagacccuggagauccucgacaucacccccugcagcuucggcggggugagcgugaucacgccgggcaccaacaccuccaaccaggucgccgugcuguaccagggcgugaacugcaccgagguccccguggccauccacgccgaccagcugacgcccaccuggcggguguacagcaccggguccaacgucuuccagacccgcgccggcugccucaucggggcggagcacgugaacaacagcuacgagugcgacauccccaucggcgccggcaucugcgccuccuaccagacgcagaccaacagcccgcggcgcgcccgguccguggcgagccaguccaucaucgccuacaccaugagccugggggccgagaacuccgucgccuacagcaacaacuccaucgccauccccaccaacuucacgaucagcgugaccaccgagauccugcccguguccaugaccaagacgagcgucgacugcaccauguacaucugcggcgacagcaccgagugcuccaaccuccugcugcaguacgggagcuucugcacccagcucaaccgcgcgcugacgggcaucgccguggagcaggacaagaacacccaggagguguucgcccaggucaagcagaucuacaagacgcccccgaucaaggacuucgggggcuucaacuucucccagauccugcccgaccccagcaagcccuccaagcggagcuucaucgaggaccuccuguucaacaaggugacccuggccgacgccggcuucaucaagcaguacggggacugccucggcgacaucgcggcccgcgaccugaucugcgcccagaaguucaacgggcugaccgugcucccgccccugcugaccgacgagaugaucgcccaguacaccuccgcccuccuggcgggcaccaucacgagcggguggaccuucggcgccggcgccgcccugcagauccccuucgcgaugcagauggccuaccgguucaacgggaucggcgucacccagaacgugcucuacgagaaccagaagcugaucgccaaccaguucaacuccgccaucgggaagauccaggacagccuguccagcaccgccuccgcgcucggcaagcugcaggacguggucaaccagaacgcccaggcccugaacacgcucgugaagcagcugagcuccaacuucggggccaucagcuccgugcugaacgacauccucagccgccuggacaaggucgaggccgaggugcagaucgaccggcugaucaccggccgccuccagucccugcagaccuacgugacccagcagcugauccgggcggccgagauccgcgccagcgccaaccucgccgcgaccaagaugagcgagugcguccugggccaguccaagcggguggacuucugcgggaagggcuaccaccugaugagcuucccccaguccgccccgcacgggguggucuuccuccacgugacguacguccccgcccaggagaagaacuucaccaccgcccccgcgaucugccacgacggcaaggcccacuucccccgcgaggggguguucgugagcaacggcacccacugguucgucacgcagcggaacuucuacgagccgcagaucaucaccaccgacaacaccuucguguccggcaacugcgacguggucaucgggaucgugaacaacacgguguacgacccccugcagcccgagcuggacagcuucaaggaggagcucgacaaguacuucaagaaccacaccucccccgacgucgaccugggcgacaucagcgggaucaacgccuccguggugaacauccagaaggagaucgaccgccugaacgaggucgccaagaaccucaacgagagccugaucgaccugcaggagcucggcaaguacgagcaguacaucaaguggccgugguacaucuggcugggcuucaucgccgggcugaucgcgaucgugauggugaccaucaugcucugcugcaugaccuccugcugcagcugccugaagggcugcugcuccugcgggagcugcugcaaguucgacgaggacgacuccgagcccguccugaagggcgugaagcuccacuacacgugaggacuagucccuguucccagagcccacuuuuuuuucuuuuuuugaaauaaaauagccugucuuucagaucuaaaaaaaaaaaaaaaaaaaaaaaaaaaaaaaaaaaaaaaaaaaaaaaaaaaaaaaaaaaaaaaaaaaaaaaaaaaaaaaaaaaaaaaaaaaaaaaaaaaa

SEQ ID NO: 24972 - RNA, 4167 nt, Artificial Sequence
  SARS-CoV-2/Wuhan/WIV05/2019__EPI_ISL_402128 spike protein mRNA gc (1-1273)(N501Y_D614G)
aggagagggcgcuuggcuugcaaggacccugagcugcggcauugaagcacacccaacccaacucgacugaagucagccucacugaaccggaucugagaaucuucucucucugggcuugccagggcucuccgaaccuagcuagcauccucuucaauuccaacuagaaagcuuaccauguucguguuccugguccuccugccccuggugagcucccagugcgugaaccucaccacccgcacgcagcugccgcccgccuacaccaacagcuucacccggggcgucuacuaccccgacaagguguuccgcuccagcgugcugcacuccacccaggaccucuuccugcccuucuucagcaacgucacgugguuccacgccauccacguguccgggaccaacggcaccaagcgguucgacaacccggugcugcccuucaacgacggggucuacuucgcgagcaccgagaaguccaacaucauccgcggcuggaucuucgggacgacccucgacagcaagacccagucccugcugaucgugaacaacgccaccaacguggucaucaaggugugcgaguuccaguucugcaacgaccccuuccucggcguguacuaccacaagaacaacaagagcuggauggaguccgaguuccgggucuacagcuccgccaacaacugcacguucgaguacgugagccagcccuuccugauggaccuggagggcaagcaggggaacuucaagaaccuccgcgaguucguguucaagaacaucgacggcuacuucaagaucuacuccaagcacaccccgaucaaccugguccgggaccugccccagggguucagcgcccucgagccccugguggaccugcccaucggcaucaacaucacccgcuuccagacccuccuggcccugcaccgguccuaccucacgccgggggacagcagcuccggcuggaccgcgggcgccgccgccuacuacgugggguaccugcagccccgcaccuuccugcucaaguacaacgagaacggcaccaucacggacgcggucgacugcgcccuggacccccugagcgagaccaagugcacccucaaguccuucaccguggagaaggggaucuaccagacgagcaacuuccgggugcagcccaccgaguccaucguccgcuucccgaacaucaccaaccugugccccuucggcgagguguucaacgccacccgguucgccagcgucuacgccuggaaccgcaagcggaucuccaacugcguggcggacuacagcgugcuguacaacuccgccagcuucuccacguucaagugcuacggcgucagccccaccaagcucaacgaccugugcuucaccaacguguacgccgacuccuucgugauccgcggggacgagguccggcagaucgcccccggccagaccgggaagaucgccgacuacaacuacaagcugccggacgacuucacgggcugcgugaucgcguggaacagcaacaaccucgacuccaaggucgggggcaacuacaacuaccuguaccgccuguuccgcaagagcaaccucaagcccuucgagcgggacaucuccaccgagaucuaccaggccggcagcacccccugcaacgggguggagggcuucaacugcuacuucccccugcaguccuacggguuccagccgaccuacggcgugggguaccagcccuaccggguggucgugcugagcuucgagcuccugcacgcccccgccacggugugcggccccaagaaguccaccaaccuggucaagaacaagugcgugaacuucaacuucaacggccucaccgggaccggcgugcugaccgagagcaacaagaaguuccugccguuccagcaguucgggcgcgacaucgccgacacgaccgacgcgguccgcgacccccagacccuggagauccucgacaucacccccugcagcuucggcgggguguccgugaucacgccgggcaccaacaccagcaaccaggucgccgugcuguaccagggcgugaacugcaccgagguccccguggccauccacgccgaccagcugacgcccaccuggcggguguacuccaccgggagcaacgucuuccagacccgcgccggcugccucaucggggcggagcacgugaacaacuccuacgagugcgacauccccaucggcgccggcaucugcgccagcuaccagacgcagaccaacuccccgcggcgcgcccggagcguggcgucccagagcaucaucgccuacaccaugucccugggggccgagaacagcgucgccuacuccaacaacagcaucgccauccccaccaacuucacgaucuccgugaccaccgagauccugcccgugagcaugaccaagacgagcgucgacugcaccauguacaucugcggcgacuccaccgagugcagcaaccuccugcugcaguacggguccuucugcacccagcucaaccgcgcgcugacgggcaucgccguggagcaggacaagaacacccaggagguguucgcccaggucaagcagaucuacaagacgcccccgaucaaggacuucgggggcuucaacuucagccagauccugcccgaccccuccaagcccagcaagcgguccuucaucgaggaccuccuguucaacaaggugacccuggccgacgccggcuucaucaagcaguacggggacugccucggcgacaucgcggcccgcgaccugaucugcgcccagaaguucaacgggcugaccgugcucccgccccugcugaccgacgagaugaucgcccaguacaccagcgcccuccuggcgggcaccaucacguccggguggaccuucggcgccggcgccgcccugcagauccccuucgcgaugcagauggccuaccgguucaacgggaucggcgucacccagaacgugcucuacgagaaccagaagcugaucgccaaccaguucaacagcgccaucgggaagauccaggacucccugagcuccaccgccagcgcgcucggcaagcugcaggacguggucaaccagaacgcccaggcccugaacacgcucgugaagcagcuguccagcaacuucggggccaucuccagcgugcugaacgacauccucucccgccuggacaaggucgaggccgaggugcagaucgaccggcugaucaccggccgccuccagagccugcagaccuacgugacccagcagcugauccgggcggccgagauccgcgccagcgccaaccucgccgcgaccaagauguccgagugcguccugggccagagcaagcggguggacuucugcgggaagggcuaccaccugauguccuucccccagagcgccccgcacgggguggucuuccuccacgugacguacguccccgcccaggagaagaacuucaccaccgcccccgcgaucugccacgacggcaaggcccacuucccccgcgaggggguguucguguccaacggcacccacugguucgucacgcagcggaacuucuacgagccgcagaucaucaccaccgacaacaccuucgugagcggcaacugcgacguggucaucgggaucgugaacaacacgguguacgacccccugcagcccgagcuggacuccuucaaggaggagcucgacaaguacuucaagaaccacaccagccccgacgucgaccugggcgacaucuccgggaucaacgccagcguggugaacauccagaaggagaucgaccgccugaacgaggucgccaagaaccucaacgagucccugaucgaccugcaggagcucggcaaguacgagcaguacaucaaguggccgugguacaucuggcugggcuucaucgccgggcugaucgcgaucgugauggugaccaucaugcucugcugcaugaccagcugcugcuccugccugaagggcugcugcagcugcggguccugcugcaaguucgacgaggacgacagcgagcccguccugaagggcgugaagcuccacuacacgugaggacuagucccuguucccagagcccacuuuuuuuucuuuuuuugaaauaaaauagccugucuuucagaucuaaaaaaaaaaaaaaaaaaaaaaaaaaaaaaaaaaaaaaaaaaaaaaaaaaaaaaaaaaaaaaaaaaaaaaaaaaaaaaaaaaaaaaaaaaaaaaaaaaaa

SEQ ID NO: 24973 - RNA, 4161 nt, Artificial Sequence
  SARS-CoV-2/Wuhan/WIV05/2019__EPI_ISL_402128 spike protein mRNA gc (1-1273)(H69del_V70del_D614G)
aggagagggcgcuuggcuugcaaggacccugagcugcggcauugaagcacacccaacccaacucgacugaagucagccucacugaaccggaucugagaaucuucucucucugggcuugccagggcucuccgaaccuagcuagcauccucuucaauuccaacuagaaagcuuaccauguucguguuccugguccuccugccccuggugagcucccagugcgugaaccucaccacccgcacgcagcugccgcccgccuacaccaacagcuucacccggggcgucuacuaccccgacaagguguuccgcuccagcgugcugcacuccacccaggaccucuuccugcccuucuucagcaacgucacgugguuccacgccaucuccgggaccaacggcaccaagcgguucgacaacccggugcugcccuucaacgacgggguguacuucgcgagcaccgagaaguccaacaucauccgcggcuggaucuucgggacgacccucgacagcaagacccagucccugcugaucgucaacaacgccaccaacguggugaucaaggucugcgaguuccaguucugcaacgaccccuuccucggcguguacuaccacaagaacaacaagagcuggauggaguccgaguuccggguguacagcuccgccaacaacugcacguucgaguacgucagccagcccuuccugauggaccuggagggcaagcaggggaacuucaagaaccuccgcgaguucguguucaagaacaucgacggcuacuucaagaucuacuccaagcacaccccgaucaaccuggugcgggaccugccccagggguucagcgcccucgagccccuggucgaccugcccaucggcaucaacaucacccgcuuccagacccuccuggcccugcaccgguccuaccucacgccgggggacagcagcuccggcuggaccgcgggcgccgccgccuacuacgugggguaccugcagccccgcaccuuccugcucaaguacaacgagaacggcaccaucacggacgcgguggacugcgcccuggacccccugagcgagaccaagugcacccucaaguccuucaccgucgagaaggggaucuaccagacgagcaacuuccgggugcagcccaccgaguccaucgugcgcuucccgaacaucaccaaccugugccccuucggcgaggucuucaacgccacccgguucgccagcguguacgccuggaaccgcaagcggaucuccaacugcgucgcggacuacagcgugcuguacaacuccgccagcuucuccacguucaagugcuacggcgugagccccaccaagcucaacgaccugugcuucaccaacgucuacgccgacuccuucgugauccgcggggacgaggugcggcagaucgcccccggccagaccgggaagaucgccgacuacaacuacaagcugccggacgacuucacgggcugcgucaucgcguggaacagcaacaaccucgacuccaaggucgggggcaacuacaacuaccuguaccgccuguuccgcaagagcaaccucaagcccuucgagcgggacaucuccaccgagaucuaccaggccggcagcacccccugcaacgggguggagggcuucaacugcuacuucccccugcaguccuacggguuccagccgaccaacggcgugggguaccagcccuaccggguggugguccugagcuucgagcuccugcacgcccccgccacggugugcggccccaagaaguccaccaaccuggugaagaacaagugcgucaacuucaacuucaacggccucaccgggaccggcgugcugaccgagagcaacaagaaguuccugccguuccagcaguucgggcgcgacaucgccgacacgaccgacgcggugcgcgacccccagacccuggagauccucgacaucacccccugcagcuucggcggggucuccgugaucacgccgggcaccaacaccagcaaccagguggccguccuguaccagggcgugaacugcaccgaggugcccgucgccauccacgccgaccagcugacgcccaccuggcggguguacuccaccgggagcaacguguuccagacccgcgccggcugccucaucggggcggagcacgucaacaacuccuacgagugcgacauccccaucggcgccggcaucugcgccagcuaccagacgcagaccaacuccccgcggcgcgcccggagcguggcgucccagagcaucaucgccuacaccaugucccugggggccgagaacagcguggccuacuccaacaacagcaucgccauccccaccaacuucacgaucuccgucaccaccgagauccugcccgugagcaugaccaagacgagcguggacugcaccauguacaucugcggcgacuccaccgagugcagcaaccuccugcugcaguacggguccuucugcacccagcucaaccgcgcgcugacgggcaucgccgucgagcaggacaagaacacccaggagguguucgcccaggugaagcagaucuacaagacgcccccgaucaaggacuucgggggcuucaacuucagccagauccugcccgaccccuccaagcccagcaagcgguccuucaucgaggaccuccuguucaacaaggucacccuggccgacgccggcuucaucaagcaguacggggacugccucggcgacaucgcggcccgcgaccugaucugcgcccagaaguucaacgggcugaccgugcucccgccccugcugaccgacgagaugaucgcccaguacaccagcgcccuccuggcgggcaccaucacguccggguggaccuucggcgccggcgccgcccugcagauccccuucgcgaugcagauggccuaccgguucaacgggaucggcgugacccagaacguccucuacgagaaccagaagcugaucgccaaccaguucaacagcgccaucgggaagauccaggacucccugagcuccaccgccagcgcgcucggcaagcugcaggacguggugaaccagaacgcccaggcccugaacacgcucgucaagcagcuguccagcaacuucggggccaucuccagcgugcugaacgacauccucucccgccuggacaagguggaggccgagguccagaucgaccggcugaucaccggccgccuccagagccugcagaccuacgugacccagcagcugauccgggcggccgagauccgcgccagcgccaaccucgccgcgaccaagauguccgagugcgugcugggccagagcaagcgggucgacuucugcgggaagggcuaccaccugauguccuucccccagagcgccccgcacggggugguguuccuccacgucacguacgugcccgcccaggagaagaacuucaccaccgcccccgcgaucugccacgacggcaaggcccacuucccccgcgagggggucuucguguccaacggcacccacugguucgugacgcagcggaacuucuacgagccgcagaucaucaccaccgacaacaccuucgucagcggcaacugcgacguggugaucgggaucgucaacaacacgguguacgacccccugcagcccgagcuggacuccuucaaggaggagcucgacaaguacuucaagaaccacaccagccccgacguggaccugggcgacaucuccgggaucaacgccagcgucgugaacauccagaaggagaucgaccgccugaacgagguggccaagaaccucaacgagucccugaucgaccugcaggagcucggcaaguacgagcaguacaucaaguggccgugguacaucuggcugggcuucaucgccgggcugaucgcgaucgucauggugaccaucaugcucugcugcaugaccagcugcugcuccugccugaagggcugcugcagcugcggguccugcugcaaguucgacgaggacgacagcgagcccgugcugaagggcgucaagcuccacuacacgugaggacuagucccuguucccagagcccacuuuuuuuucuuuuuuugaaauaaaauagccugucuuucagaucuaaaaaaaaaaaaaaaaaaaaaaaaaaaaaaaaaaaaaaaaaaaaaaaaaaaaaaaaaaaaaaaaaaaaaaaaaaaaaaaaaaaaaaaaaaaaaaaaaaaa

SEQ ID NO: 24974 - RNA, 4167 nt, Artificial Sequence
  SARS-CoV-2/Wuhan/WIV05/2019__EPI_ISL_402128 spike protein mRNA gc (1-1273)(Y453F_D614G)
aggagagggcgcuuggcuugcaaggacccugagcugcggcauugaagcacacccaacccaacucgacugaagucagccucacugaaccggaucugagaaucuucucucucugggcuugccagggcucuccgaaccuagcuagcauccucuucaauuccaacuagaaagcuuaccauguucguguuccugguccuccugccccuggugagcucccagugcgugaaccucaccacccgcacgcagcugccgcccgccuacaccaacagcuucacccggggcgucuacuaccccgacaagguguuccgcuccagcgugcugcacuccacccaggaccucuuccugcccuucuucagcaacgucacgugguuccacgccauccacguguccgggaccaacggcaccaagcgguucgacaacccggugcugcccuucaacgacggggucuacuucgcgagcaccgagaaguccaacaucauccgcggcuggaucuucgggacgacccucgacagcaagacccagucccugcugaucgugaacaacgccaccaacguggucaucaaggugugcgaguuccaguucugcaacgaccccuuccucggcguguacuaccacaagaacaacaagagcuggauggaguccgaguuccgggucuacagcuccgccaacaacugcacguucgaguacgugagccagcccuuccugauggaccuggagggcaagcaggggaacuucaagaaccuccgcgaguucguguucaagaacaucgacggcuacuucaagaucuacuccaagcacaccccgaucaaccugguccgggaccugccccagggguucagcgcccucgagccccugguggaccugcccaucggcaucaacaucacccgcuuccagacccuccuggcccugcaccgguccuaccucacgccgggggacagcagcuccggcuggaccgcgggcgccgccgccuacuacgugggguaccugcagccccgcaccuuccugcucaaguacaacgagaacggcaccaucacggacgcggucgacugcgcccuggacccccugagcgagaccaagugcacccucaaguccuucaccguggagaaggggaucuaccagacgagcaacuuccgggugcagcccaccgaguccaucguccgcuucccgaacaucaccaaccugugccccuucggcgagguguucaacgccacccgguucgccagcgucuacgccuggaaccgcaagcggaucuccaacugcguggcggacuacagcgugcuguacaacuccgccagcuucuccacguucaagugcuacggcgucagccccaccaagcucaacgaccugugcuucaccaacguguacgccgacuccuucgugauccgcggggacgagguccggcagaucgcccccggccagaccgggaagaucgccgacuacaacuacaagcugccggacgacuucacgggcugcgugaucgcguggaacagcaacaaccucgacuccaaggucgggggcaacuacaacuaccuguuccgccuguuccgcaagagcaaccucaagcccuucgagcgggacaucuccaccgagaucuaccaggccggcagcacccccugcaacgggguggagggcuucaacugcuacuucccccugcaguccuacggguuccagccgaccaacggcgugggguaccagcccuaccggguggucgugcugagcuucgagcuccugcacgcccccgccacggugugcggccccaagaaguccaccaaccuggucaagaacaagugcgugaacuucaacuucaacggccucaccgggaccggcgugcugaccgagagcaacaagaaguuccugccguuccagcaguucgggcgcgacaucgccgacacgaccgacgcgguccgcgacccccagacccuggagauccucgacaucacccccugcagcuucggcgggguguccgugaucacgccgggcaccaacaccagcaaccaggucgccgugcuguaccagggcgugaacugcaccgagguccccguggccauccacgccgaccagcugacgcccaccuggcggguguacuccaccgggagcaacgucuuccagacccgcgccggcugccucaucggggcggagcacgugaacaacuccuacgagugcgacauccccaucggcgccggcaucugcgccagcuaccagacgcagaccaacuccccgcggcgcgcccggagcguggcgucccagagcaucaucgccuacaccaugucccugggggccgagaacagcgucgccuacuccaacaacagcaucgccauccccaccaacuucacgaucuccgugaccaccgagauccugcccgugagcaugaccaagacgagcgucgacugcaccauguacaucugcggcgacuccaccgagugcagcaaccuccugcugcaguacggguccuucugcacccagcucaaccgcgcgcugacgggcaucgccguggagcaggacaagaacacccaggagguguucgcccaggucaagcagaucuacaagacgcccccgaucaaggacuucgggggcuucaacuucagccagauccugcccgaccccuccaagcccagcaagcgguccuucaucgaggaccuccuguucaacaaggugacccuggccgacgccggcuucaucaagcaguacggggacugccucggcgacaucgcggcccgcgaccugaucugcgcccagaaguucaacgggcugaccgugcucccgccccugcugaccgacgagaugaucgcccaguacaccagcgcccuccuggcgggcaccaucacguccggguggaccuucggcgccggcgccgcccugcagauccccuucgcgaugcagauggccuaccgguucaacgggaucggcgucacccagaacgugcucuacgagaaccagaagcugaucgccaaccaguucaacagcgccaucgggaagauccaggacucccugagcuccaccgccagcgcgcucggcaagcugcaggacguggucaaccagaacgcccaggcccugaacacgcucgugaagcagcuguccagcaacuucggggccaucuccagcgugcugaacgacauccucucccgccuggacaaggucgaggccgaggugcagaucgaccggcugaucaccggccgccuccagagccugcagaccuacgugacccagcagcugauccgggcggccgagauccgcgccagcgccaaccucgccgcgaccaagauguccgagugcguccugggccagagcaagcggguggacuucugcgggaagggcuaccaccugauguccuucccccagagcgccccgcacgggguggucuuccuccacgugacguacguccccgcccaggagaagaacuucaccaccgcccccgcgaucugccacgacggcaaggcccacuucccccgcgaggggguguucguguccaacggcacccacugguucgucacgcagcggaacuucuacgagccgcagaucaucaccaccgacaacaccuucgugagcggcaacugcgacguggucaucgggaucgugaacaacacgguguacgacccccugcagcccgagcuggacuccuucaaggaggagcucgacaaguacuucaagaaccacaccagccccgacgucgaccugggcgacaucuccgggaucaacgccagcguggugaacauccagaaggagaucgaccgccugaacgaggucgccaagaaccucaacgagucccugaucgaccugcaggagcucggcaaguacgagcaguacaucaaguggccgugguacaucuggcugggcuucaucgccgggcugaucgcgaucgugauggugaccaucaugcucugcugcaugaccagcugcugcuccugccugaagggcugcugcagcugcggguccugcugcaaguucgacgaggacgacagcgagcccguccugaagggcgugaagcuccacuacacgugaggacuagucccuguucccagagcccacuuuuuuuucuuuuuuugaaauaaaauagccugucuuucagaucuaaaaaaaaaaaaaaaaaaaaaaaaaaaaaaaaaaaaaaaaaaaaaaaaaaaaaaaaaaaaaaaaaaaaaaaaaaaaaaaaaaaaaaaaaaaaaaaaaaaa

SEQ ID NO: 24975 - RNA, 4167 nt, Artificial Sequence
  SARS-CoV-2/Wuhan/WIV05/2019__EPI_ISL_402128 spike protein mRNA gc (1-1273)(D614G_I692V)
aggagagggcgcuuggcuugcaaggacccugagcugcggcauugaagcacacccaacccaacucgacugaagucagccucacugaaccggaucugagaaucuucucucucugggcuugccagggcucuccgaaccuagcuagcauccucuucaauuccaacuagaaagcuuaccauguucguguuccugguccuccugccccuggugagcucccagugcgugaaccucaccacccgcacgcagcugccgcccgccuacaccaacagcuucacccggggcgucuacuaccccgacaagguguuccgcuccagcgugcugcacuccacccaggaccucuuccugcccuucuucagcaacgucacgugguuccacgccauccacguguccgggaccaacggcaccaagcgguucgacaacccggugcugcccuucaacgacggggucuacuucgcgagcaccgagaaguccaacaucauccgcggcuggaucuucgggacgacccucgacagcaagacccagucccugcugaucgugaacaacgccaccaacguggucaucaaggugugcgaguuccaguucugcaacgaccccuuccucggcguguacuaccacaagaacaacaagagcuggauggaguccgaguuccgggucuacagcuccgccaacaacugcacguucgaguacgugagccagcccuuccugauggaccuggagggcaagcaggggaacuucaagaaccuccgcgaguucguguucaagaacaucgacggcuacuucaagaucuacuccaagcacaccccgaucaaccugguccgggaccugccccagggguucagcgcccucgagccccugguggaccugcccaucggcaucaacaucacccgcuuccagacccuccuggcccugcaccgguccuaccucacgccgggggacagcagcuccggcuggaccgcgggcgccgccgccuacuacgugggguaccugcagccccgcaccuuccugcucaaguacaacgagaacggcaccaucacggacgcggucgacugcgcccuggacccccugagcgagaccaagugcacccucaaguccuucaccguggagaaggggaucuaccagacgagcaacuuccgggugcagcccaccgaguccaucguccgcuucccgaacaucaccaaccugugccccuucggcgagguguucaacgccacccgguucgccagcgucuacgccuggaaccgcaagcggaucuccaacugcguggcggacuacagcgugcuguacaacuccgccagcuucuccacguucaagugcuacggcgucagccccaccaagcucaacgaccugugcuucaccaacguguacgccgacuccuucgugauccgcggggacgagguccggcagaucgcccccggccagaccgggaagaucgccgacuacaacuacaagcugccggacgacuucacgggcugcgugaucgcguggaacagcaacaaccucgacuccaaggucgggggcaacuacaacuaccuguaccgccuguuccgcaagagcaaccucaagcccuucgagcgggacaucuccaccgagaucuaccaggccggcagcacccccugcaacgggguggagggcuucaacugcuacuucccccugcaguccuacggguuccagccgaccaacggcgugggguaccagcccuaccggguggucgugcugagcuucgagcuccugcacgcccccgccacggugugcggccccaagaaguccaccaaccuggucaagaacaagugcgugaacuucaacuucaacggccucaccgggaccggcgugcugaccgagagcaacaagaaguuccugccguuccagcaguucgggcgcgacaucgccgacacgaccgacgcgguccgcgacccccagacccuggagauccucgacaucacccccugcagcuucggcgggguguccgugaucacgccgggcaccaacaccagcaaccaggucgccgugcuguaccagggcgugaacugcaccgagguccccguggccauccacgccgaccagcugacgcccaccuggcggguguacuccaccgggagcaacgucuuccagacccgcgccggcugccucaucggggcggagcacgugaacaacuccuacgagugcgacauccccaucggcgccggcaucugcgccagcuaccagacgcagaccaacuccccgcggcgcgcccggagcguggcgucccagagcgucaucgccuacaccaugucccugggggccgagaacagcguggccuacuccaacaacagcaucgccauccccaccaacuucacgaucuccgugaccaccgagauccugcccgucagcaugaccaagacgagcguggacugcaccauguacaucugcggcgacuccaccgagugcagcaaccuccugcugcaguacggguccuucugcacccagcucaaccgcgcgcugacgggcaucgccguggagcaggacaagaacacccaggaggucuucgcccaggugaagcagaucuacaagacgcccccgaucaaggacuucgggggcuucaacuucagccagauccugcccgaccccuccaagcccagcaagcgguccuucaucgaggaccuccuguucaacaaggugacccuggccgacgccggcuucaucaagcaguacggggacugccucggcgacaucgcggcccgcgaccugaucugcgcccagaaguucaacgggcugaccguccucccgccccugcugaccgacgagaugaucgcccaguacaccagcgcccuccuggcgggcaccaucacguccggguggaccuucggcgccggcgccgcccugcagauccccuucgcgaugcagauggccuaccgguucaacgggaucggcgugacccagaacgugcucuacgagaaccagaagcugaucgccaaccaguucaacagcgccaucgggaagauccaggacucccugagcuccaccgccagcgcgcucggcaagcugcaggacgucgugaaccagaacgcccaggcccugaacacgcucgugaagcagcuguccagcaacuucggggccaucuccagcguccugaacgacauccucucccgccuggacaagguggaggccgaggugcagaucgaccggcugaucaccggccgccuccagagccugcagaccuacgucacccagcagcugauccgggcggccgagauccgcgccagcgccaaccucgccgcgaccaagauguccgagugcgugcugggccagagcaagcggguggacuucugcgggaagggcuaccaccugauguccuucccccagagcgccccgcacggggucguguuccuccacgucacguacgugcccgcccaggagaagaacuucaccaccgcccccgcgaucugccacgacggcaaggcccacuucccccgcgaggggguguucgucuccaacggcacccacugguucgugacgcagcggaacuucuacgagccgcagaucaucaccaccgacaacaccuucgugagcggcaacugcgacgucgugaucgggaucgugaacaacacggucuacgacccccugcagcccgagcuggacuccuucaaggaggagcucgacaaguacuucaagaaccacaccagccccgacguggaccugggcgacaucuccgggaucaacgccagcguggucaacauccagaaggagaucgaccgccugaacgagguggccaagaaccucaacgagucccugaucgaccugcaggagcucggcaaguacgagcaguacaucaaguggccgugguacaucuggcugggcuucaucgccgggcugaucgcgaucgugauggucaccaucaugcucugcugcaugaccagcugcugcuccugccugaagggcugcugcagcugcggguccugcugcaaguucgacgaggacgacagcgagcccgugcugaagggcgugaagcuccacuacacgugaggacuagucccuguucccagagcccacuuuuuuuucuuuuuuugaaauaaaauagccugucuuucagaucuaaaaaaaaaaaaaaaaaaaaaaaaaaaaaaaaaaaaaaaaaaaaaaaaaaaaaaaaaaaaaaaaaaaaaaaaaaaaaaaaaaaaaaaaaaaaaaaaaaaa

SEQ ID NO: 24976 - RNA, 4167 nt, Artificial Sequence
  SARS-CoV-2/Wuhan/WIV05/2019__EPI_ISL_402128 spike protein mRNA gc (1-1273)(D614G_M1229I)
aggagagggcgcuuggcuugcaaggacccugagcugcggcauugaagcacacccaacccaacucgacugaagucagccucacugaaccggaucugagaaucuucucucucugggcuugccagggcucuccgaaccuagcuagcauccucuucaauuccaacuagaaagcuuaccauguucguguuccugguccuccugccccuggugagcucccagugcgugaaccucaccacccgcacgcagcugccgcccgccuacaccaacagcuucacccggggcgucuacuaccccgacaagguguuccgcuccagcgugcugcacuccacccaggaccucuuccugcccuucuucagcaacgucacgugguuccacgccauccacguguccgggaccaacggcaccaagcgguucgacaacccggugcugcccuucaacgacggggucuacuucgcgagcaccgagaaguccaacaucauccgcggcuggaucuucgggacgacccucgacagcaagacccagucccugcugaucgugaacaacgccaccaacguggucaucaaggugugcgaguuccaguucugcaacgaccccuuccucggcguguacuaccacaagaacaacaagagcuggauggaguccgaguuccgggucuacagcuccgccaacaacugcacguucgaguacgugagccagcccuuccugauggaccuggagggcaagcaggggaacuucaagaaccuccgcgaguucguguucaagaacaucgacggcuacuucaagaucuacuccaagcacaccccgaucaaccugguccgggaccugccccagggguucagcgcccucgagccccugguggaccugcccaucggcaucaacaucacccgcuuccagacccuccuggcccugcaccgguccuaccucacgccgggggacagcagcuccggcuggaccgcgggcgccgccgccuacuacgugggguaccugcagccccgcaccuuccugcucaaguacaacgagaacggcaccaucacggacgcggucgacugcgcccuggacccccugagcgagaccaagugcacccucaaguccuucaccguggagaaggggaucuaccagacgagcaacuuccgggugcagcccaccgaguccaucguccgcuucccgaacaucaccaaccugugccccuucggcgagguguucaacgccacccgguucgccagcgucuacgccuggaaccgcaagcggaucuccaacugcguggcggacuacagcgugcuguacaacuccgccagcuucuccacguucaagugcuacggcgucagccccaccaagcucaacgaccugugcuucaccaacguguacgccgacuccuucgugauccgcggggacgagguccggcagaucgcccccggccagaccgggaagaucgccgacuacaacuacaagcugccggacgacuucacgggcugcgugaucgcguggaacagcaacaaccucgacuccaaggucgggggcaacuacaacuaccuguaccgccuguuccgcaagagcaaccucaagcccuucgagcgggacaucuccaccgagaucuaccaggccggcagcacccccugcaacgggguggagggcuucaacugcuacuucccccugcaguccuacggguuccagccgaccaacggcgugggguaccagcccuaccggguggucgugcugagcuucgagcuccugcacgcccccgccacggugugcggccccaagaaguccaccaaccuggucaagaacaagugcgugaacuucaacuucaacggccucaccgggaccggcgugcugaccgagagcaacaagaaguuccugccguuccagcaguucgggcgcgacaucgccgacacgaccgacgcgguccgcgacccccagacccuggagauccucgacaucacccccugcagcuucggcgggguguccgugaucacgccgggcaccaacaccagcaaccaggucgccgugcuguaccagggcgugaacugcaccgagguccccguggccauccacgccgaccagcugacgcccaccuggcggguguacuccaccgggagcaacgucuuccagacccgcgccggcugccucaucggggcggagcacgugaacaacuccuacgagugcgacauccccaucggcgccggcaucugcgccagcuaccagacgcagaccaacuccccgcggcgcgcccggagcguggcgucccagagcaucaucgccuacaccaugucccugggggccgagaacagcgucgccuacuccaacaacagcaucgccauccccaccaacuucacgaucuccgugaccaccgagauccugcccgugagcaugaccaagacgagcgucgacugcaccauguacaucugcggcgacuccaccgagugcagcaaccuccugcugcaguacggguccuucugcacccagcucaaccgcgcgcugacgggcaucgccguggagcaggacaagaacacccaggagguguucgcccaggucaagcagaucuacaagacgcccccgaucaaggacuucgggggcuucaacuucagccagauccugcccgaccccuccaagcccagcaagcgguccuucaucgaggaccuccuguucaacaaggugacccuggccgacgccggcuucaucaagcaguacggggacugccucggcgacaucgcggcccgcgaccugaucugcgcccagaaguucaacgggcugaccgugcucccgccccugcugaccgacgagaugaucgcccaguacaccagcgcccuccuggcgggcaccaucacguccggguggaccuucggcgccggcgccgcccugcagauccccuucgcgaugcagauggccuaccgguucaacgggaucggcgucacccagaacgugcucuacgagaaccagaagcugaucgccaaccaguucaacagcgccaucgggaagauccaggacucccugagcuccaccgccagcgcgcucggcaagcugcaggacguggucaaccagaacgcccaggcccugaacacgcucgugaagcagcuguccagcaacuucggggccaucuccagcgugcugaacgacauccucucccgccuggacaaggucgaggccgaggugcagaucgaccggcugaucaccggccgccuccagagccugcagaccuacgugacccagcagcugauccgggcggccgagauccgcgccagcgccaaccucgccgcgaccaagauguccgagugcguccugggccagagcaagcggguggacuucugcgggaagggcuaccaccugauguccuucccccagagcgccccgcacgggguggucuuccuccacgugacguacguccccgcccaggagaagaacuucaccaccgcccccgcgaucugccacgacggcaaggcccacuucccccgcgaggggguguucguguccaacggcacccacugguucgucacgcagcggaacuucuacgagccgcagaucaucaccaccgacaacaccuucgugagcggcaacugcgacguggucaucgggaucgugaacaacacgguguacgacccccugcagcccgagcuggacuccuucaaggaggagcucgacaaguacuucaagaaccacaccagccccgacgucgaccugggcgacaucuccgggaucaacgccagcguggugaacauccagaaggagaucgaccgccugaacgaggucgccaagaaccucaacgagucccugaucgaccugcaggagcucggcaaguacgagcaguacaucaaguggccgugguacaucuggcugggcuucaucgccgggcugaucgcgaucgugaucgugaccaucaugcucugcugcaugaccagcugcugcuccugccugaagggcugcugcagcugcggguccugcugcaaguucgacgaggacgacagcgagcccguccugaagggcgugaagcuccacuacacgugaggacuagucccuguucccagagcccacuuuuuuuucuuuuuuugaaauaaaauagccugucuuucagaucuaaaaaaaaaaaaaaaaaaaaaaaaaaaaaaaaaaaaaaaaaaaaaaaaaaaaaaaaaaaaaaaaaaaaaaaaaaaaaaaaaaaaaaaaaaaaaaaaaaaa

SEQ ID NO: 24977 - RNA, 4161 nt, Artificial Sequence
  SARS-CoV-2/Wuhan/WIV05/2019__EPI_ISL_402128 spike protein mRNA gc (1-1273)(H69del_V70del_A222V_Y453F_S477N_D614G_I692V)
aggagagggcgcuuggcuugcaaggacccugagcugcggcauugaagcacacccaacccaacucgacugaagucagccucacugaaccggaucugagaaucuucucucucugggcuugccagggcucuccgaaccuagcuagcauccucuucaauuccaacuagaaagcuuaccauguucguguuccugguccuccugccccuggugagcucccagugcgugaaccucaccacccgcacgcagcugccgcccgccuacaccaacagcuucacccggggcgucuacuaccccgacaagguguuccgcuccagcgugcugcacuccacccaggaccucuuccugcccuucuucagcaacgucacgugguuccacgccaucuccgggaccaacggcaccaagcgguucgacaacccggugcugcccuucaacgacgggguguacuucgcgagcaccgagaaguccaacaucauccgcggcuggaucuucgggacgacccucgacagcaagacccagucccugcugaucgucaacaacgccaccaacguggugaucaaggucugcgaguuccaguucugcaacgaccccuuccucggcguguacuaccacaagaacaacaagagcuggauggaguccgaguuccggguguacagcuccgccaacaacugcacguucgaguacgucagccagcccuuccugauggaccuggagggcaagcaggggaacuucaagaaccuccgcgaguucguguucaagaacaucgacggcuacuucaagaucuacuccaagcacaccccgaucaaccuggugcgggaccugccccagggguucagcguccucgagccccugguggaccugcccaucggcaucaacaucacccgcuuccagacccuccuggcccugcaccgguccuaccucacgccgggggacagcagcuccggcuggaccgccggcgcggccgccuacuacgugggguaccugcagccccgcaccuuccugcucaaguacaacgagaacggcaccaucacggacgccgucgacugcgcgcuggacccccugagcgagaccaagugcacccucaaguccuucaccguggagaaggggaucuaccagacgagcaacuuccgggugcagcccaccgaguccaucguccgcuucccgaacaucaccaaccugugccccuucggcgagguguucaacgccacccgguucgccagcgucuacgccuggaaccgcaagcggaucuccaacugcguggccgacuacagcgugcuguacaacuccgcgagcuucuccacguucaagugcuacggcgucagccccaccaagcucaacgaccugugcuucaccaacguguacgccgacuccuucgugauccgcggggacgagguccggcagaucgcccccggccagaccgggaagaucgccgacuacaacuacaagcugccggacgacuucacgggcugcgugaucgccuggaacagcaacaaccucgacuccaaggucgggggcaacuacaacuaccuguuccgccuguuccgcaagagcaaccucaagcccuucgagcgggacaucuccaccgagaucuaccaggcgggcaacacccccugcaacgggguggagggcuucaacugcuacuucccccugcagagcuacggguuccagccgaccaacggcgugggguaccagcccuaccggguggucgugcuguccuucgagcuccugcacgcccccgccacggugugcggccccaagaaguccaccaaccuggucaagaacaagugcgugaacuucaacuucaacggccucaccgggaccggcgugcugaccgagagcaacaagaaguuccugccguuccagcaguucgggcgcgacaucgccgacacgaccgacgccguccgcgacccccagacccuggagauccucgacaucacccccugcagcuucggcggggugagcgugaucacgccgggcaccaacaccuccaaccaggucgcggugcuguaccagggcgugaacugcaccgagguccccguggccauccacgccgaccagcugacgcccaccuggcggguguacagcaccggguccaacgucuuccagacccgcgccggcugccucaucggggccgagcacgugaacaacagcuacgagugcgacauccccaucggcgcgggcaucugcgccuccuaccagacgcagaccaacagcccgcggcgcgcccgguccguggccagccaguccgucaucgcguacaccaugagccugggggccgagaacuccguggccuacagcaacaacuccaucgccauccccaccaacuucacgaucagcgugaccaccgagauccugcccgucuccaugaccaagacgagcguggacugcaccauguacaucugcggcgacagcaccgagugcuccaaccuccugcugcaguacgggagcuucugcacccagcucaaccgcgcccugacgggcaucgcgguggagcaggacaagaacacccaggaggucuucgcccaggugaagcagaucuacaagacgcccccgaucaaggacuucgggggcuucaacuucucccagauccugcccgaccccagcaagcccuccaagcggagcuucaucgaggaccuccuguucaacaaggugacccuggccgacgccggcuucaucaagcaguacggggacugccucggcgacaucgccgcgcgcgaccugaucugcgcccagaaguucaacgggcugaccguccucccgccccugcugaccgacgagaugaucgcccaguacaccuccgcccuccuggccggcaccaucacgagcggguggaccuucggcgcgggcgccgcccugcagauccccuucgccaugcagauggcguaccgguucaacgggaucggcgugacccagaacgugcucuacgagaaccagaagcugaucgccaaccaguucaacuccgccaucgggaagauccaggacagccuguccagcaccgccuccgcccucggcaagcugcaggacgucgugaaccagaacgcgcaggcccugaacacgcucgugaagcagcugagcuccaacuucggggccaucagcuccguccugaacgacauccucagccgccuggacaagguggaggccgaggugcagaucgaccggcugaucaccggccgccuccagucccugcagaccuacgucacccagcagcugauccgggccgcggagauccgcgccagcgccaaccucgccgccaccaagaugagcgagugcgugcugggccaguccaagcggguggacuucugcgggaagggcuaccaccugaugagcuucccccaguccgcgccgcacggggucguguuccuccacgucacguacgugcccgcccaggagaagaacuucaccaccgcccccgccaucugccacgacggcaaggcgcacuucccccgcgaggggguguucgucagcaacggcacccacugguucgugacgcagcggaacuucuacgagccgcagaucaucaccaccgacaacaccuucguguccggcaacugcgacgucgugaucgggaucgugaacaacacggucuacgacccccugcagcccgagcuggacagcuucaaggaggagcucgacaaguacuucaagaaccacaccucccccgacguggaccugggcgacaucagcgggaucaacgccuccguggucaacauccagaaggagaucgaccgccugaacgagguggccaagaaccucaacgagagccugaucgaccugcaggagcucggcaaguacgagcaguacaucaaguggccgugguacaucuggcugggcuucaucgccgggcugaucgccaucgugauggucaccaucaugcucugcugcaugaccuccugcugcagcugccugaagggcugcugcuccugcgggagcugcugcaaguucgacgaggacgacuccgagcccgugcugaagggcgugaagcuccacuacacgugaggacuagucccuguucccagagcccacuuuuuuuucuuuuuuugaaauaaaauagccugucuuucagaucuaaaaaaaaaaaaaaaaaaaaaaaaaaaaaaaaaaaaaaaaaaaaaaaaaaaaaaaaaaaaaaaaaaaaaaaaaaaaaaaaaaaaaaaaaaaaaaaaaaaa

SEQ ID NO: 24978 - RNA, 4161 nt, Artificial Sequence
  SARS-CoV-2/Wuhan/WIV05/2019__EPI_ISL_402128 spike protein mRNA gc (1-1273)(H69del_V70del_Y453F_D614G_I692V_M1229I)
aggagagggcgcuuggcuugcaaggacccugagcugcggcauugaagcacacccaacccaacucgacugaagucagccucacugaaccggaucugagaaucuucucucucugggcuugccagggcucuccgaaccuagcuagcauccucuucaauuccaacuagaaagcuuaccauguucguguuccugguccuccugccccuggugagcucccagugcgugaaccucaccacccgcacgcagcugccgcccgccuacaccaacagcuucacccggggcgucuacuaccccgacaagguguuccgcuccagcgugcugcacuccacccaggaccucuuccugcccuucuucagcaacgucacgugguuccacgccaucuccgggaccaacggcaccaagcgguucgacaacccggugcugcccuucaacgacgggguguacuucgcgagcaccgagaaguccaacaucauccgcggcuggaucuucgggacgacccucgacagcaagacccagucccugcugaucgucaacaacgccaccaacguggugaucaaggucugcgaguuccaguucugcaacgaccccuuccucggcguguacuaccacaagaacaacaagagcuggauggaguccgaguuccggguguacagcuccgccaacaacugcacguucgaguacgucagccagcccuuccugauggaccuggagggcaagcaggggaacuucaagaaccuccgcgaguucguguucaagaacaucgacggcuacuucaagaucuacuccaagcacaccccgaucaaccuggugcgggaccugccccagggguucagcgcccucgagccccuggucgaccugcccaucggcaucaacaucacccgcuuccagacccuccuggcccugcaccgguccuaccucacgccgggggacagcagcuccggcuggaccgcgggcgccgccgccuacuacgugggguaccugcagccccgcaccuuccugcucaaguacaacgagaacggcaccaucacggacgcgguggacugcgcccuggacccccugagcgagaccaagugcacccucaaguccuucaccgucgagaaggggaucuaccagacgagcaacuuccgggugcagcccaccgaguccaucgugcgcuucccgaacaucaccaaccugugccccuucggcgaggucuucaacgccacccgguucgccagcguguacgccuggaaccgcaagcggaucuccaacugcgucgcggacuacagcgugcuguacaacuccgccagcuucuccacguucaagugcuacggcgugagccccaccaagcucaacgaccugugcuucaccaacgucuacgccgacuccuucgugauccgcggggacgaggugcggcagaucgcccccggccagaccgggaagaucgccgacuacaacuacaagcugccggacgacuucacgggcugcgucaucgcguggaacagcaacaaccucgacuccaaggucgggggcaacuacaacuaccuguuccgccuguuccgcaagagcaaccucaagcccuucgagcgggacaucuccaccgagaucuaccaggccggcagcacccccugcaacgggguggagggcuucaacugcuacuucccccugcaguccuacggguuccagccgaccaacggcgugggguaccagcccuaccggguggugguccugagcuucgagcuccugcacgcccccgccacggugugcggccccaagaaguccaccaaccuggugaagaacaagugcgucaacuucaacuucaacggccucaccgggaccggcgugcugaccgagagcaacaagaaguuccugccguuccagcaguucgggcgcgacaucgccgacacgaccgacgcggugcgcgacccccagacccuggagauccucgacaucacccccugcagcuucggcggggucuccgugaucacgccgggcaccaacaccagcaaccagguggccguccuguaccagggcgugaacugcaccgaggugcccgucgccauccacgccgaccagcugacgcccaccuggcggguguacuccaccgggagcaacguguuccagacccgcgccggcugccucaucggggcggagcacgucaacaacuccuacgagugcgacauccccaucggcgccggcaucugcgccagcuaccagacgcagaccaacuccccgcggcgcgcccggagcguggcgucccagagcgugaucgccuacaccaugucccugggggccgagaacagcgucgccuacuccaacaacagcaucgccauccccaccaacuucacgaucuccgugaccaccgagauccugcccgugagcaugaccaagacgagcgucgacugcaccauguacaucugcggcgacuccaccgagugcagcaaccuccugcugcaguacggguccuucugcacccagcucaaccgcgcgcugacgggcaucgccguggagcaggacaagaacacccaggagguguucgcccaggucaagcagaucuacaagacgcccccgaucaaggacuucgggggcuucaacuucagccagauccugcccgaccccuccaagcccagcaagcgguccuucaucgaggaccuccuguucaacaaggugacccuggccgacgccggcuucaucaagcaguacggggacugccucggcgacaucgcggcccgcgaccugaucugcgcccagaaguucaacgggcugaccgugcucccgccccugcugaccgacgagaugaucgcccaguacaccagcgcccuccuggcgggcaccaucacguccggguggaccuucggcgccggcgccgcccugcagauccccuucgcgaugcagauggccuaccgguucaacgggaucggcgucacccagaacgugcucuacgagaaccagaagcugaucgccaaccaguucaacagcgccaucgggaagauccaggacucccugagcuccaccgccagcgcgcucggcaagcugcaggacguggucaaccagaacgcccaggcccugaacacgcucgugaagcagcuguccagcaacuucggggccaucuccagcgugcugaacgacauccucucccgccuggacaaggucgaggccgaggugcagaucgaccggcugaucaccggccgccuccagagccugcagaccuacgugacccagcagcugauccgggcggccgagauccgcgccagcgccaaccucgccgcgaccaagauguccgagugcguccugggccagagcaagcggguggacuucugcgggaagggcuaccaccugauguccuucccccagagcgccccgcacgggguggucuuccuccacgugacguacguccccgcccaggagaagaacuucaccaccgcccccgcgaucugccacgacggcaaggcccacuucccccgcgaggggguguucguguccaacggcacccacugguucgucacgcagcggaacuucuacgagccgcagaucaucaccaccgacaacaccuucgugagcggcaacugcgacguggucaucgggaucgugaacaacacgguguacgacccccugcagcccgagcuggacuccuucaaggaggagcucgacaaguacuucaagaaccacaccagccccgacgucgaccugggcgacaucuccgggaucaacgccagcguggugaacauccagaaggagaucgaccgccugaacgaggucgccaagaaccucaacgagucccugaucgaccugcaggagcucggcaaguacgagcaguacaucaaguggccgugguacaucuggcugggcuucaucgccgggcugaucgcgaucgugaucgugaccaucaugcucugcugcaugaccagcugcugcuccugccugaagggcugcugcagcugcggguccugcugcaaguucgacgaggacgacagcgagcccguccugaagggcgugaagcuccacuacacgugaggacuagucccuguucccagagcccacuuuuuuuucuuuuuuugaaauaaaauagccugucuuucagaucuaaaaaaaaaaaaaaaaaaaaaaaaaaaaaaaaaaaaaaaaaaaaaaaaaaaaaaaaaaaaaaaaaaaaaaaaaaaaaaaaaaaaaaaaaaaaaaaaaaaa

SEQ ID NO: 24979 - RNA, 4158 nt, Artificial Sequence
  SARS-CoV-2/Wuhan/WIV05/2019__EPI_ISL_402128 spike protein mRNA gc (1-1273)(H69del_V70del_Y144del_N501Y_A570D_D614G_P681H_T716I_S982 A_D1118H)
aggagagggcgcuuggcuugcaaggacccugagcugcggcauugaagcacacccaacccaacucgacugaagucagccucacugaaccggaucugagaaucuucucucucugggcuugccagggcucuccgaaccuagcuagcauccucuucaauuccaacuagaaagcuuaccauguucguguuccugguccuccugccccuggugagcucccagugcgugaaccucaccacccgcacgcagcugccgcccgccuacaccaacagcuucacccggggcgucuacuaccccgacaagguguuccgcuccagcgugcugcacuccacccaggaccucuuccugcccuucuucagcaacgucacgugguuccacgccaucuccgggaccaacggcaccaagcgguucgacaacccggugcugcccuucaacgacgggguguacuucgcgagcaccgagaaguccaacaucauccgcggcuggaucuucgggacgacccucgacagcaagacccagucccugcugaucgucaacaacgccaccaacguggugaucaaggucugcgaguuccaguucugcaacgaccccuuccucggcguguaccacaagaacaacaagagcuggauggaguccgaguuccggguguacagcuccgccaacaacugcacguucgaguacgucagccagcccuuccugauggaccuggagggcaagcaggggaacuucaagaaccuccgcgaguucguguucaagaacaucgacggcuacuucaagaucuacuccaagcacaccccgaucaaccuggugcgggaccugccccagggguucagcgcccucgagccccuggucgaccugcccaucggcaucaacaucacccgcuuccagacccuccuggcccugcaccgguccuaccucacgccgggggacagcagcuccggcuggaccgcgggcgccgccgccuacuacgugggguaccugcagccccgcaccuuccugcucaaguacaacgagaacggcaccaucacggacgcgguggacugcgcccuggacccccugagcgagaccaagugcacccucaaguccuucaccgucgagaaggggaucuaccagacgagcaacuuccgggugcagcccaccgaguccaucgugcgcuucccgaacaucaccaaccugugccccuucggcgaggucuucaacgccacccgguucgccagcguguacgccuggaaccgcaagcggaucuccaacugcgucgcggacuacagcgugcuguacaacuccgccagcuucuccacguucaagugcuacggcgugagccccaccaagcucaacgaccugugcuucaccaacgucuacgccgacuccuucgugauccgcggggacgaggugcggcagaucgcccccggccagaccgggaagaucgccgacuacaacuacaagcugccggacgacuucacgggcugcgucaucgcguggaacagcaacaaccucgacuccaaggucgggggcaacuacaacuaccuguaccgccuguuccgcaagagcaaccucaagcccuucgagcgggacaucuccaccgagaucuaccaggccggcagcacccccugcaacgggguggagggcuucaacugcuacuucccccugcaguccuacggguuccagccgaccuacggcgugggguaccagcccuaccggguggugguccugagcuucgagcuccugcacgcccccgccacggugugcggccccaagaaguccaccaaccuggugaagaacaagugcgucaacuucaacuucaacggccucaccgggaccggcgugcugaccgagagcaacaagaaguuccugccguuccagcaguucgggcgcgacaucgacgacacgaccgacgccgugcgcgacccccagacccuggagauccucgacaucacccccugcagcuucggcggggucuccgugaucacgccgggcaccaacaccagcaaccagguggcgguccuguaccagggcgugaacugcaccgaggugcccgucgccauccacgccgaccagcugacgcccaccuggcggguguacuccaccgggagcaacguguuccagacccgcgccggcugccucaucggggccgagcacgucaacaacuccuacgagugcgacauccccaucggcgcgggcaucugcgccagcuaccagacgcagaccaacucccaccggcgcgcccggagcguggccucccagagcaucaucgcguacaccaugucccugggggccgagaacagcguggccuacuccaacaacagcaucgccaucccgaucaacuucaccaucuccgucacgaccgagauccugcccgugagcaugaccaagaccagcguggacugcacgauguacaucugcggcgacuccaccgagugcagcaaccuccugcugcaguacggguccuucugcacccagcucaaccgcgcccugaccggcaucgcggucgagcaggacaagaacacgcaggagguguucgcccaggugaagcagaucuacaagaccccgcccaucaaggacuucgggggcuucaacuucagccagauccugcccgaccccuccaagcccagcaagcgguccuucaucgaggaccuccuguucaacaaggucacccuggccgacgccggcuucaucaagcaguacggggacugccucggcgacaucgccgcgcgcgaccugaucugcgcccagaaguucaacgggcugaccgugcugcccccgcuccugacggacgagaugaucgcccaguacaccagcgcccuccuggccggcaccaucaccuccggguggacguucggcgcgggcgccgcccugcagauccccuucgccaugcagauggcguaccgguucaacgggaucggcgugacccagaacguccucuacgagaaccagaagcugaucgccaaccaguucaacagcgccaucgggaagauccaggacucccugagcuccaccgccagcgcccucggcaagcugcaggacguggugaaccagaacgcgcaggcccugaacacccucgucaagcagcuguccagcaacuucggggccaucuccagcgugcugaacgacauccucgcccgccuggacaagguggaggccgagguccagaucgaccggcugaucacgggccgccuccagucccugcagaccuacgugacccagcagcugauccgggcggccgagauccgcgccagcgccaaccucgccgcgaccaagaugagcgagugcgugcugggccaguccaagcgggucgacuucugcgggaagggcuaccaccugaugagcuucccccaguccgcgccccacggggugguguuccuccacgucaccuacgugccggcccaggagaagaacuucacgaccgcccccgccaucugccacgacggcaaggcccacuucccccgcgagggggucuucgugagcaacggcacccacugguucgugacccagcggaacuucuacgagccccagaucaucacgacccacaacaccuucgucuccggcaacugcgacguggugaucgggaucgucaacaacaccguguacgacccgcugcagcccgagcuggacagcuucaaggaggagcucgacaaguacuucaagaaccacacgucccccgacguggaccugggcgacaucagcgggaucaacgccuccgucgugaacauccagaaggagaucgaccgccugaacgagguggccaagaaccucaacgagagccugaucgaccugcaggagcucggcaaguacgagcaguacaucaaguggcccugguacaucuggcugggcuucaucgccgggcugaucgcgaucgucauggugaccaucaugcucugcugcaugaccuccugcugcagcugccugaagggcugcugcuccugcgggagcugcugcaaguucgacgaggacgacuccgagccggugcugaagggcgucaagcuccacuacaccugaggacuagucccuguucccagagcccacuuuuuuuucuuuuuuugaaauaaaauagccugucuuucagaucuaaaaaaaaaaaaaaaaaaaaaaaaaaaaaaaaaaaaaaaaaaaaaaaaaaaaaaaaaaaaaaaaaaaaaaaaaaaaaaaaaaaaaaaaaaaaaaaaaaaa

SEQ ID NO: 24980 - RNA, 4167 nt, Artificial Sequence
  SARS-CoV-2/Wuhan/WIV05/2019__EPI_ISL_402128 spike protein mRNA gc (1-1273)(K417N_E484K_N501Y_D614G)
aggagagggcgcuuggcuugcaaggacccugagcugcggcauugaagcacacccaacccaacucgacugaagucagccucacugaaccggaucugagaaucuucucucucugggcuugccagggcucuccgaaccuagcuagcauccucuucaauuccaacuagaaagcuuaccauguucguguuccugguccuccugccccuggugagcucccagugcgugaaccucaccacccgcacgcagcugccgcccgccuacaccaacagcuucacccggggcgucuacuaccccgacaagguguuccgcuccagcgugcugcacuccacccaggaccucuuccugcccuucuucagcaacgucacgugguuccacgccauccacguguccgggaccaacggcaccaagcgguucgacaacccggugcugcccuucaacgacggggucuacuucgcgagcaccgagaaguccaacaucauccgcggcuggaucuucgggacgacccucgacagcaagacccagucccugcugaucgugaacaacgccaccaacguggucaucaaggugugcgaguuccaguucugcaacgaccccuuccucggcguguacuaccacaagaacaacaagagcuggauggaguccgaguuccgggucuacagcuccgccaacaacugcacguucgaguacgugagccagcccuuccugauggaccuggagggcaagcaggggaacuucaagaaccuccgcgaguucguguucaagaacaucgacggcuacuucaagaucuacuccaagcacaccccgaucaaccugguccgggaccugccccagggguucagcgcccucgagccccugguggaccugcccaucggcaucaacaucacccgcuuccagacccuccuggcccugcaccgguccuaccucacgccgggggacagcagcuccggcuggaccgcgggcgccgccgccuacuacgugggguaccugcagccccgcaccuuccugcucaaguacaacgagaacggcaccaucacggacgcggucgacugcgcccuggacccccugagcgagaccaagugcacccucaaguccuucaccguggagaaggggaucuaccagacgagcaacuuccgggugcagcccaccgaguccaucguccgcuucccgaacaucaccaaccugugccccuucggcgagguguucaacgccacccgguucgccagcgucuacgccuggaaccgcaagcggaucuccaacugcguggcggacuacagcgugcuguacaacuccgccagcuucuccacguucaagugcuacggcgucagccccaccaagcucaacgaccugugcuucaccaacguguacgccgacuccuucgugauccgcggggacgagguccggcagaucgcccccggccagaccgggaacaucgccgacuacaacuacaagcugccggacgacuucacgggcugcgugaucgcguggaacagcaacaaccucgacuccaaggucgggggcaacuacaacuaccuguaccgccuguuccgcaagagcaaccucaagcccuucgagcgggacaucuccaccgagaucuaccaggccggcagcacccccugcaacggggugaagggcuucaacugcuacuucccccugcaguccuacggguuccagccgaccuacggcgugggguaccagcccuaccggguggucgugcugagcuucgagcuccugcacgcccccgccacggugugcggccccaagaaguccaccaaccuggucaagaacaagugcgugaacuucaacuucaacggccucaccgggaccggcgugcugaccgagagcaacaagaaguuccugccguuccagcaguucgggcgcgacaucgccgacacgaccgacgcgguccgcgacccccagacccuggagauccucgacaucacccccugcagcuucggcgggguguccgugaucacgccgggcaccaacaccagcaaccaggucgccgugcuguaccagggcgugaacugcaccgagguccccguggccauccacgccgaccagcugacgcccaccuggcggguguacuccaccgggagcaacgucuuccagacccgcgccggcugccucaucggggcggagcacgugaacaacuccuacgagugcgacauccccaucggcgccggcaucugcgccagcuaccagacgcagaccaacuccccgcggcgcgcccggagcguggcgucccagagcaucaucgccuacaccaugucccugggggccgagaacagcgucgccuacuccaacaacagcaucgccauccccaccaacuucacgaucuccgugaccaccgagauccugcccgugagcaugaccaagacgagcgucgacugcaccauguacaucugcggcgacuccaccgagugcagcaaccuccugcugcaguacggguccuucugcacccagcucaaccgcgcgcugacgggcaucgccguggagcaggacaagaacacccaggagguguucgcccaggucaagcagaucuacaagacgcccccgaucaaggacuucgggggcuucaacuucagccagauccugcccgaccccuccaagcccagcaagcgguccuucaucgaggaccuccuguucaacaaggugacccuggccgacgccggcuucaucaagcaguacggggacugccucggcgacaucgcggcccgcgaccugaucugcgcccagaaguucaacgggcugaccgugcucccgccccugcugaccgacgagaugaucgcccaguacaccagcgcccuccuggcgggcaccaucacguccggguggaccuucggcgccggcgccgcccugcagauccccuucgcgaugcagauggccuaccgguucaacgggaucggcgucacccagaacgugcucuacgagaaccagaagcugaucgccaaccaguucaacagcgccaucgggaagauccaggacucccugagcuccaccgccagcgcgcucggcaagcugcaggacguggucaaccagaacgcccaggcccugaacacgcucgugaagcagcuguccagcaacuucggggccaucuccagcgugcugaacgacauccucucccgccuggacaaggucgaggccgaggugcagaucgaccggcugaucaccggccgccuccagagccugcagaccuacgugacccagcagcugauccgggcggccgagauccgcgccagcgccaaccucgccgcgaccaagauguccgagugcguccugggccagagcaagcggguggacuucugcgggaagggcuaccaccugauguccuucccccagagcgccccgcacgggguggucuuccuccacgugacguacguccccgcccaggagaagaacuucaccaccgcccccgcgaucugccacgacggcaaggcccacuucccccgcgaggggguguucguguccaacggcacccacugguucgucacgcagcggaacuucuacgagccgcagaucaucaccaccgacaacaccuucgugagcggcaacugcgacguggucaucgggaucgugaacaacacgguguacgacccccugcagcccgagcuggacuccuucaaggaggagcucgacaaguacuucaagaaccacaccagccccgacgucgaccugggcgacaucuccgggaucaacgccagcguggugaacauccagaaggagaucgaccgccugaacgaggucgccaagaaccucaacgagucccugaucgaccugcaggagcucggcaaguacgagcaguacaucaaguggccgugguacaucuggcugggcuucaucgccgggcugaucgcgaucgugauggugaccaucaugcucugcugcaugaccagcugcugcuccugccugaagggcugcugcagcugcggguccugcugcaaguucgacgaggacgacagcgagcccguccugaagggcgugaagcuccacuacacgugaggacuagucccuguucccagagcccacuuuuuuuucuuuuuuugaaauaaaauagccugucuuucagaucuaaaaaaaaaaaaaaaaaaaaaaaaaaaaaaaaaaaaaaaaaaaaaaaaaaaaaaaaaaaaaaaaaaaaaaaaaaaaaaaaaaaaaaaaaaaaaaaaaaaa

SEQ ID NO: 24981 - RNA, 4158 nt, Artificial Sequence
  SARS-CoV-2/Wuhan/WIV05/2019__EPI_ISL_402128 spike protein mRNA gc (1-1273)(L18F_D80A_D215G_L242del_A243del_L244del_R246I_K417N_E484 K_N501Y_D614G_A701V)
aggagagggcgcuuggcuugcaaggacccugagcugcggcauugaagcacacccaacccaacucgacugaagucagccucacugaaccggaucugagaaucuucucucucugggcuugccagggcucuccgaaccuagcuagcauccucuucaauuccaacuagaaagcuuaccauguucguguuccugguccuccugccccuggugagcucccagugcgugaacuucaccacccgcacgcagcucccgcccgccuacaccaacagcuucacccggggcgucuacuaccccgacaagguguuccgcuccagcgugcugcacuccacccaggaccuguuccuccccuucuucagcaacgucacgugguuccacgccauccacguguccgggaccaacggcaccaagcgguucgcgaacccggugcugcccuucaacgacggggucuacuucgccagcaccgagaaguccaacaucauccgcggcuggaucuucgggacgacccuggacagcaagacccagucccuccugaucgugaacaacgccaccaacguggucaucaaggugugcgaguuccaguucugcaacgaccccuuccugggcguguacuaccacaagaacaacaagagcuggauggaguccgaguuccgggucuacagcuccgccaacaacugcacguucgaguacgugagccagcccuuccucauggaccuggagggcaagcaggggaacuucaagaaccugcgcgaguucguguucaagaacaucgacggcuacuucaagaucuacuccaagcacaccccgaucaaccucguccgggggcugccccagggcuucagcgcccuggagccccucguggaccugcccaucgggaucaacaucacccgcuuccagacccugcacaucuccuaccucacgccgggcgacagcagcuccggcuggaccgcgggggccgccgccuacuacgugggcuaccugcagccccggaccuuccugcucaaguacaacgagaacgggaccaucacggacgcggucgacugcgcccuggacccccugagcgagaccaagugcacccucaaguccuucaccguggagaagggcaucuaccagacgagcaacuuccgcgugcagcccaccgaguccaucguccgguucccgaacaucaccaaccugugccccuucggcgagguguucaacgccacccgcuucgccagcgucuacgccuggaaccggaagcgcaucuccaacugcguggcggacuacagcgugcuguacaacuccgccagcuucuccacguucaagugcuacggggucagccccaccaagcucaacgaccugugcuucaccaacguguacgccgacuccuucgugauccggggcgacgagguccgccagaucgcccccgggcagaccggcaacaucgccgacuacaacuacaagcugccggacgacuucacggggugcgugaucgcguggaacagcaacaaccucgacuccaaggugggcggcaacuacaacuaccuguaccggcuguuccgcaagagcaaccucaagcccuucgagcgggacaucuccaccgagaucuaccaggccgggagcacccccugcaacggcgucaagggguucaacugcuacuucccccugcaguccuacggcuuccagccgaccuacggggugggcuaccagcccuaccgcguggucgugcugagcuucgagcuccugcacgcccccgccacggugugcggccccaagaaguccaccaaccuggucaagaacaagugcgugaacuucaacuucaacgggcucaccggcaccggggugcugaccgagagcaacaagaaguuccugccguuccagcaguucggccgggacaucgccgacacgaccgacgcgguccgcgacccccagacccucgagauccuggacaucacccccugcagcuucgggggcguguccgugaucacgccgggcaccaacaccagcaaccaggucgccgugcuguaccagggggugaacugcaccgagguccccguggccauccacgccgaccagcugacgcccaccuggcgcguguacuccaccggcagcaacgucuuccagacccgggccgggugccucaucggcgcggagcacgugaacaacuccuacgagugcgacauccccaucggcgccgggaucugcgccagcuaccagacgcagaccaacuccccgcgccgggcccgcagcguggcgucccagagcaucaucgccuacaccaugucccugggcgucgagaacagcguggccuacuccaacaacagcaucgccauccccaccaacuucacgaucuccgugaccaccgagauccugcccgucagcaugaccaagacgagcguggacugcaccauguacaucugcggggacuccaccgagugcagcaaccuccugcugcaguacggcuccuucugcacccagcucaaccgggcccugacggggaucgcgguggagcaggacaagaacacccaggaggucuucgcccaggugaagcagaucuacaagacgcccccgaucaaggacuucggcggcuucaacuucagccagauccugcccgaccccuccaagcccagcaagcgcuccuucaucgaggaccuccuguucaacaaggugacccuggccgacgccggguucaucaagcaguacggcgacugccucggggacaucgccgcgcgggaccugaucugcgcccagaaguucaacggccugaccguccucccgccccugcugaccgacgagaugaucgcccaguacaccagcgcccuccuggccgggaccaucacguccggcuggaccuucggcgcgggggccgcccugcagauccccuucgccaugcagauggcguaccgcuucaacggcaucggggugacccagaacgugcucuacgagaaccagaagcugaucgccaaccaguucaacagcgccaucggcaagauccaggacucccugagcuccaccgccagcgcccucgggaagcugcaggacgucgugaaccagaacgcgcaggcccugaacacgcucgugaagcagcuguccagcaacuucggcgccaucuccagcguccugaacgacauccucucccggcuggacaagguggaggccgaggugcagaucgaccgccugaucaccggccggcuccagagccugcagaccuacgucacccagcagcugauccgcgccgcggagauccgggccagcgccaaccucgccgccaccaagauguccgagugcgugcuggggcagagcaagcgcguggacuucugcggcaagggguaccaccugauguccuucccccagagcgcgccgcacggcgucguguuccuccacgucacguacgugcccgcccaggagaagaacuucaccaccgcccccgccaucugccacgacgggaaggcgcacuucccccgggagggcguguucgucuccaacggcacccacugguucgugacgcagcgcaacuucuacgagccgcagaucaucaccaccgacaacaccuucgugagcgggaacugcgacgucgugaucggcaucgugaacaacacggucuacgacccccugcagcccgagcuggacuccuucaaggaggagcucgacaaguacuucaagaaccacaccagccccgacguggaccugggggacaucuccggcaucaacgccagcguggucaacauccagaaggagaucgaccggcugaacgagguggccaagaaccucaacgagucccugaucgaccugcaggagcucggcaaguacgagcaguacaucaaguggccgugguacaucuggcugggguucaucgccggccugaucgccaucgugauggucaccaucaugcucugcugcaugaccagcugcugcuccugccugaaggggugcugcagcugcggcuccugcugcaaguucgacgaggacgacagcgagcccgugcugaagggggugaagcuccacuacacgugaggacuagucccuguucccagagcccacuuuuuuuucuuuuuuugaaauaaaauagccugucuuucagaucuaaaaaaaaaaaaaaaaaaaaaaaaaaaaaaaaaaaaaaaaaaaaaaaaaaaaaaaaaaaaaaaaaaaaaaaaaaaaaaaaaaaaaaaaaaaaaaaaaaaa

SEQ ID NO: 24982 - RNA, 4167 nt, Artificial Sequence
  SARS-CoV-2/Wuhan/WIV05/2019__EPI_ISL_402128 spike protein mRNA gc (1-1273)(E484K_D614G)
aggagagggcgcuuggcuugcaaggacccugagcugcggcauugaagcacacccaacccaacucgacugaagucagccucacugaaccggaucugagaaucuucucucucugggcuugccagggcucuccgaaccuagcuagcauccucuucaauuccaacuagaaagcuuaccauguucguguuccugguccuccugccccuggugagcucccagugcgugaaccucaccacccgcacgcagcugccgcccgccuacaccaacagcuucacccggggcgucuacuaccccgacaagguguuccgcuccagcgugcugcacuccacccaggaccucuuccugcccuucuucagcaacgucacgugguuccacgccauccacguguccgggaccaacggcaccaagcgguucgacaacccggugcugcccuucaacgacggggucuacuucgcgagcaccgagaaguccaacaucauccgcggcuggaucuucgggacgacccucgacagcaagacccagucccugcugaucgugaacaacgccaccaacguggucaucaaggugugcgaguuccaguucugcaacgaccccuuccucggcguguacuaccacaagaacaacaagagcuggauggaguccgaguuccgggucuacagcuccgccaacaacugcacguucgaguacgugagccagcccuuccugauggaccuggagggcaagcaggggaacuucaagaaccuccgcgaguucguguucaagaacaucgacggcuacuucaagaucuacuccaagcacaccccgaucaaccugguccgggaccugccccagggguucagcgcccucgagccccugguggaccugcccaucggcaucaacaucacccgcuuccagacccuccuggcccugcaccgguccuaccucacgccgggggacagcagcuccggcuggaccgcgggcgccgccgccuacuacgugggguaccugcagccccgcaccuuccugcucaaguacaacgagaacggcaccaucacggacgcggucgacugcgcccuggacccccugagcgagaccaagugcacccucaaguccuucaccguggagaaggggaucuaccagacgagcaacuuccgggugcagcccaccgaguccaucguccgcuucccgaacaucaccaaccugugccccuucggcgagguguucaacgccacccgguucgccagcgucuacgccuggaaccgcaagcggaucuccaacugcguggcggacuacagcgugcuguacaacuccgccagcuucuccacguucaagugcuacggcgucagccccaccaagcucaacgaccugugcuucaccaacguguacgccgacuccuucgugauccgcggggacgagguccggcagaucgcccccggccagaccgggaagaucgccgacuacaacuacaagcugccggacgacuucacgggcugcgugaucgcguggaacagcaacaaccucgacuccaaggucgggggcaacuacaacuaccuguaccgccuguuccgcaagagcaaccucaagcccuucgagcgggacaucuccaccgagaucuaccaggccggcagcacccccugcaacggggugaagggcuucaacugcuacuucccccugcaguccuacggguuccagccgaccaacggcgugggguaccagcccuaccggguggucgugcugagcuucgagcuccugcacgcccccgccacggugugcggccccaagaaguccaccaaccuggucaagaacaagugcgugaacuucaacuucaacggccucaccgggaccggcgugcugaccgagagcaacaagaaguuccugccguuccagcaguucgggcgcgacaucgccgacacgaccgacgcgguccgcgacccccagacccuggagauccucgacaucacccccugcagcuucggcgggguguccgugaucacgccgggcaccaacaccagcaaccaggucgccgugcuguaccagggcgugaacugcaccgagguccccguggccauccacgccgaccagcugacgcccaccuggcggguguacuccaccgggagcaacgucuuccagacccgcgccggcugccucaucggggcggagcacgugaacaacuccuacgagugcgacauccccaucggcgccggcaucugcgccagcuaccagacgcagaccaacuccccgcggcgcgcccggagcguggcgucccagagcaucaucgccuacaccaugucccugggggccgagaacagcgucgccuacuccaacaacagcaucgccauccccaccaacuucacgaucuccgugaccaccgagauccugcccgugagcaugaccaagacgagcgucgacugcaccauguacaucugcggcgacuccaccgagugcagcaaccuccugcugcaguacggguccuucugcacccagcucaaccgcgcgcugacgggcaucgccguggagcaggacaagaacacccaggagguguucgcccaggucaagcagaucuacaagacgcccccgaucaaggacuucgggggcuucaacuucagccagauccugcccgaccccuccaagcccagcaagcgguccuucaucgaggaccuccuguucaacaaggugacccuggccgacgccggcuucaucaagcaguacggggacugccucggcgacaucgcggcccgcgaccugaucugcgcccagaaguucaacgggcugaccgugcucccgccccugcugaccgacgagaugaucgcccaguacaccagcgcccuccuggcgggcaccaucacguccggguggaccuucggcgccggcgccgcccugcagauccccuucgcgaugcagauggccuaccgguucaacgggaucggcgucacccagaacgugcucuacgagaaccagaagcugaucgccaaccaguucaacagcgccaucgggaagauccaggacucccugagcuccaccgccagcgcgcucggcaagcugcaggacguggucaaccagaacgcccaggcccugaacacgcucgugaagcagcuguccagcaacuucggggccaucuccagcgugcugaacgacauccucucccgccuggacaaggucgaggccgaggugcagaucgaccggcugaucaccggccgccuccagagccugcagaccuacgugacccagcagcugauccgggcggccgagauccgcgccagcgccaaccucgccgcgaccaagauguccgagugcguccugggccagagcaagcggguggacuucugcgggaagggcuaccaccugauguccuucccccagagcgccccgcacgggguggucuuccuccacgugacguacguccccgcccaggagaagaacuucaccaccgcccccgcgaucugccacgacggcaaggcccacuucccccgcgaggggguguucguguccaacggcacccacugguucgucacgcagcggaacuucuacgagccgcagaucaucaccaccgacaacaccuucgugagcggcaacugcgacguggucaucgggaucgugaacaacacgguguacgacccccugcagcccgagcuggacuccuucaaggaggagcucgacaaguacuucaagaaccacaccagccccgacgucgaccugggcgacaucuccgggaucaacgccagcguggugaacauccagaaggagaucgaccgccugaacgaggucgccaagaaccucaacgagucccugaucgaccugcaggagcucggcaaguacgagcaguacaucaaguggccgugguacaucuggcugggcuucaucgccgggcugaucgcgaucgugauggugaccaucaugcucugcugcaugaccagcugcugcuccugccugaagggcugcugcagcugcggguccugcugcaaguucgacgaggacgacagcgagcccguccugaagggcgugaagcuccacuacacgugaggacuagucccuguucccagagcccacuuuuuuuucuuuuuuugaaauaaaauagccugucuuucagaucuaaaaaaaaaaaaaaaaaaaaaaaaaaaaaaaaaaaaaaaaaaaaaaaaaaaaaaaaaaaaaaaaaaaaaaaaaaaaaaaaaaaaaaaaaaaaaaaaaaaa

SEQ ID NO: 24983 - RNA, 4167 nt, Artificial Sequence
  SARS-CoV-2/Wuhan/WIV05/2019__EPI_ISL_402128 spike protein mRNA gc (1-1273)(L18F_T20N_P26S_D138Y_R190S_K417T_E484K_N501Y_D614G_H655Y _T1027I)
aggagagggcgcuuggcuugcaaggacccugagcugcggcauugaagcacacccaacccaacucgacugaagucagccucacugaaccggaucugagaaucuucucucucugggcuugccagggcucuccgaaccuagcuagcauccucuucaauuccaacuagaaagcuuaccauguucguguuccugguccuccugccccuggugagcucccagugcgugaacuucaccaaccgcacccagcucccgagcgccuacacgaacuccuucacccggggcgucuacuaccccgacaagguguuccgcagcuccgugcugcacagcacccaggaccuguuccuccccuucuucuccaacgucaccugguuccacgccauccacgugagcgggacgaacggcaccaagcgguucgacaaccccgugcugccguucaacgacggggucuacuucgcguccaccgagaaguccaacaucauccgcggcuggaucuucgggaccacgcuggacuccaagacccagagccuccugaucgugaacaacgccaccaacguggucaucaaggugugcgaguuccaguucugcaacuaccccuuccugggcguguacuaccacaagaacaacaaguccuggauggagagcgaguuccgggucuacuccagcgccaacaacugcaccuucgaguacgugucccagcccuuccucauggaccuggagggcaagcaggggaacuucaagaaccugagcgaguucguguucaagaacaucgacggcuacuucaagaucuacuccaagcacacgcccaucaaccucguccgcgaccugccgcagggguucagcgcccuggagccccucguggaccugcccaucggcaucaacaucacccgguuccagacccugcucgcccugcaccgcagcuaccugacccccggggacuccagcuccggcuggacggcgggcgccgccgccuacuacgugggguaccuccagccgcggaccuuccugcugaaguacaacgagaacggcaccaucaccgacgcggucgacugcgcccucgacccccugagcgagacgaagugcacccugaaguccuucaccguggagaaggggaucuaccagaccagcaacuuccgcgugcagcccacggaguccaucguccgguuccccaacaucaccaaccucugcccguucggcgagguguucaacgccacccgcuucgccagcgucuacgccuggaaccggaagcgcaucuccaacugcguggcggacuacagcgugcuguacaacuccgccagcuucuccaccuucaagugcuacggcgucagccccacgaagcugaacgaccucugcuucaccaacguguacgccgacuccuucgugauccgcggggacgagguccggcagaucgcccccggccagaccgggaccaucgccgacuacaacuacaagcugcccgacgacuucacgggcugcgugaucgcguggaacagcaacaaccuggacuccaaggucgggggcaacuacaacuaccucuaccggcuguuccgcaagagcaaccugaagccguucgagcgggacaucuccaccgagaucuaccaggccggcagcacccccugcaacggggugaagggcuucaacugcuacuucccccuccagagcuacggguuccagcccaccuacggcgugggguaccagccguaccgcguggucgugcuguccuucgagcugcuccacgcccccgccacggugugcggccccaagaaguccaccaaccuggucaagaacaagugcgugaacuucaacuucaacggccugaccgggaccggcgugcucaccgagagcaacaagaaguuccugcccuuccagcaguucgggcgggacaucgccgacacgaccgacgcgguccgcgacccgcagacccuggagauccuggacaucacccccugcagcuucggcgggguguccgugaucacgcccggcaccaacaccagcaaccaggucgccgugcucuaccagggcgugaacugcaccgaggucccgguggccauccacgccgaccagcugacgcccaccuggcgcguguacuccaccgggagcaacgucuuccagacccgggccggcugccugaucggggcggaguacgugaacaacuccuacgagugcgacauccccaucggcgccggcaucugcgccagcuaccagacgcagaccaacagcccccgccgggcccgcagcguggcgucccagagcaucaucgccuacaccaugucccucggggccgagaacagcgucgccuacuccaacaacagcaucgccaucccgaccaacuucacgaucagcgugaccaccgagauccugcccguguccaugaccaagacgagcgucgacugcaccauguacaucugcggcgacuccaccgagugcagcaaccugcuccugcaguacggguccuucugcacccagcugaaccgggcgcucacgggcaucgccguggagcaggacaagaacacccaggagguguucgcccaggucaagcagaucuacaagaccccgcccaucaaggacuucgggggcuucaacuucagccagauccugcccgaccccuccaagcccagcaagcgcuccuucaucgaggaccuccuguucaacaaggugacccuggccgacgccggcuucaucaagcaguacggggacugccugggcgacaucgcggcccgggaccucaucugcgcccagaaguucaacgggcugacggugcugcccccgcuccugaccgacgagaugaucgcccaguacaccagcgcccugcucgcgggcaccaucacguccggguggaccuucggcgccggcgccgcccugcagauccccuucgcgaugcagauggccuaccgcuucaacgggaucggcgucacccagaacgugcuguacgagaaccagaagcucaucgccaaccaguucaacagcgccaucgggaagauccaggacucccugagcuccaccgccagcgcgcugggcaagcuccaggacguggucaaccagaacgcccaggcccugaacacgcuggugaagcagcucuccagcaacuucggggccaucuccagcgugcugaacgacauccugagccggcucgacaaggucgaggccgaggugcagaucgaccgccugaucaccggccggcugcagucccuccagaccuacgugacccagcagcugauccgcgcggccgagauccgggccagcgccaaccuggccgcgaucaagauguccgagugcguccucggccagagcaagcgcguggacuucugcgggaagggcuaccaccugauguccuucccccagagcgcgccccacgggguggucuuccugcacgugaccuacgucccggcccaggagaagaacuucacgaccgcccccgccaucugccacgacggcaaggcccacuucccccgggaggggguguucguguccaacggcacccacugguucgucacccagcgcaacuucuacgagccccagaucaucacgaccgacaacaccuucgugagcggcaacugcgacguggucaucgggaucgugaacaacaccguguacgacccgcuccagcccgagcuggacuccuucaaggaggagcuggacaaguacuucaagaaccacacgagccccgacgucgaccucggcgacaucuccgggaucaacgccagcguggugaacauccagaaggagaucgaccggcugaacgaggucgccaagaaccugaacgagucccucaucgaccugcaggagcugggcaaguacgagcaguacaucaaguggcccugguacaucuggcucggcuucaucgccgggcugaucgcgaucgugauggugaccaucaugcugugcugcaugaccagcugcugcuccugccucaagggcugcugcagcugcggguccugcugcaaguucgacgaggacgacagcgagccgguccugaagggcgugaagcugcacuacaccugaggacuagucccuguucccagagcccacuuuuuuuucuuuuuuugaaauaaaauagccugucuuucagaucuaaaaaaaaaaaaaaaaaaaaaaaaaaaaaaaaaaaaaaaaaaaaaaaaaaaaaaaaaaaaaaaaaaaaaaaaaaaaaaaaaaaaaaaaaaaaaaaaaaaa

SEQ ID NO: 24984 - RNA, 4167 nt, Artificial Sequence
  SARS-CoV-2/Wuhan/WIV05/2019__EPI_ISL_402128 spike protein mRNA gc (1-1273)(S13I_W152C_L452R_D614G)
aggagagggcgcuuggcuugcaaggacccugagcugcggcauugaagcacacccaacccaacucgacugaagucagccucacugaaccggaucugagaaucuucucucucugggcuugccagggcucuccgaaccuagcuagcauccucuucaauuccaacuagaaagcuuaccauguucguguuccugguccuccugccccuggugagcauccagugcgugaaccucaccacccgcacgcagcugccgcccgccuacaccaacuccuucacccggggcgucuacuaccccgacaagguguuccgcagcuccgugcugcacagcacccaggaccucuuccugcccuucuucuccaacgucacgugguuccacgccauccacgugagcgggaccaacggcaccaagcgguucgacaacccggugcugcccuucaacgacggggucuacuucgcguccaccgagaaguccaacaucauccgcggcuggaucuucgggacgacccucgacagcaagacccagagccugcugaucgugaacaacgccaccaacguggucaucaaggugugcgaguuccaguucugcaacgaccccuuccucggcguguacuaccacaagaacaacaaguccugcauggagagcgaguuccgggucuacuccagcgccaacaacugcacguucgaguacgugucccagcccuuccugauggaccuggagggcaagcaggggaacuucaagaaccuccgcgaguucguguucaagaacaucgacggcuacuucaagaucuacagcaagcacaccccgaucaaccugguccgggaccugccccagggguucuccgcccucgagccccugguggaccugcccaucggcaucaacaucacccgcuuccagacccuccuggcccugcaccggagcuaccucacgccgggggacuccagcagcggcuggaccgcgggcgccgccgccuacuacgugggguaccugcagccccgcaccuuccugcucaaguacaacgagaacggcaccaucacggacgcggucgacugcgcccuggacccccuguccgagaccaagugcacccucaagagcuucaccguggagaaggggaucuaccagacguccaacuuccgggugcagcccaccgagagcaucguccgcuucccgaacaucaccaaccugugccccuucggcgagguguucaacgccacccgguucgccuccgucuacgccuggaaccgcaagcggaucagcaacugcguggcggacuacuccgugcuguacaacagcgccuccuucagcacguucaagugcuacggcgucucccccaccaagcucaacgaccugugcuucaccaacguguacgccgacagcuucgugauccgcggggacgagguccggcagaucgcccccggccagaccgggaagaucgccgacuacaacuacaagcugccggacgacuucacgggcugcgugaucgcguggaacuccaacaaccucgacagcaaggucgggggcaacuacaacuaccgcuaccggcuguuccgcaaguccaaccugaagcccuucgagcgggacaucagcaccgagaucuaccaggccggcuccacccccugcaacgggguggagggcuucaacugcuacuucccccuccagagcuacggguuccagccgaccaacggcgugggguaccagcccuaccgcguggucgugcuguccuucgagcugcuccacgcccccgccacggugugcggccccaagaaguccaccaaccuggucaagaacaagugcgugaacuucaacuucaacggccugaccgggaccggcgugcucaccgagagcaacaagaaguuccugccguuccagcaguucgggcgcgacaucgccgacacgaccgacgcgguccgggacccccagacccuggagauccuggacaucacccccugcagcuucggcggggugagcgugaucacgccgggcaccaacaccuccaaccaggucgccgugcucuaccagggcgugaacugcaccgagguccccguggccauccacgccgaccagcugacgcccaccuggcgcguguacagcaccggguccaacgucuuccagacccgggccggcugccugaucggggcggagcacgugaacaacagcuacgagugcgacauccccaucggcgccggcaucugcgccuccuaccagacgcagaccaacagcccgcgccgggcccgcuccguggcgagccaguccaucaucgccuacaccaugagccucggggccgagaacuccgucgccuacagcaacaacuccaucgccauccccaccaacuucacgaucagcgugaccaccgagauccugcccguguccaugaccaagacgagcgucgacugcaccauguacaucugcggcgacagcaccgagugcuccaaccugcuccugcaguacgggagcuucugcacccagcugaaccgggcgcucacgggcaucgccguggagcaggacaagaacacccaggagguguucgcccaggucaagcagaucuacaagacgcccccgaucaaggacuucgggggcuucaacuucucccagauccugcccgaccccagcaagcccuccaagcgcagcuucaucgaggaccuccuguucaacaaggugacccuggccgacgccggcuucaucaagcaguacggggacugccugggcgacaucgcggcccgggaccucaucugcgcccagaaguucaacgggcugaccgugcugccgccccuccugaccgacgagaugaucgcccaguacaccuccgcccugcucgcgggcaccaucacgagcggguggaccuucggcgccggcgccgcccugcagauccccuucgcgaugcagauggccuaccgcuucaacgggaucggcgucacccagaacgugcuguacgagaaccagaagcucaucgccaaccaguucaacuccgccaucgggaagauccaggacagccuguccagcaccgccuccgcgcugggcaagcuccaggacguggucaaccagaacgcccaggcccugaacacgcuggugaagcagcucagcuccaacuucggggccaucagcuccgugcugaacgacauccugagccggcucgacaaggucgaggccgaggugcagaucgaccgccugaucaccggccggcugcagucccuccagaccuacgugacccagcagcugauccgcgcggccgagauccgggccagcgccaaccuggccgcgaccaagaugagcgagugcguccucggccaguccaagcgcguggacuucugcgggaagggcuaccaccugaugagcuucccccaguccgccccgcacgggguggucuuccugcacgugacguacguccccgcccaggagaagaacuucaccaccgcccccgcgaucugccacgacggcaaggcccacuucccccgggaggggguguucgugagcaacggcacccacugguucgucacgcagcgcaacuucuacgagccgcagaucaucaccaccgacaacaccuucguguccggcaacugcgacguggucaucgggaucgugaacaacacgguguacgacccccuccagcccgagcuggacagcuucaaggaggagcuggacaaguacuucaagaaccacaccucccccgacgucgaccucggcgacaucagcgggaucaacgccuccguggugaacauccagaaggagaucgaccggcugaacgaggucgccaagaaccugaacgagagccucaucgaccugcaggagcugggcaaguacgagcaguacaucaaguggccgugguacaucuggcucggcuucaucgccgggcugaucgcgaucgugauggugaccaucaugcugugcugcaugaccuccugcugcagcugccucaagggcugcugcuccugcgggagcugcugcaaguucgacgaggacgacuccgagcccguccugaagggcgugaagcugcacuacacgugaggacuagucccuguucccagagcccacuuuuuuuucuuuuuuugaaauaaaauagccugucuuucagaucuaaaaaaaaaaaaaaaaaaaaaaaaaaaaaaaaaaaaaaaaaaaaaaaaaaaaaaaaaaaaaaaaaaaaaaaaaaaaaaaaaaaaaaaaaaaaaaaaaaaa

SEQ ID NO: 24985 - RNA, 4167 nt, Artificial Sequence
  SARS-CoV-2/Wuhan/WIV05/2019__EPI_ISL_402128 spike protein mRNA gc (1-1273)
aggagagggcgcuuggcuugcaaggacccugagcugcggcauugaagcacacccaacccaacucgacugaagucagccucacugaaccggaucugagaaucuucucucucugggcuugccagggcucuccgaaccuagcuagcauccucuucaauuccaacuagaaagcuuaccauguucguguuccuggugcugcugccccuggugagcagccagugcgugaaccugaccacccggacccagcugccaccagccuacaccaacagcuucacccggggcgucuacuaccccgacaagguguuccggagcagcguccugcacagcacccaggaccuguuccugcccuucuucagcaacgugaccugguuccacgccauccacgugagcggcaccaacggcaccaagcgguucgacaaccccgugcugcccuucaacgacggcguguacuucgccagcaccgagaagagcaacaucauccggggcuggaucuucggcaccacccuggacagcaagacccagagccugcugaucgugaauaacgccaccaacguggugaucaaggugugcgaguuccaguucugcaacgaccccuuccugggcguguacuaccacaagaacaacaagagcuggauggagagcgaguuccggguguacagcagcgccaacaacugcaccuucgaguacgugagccagcccuuccugauggaccuggagggcaagcagggcaacuucaagaaccugcgggaguucguguucaagaacaucgacggcuacuucaagaucuacagcaagcacaccccaaucaaccuggugcgggaucugccccagggcuucucagcccuggagccccugguggaccugcccaucggcaucaacaucacccgguuccagacccugcuggcccugcaccggagcuaccugaccccaggcgacagcagcagcggguggacagcaggcgcggcugcuuacuacgugggcuaccugcagccccggaccuuccugcugaaguacaacgagaacggcaccaucaccgacgccguggacugcgcccuggacccucugagcgagaccaagugcacccugaagagcuucaccguggagaagggcaucuaccagaccagcaacuuccgggugcagcccaccgagagcaucgugcgguuccccaacaucaccaaccugugccccuucggcgagguguucaacgccacccgguucgccagcguguacgccuggaaccggaagcggaucagcaacugcguggccgacuacagcgugcuguacaacagcgccagcuucagcaccuucaagugcuacggcgugagccccaccaagcugaacgaccugugcuucaccaacguguacgccgacagcuucgugauccguggcgacgaggugcggcagaucgcacccggccagacaggcaagaucgccgacuacaacuacaagcugcccgacgacuucaccggcugcgugaucgccuggaacagcaacaaccucgacagcaaggugggcggcaacuacaacuaccuguaccggcuguuccggaagagcaaccugaagcccuucgagcgggacaucagcaccgagaucuaccaagccggcuccaccccuugcaacggcguggagggcuucaacugcuacuucccucugcagagcuacggcuuccagcccaccaacggcgugggcuaccagcccuaccgggugguggugcugagcuucgagcugcugcacgccccagccaccguguguggccccaagaagagcaccaaccuggugaagaacaagugcgugaacuucaacuucaacggccuuaccggcaccggcgugcugaccgagagcaacaagaaauuccugcccuuucagcaguucggccgggacaucgccgacaccaccgacgcugugcgggauccccagacccuggagauccuggacaucaccccuugcagcuucggcggcgugagcgugaucaccccaggcaccaacaccagcaaccagguggccgugcuguaccaggacgugaacugcaccgaggugcccguggccauccacgccgaccagcugacacccaccuggcgggucuacagcaccggcagcaacguguuccagacccgggccgguugccugaucggcgccgagcacgugaacaacagcuacgagugcgacauccccaucggcgccggcaucugugccagcuaccagacccagaccaauucaccccggagggcaaggagcguggccagccagagcaucaucgccuacaccaugagccugggcgccgagaacagcguggccuacagcaacaacagcaucgccauccccaccaacuucaccaucagcgugaccaccgagauucugcccgugagcaugaccaagaccagcguggacugcaccauguacaucugcggcgacagcaccgagugcagcaaccugcugcugcaguacggcagcuucugcacccagcugaaccgggcccugaccggcaucgccguggagcaggacaagaacacccaggagguguucgcccaggugaagcagaucuacaagaccccucccaucaaggacuucggcggcuucaacuucagccagauccugcccgaccccagcaagcccagcaagcggagcuucaucgaggaccugcuguucaacaaggugacccuagccgacgccggcuucaucaagcaguacggcgacugccucggcgacauagccgcccgggaccugaucugcgcccagaaguucaacggccugaccgugcugccuccccugcugaccgacgagaugaucgcccaguacaccagcgcccuguuagccggaaccaucaccagcggcuggacuuucggcgcuggagccgcucugcagauccccuucgccaugcagauggccuaccgguucaacggcaucggcgugacccagaacgugcuguacgagaaccagaagcugaucgccaaccaguucaacagcgccaucggcaagauccaggacagccugagcagcaccgcuagcgcccugggcaagcugcaggacguggugaaccagaacgcccaggcccugaacacccuggugaagcagcugagcagcaacuucggcgccaucagcagcgugcugaacgacauccugagccggcuggacaaggucgaggccgaggugcagaucgaccggcugaucacuggccggcugcagagccugcagaccuacgugacccagcagcugauccgggccgccgagauucgggccagcgccaaccuggccgccaccaagaugagcgagugcgugcugggccagagcaagcggguggacuucugcggcaagggcuaccaccugaugagcuuuccccagagcgcaccccacggagugguguuccugcacgugaccuacgugcccgcccaggagaagaacuucaccaccgccccagccaucugccacgacggcaaggcccacuuuccccgggagggcguguucgugagcaacggcacccacugguucgugacccagcggaacuucuacgagccccagaucaucaccaccgacaacaccuucgugagcggcaacugcgacguggugaucggcaucgugaacaacaccguguacgauccccugcagcccgagcuggacagcuucaaggaggagcuggacaaguacuucaagaaucacaccagccccgacguggaccugggcgacaucagcggcaucaacgccagcguggugaacauccagaaggagaucgaucggcugaacgagguggccaagaaccugaacgagagccugaucgaccugcaggagcugggcaaguacgagcaguacaucaaguggcccugguacaucuggcugggcuucaucgccggccugaucgccaucgugauggugaccaucaugcugugcugcaugaccagcugcugcagcugccugaagggcuguugcagcugcggcagcugcugcaaguucgacgaggacgacagcgagcccgugcugaagggcgugaagcugcacuacaccugaggacuagucccuguucccagagcccacuuuuuuuucuuuuuuugaaauaaaauagccugucuuucagaucuaaaaaaaaaaaaaaaaaaaaaaaaaaaaaaaaaaaaaaaaaaaaaaaaaaaaaaaaaaaaaaaaaaaaaaaaaaaaaaaaaaaaaaaaaaaaaaaaaaaa

SEQ ID NO: 24986 - RNA, 4167 nt, Artificial Sequence
  SARS-CoV-2/Wuhan/WIV05/2019__EPI_ISL_402128 spike protein mRNA gc (1-1273)(D614G)
aggagagggcgcuuggcuugcaaggacccugagcugcggcauugaagcacacccaacccaacucgacugaagucagccucacugaaccggaucugagaaucuucucucucugggcuugccagggcucuccgaaccuagcuagcauccucuucaauuccaacuagaaagcuuaccauguucguguuccuggugcugcugccccuggugagcagccagugcgugaaccugaccacccggacccagcugccaccagccuacaccaacagcuucacccggggcgucuacuaccccgacaagguguuccggagcagcguccugcacagcacccaggaccuguuccugcccuucuucagcaacgugaccugguuccacgccauccacgugagcggcaccaacggcaccaagcgguucgacaaccccgugcugcccuucaacgacggcguguacuucgccagcaccgagaagagcaacaucauccggggcuggaucuucggcaccacccuggacagcaagacccagagccugcugaucgugaauaacgccaccaacguggugaucaaggugugcgaguuccaguucugcaacgaccccuuccugggcguguacuaccacaagaacaacaagagcuggauggagagcgaguuccggguguacagcagcgccaacaacugcaccuucgaguacgugagccagcccuuccugauggaccuggagggcaagcagggcaacuucaagaaccugcgggaguucguguucaagaacaucgacggcuacuucaagaucuacagcaagcacaccccaaucaaccuggugcgggaucugccccagggcuucucagcccuggagccccugguggaccugcccaucggcaucaacaucacccgguuccagacccugcuggcccugcaccggagcuaccugaccccaggcgacagcagcagcggguggacagcaggcgcggcugcuuacuacgugggcuaccugcagccccggaccuuccugcugaaguacaacgagaacggcaccaucaccgacgccguggacugcgcccuggacccucugagcgagaccaagugcacccugaagagcuucaccguggagaagggcaucuaccagaccagcaacuuccgggugcagcccaccgagagcaucgugcgguuccccaacaucaccaaccugugccccuucggcgagguguucaacgccacccgguucgccagcguguacgccuggaaccggaagcggaucagcaacugcguggccgacuacagcgugcuguacaacagcgccagcuucagcaccuucaagugcuacggcgugagccccaccaagcugaacgaccugugcuucaccaacguguacgccgacagcuucgugauccguggcgacgaggugcggcagaucgcacccggccagacaggcaagaucgccgacuacaacuacaagcugcccgacgacuucaccggcugcgugaucgccuggaacagcaacaaccucgacagcaaggugggcggcaacuacaacuaccuguaccggcuguuccggaagagcaaccugaagcccuucgagcgggacaucagcaccgagaucuaccaagccggcuccaccccuugcaacggcguggagggcuucaacugcuacuucccucugcagagcuacggcuuccagcccaccaacggcgugggcuaccagcccuaccgggugguggugcugagcuucgagcugcugcacgccccagccaccguguguggccccaagaagagcaccaaccuggugaagaacaagugcgugaacuucaacuucaacggccuuaccggcaccggcgugcugaccgagagcaacaagaaauuccugcccuuucagcaguucggccgggacaucgccgacaccaccgacgcugugcgggauccccagacccuggagauccuggacaucaccccuugcagcuucggcggcgugagcgugaucaccccaggcaccaacaccagcaaccagguggccgugcuguaccagggcgugaacugcaccgaggugcccguggccauccacgccgaccagcugacacccaccuggcgggucuacagcaccggcagcaacguguuccagacccgggccgguugccugaucggcgccgagcacgugaacaacagcuacgagugcgacauccccaucggcgccggcaucugugccagcuaccagacccagaccaauucaccccggagggcaaggagcguggccagccagagcaucaucgccuacaccaugagccugggcgccgagaacagcguggccuacagcaacaacagcaucgccauccccaccaacuucaccaucagcgugaccaccgagauucugcccgugagcaugaccaagaccagcguggacugcaccauguacaucugcggcgacagcaccgagugcagcaaccugcugcugcaguacggcagcuucugcacccagcugaaccgggcccugaccggcaucgccguggagcaggacaagaacacccaggagguguucgcccaggugaagcagaucuacaagaccccucccaucaaggacuucggcggcuucaacuucagccagauccugcccgaccccagcaagcccagcaagcggagcuucaucgaggaccugcuguucaacaaggugacccuagccgacgccggcuucaucaagcaguacggcgacugccucggcgacauagccgcccgggaccugaucugcgcccagaaguucaacggccugaccgugcugccuccccugcugaccgacgagaugaucgcccaguacaccagcgcccuguuagccggaaccaucaccagcggcuggacuuucggcgcuggagccgcucugcagauccccuucgccaugcagauggccuaccgguucaacggcaucggcgugacccagaacgugcuguacgagaaccagaagcugaucgccaaccaguucaacagcgccaucggcaagauccaggacagccugagcagcaccgcuagcgcccugggcaagcugcaggacguggugaaccagaacgcccaggcccugaacacccuggugaagcagcugagcagcaacuucggcgccaucagcagcgugcugaacgacauccugagccggcuggacaaggucgaggccgaggugcagaucgaccggcugaucacuggccggcugcagagccugcagaccuacgugacccagcagcugauccgggccgccgagauucgggccagcgccaaccuggccgccaccaagaugagcgagugcgugcugggccagagcaagcggguggacuucugcggcaagggcuaccaccugaugagcuuuccccagagcgcaccccacggagugguguuccugcacgugaccuacgugcccgcccaggagaagaacuucaccaccgccccagccaucugccacgacggcaaggcccacuuuccccgggagggcguguucgugagcaacggcacccacugguucgugacccagcggaacuucuacgagccccagaucaucaccaccgacaacaccuucgugagcggcaacugcgacguggugaucggcaucgugaacaacaccguguacgauccccugcagcccgagcuggacagcuucaaggaggagcuggacaaguacuucaagaaucacaccagccccgacguggaccugggcgacaucagcggcaucaacgccagcguggugaacauccagaaggagaucgaucggcugaacgagguggccaagaaccugaacgagagccugaucgaccugcaggagcugggcaaguacgagcaguacaucaaguggcccugguacaucuggcugggcuucaucgccggccugaucgccaucgugauggugaccaucaugcugugcugcaugaccagcugcugcagcugccugaagggcuguugcagcugcggcagcugcugcaaguucgacgaggacgacagcgagcccgugcugaagggcgugaagcugcacuacaccugaggacuagucccuguucccagagcccacuuuuuuuucuuuuuuugaaauaaaauagccugucuuucagaucuaaaaaaaaaaaaaaaaaaaaaaaaaaaaaaaaaaaaaaaaaaaaaaaaaaaaaaaaaaaaaaaaaaaaaaaaaaaaaaaaaaaaaaaaaaaaaaaaaaaa

SEQ ID NO: 24987 - RNA, 4167 nt, Artificial Sequence
  SARS-CoV-2/Wuhan/WIV05/2019__EPI_ISL_402128 spike protein mRNA gc (1-1273)(A222V_D614G)
aggagagggcgcuuggcuugcaaggacccugagcugcggcauugaagcacacccaacccaacucgacugaagucagccucacugaaccggaucugagaaucuucucucucugggcuugccagggcucuccgaaccuagcuagcauccucuucaauuccaacuagaaagcuuaccauguucguguuccuggugcugcugccccuggugagcagccagugcgugaaccugaccacccggacccagcugccaccagccuacaccaacagcuucacccggggcgucuacuaccccgacaagguguuccggagcagcguccugcacagcacccaggaccuguuccugcccuucuucagcaacgugaccugguuccacgccauccacgugagcggcaccaacggcaccaagcgguucgacaaccccgugcugcccuucaacgacggcguguacuucgccagcaccgagaagagcaacaucauccggggcuggaucuucggcaccacccuggacagcaagacccagagccugcugaucgugaauaacgccaccaacguggugaucaaggugugcgaguuccaguucugcaacgaccccuuccugggcguguacuaccacaagaacaacaagagcuggauggagagcgaguuccggguguacagcagcgccaacaacugcaccuucgaguacgugagccagcccuuccugauggaccuggagggcaagcagggcaacuucaagaaccugcgggaguucguguucaagaacaucgacggcuacuucaagaucuacagcaagcacaccccaaucaaccuggugcgggaucugccccagggcuucucagugcuggagccccugguggaccugcccaucggcaucaacaucacccgguuccagacccugcuggcccugcaccggagcuaccugaccccaggcgacagcagcagcggguggacagcaggcgcggcugcuuacuacgugggcuaccugcagccccggaccuuccugcugaaguacaacgagaacggcaccaucaccgacgccguggacugcgcccuggacccucugagcgagaccaagugcacccugaagagcuucaccguggagaagggcaucuaccagaccagcaacuuccgggugcagcccaccgagagcaucgugcgguuccccaacaucaccaaccugugccccuucggcgagguguucaacgccacccgguucgccagcguguacgccuggaaccggaagcggaucagcaacugcguggccgacuacagcgugcuguacaacagcgccagcuucagcaccuucaagugcuacggcgugagccccaccaagcugaacgaccugugcuucaccaacguguacgccgacagcuucgugauccguggcgacgaggugcggcagaucgcacccggccagacaggcaagaucgccgacuacaacuacaagcugcccgacgacuucaccggcugcgugaucgccuggaacagcaacaaccucgacagcaaggugggcggcaacuacaacuaccuguaccggcuguuccggaagagcaaccugaagcccuucgagcgggacaucagcaccgagaucuaccaagccggcuccaccccuugcaacggcguggagggcuucaacugcuacuucccucugcagagcuacggcuuccagcccaccaacggcgugggcuaccagcccuaccgggugguggugcugagcuucgagcugcugcacgccccagccaccguguguggccccaagaagagcaccaaccuggugaagaacaagugcgugaacuucaacuucaacggccuuaccggcaccggcgugcugaccgagagcaacaagaaauuccugcccuuucagcaguucggccgggacaucgccgacaccaccgacgcugugcgggauccccagacccuggagauccuggacaucaccccuugcagcuucggcggcgugagcgugaucaccccaggcaccaacaccagcaaccagguggccgugcuguaccagggcgugaacugcaccgaggugcccguggccauccacgccgaccagcugacacccaccuggcgggucuacagcaccggcagcaacguguuccagacccgggccgguugccugaucggcgccgagcacgugaacaacagcuacgagugcgacauccccaucggcgccggcaucugugccagcuaccagacccagaccaauucaccccggagggcaaggagcguggccagccagagcaucaucgccuacaccaugagccugggcgccgagaacagcguggccuacagcaacaacagcaucgccauccccaccaacuucaccaucagcgugaccaccgagauucugcccgugagcaugaccaagaccagcguggacugcaccauguacaucugcggcgacagcaccgagugcagcaaccugcugcugcaguacggcagcuucugcacccagcugaaccgggcccugaccggcaucgccguggagcaggacaagaacacccaggagguguucgcccaggugaagcagaucuacaagaccccucccaucaaggacuucggcggcuucaacuucagccagauccugcccgaccccagcaagcccagcaagcggagcuucaucgaggaccugcuguucaacaaggugacccuagccgacgccggcuucaucaagcaguacggcgacugccucggcgacauagccgcccgggaccugaucugcgcccagaaguucaacggccugaccgugcugccuccccugcugaccgacgagaugaucgcccaguacaccagcgcccuguuagccggaaccaucaccagcggcuggacuuucggcgcuggagccgcucugcagauccccuucgccaugcagauggccuaccgguucaacggcaucggcgugacccagaacgugcuguacgagaaccagaagcugaucgccaaccaguucaacagcgccaucggcaagauccaggacagccugagcagcaccgcuagcgcccugggcaagcugcaggacguggugaaccagaacgcccaggcccugaacacccuggugaagcagcugagcagcaacuucggcgccaucagcagcgugcugaacgacauccugagccggcuggacaaggucgaggccgaggugcagaucgaccggcugaucacuggccggcugcagagccugcagaccuacgugacccagcagcugauccgggccgccgagauucgggccagcgccaaccuggccgccaccaagaugagcgagugcgugcugggccagagcaagcggguggacuucugcggcaagggcuaccaccugaugagcuuuccccagagcgcaccccacggagugguguuccugcacgugaccuacgugcccgcccaggagaagaacuucaccaccgccccagccaucugccacgacggcaaggcccacuuuccccgggagggcguguucgugagcaacggcacccacugguucgugacccagcggaacuucuacgagccccagaucaucaccaccgacaacaccuucgugagcggcaacugcgacguggugaucggcaucgugaacaacaccguguacgauccccugcagcccgagcuggacagcuucaaggaggagcuggacaaguacuucaagaaucacaccagccccgacguggaccugggcgacaucagcggcaucaacgccagcguggugaacauccagaaggagaucgaucggcugaacgagguggccaagaaccugaacgagagccugaucgaccugcaggagcugggcaaguacgagcaguacaucaaguggcccugguacaucuggcugggcuucaucgccggccugaucgccaucgugauggugaccaucaugcugugcugcaugaccagcugcugcagcugccugaagggcuguugcagcugcggcagcugcugcaaguucgacgaggacgacagcgagcccgugcugaagggcgugaagcugcacuacaccugaggacuagucccuguucccagagcccacuuuuuuuucuuuuuuugaaauaaaauagccugucuuucagaucuaaaaaaaaaaaaaaaaaaaaaaaaaaaaaaaaaaaaaaaaaaaaaaaaaaaaaaaaaaaaaaaaaaaaaaaaaaaaaaaaaaaaaaaaaaaaaaaaaaaa

SEQ ID NO: 24988 - RNA, 4167 nt, Artificial Sequence
  SARS-CoV-2/Wuhan/WIV05/2019__EPI_ISL_402128 spike protein mRNA gc (1-1273)(N439K_D614G)
aggagagggcgcuuggcuugcaaggacccugagcugcggcauugaagcacacccaacccaacucgacugaagucagccucacugaaccggaucugagaaucuucucucucugggcuugccagggcucuccgaaccuagcuagcauccucuucaauuccaacuagaaagcuuaccauguucguguuccuggugcugcugccccuggugagcagccagugcgugaaccugaccacccggacccagcugccaccagccuacaccaacagcuucacccggggcgucuacuaccccgacaagguguuccggagcagcguccugcacagcacccaggaccuguuccugcccuucuucagcaacgugaccugguuccacgccauccacgugagcggcaccaacggcaccaagcgguucgacaaccccgugcugcccuucaacgacggcguguacuucgccagcaccgagaagagcaacaucauccggggcuggaucuucggcaccacccuggacagcaagacccagagccugcugaucgugaauaacgccaccaacguggugaucaaggugugcgaguuccaguucugcaacgaccccuuccugggcguguacuaccacaagaacaacaagagcuggauggagagcgaguuccggguguacagcagcgccaacaacugcaccuucgaguacgugagccagcccuuccugauggaccuggagggcaagcagggcaacuucaagaaccugcgggaguucguguucaagaacaucgacggcuacuucaagaucuacagcaagcacaccccaaucaaccuggugcgggaucugccccagggcuucucagcccuggagccccugguggaccugcccaucggcaucaacaucacccgguuccagacccugcuggcccugcaccggagcuaccugaccccaggcgacagcagcagcggguggacagcaggcgcggcugcuuacuacgugggcuaccugcagccccggaccuuccugcugaaguacaacgagaacggcaccaucaccgacgccguggacugcgcccuggacccucugagcgagaccaagugcacccugaagagcuucaccguggagaagggcaucuaccagaccagcaacuuccgggugcagcccaccgagagcaucgugcgguuccccaacaucaccaaccugugccccuucggcgagguguucaacgccacccgguucgccagcguguacgccuggaaccggaagcggaucagcaacugcguggccgacuacagcgugcuguacaacagcgccagcuucagcaccuucaagugcuacggcgugagccccaccaagcugaacgaccugugcuucaccaacguguacgccgacagcuucgugauccguggcgacgaggugcggcagaucgcacccggccagacaggcaagaucgccgacuacaacuacaagcugcccgacgacuucaccggcugcgugaucgccuggaacagcaagaaccucgacagcaaggugggcggcaacuacaacuaccuguaccggcuguuccggaagagcaaccugaagcccuucgagcgggacaucagcaccgagaucuaccaagccggcuccaccccuugcaacggcguggagggcuucaacugcuacuucccucugcagagcuacggcuuccagcccaccaacggcgugggcuaccagcccuaccgggugguggugcugagcuucgagcugcugcacgccccagccaccguguguggccccaagaagagcaccaaccuggugaagaacaagugcgugaacuucaacuucaacggccuuaccggcaccggcgugcugaccgagagcaacaagaaauuccugcccuuucagcaguucggccgggacaucgccgacaccaccgacgcugugcgggauccccagacccuggagauccuggacaucaccccuugcagcuucggcggcgugagcgugaucaccccaggcaccaacaccagcaaccagguggccgugcuguaccagggcgugaacugcaccgaggugcccguggccauccacgccgaccagcugacacccaccuggcgggucuacagcaccggcagcaacguguuccagacccgggccgguugccugaucggcgccgagcacgugaacaacagcuacgagugcgacauccccaucggcgccggcaucugugccagcuaccagacccagaccaauucaccccggagggcaaggagcguggccagccagagcaucaucgccuacaccaugagccugggcgccgagaacagcguggccuacagcaacaacagcaucgccauccccaccaacuucaccaucagcgugaccaccgagauucugcccgugagcaugaccaagaccagcguggacugcaccauguacaucugcggcgacagcaccgagugcagcaaccugcugcugcaguacggcagcuucugcacccagcugaaccgggcccugaccggcaucgccguggagcaggacaagaacacccaggagguguucgcccaggugaagcagaucuacaagaccccucccaucaaggacuucggcggcuucaacuucagccagauccugcccgaccccagcaagcccagcaagcggagcuucaucgaggaccugcuguucaacaaggugacccuagccgacgccggcuucaucaagcaguacggcgacugccucggcgacauagccgcccgggaccugaucugcgcccagaaguucaacggccugaccgugcugccuccccugcugaccgacgagaugaucgcccaguacaccagcgcccuguuagccggaaccaucaccagcggcuggacuuucggcgcuggagccgcucugcagauccccuucgccaugcagauggccuaccgguucaacggcaucggcgugacccagaacgugcuguacgagaaccagaagcugaucgccaaccaguucaacagcgccaucggcaagauccaggacagccugagcagcaccgcuagcgcccugggcaagcugcaggacguggugaaccagaacgcccaggcccugaacacccuggugaagcagcugagcagcaacuucggcgccaucagcagcgugcugaacgacauccugagccggcuggacaaggucgaggccgaggugcagaucgaccggcugaucacuggccggcugcagagccugcagaccuacgugacccagcagcugauccgggccgccgagauucgggccagcgccaaccuggccgccaccaagaugagcgagugcgugcugggccagagcaagcggguggacuucugcggcaagggcuaccaccugaugagcuuuccccagagcgcaccccacggagugguguuccugcacgugaccuacgugcccgcccaggagaagaacuucaccaccgccccagccaucugccacgacggcaaggcccacuuuccccgggagggcguguucgugagcaacggcacccacugguucgugacccagcggaacuucuacgagccccagaucaucaccaccgacaacaccuucgugagcggcaacugcgacguggugaucggcaucgugaacaacaccguguacgauccccugcagcccgagcuggacagcuucaaggaggagcuggacaaguacuucaagaaucacaccagccccgacguggaccugggcgacaucagcggcaucaacgccagcguggugaacauccagaaggagaucgaucggcugaacgagguggccaagaaccugaacgagagccugaucgaccugcaggagcugggcaaguacgagcaguacaucaaguggcccugguacaucuggcugggcuucaucgccggccugaucgccaucgugauggugaccaucaugcugugcugcaugaccagcugcugcagcugccugaagggcuguugcagcugcggcagcugcugcaaguucgacgaggacgacagcgagcccgugcugaagggcgugaagcugcacuacaccugaggacuagucccuguucccagagcccacuuuuuuuucuuuuuuugaaauaaaauagccugucuuucagaucuaaaaaaaaaaaaaaaaaaaaaaaaaaaaaaaaaaaaaaaaaaaaaaaaaaaaaaaaaaaaaaaaaaaaaaaaaaaaaaaaaaaaaaaaaaaaaaaaaaaa

SEQ ID NO: 24989 - RNA, 4167 nt, Artificial Sequence
  SARS-CoV-2/Wuhan/WIV05/2019__EPI_ISL_402128 spike protein mRNA gc (1-1273)(S477N_D614G)
aggagagggcgcuuggcuugcaaggacccugagcugcggcauugaagcacacccaacccaacucgacugaagucagccucacugaaccggaucugagaaucuucucucucugggcuugccagggcucuccgaaccuagcuagcauccucuucaauuccaacuagaaagcuuaccauguucguguuccuggugcugcugccccuggugagcagccagugcgugaaccugaccacccggacccagcugccaccagccuacaccaacagcuucacccggggcgucuacuaccccgacaagguguuccggagcagcguccugcacagcacccaggaccuguuccugcccuucuucagcaacgugaccugguuccacgccauccacgugagcggcaccaacggcaccaagcgguucgacaaccccgugcugcccuucaacgacggcguguacuucgccagcaccgagaagagcaacaucauccggggcuggaucuucggcaccacccuggacagcaagacccagagccugcugaucgugaauaacgccaccaacguggugaucaaggugugcgaguuccaguucugcaacgaccccuuccugggcguguacuaccacaagaacaacaagagcuggauggagagcgaguuccggguguacagcagcgccaacaacugcaccuucgaguacgugagccagcccuuccugauggaccuggagggcaagcagggcaacuucaagaaccugcgggaguucguguucaagaacaucgacggcuacuucaagaucuacagcaagcacaccccaaucaaccuggugcgggaucugccccagggcuucucagcccuggagccccugguggaccugcccaucggcaucaacaucacccgguuccagacccugcuggcccugcaccggagcuaccugaccccaggcgacagcagcagcggguggacagcaggcgcggcugcuuacuacgugggcuaccugcagccccggaccuuccugcugaaguacaacgagaacggcaccaucaccgacgccguggacugcgcccuggacccucugagcgagaccaagugcacccugaagagcuucaccguggagaagggcaucuaccagaccagcaacuuccgggugcagcccaccgagagcaucgugcgguuccccaacaucaccaaccugugccccuucggcgagguguucaacgccacccgguucgccagcguguacgccuggaaccggaagcggaucagcaacugcguggccgacuacagcgugcuguacaacagcgccagcuucagcaccuucaagugcuacggcgugagccccaccaagcugaacgaccugugcuucaccaacguguacgccgacagcuucgugauccguggcgacgaggugcggcagaucgcacccggccagacaggcaagaucgccgacuacaacuacaagcugcccgacgacuucaccggcugcgugaucgccuggaacagcaacaaccucgacagcaaggugggcggcaacuacaacuaccuguaccggcuguuccggaagagcaaccugaagcccuucgagcgggacaucagcaccgagaucuaccaagccggcaacaccccuugcaacggcguggagggcuucaacugcuacuucccucugcagagcuacggcuuccagcccaccaacggcgugggcuaccagcccuaccgggugguggugcugagcuucgagcugcugcacgccccagccaccguguguggccccaagaagagcaccaaccuggugaagaacaagugcgugaacuucaacuucaacggccuuaccggcaccggcgugcugaccgagagcaacaagaaauuccugcccuuucagcaguucggccgggacaucgccgacaccaccgacgcugugcgggauccccagacccuggagauccuggacaucaccccuugcagcuucggcggcgugagcgugaucaccccaggcaccaacaccagcaaccagguggccgugcuguaccagggcgugaacugcaccgaggugcccguggccauccacgccgaccagcugacacccaccuggcgggucuacagcaccggcagcaacguguuccagacccgggccgguugccugaucggcgccgagcacgugaacaacagcuacgagugcgacauccccaucggcgccggcaucugugccagcuaccagacccagaccaauucaccccggagggcaaggagcguggccagccagagcaucaucgccuacaccaugagccugggcgccgagaacagcguggccuacagcaacaacagcaucgccauccccaccaacuucaccaucagcgugaccaccgagauucugcccgugagcaugaccaagaccagcguggacugcaccauguacaucugcggcgacagcaccgagugcagcaaccugcugcugcaguacggcagcuucugcacccagcugaaccgggcccugaccggcaucgccguggagcaggacaagaacacccaggagguguucgcccaggugaagcagaucuacaagaccccucccaucaaggacuucggcggcuucaacuucagccagauccugcccgaccccagcaagcccagcaagcggagcuucaucgaggaccugcuguucaacaaggugacccuagccgacgccggcuucaucaagcaguacggcgacugccucggcgacauagccgcccgggaccugaucugcgcccagaaguucaacggccugaccgugcugccuccccugcugaccgacgagaugaucgcccaguacaccagcgcccuguuagccggaaccaucaccagcggcuggacuuucggcgcuggagccgcucugcagauccccuucgccaugcagauggccuaccgguucaacggcaucggcgugacccagaacgugcuguacgagaaccagaagcugaucgccaaccaguucaacagcgccaucggcaagauccaggacagccugagcagcaccgcuagcgcccugggcaagcugcaggacguggugaaccagaacgcccaggcccugaacacccuggugaagcagcugagcagcaacuucggcgccaucagcagcgugcugaacgacauccugagccggcuggacaaggucgaggccgaggugcagaucgaccggcugaucacuggccggcugcagagccugcagaccuacgugacccagcagcugauccgggccgccgagauucgggccagcgccaaccuggccgccaccaagaugagcgagugcgugcugggccagagcaagcggguggacuucugcggcaagggcuaccaccugaugagcuuuccccagagcgcaccccacggagugguguuccugcacgugaccuacgugcccgcccaggagaagaacuucaccaccgccccagccaucugccacgacggcaaggcccacuuuccccgggagggcguguucgugagcaacggcacccacugguucgugacccagcggaacuucuacgagccccagaucaucaccaccgacaacaccuucgugagcggcaacugcgacguggugaucggcaucgugaacaacaccguguacgauccccugcagcccgagcuggacagcuucaaggaggagcuggacaaguacuucaagaaucacaccagccccgacguggaccugggcgacaucagcggcaucaacgccagcguggugaacauccagaaggagaucgaucggcugaacgagguggccaagaaccugaacgagagccugaucgaccugcaggagcugggcaaguacgagcaguacaucaaguggcccugguacaucuggcugggcuucaucgccggccugaucgccaucgugauggugaccaucaugcugugcugcaugaccagcugcugcagcugccugaagggcuguugcagcugcggcagcugcugcaaguucgacgaggacgacagcgagcccgugcugaagggcgugaagcugcacuacaccugaggacuagucccuguucccagagcccacuuuuuuuucuuuuuuugaaauaaaauagccugucuuucagaucuaaaaaaaaaaaaaaaaaaaaaaaaaaaaaaaaaaaaaaaaaaaaaaaaaaaaaaaaaaaaaaaaaaaaaaaaaaaaaaaaaaaaaaaaaaaaaaaaaaaa

SEQ ID NO: 24990 - RNA, 4167 nt, Artificial Sequence
  SARS-CoV-2/Wuhan/WIV05/2019__EPI_ISL_402128 spike protein mRNA gc (1-1273)(N501Y_D614G)
aggagagggcgcuuggcuugcaaggacccugagcugcggcauugaagcacacccaacccaacucgacugaagucagccucacugaaccggaucugagaaucuucucucucugggcuugccagggcucuccgaaccuagcuagcauccucuucaauuccaacuagaaagcuuaccauguucguguuccuggugcugcugccccuggugagcagccagugcgugaaccugaccacccggacccagcugccaccagccuacaccaacagcuucacccggggcgucuacuaccccgacaagguguuccggagcagcguccugcacagcacccaggaccuguuccugcccuucuucagcaacgugaccugguuccacgccauccacgugagcggcaccaacggcaccaagcgguucgacaaccccgugcugcccuucaacgacggcguguacuucgccagcaccgagaagagcaacaucauccggggcuggaucuucggcaccacccuggacagcaagacccagagccugcugaucgugaauaacgccaccaacguggugaucaaggugugcgaguuccaguucugcaacgaccccuuccugggcguguacuaccacaagaacaacaagagcuggauggagagcgaguuccggguguacagcagcgccaacaacugcaccuucgaguacgugagccagcccuuccugauggaccuggagggcaagcagggcaacuucaagaaccugcgggaguucguguucaagaacaucgacggcuacuucaagaucuacagcaagcacaccccaaucaaccuggugcgggaucugccccagggcuucucagcccuggagccccugguggaccugcccaucggcaucaacaucacccgguuccagacccugcuggcccugcaccggagcuaccugaccccaggcgacagcagcagcggguggacagcaggcgcggcugcuuacuacgugggcuaccugcagccccggaccuuccugcugaaguacaacgagaacggcaccaucaccgacgccguggacugcgcccuggacccucugagcgagaccaagugcacccugaagagcuucaccguggagaagggcaucuaccagaccagcaacuuccgggugcagcccaccgagagcaucgugcgguuccccaacaucaccaaccugugccccuucggcgagguguucaacgccacccgguucgccagcguguacgccuggaaccggaagcggaucagcaacugcguggccgacuacagcgugcuguacaacagcgccagcuucagcaccuucaagugcuacggcgugagccccaccaagcugaacgaccugugcuucaccaacguguacgccgacagcuucgugauccguggcgacgaggugcggcagaucgcacccggccagacaggcaagaucgccgacuacaacuacaagcugcccgacgacuucaccggcugcgugaucgccuggaacagcaacaaccucgacagcaaggugggcggcaacuacaacuaccuguaccggcuguuccggaagagcaaccugaagcccuucgagcgggacaucagcaccgagaucuaccaagccggcuccaccccuugcaacggcguggagggcuucaacugcuacuucccucugcagagcuacggcuuccagcccaccuacggcgugggcuaccagcccuaccgggugguggugcugagcuucgagcugcugcacgccccagccaccguguguggccccaagaagagcaccaaccuggugaagaacaagugcgugaacuucaacuucaacggccuuaccggcaccggcgugcugaccgagagcaacaagaaauuccugcccuuucagcaguucggccgggacaucgccgacaccaccgacgcugugcgggauccccagacccuggagauccuggacaucaccccuugcagcuucggcggcgugagcgugaucaccccaggcaccaacaccagcaaccagguggccgugcuguaccagggcgugaacugcaccgaggugcccguggccauccacgccgaccagcugacacccaccuggcgggucuacagcaccggcagcaacguguuccagacccgggccgguugccugaucggcgccgagcacgugaacaacagcuacgagugcgacauccccaucggcgccggcaucugugccagcuaccagacccagaccaauucaccccggagggcaaggagcguggccagccagagcaucaucgccuacaccaugagccugggcgccgagaacagcguggccuacagcaacaacagcaucgccauccccaccaacuucaccaucagcgugaccaccgagauucugcccgugagcaugaccaagaccagcguggacugcaccauguacaucugcggcgacagcaccgagugcagcaaccugcugcugcaguacggcagcuucugcacccagcugaaccgggcccugaccggcaucgccguggagcaggacaagaacacccaggagguguucgcccaggugaagcagaucuacaagaccccucccaucaaggacuucggcggcuucaacuucagccagauccugcccgaccccagcaagcccagcaagcggagcuucaucgaggaccugcuguucaacaaggugacccuagccgacgccggcuucaucaagcaguacggcgacugccucggcgacauagccgcccgggaccugaucugcgcccagaaguucaacggccugaccgugcugccuccccugcugaccgacgagaugaucgcccaguacaccagcgcccuguuagccggaaccaucaccagcggcuggacuuucggcgcuggagccgcucugcagauccccuucgccaugcagauggccuaccgguucaacggcaucggcgugacccagaacgugcuguacgagaaccagaagcugaucgccaaccaguucaacagcgccaucggcaagauccaggacagccugagcagcaccgcuagcgcccugggcaagcugcaggacguggugaaccagaacgcccaggcccugaacacccuggugaagcagcugagcagcaacuucggcgccaucagcagcgugcugaacgacauccugagccggcuggacaaggucgaggccgaggugcagaucgaccggcugaucacuggccggcugcagagccugcagaccuacgugacccagcagcugauccgggccgccgagauucgggccagcgccaaccuggccgccaccaagaugagcgagugcgugcugggccagagcaagcggguggacuucugcggcaagggcuaccaccugaugagcuuuccccagagcgcaccccacggagugguguuccugcacgugaccuacgugcccgcccaggagaagaacuucaccaccgccccagccaucugccacgacggcaaggcccacuuuccccgggagggcguguucgugagcaacggcacccacugguucgugacccagcggaacuucuacgagccccagaucaucaccaccgacaacaccuucgugagcggcaacugcgacguggugaucggcaucgugaacaacaccguguacgauccccugcagcccgagcuggacagcuucaaggaggagcuggacaaguacuucaagaaucacaccagccccgacguggaccugggcgacaucagcggcaucaacgccagcguggugaacauccagaaggagaucgaucggcugaacgagguggccaagaaccugaacgagagccugaucgaccugcaggagcugggcaaguacgagcaguacaucaaguggcccugguacaucuggcugggcuucaucgccggccugaucgccaucgugauggugaccaucaugcugugcugcaugaccagcugcugcagcugccugaagggcuguugcagcugcggcagcugcugcaaguucgacgaggacgacagcgagcccgugcugaagggcgugaagcugcacuacaccugaggacuagucccuguucccagagcccacuuuuuuuucuuuuuuugaaauaaaauagccugucuuucagaucuaaaaaaaaaaaaaaaaaaaaaaaaaaaaaaaaaaaaaaaaaaaaaaaaaaaaaaaaaaaaaaaaaaaaaaaaaaaaaaaaaaaaaaaaaaaaaaaaaaaa

SEQ ID NO: 24991 - RNA, 4161 nt, Artificial Sequence
  SARS-CoV-2/Wuhan/WIV05/2019__EPI_ISL_402128 spike protein mRNA gc (1-1273)(H69del_V70del_D614G)
aggagagggcgcuuggcuugcaaggacccugagcugcggcauugaagcacacccaacccaacucgacugaagucagccucacugaaccggaucugagaaucuucucucucugggcuugccagggcucuccgaaccuagcuagcauccucuucaauuccaacuagaaagcuuaccauguucguguuccuggugcugcugccccuggugagcagccagugcgugaaccugaccacccggacccagcugccaccagccuacaccaacagcuucacccggggcgucuacuaccccgacaagguguuccggagcagcguccugcacagcacccaggaccuguuccugcccuucuucagcaacgugaccugguuccacgccaucagcggcaccaacggcaccaagcgguucgacaaccccgugcugcccuucaacgacggcguguacuucgccagcaccgagaagagcaacaucauccggggcuggaucuucggcaccacccuggacagcaagacccagagccugcugaucgugaauaacgccaccaacguggugaucaaggugugcgaguuccaguucugcaacgaccccuuccugggcguguacuaccacaagaacaacaagagcuggauggagagcgaguuccggguguacagcagcgccaacaacugcaccuucgaguacgugagccagcccuuccugauggaccuggagggcaagcagggcaacuucaagaaccugcgggaguucguguucaagaacaucgacggcuacuucaagaucuacagcaagcacaccccaaucaaccuggugcgggaucugccccagggcuucucagcccuggagccccugguggaccugcccaucggcaucaacaucacccgguuccagacccugcuggcccugcaccggagcuaccugaccccaggcgacagcagcagcggguggacagcaggcgcggcugcuuacuacgugggcuaccugcagccccggaccuuccugcugaaguacaacgagaacggcaccaucaccgacgccguggacugcgcccuggacccucugagcgagaccaagugcacccugaagagcuucaccguggagaagggcaucuaccagaccagcaacuuccgggugcagcccaccgagagcaucgugcgguuccccaacaucaccaaccugugccccuucggcgagguguucaacgccacccgguucgccagcguguacgccuggaaccggaagcggaucagcaacugcguggccgacuacagcgugcuguacaacagcgccagcuucagcaccuucaagugcuacggcgugagccccaccaagcugaacgaccugugcuucaccaacguguacgccgacagcuucgugauccguggcgacgaggugcggcagaucgcacccggccagacaggcaagaucgccgacuacaacuacaagcugcccgacgacuucaccggcugcgugaucgccuggaacagcaacaaccucgacagcaaggugggcggcaacuacaacuaccuguaccggcuguuccggaagagcaaccugaagcccuucgagcgggacaucagcaccgagaucuaccaagccggcuccaccccuugcaacggcguggagggcuucaacugcuacuucccucugcagagcuacggcuuccagcccaccaacggcgugggcuaccagcccuaccgggugguggugcugagcuucgagcugcugcacgccccagccaccguguguggccccaagaagagcaccaaccuggugaagaacaagugcgugaacuucaacuucaacggccuuaccggcaccggcgugcugaccgagagcaacaagaaauuccugcccuuucagcaguucggccgggacaucgccgacaccaccgacgcugugcgggauccccagacccuggagauccuggacaucaccccuugcagcuucggcggcgugagcgugaucaccccaggcaccaacaccagcaaccagguggccgugcuguaccagggcgugaacugcaccgaggugcccguggccauccacgccgaccagcugacacccaccuggcgggucuacagcaccggcagcaacguguuccagacccgggccgguugccugaucggcgccgagcacgugaacaacagcuacgagugcgacauccccaucggcgccggcaucugugccagcuaccagacccagaccaauucaccccggagggcaaggagcguggccagccagagcaucaucgccuacaccaugagccugggcgccgagaacagcguggccuacagcaacaacagcaucgccauccccaccaacuucaccaucagcgugaccaccgagauucugcccgugagcaugaccaagaccagcguggacugcaccauguacaucugcggcgacagcaccgagugcagcaaccugcugcugcaguacggcagcuucugcacccagcugaaccgggcccugaccggcaucgccguggagcaggacaagaacacccaggagguguucgcccaggugaagcagaucuacaagaccccucccaucaaggacuucggcggcuucaacuucagccagauccugcccgaccccagcaagcccagcaagcggagcuucaucgaggaccugcuguucaacaaggugacccuagccgacgccggcuucaucaagcaguacggcgacugccucggcgacauagccgcccgggaccugaucugcgcccagaaguucaacggccugaccgugcugccuccccugcugaccgacgagaugaucgcccaguacaccagcgcccuguuagccggaaccaucaccagcggcuggacuuucggcgcuggagccgcucugcagauccccuucgccaugcagauggccuaccgguucaacggcaucggcgugacccagaacgugcuguacgagaaccagaagcugaucgccaaccaguucaacagcgccaucggcaagauccaggacagccugagcagcaccgcuagcgcccugggcaagcugcaggacguggugaaccagaacgcccaggcccugaacacccuggugaagcagcugagcagcaacuucggcgccaucagcagcgugcugaacgacauccugagccggcuggacaaggucgaggccgaggugcagaucgaccggcugaucacuggccggcugcagagccugcagaccuacgugacccagcagcugauccgggccgccgagauucgggccagcgccaaccuggccgccaccaagaugagcgagugcgugcugggccagagcaagcggguggacuucugcggcaagggcuaccaccugaugagcuuuccccagagcgcaccccacggagugguguuccugcacgugaccuacgugcccgcccaggagaagaacuucaccaccgccccagccaucugccacgacggcaaggcccacuuuccccgggagggcguguucgugagcaacggcacccacugguucgugacccagcggaacuucuacgagccccagaucaucaccaccgacaacaccuucgugagcggcaacugcgacguggugaucggcaucgugaacaacaccguguacgauccccugcagcccgagcuggacagcuucaaggaggagcuggacaaguacuucaagaaucacaccagccccgacguggaccugggcgacaucagcggcaucaacgccagcguggugaacauccagaaggagaucgaucggcugaacgagguggccaagaaccugaacgagagccugaucgaccugcaggagcugggcaaguacgagcaguacaucaaguggcccugguacaucuggcugggcuucaucgccggccugaucgccaucgugauggugaccaucaugcugugcugcaugaccagcugcugcagcugccugaagggcuguugcagcugcggcagcugcugcaaguucgacgaggacgacagcgagcccgugcugaagggcgugaagcugcacuacaccugaggacuagucccuguucccagagcccacuuuuuuuucuuuuuuugaaauaaaauagccugucuuucagaucuaaaaaaaaaaaaaaaaaaaaaaaaaaaaaaaaaaaaaaaaaaaaaaaaaaaaaaaaaaaaaaaaaaaaaaaaaaaaaaaaaaaaaaaaaaaaaaaaaaaa

SEQ ID NO: 24992 - RNA, 4167 nt, Artificial Sequence
  SARS-CoV-2/Wuhan/WIV05/2019__EPI_ISL_402128 spike protein mRNA gc (1-1273)(Y453F_D614G)
aggagagggcgcuuggcuugcaaggacccugagcugcggcauugaagcacacccaacccaacucgacugaagucagccucacugaaccggaucugagaaucuucucucucugggcuugccagggcucuccgaaccuagcuagcauccucuucaauuccaacuagaaagcuuaccauguucguguuccuggugcugcugccccuggugagcagccagugcgugaaccugaccacccggacccagcugccaccagccuacaccaacagcuucacccggggcgucuacuaccccgacaagguguuccggagcagcguccugcacagcacccaggaccuguuccugcccuucuucagcaacgugaccugguuccacgccauccacgugagcggcaccaacggcaccaagcgguucgacaaccccgugcugcccuucaacgacggcguguacuucgccagcaccgagaagagcaacaucauccggggcuggaucuucggcaccacccuggacagcaagacccagagccugcugaucgugaauaacgccaccaacguggugaucaaggugugcgaguuccaguucugcaacgaccccuuccugggcguguacuaccacaagaacaacaagagcuggauggagagcgaguuccggguguacagcagcgccaacaacugcaccuucgaguacgugagccagcccuuccugauggaccuggagggcaagcagggcaacuucaagaaccugcgggaguucguguucaagaacaucgacggcuacuucaagaucuacagcaagcacaccccaaucaaccuggugcgggaucugccccagggcuucucagcccuggagccccugguggaccugcccaucggcaucaacaucacccgguuccagacccugcuggcccugcaccggagcuaccugaccccaggcgacagcagcagcggguggacagcaggcgcggcugcuuacuacgugggcuaccugcagccccggaccuuccugcugaaguacaacgagaacggcaccaucaccgacgccguggacugcgcccuggacccucugagcgagaccaagugcacccugaagagcuucaccguggagaagggcaucuaccagaccagcaacuuccgggugcagcccaccgagagcaucgugcgguuccccaacaucaccaaccugugccccuucggcgagguguucaacgccacccgguucgccagcguguacgccuggaaccggaagcggaucagcaacugcguggccgacuacagcgugcuguacaacagcgccagcuucagcaccuucaagugcuacggcgugagccccaccaagcugaacgaccugugcuucaccaacguguacgccgacagcuucgugauccguggcgacgaggugcggcagaucgcacccggccagacaggcaagaucgccgacuacaacuacaagcugcccgacgacuucaccggcugcgugaucgccuggaacagcaacaaccucgacagcaaggugggcggcaacuacaacuaccuguuccggcuguuccggaagagcaaccugaagcccuucgagcgggacaucagcaccgagaucuaccaagccggcuccaccccuugcaacggcguggagggcuucaacugcuacuucccucugcagagcuacggcuuccagcccaccaacggcgugggcuaccagcccuaccgggugguggugcugagcuucgagcugcugcacgccccagccaccguguguggccccaagaagagcaccaaccuggugaagaacaagugcgugaacuucaacuucaacggccuuaccggcaccggcgugcugaccgagagcaacaagaaauuccugcccuuucagcaguucggccgggacaucgccgacaccaccgacgcugugcgggauccccagacccuggagauccuggacaucaccccuugcagcuucggcggcgugagcgugaucaccccaggcaccaacaccagcaaccagguggccgugcuguaccagggcgugaacugcaccgaggugcccguggccauccacgccgaccagcugacacccaccuggcgggucuacagcaccggcagcaacguguuccagacccgggccgguugccugaucggcgccgagcacgugaacaacagcuacgagugcgacauccccaucggcgccggcaucugugccagcuaccagacccagaccaauucaccccggagggcaaggagcguggccagccagagcaucaucgccuacaccaugagccugggcgccgagaacagcguggccuacagcaacaacagcaucgccauccccaccaacuucaccaucagcgugaccaccgagauucugcccgugagcaugaccaagaccagcguggacugcaccauguacaucugcggcgacagcaccgagugcagcaaccugcugcugcaguacggcagcuucugcacccagcugaaccgggcccugaccggcaucgccguggagcaggacaagaacacccaggagguguucgcccaggugaagcagaucuacaagaccccucccaucaaggacuucggcggcuucaacuucagccagauccugcccgaccccagcaagcccagcaagcggagcuucaucgaggaccugcuguucaacaaggugacccuagccgacgccggcuucaucaagcaguacggcgacugccucggcgacauagccgcccgggaccugaucugcgcccagaaguucaacggccugaccgugcugccuccccugcugaccgacgagaugaucgcccaguacaccagcgcccuguuagccggaaccaucaccagcggcuggacuuucggcgcuggagccgcucugcagauccccuucgccaugcagauggccuaccgguucaacggcaucggcgugacccagaacgugcuguacgagaaccagaagcugaucgccaaccaguucaacagcgccaucggcaagauccaggacagccugagcagcaccgcuagcgcccugggcaagcugcaggacguggugaaccagaacgcccaggcccugaacacccuggugaagcagcugagcagcaacuucggcgccaucagcagcgugcugaacgacauccugagccggcuggacaaggucgaggccgaggugcagaucgaccggcugaucacuggccggcugcagagccugcagaccuacgugacccagcagcugauccgggccgccgagauucgggccagcgccaaccuggccgccaccaagaugagcgagugcgugcugggccagagcaagcggguggacuucugcggcaagggcuaccaccugaugagcuuuccccagagcgcaccccacggagugguguuccugcacgugaccuacgugcccgcccaggagaagaacuucaccaccgccccagccaucugccacgacggcaaggcccacuuuccccgggagggcguguucgugagcaacggcacccacugguucgugacccagcggaacuucuacgagccccagaucaucaccaccgacaacaccuucgugagcggcaacugcgacguggugaucggcaucgugaacaacaccguguacgauccccugcagcccgagcuggacagcuucaaggaggagcuggacaaguacuucaagaaucacaccagccccgacguggaccugggcgacaucagcggcaucaacgccagcguggugaacauccagaaggagaucgaucggcugaacgagguggccaagaaccugaacgagagccugaucgaccugcaggagcugggcaaguacgagcaguacaucaaguggcccugguacaucuggcugggcuucaucgccggccugaucgccaucgugauggugaccaucaugcugugcugcaugaccagcugcugcagcugccugaagggcuguugcagcugcggcagcugcugcaaguucgacgaggacgacagcgagcccgugcugaagggcgugaagcugcacuacaccugaggacuagucccuguucccagagcccacuuuuuuuucuuuuuuugaaauaaaauagccugucuuucagaucuaaaaaaaaaaaaaaaaaaaaaaaaaaaaaaaaaaaaaaaaaaaaaaaaaaaaaaaaaaaaaaaaaaaaaaaaaaaaaaaaaaaaaaaaaaaaaaaaaaaa

SEQ ID NO: 24993 - RNA, 4167 nt, Artificial Sequence
  SARS-CoV-2/Wuhan/WIV05/2019__EPI_ISL_402128 spike protein mRNA gc (1-1273)(D614G_I692V)
aggagagggcgcuuggcuugcaaggacccugagcugcggcauugaagcacacccaacccaacucgacugaagucagccucacugaaccggaucugagaaucuucucucucugggcuugccagggcucuccgaaccuagcuagcauccucuucaauuccaacuagaaagcuuaccauguucguguuccuggugcugcugccccuggugagcagccagugcgugaaccugaccacccggacccagcugccaccagccuacaccaacagcuucacccggggcgucuacuaccccgacaagguguuccggagcagcguccugcacagcacccaggaccuguuccugcccuucuucagcaacgugaccugguuccacgccauccacgugagcggcaccaacggcaccaagcgguucgacaaccccgugcugcccuucaacgacggcguguacuucgccagcaccgagaagagcaacaucauccggggcuggaucuucggcaccacccuggacagcaagacccagagccugcugaucgugaauaacgccaccaacguggugaucaaggugugcgaguuccaguucugcaacgaccccuuccugggcguguacuaccacaagaacaacaagagcuggauggagagcgaguuccggguguacagcagcgccaacaacugcaccuucgaguacgugagccagcccuuccugauggaccuggagggcaagcagggcaacuucaagaaccugcgggaguucguguucaagaacaucgacggcuacuucaagaucuacagcaagcacaccccaaucaaccuggugcgggaucugccccagggcuucucagcccuggagccccugguggaccugcccaucggcaucaacaucacccgguuccagacccugcuggcccugcaccggagcuaccugaccccaggcgacagcagcagcggguggacagcaggcgcggcugcuuacuacgugggcuaccugcagccccggaccuuccugcugaaguacaacgagaacggcaccaucaccgacgccguggacugcgcccuggacccucugagcgagaccaagugcacccugaagagcuucaccguggagaagggcaucuaccagaccagcaacuuccgggugcagcccaccgagagcaucgugcgguuccccaacaucaccaaccugugccccuucggcgagguguucaacgccacccgguucgccagcguguacgccuggaaccggaagcggaucagcaacugcguggccgacuacagcgugcuguacaacagcgccagcuucagcaccuucaagugcuacggcgugagccccaccaagcugaacgaccugugcuucaccaacguguacgccgacagcuucgugauccguggcgacgaggugcggcagaucgcacccggccagacaggcaagaucgccgacuacaacuacaagcugcccgacgacuucaccggcugcgugaucgccuggaacagcaacaaccucgacagcaaggugggcggcaacuacaacuaccuguaccggcuguuccggaagagcaaccugaagcccuucgagcgggacaucagcaccgagaucuaccaagccggcuccaccccuugcaacggcguggagggcuucaacugcuacuucccucugcagagcuacggcuuccagcccaccaacggcgugggcuaccagcccuaccgggugguggugcugagcuucgagcugcugcacgccccagccaccguguguggccccaagaagagcaccaaccuggugaagaacaagugcgugaacuucaacuucaacggccuuaccggcaccggcgugcugaccgagagcaacaagaaauuccugcccuuucagcaguucggccgggacaucgccgacaccaccgacgcugugcgggauccccagacccuggagauccuggacaucaccccuugcagcuucggcggcgugagcgugaucaccccaggcaccaacaccagcaaccagguggccgugcuguaccagggcgugaacugcaccgaggugcccguggccauccacgccgaccagcugacacccaccuggcgggucuacagcaccggcagcaacguguuccagacccgggccgguugccugaucggcgccgagcacgugaacaacagcuacgagugcgacauccccaucggcgccggcaucugugccagcuaccagacccagaccaauucaccccggagggcaaggagcguggccagccagagcgugaucgccuacaccaugagccugggcgccgagaacagcguggccuacagcaacaacagcaucgccauccccaccaacuucaccaucagcgugaccaccgagauucugcccgugagcaugaccaagaccagcguggacugcaccauguacaucugcggcgacagcaccgagugcagcaaccugcugcugcaguacggcagcuucugcacccagcugaaccgggcccugaccggcaucgccguggagcaggacaagaacacccaggagguguucgcccaggugaagcagaucuacaagaccccucccaucaaggacuucggcggcuucaacuucagccagauccugcccgaccccagcaagcccagcaagcggagcuucaucgaggaccugcuguucaacaaggugacccuagccgacgccggcuucaucaagcaguacggcgacugccucggcgacauagccgcccgggaccugaucugcgcccagaaguucaacggccugaccgugcugccuccccugcugaccgacgagaugaucgcccaguacaccagcgcccuguuagccggaaccaucaccagcggcuggacuuucggcgcuggagccgcucugcagauccccuucgccaugcagauggccuaccgguucaacggcaucggcgugacccagaacgugcuguacgagaaccagaagcugaucgccaaccaguucaacagcgccaucggcaagauccaggacagccugagcagcaccgcuagcgcccugggcaagcugcaggacguggugaaccagaacgcccaggcccugaacacccuggugaagcagcugagcagcaacuucggcgccaucagcagcgugcugaacgacauccugagccggcuggacaaggucgaggccgaggugcagaucgaccggcugaucacuggccggcugcagagccugcagaccuacgugacccagcagcugauccgggccgccgagauucgggccagcgccaaccuggccgccaccaagaugagcgagugcgugcugggccagagcaagcggguggacuucugcggcaagggcuaccaccugaugagcuuuccccagagcgcaccccacggagugguguuccugcacgugaccuacgugcccgcccaggagaagaacuucaccaccgccccagccaucugccacgacggcaaggcccacuuuccccgggagggcguguucgugagcaacggcacccacugguucgugacccagcggaacuucuacgagccccagaucaucaccaccgacaacaccuucgugagcggcaacugcgacguggugaucggcaucgugaacaacaccguguacgauccccugcagcccgagcuggacagcuucaaggaggagcuggacaaguacuucaagaaucacaccagccccgacguggaccugggcgacaucagcggcaucaacgccagcguggugaacauccagaaggagaucgaucggcugaacgagguggccaagaaccugaacgagagccugaucgaccugcaggagcugggcaaguacgagcaguacaucaaguggcccugguacaucuggcugggcuucaucgccggccugaucgccaucgugauggugaccaucaugcugugcugcaugaccagcugcugcagcugccugaagggcuguugcagcugcggcagcugcugcaaguucgacgaggacgacagcgagcccgugcugaagggcgugaagcugcacuacaccugaggacuagucccuguucccagagcccacuuuuuuuucuuuuuuugaaauaaaauagccugucuuucagaucuaaaaaaaaaaaaaaaaaaaaaaaaaaaaaaaaaaaaaaaaaaaaaaaaaaaaaaaaaaaaaaaaaaaaaaaaaaaaaaaaaaaaaaaaaaaaaaaaaaaa

SEQ ID NO: 24994 - RNA, 4167 nt, Artificial Sequence
  SARS-CoV-2/Wuhan/WIV05/2019__EPI_ISL_402128 spike protein mRNA gc (1-1273)(D614G_M1229I)
aggagagggcgcuuggcuugcaaggacccugagcugcggcauugaagcacacccaacccaacucgacugaagucagccucacugaaccggaucugagaaucuucucucucugggcuugccagggcucuccgaaccuagcuagcauccucuucaauuccaacuagaaagcuuaccauguucguguuccuggugcugcugccccuggugagcagccagugcgugaaccugaccacccggacccagcugccaccagccuacaccaacagcuucacccggggcgucuacuaccccgacaagguguuccggagcagcguccugcacagcacccaggaccuguuccugcccuucuucagcaacgugaccugguuccacgccauccacgugagcggcaccaacggcaccaagcgguucgacaaccccgugcugcccuucaacgacggcguguacuucgccagcaccgagaagagcaacaucauccggggcuggaucuucggcaccacccuggacagcaagacccagagccugcugaucgugaauaacgccaccaacguggugaucaaggugugcgaguuccaguucugcaacgaccccuuccugggcguguacuaccacaagaacaacaagagcuggauggagagcgaguuccggguguacagcagcgccaacaacugcaccuucgaguacgugagccagcccuuccugauggaccuggagggcaagcagggcaacuucaagaaccugcgggaguucguguucaagaacaucgacggcuacuucaagaucuacagcaagcacaccccaaucaaccuggugcgggaucugccccagggcuucucagcccuggagccccugguggaccugcccaucggcaucaacaucacccgguuccagacccugcuggcccugcaccggagcuaccugaccccaggcgacagcagcagcggguggacagcaggcgcggcugcuuacuacgugggcuaccugcagccccggaccuuccugcugaaguacaacgagaacggcaccaucaccgacgccguggacugcgcccuggacccucugagcgagaccaagugcacccugaagagcuucaccguggagaagggcaucuaccagaccagcaacuuccgggugcagcccaccgagagcaucgugcgguuccccaacaucaccaaccugugccccuucggcgagguguucaacgccacccgguucgccagcguguacgccuggaaccggaagcggaucagcaacugcguggccgacuacagcgugcuguacaacagcgccagcuucagcaccuucaagugcuacggcgugagccccaccaagcugaacgaccugugcuucaccaacguguacgccgacagcuucgugauccguggcgacgaggugcggcagaucgcacccggccagacaggcaagaucgccgacuacaacuacaagcugcccgacgacuucaccggcugcgugaucgccuggaacagcaacaaccucgacagcaaggugggcggcaacuacaacuaccuguaccggcuguuccggaagagcaaccugaagcccuucgagcgggacaucagcaccgagaucuaccaagccggcuccaccccuugcaacggcguggagggcuucaacugcuacuucccucugcagagcuacggcuuccagcccaccaacggcgugggcuaccagcccuaccgggugguggugcugagcuucgagcugcugcacgccccagccaccguguguggccccaagaagagcaccaaccuggugaagaacaagugcgugaacuucaacuucaacggccuuaccggcaccggcgugcugaccgagagcaacaagaaauuccugcccuuucagcaguucggccgggacaucgccgacaccaccgacgcugugcgggauccccagacccuggagauccuggacaucaccccuugcagcuucggcggcgugagcgugaucaccccaggcaccaacaccagcaaccagguggccgugcuguaccagggcgugaacugcaccgaggugcccguggccauccacgccgaccagcugacacccaccuggcgggucuacagcaccggcagcaacguguuccagacccgggccgguugccugaucggcgccgagcacgugaacaacagcuacgagugcgacauccccaucggcgccggcaucugugccagcuaccagacccagaccaauucaccccggagggcaaggagcguggccagccagagcaucaucgccuacaccaugagccugggcgccgagaacagcguggccuacagcaacaacagcaucgccauccccaccaacuucaccaucagcgugaccaccgagauucugcccgugagcaugaccaagaccagcguggacugcaccauguacaucugcggcgacagcaccgagugcagcaaccugcugcugcaguacggcagcuucugcacccagcugaaccgggcccugaccggcaucgccguggagcaggacaagaacacccaggagguguucgcccaggugaagcagaucuacaagaccccucccaucaaggacuucggcggcuucaacuucagccagauccugcccgaccccagcaagcccagcaagcggagcuucaucgaggaccugcuguucaacaaggugacccuagccgacgccggcuucaucaagcaguacggcgacugccucggcgacauagccgcccgggaccugaucugcgcccagaaguucaacggccugaccgugcugccuccccugcugaccgacgagaugaucgcccaguacaccagcgcccuguuagccggaaccaucaccagcggcuggacuuucggcgcuggagccgcucugcagauccccuucgccaugcagauggccuaccgguucaacggcaucggcgugacccagaacgugcuguacgagaaccagaagcugaucgccaaccaguucaacagcgccaucggcaagauccaggacagccugagcagcaccgcuagcgcccugggcaagcugcaggacguggugaaccagaacgcccaggcccugaacacccuggugaagcagcugagcagcaacuucggcgccaucagcagcgugcugaacgacauccugagccggcuggacaaggucgaggccgaggugcagaucgaccggcugaucacuggccggcugcagagccugcagaccuacgugacccagcagcugauccgggccgccgagauucgggccagcgccaaccuggccgccaccaagaugagcgagugcgugcugggccagagcaagcggguggacuucugcggcaagggcuaccaccugaugagcuuuccccagagcgcaccccacggagugguguuccugcacgugaccuacgugcccgcccaggagaagaacuucaccaccgccccagccaucugccacgacggcaaggcccacuuuccccgggagggcguguucgugagcaacggcacccacugguucgugacccagcggaacuucuacgagccccagaucaucaccaccgacaacaccuucgugagcggcaacugcgacguggugaucggcaucgugaacaacaccguguacgauccccugcagcccgagcuggacagcuucaaggaggagcuggacaaguacuucaagaaucacaccagccccgacguggaccugggcgacaucagcggcaucaacgccagcguggugaacauccagaaggagaucgaucggcugaacgagguggccaagaaccugaacgagagccugaucgaccugcaggagcugggcaaguacgagcaguacaucaaguggcccugguacaucuggcugggcuucaucgccggccugaucgccaucgugaucgugaccaucaugcugugcugcaugaccagcugcugcagcugccugaagggcuguugcagcugcggcagcugcugcaaguucgacgaggacgacagcgagcccgugcugaagggcgugaagcugcacuacaccugaggacuagucccuguucccagagcccacuuuuuuuucuuuuuuugaaauaaaauagccugucuuucagaucuaaaaaaaaaaaaaaaaaaaaaaaaaaaaaaaaaaaaaaaaaaaaaaaaaaaaaaaaaaaaaaaaaaaaaaaaaaaaaaaaaaaaaaaaaaaaaaaaaaaa

SEQ ID NO: 24995 - RNA, 4161 nt, Artificial Sequence
  SARS-CoV-2/Wuhan/WIV05/2019__EPI_ISL_402128 spike protein mRNA gc (1-1273)(H69del_V70del_A222V_Y453F_S477N_D614G_I692V)
aggagagggcgcuuggcuugcaaggacccugagcugcggcauugaagcacacccaacccaacucgacugaagucagccucacugaaccggaucugagaaucuucucucucugggcuugccagggcucuccgaaccuagcuagcauccucuucaauuccaacuagaaagcuuaccauguucguguuccuggugcugcugccccuggugagcagccagugcgugaaccugaccacccggacccagcugccaccagccuacaccaacagcuucacccggggcgucuacuaccccgacaagguguuccggagcagcguccugcacagcacccaggaccuguuccugcccuucuucagcaacgugaccugguuccacgccaucagcggcaccaacggcaccaagcgguucgacaaccccgugcugcccuucaacgacggcguguacuucgccagcaccgagaagagcaacaucauccggggcuggaucuucggcaccacccuggacagcaagacccagagccugcugaucgugaauaacgccaccaacguggugaucaaggugugcgaguuccaguucugcaacgaccccuuccugggcguguacuaccacaagaacaacaagagcuggauggagagcgaguuccggguguacagcagcgccaacaacugcaccuucgaguacgugagccagcccuuccugauggaccuggagggcaagcagggcaacuucaagaaccugcgggaguucguguucaagaacaucgacggcuacuucaagaucuacagcaagcacaccccaaucaaccuggugcgggaucugccccagggcuucucagugcuggagccccugguggaccugcccaucggcaucaacaucacccgguuccagacccugcuggcccugcaccggagcuaccugaccccaggcgacagcagcagcggguggacagcaggcgcggcugcuuacuacgugggcuaccugcagccccggaccuuccugcugaaguacaacgagaacggcaccaucaccgacgccguggacugcgcccuggacccucugagcgagaccaagugcacccugaagagcuucaccguggagaagggcaucuaccagaccagcaacuuccgggugcagcccaccgagagcaucgugcgguuccccaacaucaccaaccugugccccuucggcgagguguucaacgccacccgguucgccagcguguacgccuggaaccggaagcggaucagcaacugcguggccgacuacagcgugcuguacaacagcgccagcuucagcaccuucaagugcuacggcgugagccccaccaagcugaacgaccugugcuucaccaacguguacgccgacagcuucgugauccguggcgacgaggugcggcagaucgcacccggccagacaggcaagaucgccgacuacaacuacaagcugcccgacgacuucaccggcugcgugaucgccuggaacagcaacaaccucgacagcaaggugggcggcaacuacaacuaccuguuccggcuguuccggaagagcaaccugaagcccuucgagcgggacaucagcaccgagaucuaccaagccggcaacaccccuugcaacggcguggagggcuucaacugcuacuucccucugcagagcuacggcuuccagcccaccaacggcgugggcuaccagcccuaccgggugguggugcugagcuucgagcugcugcacgccccagccaccguguguggccccaagaagagcaccaaccuggugaagaacaagugcgugaacuucaacuucaacggccuuaccggcaccggcgugcugaccgagagcaacaagaaauuccugcccuuucagcaguucggccgggacaucgccgacaccaccgacgcugugcgggauccccagacccuggagauccuggacaucaccccuugcagcuucggcggcgugagcgugaucaccccaggcaccaacaccagcaaccagguggccgugcuguaccagggcgugaacugcaccgaggugcccguggccauccacgccgaccagcugacacccaccuggcgggucuacagcaccggcagcaacguguuccagacccgggccgguugccugaucggcgccgagcacgugaacaacagcuacgagugcgacauccccaucggcgccggcaucugugccagcuaccagacccagaccaauucaccccggagggcaaggagcguggccagccagagcgugaucgccuacaccaugagccugggcgccgagaacagcguggccuacagcaacaacagcaucgccauccccaccaacuucaccaucagcgugaccaccgagauucugcccgugagcaugaccaagaccagcguggacugcaccauguacaucugcggcgacagcaccgagugcagcaaccugcugcugcaguacggcagcuucugcacccagcugaaccgggcccugaccggcaucgccguggagcaggacaagaacacccaggagguguucgcccaggugaagcagaucuacaagaccccucccaucaaggacuucggcggcuucaacuucagccagauccugcccgaccccagcaagcccagcaagcggagcuucaucgaggaccugcuguucaacaaggugacccuagccgacgccggcuucaucaagcaguacggcgacugccucggcgacauagccgcccgggaccugaucugcgcccagaaguucaacggccugaccgugcugccuccccugcugaccgacgagaugaucgcccaguacaccagcgcccuguuagccggaaccaucaccagcggcuggacuuucggcgcuggagccgcucugcagauccccuucgccaugcagauggccuaccgguucaacggcaucggcgugacccagaacgugcuguacgagaaccagaagcugaucgccaaccaguucaacagcgccaucggcaagauccaggacagccugagcagcaccgcuagcgcccugggcaagcugcaggacguggugaaccagaacgcccaggcccugaacacccuggugaagcagcugagcagcaacuucggcgccaucagcagcgugcugaacgacauccugagccggcuggacaaggucgaggccgaggugcagaucgaccggcugaucacuggccggcugcagagccugcagaccuacgugacccagcagcugauccgggccgccgagauucgggccagcgccaaccuggccgccaccaagaugagcgagugcgugcugggccagagcaagcggguggacuucugcggcaagggcuaccaccugaugagcuuuccccagagcgcaccccacggagugguguuccugcacgugaccuacgugcccgcccaggagaagaacuucaccaccgccccagccaucugccacgacggcaaggcccacuuuccccgggagggcguguucgugagcaacggcacccacugguucgugacccagcggaacuucuacgagccccagaucaucaccaccgacaacaccuucgugagcggcaacugcgacguggugaucggcaucgugaacaacaccguguacgauccccugcagcccgagcuggacagcuucaaggaggagcuggacaaguacuucaagaaucacaccagccccgacguggaccugggcgacaucagcggcaucaacgccagcguggugaacauccagaaggagaucgaucggcugaacgagguggccaagaaccugaacgagagccugaucgaccugcaggagcugggcaaguacgagcaguacaucaaguggcccugguacaucuggcugggcuucaucgccggccugaucgccaucgugauggugaccaucaugcugugcugcaugaccagcugcugcagcugccugaagggcuguugcagcugcggcagcugcugcaaguucgacgaggacgacagcgagcccgugcugaagggcgugaagcugcacuacaccugaggacuagucccuguucccagagcccacuuuuuuuucuuuuuuugaaauaaaauagccugucuuucagaucuaaaaaaaaaaaaaaaaaaaaaaaaaaaaaaaaaaaaaaaaaaaaaaaaaaaaaaaaaaaaaaaaaaaaaaaaaaaaaaaaaaaaaaaaaaaaaaaaaaaa

SEQ ID NO: 24996 - RNA, 4161 nt, Artificial Sequence
  SARS-CoV-2/Wuhan/WIV05/2019__EPI_ISL_402128 spike protein mRNA gc (1-1273)(H69del_V70del_Y453F_D614G_I692V_M1229I)
aggagagggcgcuuggcuugcaaggacccugagcugcggcauugaagcacacccaacccaacucgacugaagucagccucacugaaccggaucugagaaucuucucucucugggcuugccagggcucuccgaaccuagcuagcauccucuucaauuccaacuagaaagcuuaccauguucguguuccuggugcugcugccccuggugagcagccagugcgugaaccugaccacccggacccagcugccaccagccuacaccaacagcuucacccggggcgucuacuaccccgacaagguguuccggagcagcguccugcacagcacccaggaccuguuccugcccuucuucagcaacgugaccugguuccacgccaucagcggcaccaacggcaccaagcgguucgacaaccccgugcugcccuucaacgacggcguguacuucgccagcaccgagaagagcaacaucauccggggcuggaucuucggcaccacccuggacagcaagacccagagccugcugaucgugaauaacgccaccaacguggugaucaaggugugcgaguuccaguucugcaacgaccccuuccugggcguguacuaccacaagaacaacaagagcuggauggagagcgaguuccggguguacagcagcgccaacaacugcaccuucgaguacgugagccagcccuuccugauggaccuggagggcaagcagggcaacuucaagaaccugcgggaguucguguucaagaacaucgacggcuacuucaagaucuacagcaagcacaccccaaucaaccuggugcgggaucugccccagggcuucucagcccuggagccccugguggaccugcccaucggcaucaacaucacccgguuccagacccugcuggcccugcaccggagcuaccugaccccaggcgacagcagcagcggguggacagcaggcgcggcugcuuacuacgugggcuaccugcagccccggaccuuccugcugaaguacaacgagaacggcaccaucaccgacgccguggacugcgcccuggacccucugagcgagaccaagugcacccugaagagcuucaccguggagaagggcaucuaccagaccagcaacuuccgggugcagcccaccgagagcaucgugcgguuccccaacaucaccaaccugugccccuucggcgagguguucaacgccacccgguucgccagcguguacgccuggaaccggaagcggaucagcaacugcguggccgacuacagcgugcuguacaacagcgccagcuucagcaccuucaagugcuacggcgugagccccaccaagcugaacgaccugugcuucaccaacguguacgccgacagcuucgugauccguggcgacgaggugcggcagaucgcacccggccagacaggcaagaucgccgacuacaacuacaagcugcccgacgacuucaccggcugcgugaucgccuggaacagcaacaaccucgacagcaaggugggcggcaacuacaacuaccuguuccggcuguuccggaagagcaaccugaagcccuucgagcgggacaucagcaccgagaucuaccaagccggcuccaccccuugcaacggcguggagggcuucaacugcuacuucccucugcagagcuacggcuuccagcccaccaacggcgugggcuaccagcccuaccgggugguggugcugagcuucgagcugcugcacgccccagccaccguguguggccccaagaagagcaccaaccuggugaagaacaagugcgugaacuucaacuucaacggccuuaccggcaccggcgugcugaccgagagcaacaagaaauuccugcccuuucagcaguucggccgggacaucgccgacaccaccgacgcugugcgggauccccagacccuggagauccuggacaucaccccuugcagcuucggcggcgugagcgugaucaccccaggcaccaacaccagcaaccagguggccgugcuguaccagggcgugaacugcaccgaggugcccguggccauccacgccgaccagcugacacccaccuggcgggucuacagcaccggcagcaacguguuccagacccgggccgguugccugaucggcgccgagcacgugaacaacagcuacgagugcgacauccccaucggcgccggcaucugugccagcuaccagacccagaccaauucaccccggagggcaaggagcguggccagccagagcgugaucgccuacaccaugagccugggcgccgagaacagcguggccuacagcaacaacagcaucgccauccccaccaacuucaccaucagcgugaccaccgagauucugcccgugagcaugaccaagaccagcguggacugcaccauguacaucugcggcgacagcaccgagugcagcaaccugcugcugcaguacggcagcuucugcacccagcugaaccgggcccugaccggcaucgccguggagcaggacaagaacacccaggagguguucgcccaggugaagcagaucuacaagaccccucccaucaaggacuucggcggcuucaacuucagccagauccugcccgaccccagcaagcccagcaagcggagcuucaucgaggaccugcuguucaacaaggugacccuagccgacgccggcuucaucaagcaguacggcgacugccucggcgacauagccgcccgggaccugaucugcgcccagaaguucaacggccugaccgugcugccuccccugcugaccgacgagaugaucgcccaguacaccagcgcccuguuagccggaaccaucaccagcggcuggacuuucggcgcuggagccgcucugcagauccccuucgccaugcagauggccuaccgguucaacggcaucggcgugacccagaacgugcuguacgagaaccagaagcugaucgccaaccaguucaacagcgccaucggcaagauccaggacagccugagcagcaccgcuagcgcccugggcaagcugcaggacguggugaaccagaacgcccaggcccugaacacccuggugaagcagcugagcagcaacuucggcgccaucagcagcgugcugaacgacauccugagccggcuggacaaggucgaggccgaggugcagaucgaccggcugaucacuggccggcugcagagccugcagaccuacgugacccagcagcugauccgggccgccgagauucgggccagcgccaaccuggccgccaccaagaugagcgagugcgugcugggccagagcaagcggguggacuucugcggcaagggcuaccaccugaugagcuuuccccagagcgcaccccacggagugguguuccugcacgugaccuacgugcccgcccaggagaagaacuucaccaccgccccagccaucugccacgacggcaaggcccacuuuccccgggagggcguguucgugagcaacggcacccacugguucgugacccagcggaacuucuacgagccccagaucaucaccaccgacaacaccuucgugagcggcaacugcgacguggugaucggcaucgugaacaacaccguguacgauccccugcagcccgagcuggacagcuucaaggaggagcuggacaaguacuucaagaaucacaccagccccgacguggaccugggcgacaucagcggcaucaacgccagcguggugaacauccagaaggagaucgaucggcugaacgagguggccaagaaccugaacgagagccugaucgaccugcaggagcugggcaaguacgagcaguacaucaaguggcccugguacaucuggcugggcuucaucgccggccugaucgccaucgugaucgugaccaucaugcugugcugcaugaccagcugcugcagcugccugaagggcuguugcagcugcggcagcugcugcaaguucgacgaggacgacagcgagcccgugcugaagggcgugaagcugcacuacaccugaggacuagucccuguucccagagcccacuuuuuuuucuuuuuuugaaauaaaauagccugucuuucagaucuaaaaaaaaaaaaaaaaaaaaaaaaaaaaaaaaaaaaaaaaaaaaaaaaaaaaaaaaaaaaaaaaaaaaaaaaaaaaaaaaaaaaaaaaaaaaaaaaaaaa

SEQ ID NO: 24997 - RNA, 4158 nt, Artificial Sequence
  SARS-CoV-2/Wuhan/WIV05/2019__EPI_ISL_402128 spike protein mRNA gc (1-1273)(H69del_V70del_Y144del_N501Y_A570D_D614G_P681H_T716I_S982 A_D1118H)
aggagagggcgcuuggcuugcaaggacccugagcugcggcauugaagcacacccaacccaacucgacugaagucagccucacugaaccggaucugagaaucuucucucucugggcuugccagggcucuccgaaccuagcuagcauccucuucaauuccaacuagaaagcuuaccauguucguguuccuggugcugcugccccuggugagcagccagugcgugaaccugaccacccggacccagcugccaccagccuacaccaacagcuucacccggggcgucuacuaccccgacaagguguuccggagcagcguccugcacagcacccaggaccuguuccugcccuucuucagcaacgugaccugguuccacgccaucagcggcaccaacggcaccaagcgguucgacaaccccgugcugcccuucaacgacggcguguacuucgccagcaccgagaagagcaacaucauccggggcuggaucuucggcaccacccuggacagcaagacccagagccugcugaucgugaauaacgccaccaacguggugaucaaggugugcgaguuccaguucugcaacgaccccuuccugggcguguaccacaagaacaacaagagcuggauggagagcgaguuccggguguacagcagcgccaacaacugcaccuucgaguacgugagccagcccuuccugauggaccuggagggcaagcagggcaacuucaagaaccugcgggaguucguguucaagaacaucgacggcuacuucaagaucuacagcaagcacaccccaaucaaccuggugcgggaucugccccagggcuucucagcccuggagccccugguggaccugcccaucggcaucaacaucacccgguuccagacccugcuggcccugcaccggagcuaccugaccccaggcgacagcagcagcggguggacagcaggcgcggcugcuuacuacgugggcuaccugcagccccggaccuuccugcugaaguacaacgagaacggcaccaucaccgacgccguggacugcgcccuggacccucugagcgagaccaagugcacccugaagagcuucaccguggagaagggcaucuaccagaccagcaacuuccgggugcagcccaccgagagcaucgugcgguuccccaacaucaccaaccugugccccuucggcgagguguucaacgccacccgguucgccagcguguacgccuggaaccggaagcggaucagcaacugcguggccgacuacagcgugcuguacaacagcgccagcuucagcaccuucaagugcuacggcgugagccccaccaagcugaacgaccugugcuucaccaacguguacgccgacagcuucgugauccguggcgacgaggugcggcagaucgcacccggccagacaggcaagaucgccgacuacaacuacaagcugcccgacgacuucaccggcugcgugaucgccuggaacagcaacaaccucgacagcaaggugggcggcaacuacaacuaccuguaccggcuguuccggaagagcaaccugaagcccuucgagcgggacaucagcaccgagaucuaccaagccggcuccaccccuugcaacggcguggagggcuucaacugcuacuucccucugcagagcuacggcuuccagcccaccuacggcgugggcuaccagcccuaccgggugguggugcugagcuucgagcugcugcacgccccagccaccguguguggccccaagaagagcaccaaccuggugaagaacaagugcgugaacuucaacuucaacggccuuaccggcaccggcgugcugaccgagagcaacaagaaauuccugcccuuucagcaguucggccgggacaucgacgacaccaccgacgcugugcgggauccccagacccuggagauccuggacaucaccccuugcagcuucggcggcgugagcgugaucaccccaggcaccaacaccagcaaccagguggccgugcuguaccagggcgugaacugcaccgaggugcccguggccauccacgccgaccagcugacacccaccuggcgggucuacagcaccggcagcaacguguuccagacccgggccgguugccugaucggcgccgagcacgugaacaacagcuacgagugcgacauccccaucggcgccggcaucugugccagcuaccagacccagaccaauucacaccggagggcaaggagcguggccagccagagcaucaucgccuacaccaugagccugggcgccgagaacagcguggccuacagcaacaacagcaucgccauccccaucaacuucaccaucagcgugaccaccgagauucugcccgugagcaugaccaagaccagcguggacugcaccauguacaucugcggcgacagcaccgagugcagcaaccugcugcugcaguacggcagcuucugcacccagcugaaccgggcccugaccggcaucgccguggagcaggacaagaacacccaggagguguucgcccaggugaagcagaucuacaagaccccucccaucaaggacuucggcggcuucaacuucagccagauccugcccgaccccagcaagcccagcaagcggagcuucaucgaggaccugcuguucaacaaggugacccuagccgacgccggcuucaucaagcaguacggcgacugccucggcgacauagccgcccgggaccugaucugcgcccagaaguucaacggccugaccgugcugccuccccugcugaccgacgagaugaucgcccaguacaccagcgcccuguuagccggaaccaucaccagcggcuggacuuucggcgcuggagccgcucugcagauccccuucgccaugcagauggccuaccgguucaacggcaucggcgugacccagaacgugcuguacgagaaccagaagcugaucgccaaccaguucaacagcgccaucggcaagauccaggacagccugagcagcaccgcuagcgcccugggcaagcugcaggacguggugaaccagaacgcccaggcccugaacacccuggugaagcagcugagcagcaacuucggcgccaucagcagcgugcugaacgacauccuggcccggcuggacaaggucgaggccgaggugcagaucgaccggcugaucacuggccggcugcagagccugcagaccuacgugacccagcagcugauccgggccgccgagauucgggccagcgccaaccuggccgccaccaagaugagcgagugcgugcugggccagagcaagcggguggacuucugcggcaagggcuaccaccugaugagcuuuccccagagcgcaccccacggagugguguuccugcacgugaccuacgugcccgcccaggagaagaacuucaccaccgccccagccaucugccacgacggcaaggcccacuuuccccgggagggcguguucgugagcaacggcacccacugguucgugacccagcggaacuucuacgagccccagaucaucaccacccacaacaccuucgugagcggcaacugcgacguggugaucggcaucgugaacaacaccguguacgauccccugcagcccgagcuggacagcuucaaggaggagcuggacaaguacuucaagaaucacaccagccccgacguggaccugggcgacaucagcggcaucaacgccagcguggugaacauccagaaggagaucgaucggcugaacgagguggccaagaaccugaacgagagccugaucgaccugcaggagcugggcaaguacgagcaguacaucaaguggcccugguacaucuggcugggcuucaucgccggccugaucgccaucgugauggugaccaucaugcugugcugcaugaccagcugcugcagcugccugaagggcuguugcagcugcggcagcugcugcaaguucgacgaggacgacagcgagcccgugcugaagggcgugaagcugcacuacaccugaggacuagucccuguucccagagcccacuuuuuuuucuuuuuuugaaauaaaauagccugucuuucagaucuaaaaaaaaaaaaaaaaaaaaaaaaaaaaaaaaaaaaaaaaaaaaaaaaaaaaaaaaaaaaaaaaaaaaaaaaaaaaaaaaaaaaaaaaaaaaaaaaaaaa

SEQ ID NO: 24998 - RNA, 4167 nt, Artificial Sequence
  SARS-CoV-2/Wuhan/WIV05/2019__EPI_ISL_402128 spike protein mRNA gc (1-1273)(K417N_E484K_N501Y_D614G)
aggagagggcgcuuggcuugcaaggacccugagcugcggcauugaagcacacccaacccaacucgacugaagucagccucacugaaccggaucugagaaucuucucucucugggcuugccagggcucuccgaaccuagcuagcauccucuucaauuccaacuagaaagcuuaccauguucguguuccuggugcugcugccccuggugagcagccagugcgugaaccugaccacccggacccagcugccaccagccuacaccaacagcuucacccggggcgucuacuaccccgacaagguguuccggagcagcguccugcacagcacccaggaccuguuccugcccuucuucagcaacgugaccugguuccacgccauccacgugagcggcaccaacggcaccaagcgguucgacaaccccgugcugcccuucaacgacggcguguacuucgccagcaccgagaagagcaacaucauccggggcuggaucuucggcaccacccuggacagcaagacccagagccugcugaucgugaauaacgccaccaacguggugaucaaggugugcgaguuccaguucugcaacgaccccuuccugggcguguacuaccacaagaacaacaagagcuggauggagagcgaguuccggguguacagcagcgccaacaacugcaccuucgaguacgugagccagcccuuccugauggaccuggagggcaagcagggcaacuucaagaaccugcgggaguucguguucaagaacaucgacggcuacuucaagaucuacagcaagcacaccccaaucaaccuggugcgggaucugccccagggcuucucagcccuggagccccugguggaccugcccaucggcaucaacaucacccgguuccagacccugcuggcccugcaccggagcuaccugaccccaggcgacagcagcagcggguggacagcaggcgcggcugcuuacuacgugggcuaccugcagccccggaccuuccugcugaaguacaacgagaacggcaccaucaccgacgccguggacugcgcccuggacccucugagcgagaccaagugcacccugaagagcuucaccguggagaagggcaucuaccagaccagcaacuuccgggugcagcccaccgagagcaucgugcgguuccccaacaucaccaaccugugccccuucggcgagguguucaacgccacccgguucgccagcguguacgccuggaaccggaagcggaucagcaacugcguggccgacuacagcgugcuguacaacagcgccagcuucagcaccuucaagugcuacggcgugagccccaccaagcugaacgaccugugcuucaccaacguguacgccgacagcuucgugauccguggcgacgaggugcggcagaucgcacccggccagacaggcaacaucgccgacuacaacuacaagcugcccgacgacuucaccggcugcgugaucgccuggaacagcaacaaccucgacagcaaggugggcggcaacuacaacuaccuguaccggcuguuccggaagagcaaccugaagcccuucgagcgggacaucagcaccgagaucuaccaagccggcuccaccccuugcaacggcgugaagggcuucaacugcuacuucccucugcagagcuacggcuuccagcccaccuacggcgugggcuaccagcccuaccgggugguggugcugagcuucgagcugcugcacgccccagccaccguguguggccccaagaagagcaccaaccuggugaagaacaagugcgugaacuucaacuucaacggccuuaccggcaccggcgugcugaccgagagcaacaagaaauuccugcccuuucagcaguucggccgggacaucgccgacaccaccgacgcugugcgggauccccagacccuggagauccuggacaucaccccuugcagcuucggcggcgugagcgugaucaccccaggcaccaacaccagcaaccagguggccgugcuguaccagggcgugaacugcaccgaggugcccguggccauccacgccgaccagcugacacccaccuggcgggucuacagcaccggcagcaacguguuccagacccgggccgguugccugaucggcgccgagcacgugaacaacagcuacgagugcgacauccccaucggcgccggcaucugugccagcuaccagacccagaccaauucaccccggagggcaaggagcguggccagccagagcaucaucgccuacaccaugagccugggcgccgagaacagcguggccuacagcaacaacagcaucgccauccccaccaacuucaccaucagcgugaccaccgagauucugcccgugagcaugaccaagaccagcguggacugcaccauguacaucugcggcgacagcaccgagugcagcaaccugcugcugcaguacggcagcuucugcacccagcugaaccgggcccugaccggcaucgccguggagcaggacaagaacacccaggagguguucgcccaggugaagcagaucuacaagaccccucccaucaaggacuucggcggcuucaacuucagccagauccugcccgaccccagcaagcccagcaagcggagcuucaucgaggaccugcuguucaacaaggugacccuagccgacgccggcuucaucaagcaguacggcgacugccucggcgacauagccgcccgggaccugaucugcgcccagaaguucaacggccugaccgugcugccuccccugcugaccgacgagaugaucgcccaguacaccagcgcccuguuagccggaaccaucaccagcggcuggacuuucggcgcuggagccgcucugcagauccccuucgccaugcagauggccuaccgguucaacggcaucggcgugacccagaacgugcuguacgagaaccagaagcugaucgccaaccaguucaacagcgccaucggcaagauccaggacagccugagcagcaccgcuagcgcccugggcaagcugcaggacguggugaaccagaacgcccaggcccugaacacccuggugaagcagcugagcagcaacuucggcgccaucagcagcgugcugaacgacauccugagccggcuggacaaggucgaggccgaggugcagaucgaccggcugaucacuggccggcugcagagccugcagaccuacgugacccagcagcugauccgggccgccgagauucgggccagcgccaaccuggccgccaccaagaugagcgagugcgugcugggccagagcaagcggguggacuucugcggcaagggcuaccaccugaugagcuuuccccagagcgcaccccacggagugguguuccugcacgugaccuacgugcccgcccaggagaagaacuucaccaccgccccagccaucugccacgacggcaaggcccacuuuccccgggagggcguguucgugagcaacggcacccacugguucgugacccagcggaacuucuacgagccccagaucaucaccaccgacaacaccuucgugagcggcaacugcgacguggugaucggcaucgugaacaacaccguguacgauccccugcagcccgagcuggacagcuucaaggaggagcuggacaaguacuucaagaaucacaccagccccgacguggaccugggcgacaucagcggcaucaacgccagcguggugaacauccagaaggagaucgaucggcugaacgagguggccaagaaccugaacgagagccugaucgaccugcaggagcugggcaaguacgagcaguacaucaaguggcccugguacaucuggcugggcuucaucgccggccugaucgccaucgugauggugaccaucaugcugugcugcaugaccagcugcugcagcugccugaagggcuguugcagcugcggcagcugcugcaaguucgacgaggacgacagcgagcccgugcugaagggcgugaagcugcacuacaccugaggacuagucccuguucccagagcccacuuuuuuuucuuuuuuugaaauaaaauagccugucuuucagaucuaaaaaaaaaaaaaaaaaaaaaaaaaaaaaaaaaaaaaaaaaaaaaaaaaaaaaaaaaaaaaaaaaaaaaaaaaaaaaaaaaaaaaaaaaaaaaaaaaaaa

SEQ ID NO: 24999 - RNA, 4158 nt, Artificial Sequence
  SARS-CoV-2/Wuhan/WIV05/2019__EPI_ISL_402128 spike protein mRNA gc (1-1273)(L18F_D80A_D215G_L242del_A243del_L244del_R246I_K417N_E484 K_N501Y_D614G_A701V)
aggagagggcgcuuggcuugcaaggacccugagcugcggcauugaagcacacccaacccaacucgacugaagucagccucacugaaccggaucugagaaucuucucucucugggcuugccagggcucuccgaaccuagcuagcauccucuucaauuccaacuagaaagcuuaccauguucguguuccuggugcugcugccccuggugagcagccagugcgugaacuucaccacccggacccagcugccaccagccuacaccaacagcuucacccggggcgucuacuaccccgacaagguguuccggagcagcguccugcacagcacccaggaccuguuccugcccuucuucagcaacgugaccugguuccacgccauccacgugagcggcaccaacggcaccaagcgguucgccaaccccgugcugcccuucaacgacggcguguacuucgccagcaccgagaagagcaacaucauccggggcuggaucuucggcaccacccuggacagcaagacccagagccugcugaucgugaauaacgccaccaacguggugaucaaggugugcgaguuccaguucugcaacgaccccuuccugggcguguacuaccacaagaacaacaagagcuggauggagagcgaguuccggguguacagcagcgccaacaacugcaccuucgaguacgugagccagcccuuccugauggaccuggagggcaagcagggcaacuucaagaaccugcgggaguucguguucaagaacaucgacggcuacuucaagaucuacagcaagcacaccccaaucaaccuggugcggggccugccccagggcuucucagcccuggagccccugguggaccugcccaucggcaucaacaucacccgguuccagacccugcacaucagcuaccugaccccaggcgacagcagcagcggguggacagcaggcgcggcugcuuacuacgugggcuaccugcagccccggaccuuccugcugaaguacaacgagaacggcaccaucaccgacgccguggacugcgcccuggacccucugagcgagaccaagugcacccugaagagcuucaccguggagaagggcaucuaccagaccagcaacuuccgggugcagcccaccgagagcaucgugcgguuccccaacaucaccaaccugugccccuucggcgagguguucaacgccacccgguucgccagcguguacgccuggaaccggaagcggaucagcaacugcguggccgacuacagcgugcuguacaacagcgccagcuucagcaccuucaagugcuacggcgugagccccaccaagcugaacgaccugugcuucaccaacguguacgccgacagcuucgugauccguggcgacgaggugcggcagaucgcacccggccagacaggcaacaucgccgacuacaacuacaagcugcccgacgacuucaccggcugcgugaucgccuggaacagcaacaaccucgacagcaaggugggcggcaacuacaacuaccuguaccggcuguuccggaagagcaaccugaagcccuucgagcgggacaucagcaccgagaucuaccaagccggcuccaccccuugcaacggcgugaagggcuucaacugcuacuucccucugcagagcuacggcuuccagcccaccuacggcgugggcuaccagcccuaccgggugguggugcugagcuucgagcugcugcacgccccagccaccguguguggccccaagaagagcaccaaccuggugaagaacaagugcgugaacuucaacuucaacggccuuaccggcaccggcgugcugaccgagagcaacaagaaauuccugcccuuucagcaguucggccgggacaucgccgacaccaccgacgcugugcgggauccccagacccuggagauccuggacaucaccccuugcagcuucggcggcgugagcgugaucaccccaggcaccaacaccagcaaccagguggccgugcuguaccagggcgugaacugcaccgaggugcccguggccauccacgccgaccagcugacacccaccuggcgggucuacagcaccggcagcaacguguuccagacccgggccgguugccugaucggcgccgagcacgugaacaacagcuacgagugcgacauccccaucggcgccggcaucugugccagcuaccagacccagaccaauucaccccggagggcaaggagcguggccagccagagcaucaucgccuacaccaugagccugggcguggagaacagcguggccuacagcaacaacagcaucgccauccccaccaacuucaccaucagcgugaccaccgagauucugcccgugagcaugaccaagaccagcguggacugcaccauguacaucugcggcgacagcaccgagugcagcaaccugcugcugcaguacggcagcuucugcacccagcugaaccgggcccugaccggcaucgccguggagcaggacaagaacacccaggagguguucgcccaggugaagcagaucuacaagaccccucccaucaaggacuucggcggcuucaacuucagccagauccugcccgaccccagcaagcccagcaagcggagcuucaucgaggaccugcuguucaacaaggugacccuagccgacgccggcuucaucaagcaguacggcgacugccucggcgacauagccgcccgggaccugaucugcgcccagaaguucaacggccugaccgugcugccuccccugcugaccgacgagaugaucgcccaguacaccagcgcccuguuagccggaaccaucaccagcggcuggacuuucggcgcuggagccgcucugcagauccccuucgccaugcagauggccuaccgguucaacggcaucggcgugacccagaacgugcuguacgagaaccagaagcugaucgccaaccaguucaacagcgccaucggcaagauccaggacagccugagcagcaccgcuagcgcccugggcaagcugcaggacguggugaaccagaacgcccaggcccugaacacccuggugaagcagcugagcagcaacuucggcgccaucagcagcgugcugaacgacauccugagccggcuggacaaggucgaggccgaggugcagaucgaccggcugaucacuggccggcugcagagccugcagaccuacgugacccagcagcugauccgggccgccgagauucgggccagcgccaaccuggccgccaccaagaugagcgagugcgugcugggccagagcaagcggguggacuucugcggcaagggcuaccaccugaugagcuuuccccagagcgcaccccacggagugguguuccugcacgugaccuacgugcccgcccaggagaagaacuucaccaccgccccagccaucugccacgacggcaaggcccacuuuccccgggagggcguguucgugagcaacggcacccacugguucgugacccagcggaacuucuacgagccccagaucaucaccaccgacaacaccuucgugagcggcaacugcgacguggugaucggcaucgugaacaacaccguguacgauccccugcagcccgagcuggacagcuucaaggaggagcuggacaaguacuucaagaaucacaccagccccgacguggaccugggcgacaucagcggcaucaacgccagcguggugaacauccagaaggagaucgaucggcugaacgagguggccaagaaccugaacgagagccugaucgaccugcaggagcugggcaaguacgagcaguacaucaaguggcccugguacaucuggcugggcuucaucgccggccugaucgccaucgugauggugaccaucaugcugugcugcaugaccagcugcugcagcugccugaagggcuguugcagcugcggcagcugcugcaaguucgacgaggacgacagcgagcccgugcugaagggcgugaagcugcacuacaccugaggacuagucccuguucccagagcccacuuuuuuuucuuuuuuugaaauaaaauagccugucuuucagaucuaaaaaaaaaaaaaaaaaaaaaaaaaaaaaaaaaaaaaaaaaaaaaaaaaaaaaaaaaaaaaaaaaaaaaaaaaaaaaaaaaaaaaaaaaaaaaaaaaaaa

SEQ ID NO: 25000 - RNA, 4167 nt, Artificial Sequence
  SARS-CoV-2/Wuhan/WIV05/2019__EPI_ISL_402128 spike protein mRNA gc (1-1273)(E484K_D614G)
aggagagggcgcuuggcuugcaaggacccugagcugcggcauugaagcacacccaacccaacucgacugaagucagccucacugaaccggaucugagaaucuucucucucugggcuugccagggcucuccgaaccuagcuagcauccucuucaauuccaacuagaaagcuuaccauguucguguuccuggugcugcugccccuggugagcagccagugcgugaaccugaccacccggacccagcugccaccagccuacaccaacagcuucacccggggcgucuacuaccccgacaagguguuccggagcagcguccugcacagcacccaggaccuguuccugcccuucuucagcaacgugaccugguuccacgccauccacgugagcggcaccaacggcaccaagcgguucgacaaccccgugcugcccuucaacgacggcguguacuucgccagcaccgagaagagcaacaucauccggggcuggaucuucggcaccacccuggacagcaagacccagagccugcugaucgugaauaacgccaccaacguggugaucaaggugugcgaguuccaguucugcaacgaccccuuccugggcguguacuaccacaagaacaacaagagcuggauggagagcgaguuccggguguacagcagcgccaacaacugcaccuucgaguacgugagccagcccuuccugauggaccuggagggcaagcagggcaacuucaagaaccugcgggaguucguguucaagaacaucgacggcuacuucaagaucuacagcaagcacaccccaaucaaccuggugcgggaucugccccagggcuucucagcccuggagccccugguggaccugcccaucggcaucaacaucacccgguuccagacccugcuggcccugcaccggagcuaccugaccccaggcgacagcagcagcggguggacagcaggcgcggcugcuuacuacgugggcuaccugcagccccggaccuuccugcugaaguacaacgagaacggcaccaucaccgacgccguggacugcgcccuggacccucugagcgagaccaagugcacccugaagagcuucaccguggagaagggcaucuaccagaccagcaacuuccgggugcagcccaccgagagcaucgugcgguuccccaacaucaccaaccugugccccuucggcgagguguucaacgccacccgguucgccagcguguacgccuggaaccggaagcggaucagcaacugcguggccgacuacagcgugcuguacaacagcgccagcuucagcaccuucaagugcuacggcgugagccccaccaagcugaacgaccugugcuucaccaacguguacgccgacagcuucgugauccguggcgacgaggugcggcagaucgcacccggccagacaggcaagaucgccgacuacaacuacaagcugcccgacgacuucaccggcugcgugaucgccuggaacagcaacaaccucgacagcaaggugggcggcaacuacaacuaccuguaccggcuguuccggaagagcaaccugaagcccuucgagcgggacaucagcaccgagaucuaccaagccggcuccaccccuugcaacggcgugaagggcuucaacugcuacuucccucugcagagcuacggcuuccagcccaccaacggcgugggcuaccagcccuaccgggugguggugcugagcuucgagcugcugcacgccccagccaccguguguggccccaagaagagcaccaaccuggugaagaacaagugcgugaacuucaacuucaacggccuuaccggcaccggcgugcugaccgagagcaacaagaaauuccugcccuuucagcaguucggccgggacaucgccgacaccaccgacgcugugcgggauccccagacccuggagauccuggacaucaccccuugcagcuucggcggcgugagcgugaucaccccaggcaccaacaccagcaaccagguggccgugcuguaccagggcgugaacugcaccgaggugcccguggccauccacgccgaccagcugacacccaccuggcgggucuacagcaccggcagcaacguguuccagacccgggccgguugccugaucggcgccgagcacgugaacaacagcuacgagugcgacauccccaucggcgccggcaucugugccagcuaccagacccagaccaauucaccccggagggcaaggagcguggccagccagagcaucaucgccuacaccaugagccugggcgccgagaacagcguggccuacagcaacaacagcaucgccauccccaccaacuucaccaucagcgugaccaccgagauucugcccgugagcaugaccaagaccagcguggacugcaccauguacaucugcggcgacagcaccgagugcagcaaccugcugcugcaguacggcagcuucugcacccagcugaaccgggcccugaccggcaucgccguggagcaggacaagaacacccaggagguguucgcccaggugaagcagaucuacaagaccccucccaucaaggacuucggcggcuucaacuucagccagauccugcccgaccccagcaagcccagcaagcggagcuucaucgaggaccugcuguucaacaaggugacccuagccgacgccggcuucaucaagcaguacggcgacugccucggcgacauagccgcccgggaccugaucugcgcccagaaguucaacggccugaccgugcugccuccccugcugaccgacgagaugaucgcccaguacaccagcgcccuguuagccggaaccaucaccagcggcuggacuuucggcgcuggagccgcucugcagauccccuucgccaugcagauggccuaccgguucaacggcaucggcgugacccagaacgugcuguacgagaaccagaagcugaucgccaaccaguucaacagcgccaucggcaagauccaggacagccugagcagcaccgcuagcgcccugggcaagcugcaggacguggugaaccagaacgcccaggcccugaacacccuggugaagcagcugagcagcaacuucggcgccaucagcagcgugcugaacgacauccugagccggcuggacaaggucgaggccgaggugcagaucgaccggcugaucacuggccggcugcagagccugcagaccuacgugacccagcagcugauccgggccgccgagauucgggccagcgccaaccuggccgccaccaagaugagcgagugcgugcugggccagagcaagcggguggacuucugcggcaagggcuaccaccugaugagcuuuccccagagcgcaccccacggagugguguuccugcacgugaccuacgugcccgcccaggagaagaacuucaccaccgccccagccaucugccacgacggcaaggcccacuuuccccgggagggcguguucgugagcaacggcacccacugguucgugacccagcggaacuucuacgagccccagaucaucaccaccgacaacaccuucgugagcggcaacugcgacguggugaucggcaucgugaacaacaccguguacgauccccugcagcccgagcuggacagcuucaaggaggagcuggacaaguacuucaagaaucacaccagccccgacguggaccugggcgacaucagcggcaucaacgccagcguggugaacauccagaaggagaucgaucggcugaacgagguggccaagaaccugaacgagagccugaucgaccugcaggagcugggcaaguacgagcaguacaucaaguggcccugguacaucuggcugggcuucaucgccggccugaucgccaucgugauggugaccaucaugcugugcugcaugaccagcugcugcagcugccugaagggcuguugcagcugcggcagcugcugcaaguucgacgaggacgacagcgagcccgugcugaagggcgugaagcugcacuacaccugaggacuagucccuguucccagagcccacuuuuuuuucuuuuuuugaaauaaaauagccugucuuucagaucuaaaaaaaaaaaaaaaaaaaaaaaaaaaaaaaaaaaaaaaaaaaaaaaaaaaaaaaaaaaaaaaaaaaaaaaaaaaaaaaaaaaaaaaaaaaaaaaaaaaa

SEQ ID NO: 25001 - RNA, 4167 nt, Artificial Sequence
  SARS-CoV-2/Wuhan/WIV05/2019__EPI_ISL_402128 spike protein mRNA gc (1-1273)(L18F_T20N_P26S_D138Y_R190S_K417T_E484K_N501Y_D614G_H655Y _T1027I)
aggagagggcgcuuggcuugcaaggacccugagcugcggcauugaagcacacccaacccaacucgacugaagucagccucacugaaccggaucugagaaucuucucucucugggcuugccagggcucuccgaaccuagcuagcauccucuucaauuccaacuagaaagcuuaccauguucguguuccuggugcugcugccccuggugagcagccagugcgugaacuucaccaaccggacccagcugccaagcgccuacaccaacagcuucacccggggcgucuacuaccccgacaagguguuccggagcagcguccugcacagcacccaggaccuguuccugcccuucuucagcaacgugaccugguuccacgccauccacgugagcggcaccaacggcaccaagcgguucgacaaccccgugcugcccuucaacgacggcguguacuucgccagcaccgagaagagcaacaucauccggggcuggaucuucggcaccacccuggacagcaagacccagagccugcugaucgugaauaacgccaccaacguggugaucaaggugugcgaguuccaguucugcaacuaccccuuccugggcguguacuaccacaagaacaacaagagcuggauggagagcgaguuccggguguacagcagcgccaacaacugcaccuucgaguacgugagccagcccuuccugauggaccuggagggcaagcagggcaacuucaagaaccugagcgaguucguguucaagaacaucgacggcuacuucaagaucuacagcaagcacaccccaaucaaccuggugcgggaucugccccagggcuucucagcccuggagccccugguggaccugcccaucggcaucaacaucacccgguuccagacccugcuggcccugcaccggagcuaccugaccccaggcgacagcagcagcggguggacagcaggcgcggcugcuuacuacgugggcuaccugcagccccggaccuuccugcugaaguacaacgagaacggcaccaucaccgacgccguggacugcgcccuggacccucugagcgagaccaagugcacccugaagagcuucaccguggagaagggcaucuaccagaccagcaacuuccgggugcagcccaccgagagcaucgugcgguuccccaacaucaccaaccugugccccuucggcgagguguucaacgccacccgguucgccagcguguacgccuggaaccggaagcggaucagcaacugcguggccgacuacagcgugcuguacaacagcgccagcuucagcaccuucaagugcuacggcgugagccccaccaagcugaacgaccugugcuucaccaacguguacgccgacagcuucgugauccguggcgacgaggugcggcagaucgcacccggccagacaggcaccaucgccgacuacaacuacaagcugcccgacgacuucaccggcugcgugaucgccuggaacagcaacaaccucgacagcaaggugggcggcaacuacaacuaccuguaccggcuguuccggaagagcaaccugaagcccuucgagcgggacaucagcaccgagaucuaccaagccggcuccaccccuugcaacggcgugaagggcuucaacugcuacuucccucugcagagcuacggcuuccagcccaccuacggcgugggcuaccagcccuaccgggugguggugcugagcuucgagcugcugcacgccccagccaccguguguggccccaagaagagcaccaaccuggugaagaacaagugcgugaacuucaacuucaacggccuuaccggcaccggcgugcugaccgagagcaacaagaaauuccugcccuuucagcaguucggccgggacaucgccgacaccaccgacgcugugcgggauccccagacccuggagauccuggacaucaccccuugcagcuucggcggcgugagcgugaucaccccaggcaccaacaccagcaaccagguggccgugcuguaccagggcgugaacugcaccgaggugcccguggccauccacgccgaccagcugacacccaccuggcgggucuacagcaccggcagcaacguguuccagacccgggccgguugccugaucggcgccgaguacgugaacaacagcuacgagugcgacauccccaucggcgccggcaucugugccagcuaccagacccagaccaauucaccccggagggcaaggagcguggccagccagagcaucaucgccuacaccaugagccugggcgccgagaacagcguggccuacagcaacaacagcaucgccauccccaccaacuucaccaucagcgugaccaccgagauucugcccgugagcaugaccaagaccagcguggacugcaccauguacaucugcggcgacagcaccgagugcagcaaccugcugcugcaguacggcagcuucugcacccagcugaaccgggcccugaccggcaucgccguggagcaggacaagaacacccaggagguguucgcccaggugaagcagaucuacaagaccccucccaucaaggacuucggcggcuucaacuucagccagauccugcccgaccccagcaagcccagcaagcggagcuucaucgaggaccugcuguucaacaaggugacccuagccgacgccggcuucaucaagcaguacggcgacugccucggcgacauagccgcccgggaccugaucugcgcccagaaguucaacggccugaccgugcugccuccccugcugaccgacgagaugaucgcccaguacaccagcgcccuguuagccggaaccaucaccagcggcuggacuuucggcgcuggagccgcucugcagauccccuucgccaugcagauggccuaccgguucaacggcaucggcgugacccagaacgugcuguacgagaaccagaagcugaucgccaaccaguucaacagcgccaucggcaagauccaggacagccugagcagcaccgcuagcgcccugggcaagcugcaggacguggugaaccagaacgcccaggcccugaacacccuggugaagcagcugagcagcaacuucggcgccaucagcagcgugcugaacgacauccugagccggcuggacaaggucgaggccgaggugcagaucgaccggcugaucacuggccggcugcagagccugcagaccuacgugacccagcagcugauccgggccgccgagauucgggccagcgccaaccuggccgccaucaagaugagcgagugcgugcugggccagagcaagcggguggacuucugcggcaagggcuaccaccugaugagcuuuccccagagcgcaccccacggagugguguuccugcacgugaccuacgugcccgcccaggagaagaacuucaccaccgccccagccaucugccacgacggcaaggcccacuuuccccgggagggcguguucgugagcaacggcacccacugguucgugacccagcggaacuucuacgagccccagaucaucaccaccgacaacaccuucgugagcggcaacugcgacguggugaucggcaucgugaacaacaccguguacgauccccugcagcccgagcuggacagcuucaaggaggagcuggacaaguacuucaagaaucacaccagccccgacguggaccugggcgacaucagcggcaucaacgccagcguggugaacauccagaaggagaucgaucggcugaacgagguggccaagaaccugaacgagagccugaucgaccugcaggagcugggcaaguacgagcaguacaucaaguggcccugguacaucuggcugggcuucaucgccggccugaucgccaucgugauggugaccaucaugcugugcugcaugaccagcugcugcagcugccugaagggcuguugcagcugcggcagcugcugcaaguucgacgaggacgacagcgagcccgugcugaagggcgugaagcugcacuacaccugaggacuagucccuguucccagagcccacuuuuuuuucuuuuuuugaaauaaaauagccugucuuucagaucuaaaaaaaaaaaaaaaaaaaaaaaaaaaaaaaaaaaaaaaaaaaaaaaaaaaaaaaaaaaaaaaaaaaaaaaaaaaaaaaaaaaaaaaaaaaaaaaaaaaa

SEQ ID NO: 25002 - RNA, 4167 nt, Artificial Sequence
  SARS-CoV-2/Wuhan/WIV05/2019__EPI_ISL_402128 spike protein mRNA gc (1-1273)(S13I_W152C_L452R_D614G)
aggagagggcgcuuggcuugcaaggacccugagcugcggcauugaagcacacccaacccaacucgacugaagucagccucacugaaccggaucugagaaucuucucucucugggcuugccagggcucuccgaaccuagcuagcauccucuucaauuccaacuagaaagcuuaccauguucguguuccuggugcugcugccccuggugagcauccagugcgugaaccugaccacccggacccagcugccaccagccuacaccaacagcuucacccggggcgucuacuaccccgacaagguguuccggagcagcguccugcacagcacccaggaccuguuccugcccuucuucagcaacgugaccugguuccacgccauccacgugagcggcaccaacggcaccaagcgguucgacaaccccgugcugcccuucaacgacggcguguacuucgccagcaccgagaagagcaacaucauccggggcuggaucuucggcaccacccuggacagcaagacccagagccugcugaucgugaauaacgccaccaacguggugaucaaggugugcgaguuccaguucugcaacgaccccuuccugggcguguacuaccacaagaacaacaagagcugcauggagagcgaguuccggguguacagcagcgccaacaacugcaccuucgaguacgugagccagcccuuccugauggaccuggagggcaagcagggcaacuucaagaaccugcgggaguucguguucaagaacaucgacggcuacuucaagaucuacagcaagcacaccccaaucaaccuggugcgggaucugccccagggcuucucagcccuggagccccugguggaccugcccaucggcaucaacaucacccgguuccagacccugcuggcccugcaccggagcuaccugaccccaggcgacagcagcagcggguggacagcaggcgcggcugcuuacuacgugggcuaccugcagccccggaccuuccugcugaaguacaacgagaacggcaccaucaccgacgccguggacugcgcccuggacccucugagcgagaccaagugcacccugaagagcuucaccguggagaagggcaucuaccagaccagcaacuuccgggugcagcccaccgagagcaucgugcgguuccccaacaucaccaaccugugccccuucggcgagguguucaacgccacccgguucgccagcguguacgccuggaaccggaagcggaucagcaacugcguggccgacuacagcgugcuguacaacagcgccagcuucagcaccuucaagugcuacggcgugagccccaccaagcugaacgaccugugcuucaccaacguguacgccgacagcuucgugauccguggcgacgaggugcggcagaucgcacccggccagacaggcaagaucgccgacuacaacuacaagcugcccgacgacuucaccggcugcgugaucgccuggaacagcaacaaccucgacagcaaggugggcggcaacuacaacuaccgcuaccggcuguuccggaagagcaaccugaagcccuucgagcgggacaucagcaccgagaucuaccaagccggcuccaccccuugcaacggcguggagggcuucaacugcuacuucccucugcagagcuacggcuuccagcccaccaacggcgugggcuaccagcccuaccgggugguggugcugagcuucgagcugcugcacgccccagccaccguguguggccccaagaagagcaccaaccuggugaagaacaagugcgugaacuucaacuucaacggccuuaccggcaccggcgugcugaccgagagcaacaagaaauuccugcccuuucagcaguucggccgggacaucgccgacaccaccgacgcugugcgggauccccagacccuggagauccuggacaucaccccuugcagcuucggcggcgugagcgugaucaccccaggcaccaacaccagcaaccagguggccgugcuguaccagggcgugaacugcaccgaggugcccguggccauccacgccgaccagcugacacccaccuggcgggucuacagcaccggcagcaacguguuccagacccgggccgguugccugaucggcgccgagcacgugaacaacagcuacgagugcgacauccccaucggcgccggcaucugugccagcuaccagacccagaccaauucaccccggagggcaaggagcguggccagccagagcaucaucgccuacaccaugagccugggcgccgagaacagcguggccuacagcaacaacagcaucgccauccccaccaacuucaccaucagcgugaccaccgagauucugcccgugagcaugaccaagaccagcguggacugcaccauguacaucugcggcgacagcaccgagugcagcaaccugcugcugcaguacggcagcuucugcacccagcugaaccgggcccugaccggcaucgccguggagcaggacaagaacacccaggagguguucgcccaggugaagcagaucuacaagaccccucccaucaaggacuucggcggcuucaacuucagccagauccugcccgaccccagcaagcccagcaagcggagcuucaucgaggaccugcuguucaacaaggugacccuagccgacgccggcuucaucaagcaguacggcgacugccucggcgacauagccgcccgggaccugaucugcgcccagaaguucaacggccugaccgugcugccuccccugcugaccgacgagaugaucgcccaguacaccagcgcccuguuagccggaaccaucaccagcggcuggacuuucggcgcuggagccgcucugcagauccccuucgccaugcagauggccuaccgguucaacggcaucggcgugacccagaacgugcuguacgagaaccagaagcugaucgccaaccaguucaacagcgccaucggcaagauccaggacagccugagcagcaccgcuagcgcccugggcaagcugcaggacguggugaaccagaacgcccaggcccugaacacccuggugaagcagcugagcagcaacuucggcgccaucagcagcgugcugaacgacauccugagccggcuggacaaggucgaggccgaggugcagaucgaccggcugaucacuggccggcugcagagccugcagaccuacgugacccagcagcugauccgggccgccgagauucgggccagcgccaaccuggccgccaccaagaugagcgagugcgugcugggccagagcaagcggguggacuucugcggcaagggcuaccaccugaugagcuuuccccagagcgcaccccacggagugguguuccugcacgugaccuacgugcccgcccaggagaagaacuucaccaccgccccagccaucugccacgacggcaaggcccacuuuccccgggagggcguguucgugagcaacggcacccacugguucgugacccagcggaacuucuacgagccccagaucaucaccaccgacaacaccuucgugagcggcaacugcgacguggugaucggcaucgugaacaacaccguguacgauccccugcagcccgagcuggacagcuucaaggaggagcuggacaaguacuucaagaaucacaccagccccgacguggaccugggcgacaucagcggcaucaacgccagcguggugaacauccagaaggagaucgaucggcugaacgagguggccaagaaccugaacgagagccugaucgaccugcaggagcugggcaaguacgagcaguacaucaaguggcccugguacaucuggcugggcuucaucgccggccugaucgccaucgugauggugaccaucaugcugugcugcaugaccagcugcugcagcugccugaagggcuguugcagcugcggcagcugcugcaaguucgacgaggacgacagcgagcccgugcugaagggcgugaagcugcacuacaccugaggacuagucccuguucccagagcccacuuuuuuuucuuuuuuugaaauaaaauagccugucuuucagaucuaaaaaaaaaaaaaaaaaaaaaaaaaaaaaaaaaaaaaaaaaaaaaaaaaaaaaaaaaaaaaaaaaaaaaaaaaaaaaaaaaaaaaaaaaaaaaaaaaaaa

SEQ ID NO: 25003 - RNA, 4167 nt, Artificial Sequence
  SARS-CoV-2/Wuhan/WIV05/2019__EPI_ISL_402128 spike protein mRNA gc (1-1273)
aggagagggcgcuuggcuugcaaggacccugagcugcggcauugaagcacacccaacccaacucgacugaagucagccucacugaaccggaucugagaaucuucucucucugggcuugccagggcucuccgaaccuagcuagcauccucuucaauuccaacuagaaagcuuaccauguucguguuccuggugcugcugccccuggugagcagccagugcgugaaccugaccacccggacccagcugcccccugccuacaccaacagcuucacccggggcguguacuaccccgacaagguguuccggagcagcgugcugcacagcacccaggaccuguuccugcccuucuucagcaacgugaccugguuccacgccauccacgugagcggcaccaacggcaccaagcgguucgacaacccagugcugcccuucaacgacggcguguacuucgccagcaccgagaagucaaacaucauccggggcuggaucuucggcaccacccuggacagcaagacacagagccugcugaucgugaacaacgccaccaacguggugaucaaggugugcgaguuucaguucugcaacgaccccuuccugggcguguacuaccacaagaacaacaagagcuggauggagagcgaguuccgggucuacagcagcgcuaacaauugcaccuucgaguacgugagccagcccuuccugauggaccucgagggcaagcagggcaacuucaagaaccugcgggaguucguguucaagaacaucgauggcuacuucaagaucuacagcaagcacacccccaucaaccuggugcgggaccugccccagggauucagcgcccuggagccucugguggaccugcccaucggcaucaacaucaccagguuccagacccugcuggcccugcaccggagcuaccugacccccggcgacagcagcagcggcuggaccgccggcgccgccgcauacuacgugggcuaccugcagccacggaccuuccugcugaaguacaacgagaacggcaccaucaccgacgccguggacugcgcccuggacccccugagcgagaccaagugcacccuaaagagcuucaccguggagaagggcaucuaccagaccagcaacuuccgggugcagcccacugagagcaucgugcgguuccccaacauuaccaaccugugucccuucggcgagguguucaacgccacccgguucgccagcguguacgccuggaaccggaagcggaucagcaacugcguggccgacuacagcgugcuguacaacagcgccagcuucagcaccuucaagugcuacggcgugagcccuaccaagcugaacgaccugugcuucaccaacguguacgcugacagcuucgugauccggggcgacgaggugcggcagaucgcccccggccagaccggcaagaucgccgacuacaacuacaagcugcccgacgacuucaccggcugcgugaucgccuggaacagcaacaaccuggacagcaaggugggcggcaacuacaacuaccuguaccggcuguuccguaagagcaaccugaagccauucgagcgggacaucagcaccgagaucuaccaggccggcagcacccccugcaacgguguggagggcuuuaacugcuacuucccccugcagagcuacggcuuccagcccaccaacggcgugggcuaccagcccuaccgggugguggugcugagcuucgagcugcugcacgcccccgccaccgugugcggcccuaaaaagagcaccaaccuggugaagaacaagugcgugaacuucaauuucaacggccugaccggcaccggcgugcugaccgagagcaacaagaaguuccugcccuuccagcaguucggccgggauaucgccgacaccaccgacgcagugcgggacccccagacccuggagauccuggacaucaccccaugcagcuucggcggcgugagcgucaucacccccggcacaaacaccagcaaccagguggccgugcuguaccaggacgugaacugcaccgaggugcccguggccauccacgccgaccagcugacccccaccuggcggguguacagcaccggaagcaacguguuccagacccgggccggcugccugaucggcgccgagcacgugaacaacuccuacgagugcgacauccccaucggcgcuggcaucugcgccagcuaccagacccagaccaacagcccccggcgggcccggagcguggccagccagagcaucaucgccuacaccaugagcuuaggcgccgagaacagcguggccuacagcaacaacagcaucgcgaucccuaccaacuucaccaucagcgugaccaccgagauacugcccgugagcaugaccaagaccagcguggacuguaccauguacaucugcggcgacagcaccgagugcagcaaccugcugcugcaguacggcagcuucugcacccagcugaaccgggcccugaccggcaucgccguggagcaggacaagaacacccaagagguguucgcccaggugaagcagaucuacaagacucccccaaucaaggacuucggcggcuucaacuucagccagauccugcccgaccccagcaagcccagcaagcggagcuucaucgaggaccugcuguucaacaaggugacccuggccgacgccggcuucaucaagcaguacggcgauugccugggcgacaucgccgcucgggaccugaucugcgcccagaaguucaacgggcugaccgugcugcccccucugcugaccgacgagaugaucgcccaguacaccagcgcccugcuugccggcaccaucaccagcggcuggaccuucggcgccggcgcagcccugcagauccccuucgccaugcagauggccuaccgguucaacggcaucggcgugacccagaacgugcuguacgagaaccagaagcugaucgccaaccaguucaacagcgccaucggcaagauccaggacagccugagcagcaccgccagcgcccugggcaagcugcaggacguggugaaccagaacgcucaggcccugaacacccuggugaagcagcugagcagcaacuucggcgccaucagcucagugcugaaugacauccugagcaggcuggacaagguggaggccgaggugcagaucgaccggcugaucaccggccggcugcagagccugcagaccuacgugacccagcagcugauccgggccgccgagauccgggccagcgccaaccuggcagccaccaagaugagcgagugcgugcugggccagagcaagcggguggacuuuugcggcaagggcuaccaccugaugagcuucccccagagcgccccacacggcgugguguuccuccacgucacauacgugcccgcccaggagaagaacuucaccaccgcccccgccauuugccacgacggcaaggcucacuucccccgggagggcguguucgugagcaacggaacccacugguucgugacccagcggaacuucuacgagccccagaucaucaccaccgacaacaccuucgugagcggcaacugcgacguggugaucggcaucgugaacaacaccguguacgacccccugcagccugagcuggacagcuucaaggaggagcuggacaaguacuucaagaaccacaccagccccgauguggaccugggcgacaucagcggcaucaacgccagcguggugaacauccagaaggagaucgaccggcugaacgagguggccaagaaccugaacgagagccugaucgaccugcaggagcugggcaaguacgagcaguacaucaaguggcccugguacaucuggcugggcuucaucgccggccugaucgccaucgugauggugaccaucaugcugugcugcaugaccagcugcuguagcugccugaagggcugcugcagcugcggcagcugcugcaaguucgacgaggacgacagcgagccagugcugaagggcgugaagcugcacuacaccugaggacuagucccuguucccagagcccacuuuuuuuucuuuuuuugaaauaaaauagccugucuuucagaucuaaaaaaaaaaaaaaaaaaaaaaaaaaaaaaaaaaaaaaaaaaaaaaaaaaaaaaaaaaaaaaaaaaaaaaaaaaaaaaaaaaaaaaaaaaaaaaaaaaaa

SEQ ID NO: 25004 - RNA, 4167 nt, Artificial Sequence
  SARS-CoV-2/Wuhan/WIV05/2019__EPI_ISL_402128 spike protein mRNA gc (1-1273)(D614G)
aggagagggcgcuuggcuugcaaggacccugagcugcggcauugaagcacacccaacccaacucgacugaagucagccucacugaaccggaucugagaaucuucucucucugggcuugccagggcucuccgaaccuagcuagcauccucuucaauuccaacuagaaagcuuaccauguucguguuccuggugcugcugccccuggugagcagccagugcgugaaccugaccacccggacccagcugcccccugccuacaccaacagcuucacccggggcguguacuaccccgacaagguguuccggagcagcgugcugcacagcacccaggaccuguuccugcccuucuucagcaacgugaccugguuccacgccauccacgugagcggcaccaacggcaccaagcgguucgacaacccagugcugcccuucaacgacggcguguacuucgccagcaccgagaagucaaacaucauccggggcuggaucuucggcaccacccuggacagcaagacacagagccugcugaucgugaacaacgccaccaacguggugaucaaggugugcgaguuucaguucugcaacgaccccuuccugggcguguacuaccacaagaacaacaagagcuggauggagagcgaguuccgggucuacagcagcgcuaacaauugcaccuucgaguacgugagccagcccuuccugauggaccucgagggcaagcagggcaacuucaagaaccugcgggaguucguguucaagaacaucgauggcuacuucaagaucuacagcaagcacacccccaucaaccuggugcgggaccugccccagggauucagcgcccuggagccucugguggaccugcccaucggcaucaacaucaccagguuccagacccugcuggcccugcaccggagcuaccugacccccggcgacagcagcagcggcuggaccgccggcgccgccgcauacuacgugggcuaccugcagccacggaccuuccugcugaaguacaacgagaacggcaccaucaccgacgccguggacugcgcccuggacccccugagcgagaccaagugcacccuaaagagcuucaccguggagaagggcaucuaccagaccagcaacuuccgggugcagcccacugagagcaucgugcgguuccccaacauuaccaaccugugucccuucggcgagguguucaacgccacccgguucgccagcguguacgccuggaaccggaagcggaucagcaacugcguggccgacuacagcgugcuguacaacagcgccagcuucagcaccuucaagugcuacggcgugagcccuaccaagcugaacgaccugugcuucaccaacguguacgcugacagcuucgugauccggggcgacgaggugcggcagaucgcccccggccagaccggcaagaucgccgacuacaacuacaagcugcccgacgacuucaccggcugcgugaucgccuggaacagcaacaaccuggacagcaaggugggcggcaacuacaacuaccuguaccggcuguuccguaagagcaaccugaagccauucgagcgggacaucagcaccgagaucuaccaggccggcagcacccccugcaacgguguggagggcuuuaacugcuacuucccccugcagagcuacggcuuccagcccaccaacggcgugggcuaccagcccuaccgggugguggugcugagcuucgagcugcugcacgcccccgccaccgugugcggcccuaaaaagagcaccaaccuggugaagaacaagugcgugaacuucaauuucaacggccugaccggcaccggcgugcugaccgagagcaacaagaaguuccugcccuuccagcaguucggccgggauaucgccgacaccaccgacgcagugcgggacccccagacccuggagauccuggacaucaccccaugcagcuucggcggcgugagcgucaucacccccggcacaaacaccagcaaccagguggccgugcuguaccagggagugaacugcaccgaggugcccguggccauccacgccgaccagcugacccccaccuggcggguguacagcaccggcagcaacguguuccagacccgggccggcugccugaucggcgccgagcacgugaacaacuccuacgagugcgacauccccaucggcgcuggcaucugcgccagcuaccagacccagaccaacagcccccggcgggcccggagcguggccagccagagcaucaucgccuacaccaugagcuuaggcgccgagaacagcguggccuacagcaacaacagcaucgcgaucccuaccaacuucaccaucagcgugaccaccgagauacugcccgugagcaugaccaagaccagcguggacuguaccauguacaucugcggcgacagcaccgagugcagcaaccugcugcugcaguacggcagcuucugcacccagcugaaccgggcccugaccggcaucgccguggagcaggacaagaacacccaagagguguucgcccaggugaagcagaucuacaagacucccccaaucaaggacuucggcggcuucaacuucagccagauccugcccgaccccagcaagcccagcaagcggagcuucaucgaggaccugcuguucaacaaggugacccuggccgacgccggcuucaucaagcaguacggcgacugccugggggauaucgccgcucgggaccugaucugcgcccagaaguucaacggccugaccgugcugcccccucugcugaccgacgagaugaucgcccaguacaccagcgcccugcuugccggcaccaucaccagcggcuggaccuucggcgccggcgcagcccugcagauccccuucgccaugcagauggccuaccgguucaacggcaucggcgugacccagaacgugcuguacgagaaccagaagcugaucgccaaccaguucaacagcgccaucggcaagauccaggacagccugagcagcaccgccagcgcccugggcaagcugcaggacguggugaaccagaacgcucaggcccugaacacccuggugaagcagcugagcagcaacuucggcgccaucagcucagugcugaaugacauccugagcaggcuggacaagguggaggccgaggugcagaucgaccggcugaucaccggccggcugcagagccugcagaccuacgugacccagcagcugauccgggccgccgagauccgggccagcgccaaccuggcagccaccaagaugagcgagugcgugcugggccagagcaagcggguggacuuuugcggcaagggcuaccaccugaugagcuucccccagagcgccccacacggcgugguguuccuccacgucacauacgugcccgcccaggagaagaacuucaccaccgcccccgccauuugccacgacggcaaggcucacuucccccgggagggaguguucgugagcaacggcacccacugguucgugacccagcggaacuucuacgagccccagaucaucaccaccgacaacaccuucgugagcggcaacugcgacguggugaucggcaucgugaacaacaccguguacgacccccugcagccugagcuggacagcuucaaggaggagcuggacaaguacuucaagaaccacaccagccccgacguggaucugggcgacaucagcggcaucaacgccagcguggugaacauccagaaggagaucgaccggcugaacgagguggccaagaaccugaacgagagccugaucgaccugcaggagcugggcaaguacgagcaguacaucaaguggcccugguacaucuggcugggcuucaucgccggccugaucgccaucgugauggugaccaucaugcugugcugcaugaccagcugcuguagcugccugaagggcugcugcagcugcggcagcugcugcaaguucgacgaggacgacagcgagccagugcugaagggcgugaagcugcacuacaccugaggacuagucccuguucccagagcccacuuuuuuuucuuuuuuugaaauaaaauagccugucuuucagaucuaaaaaaaaaaaaaaaaaaaaaaaaaaaaaaaaaaaaaaaaaaaaaaaaaaaaaaaaaaaaaaaaaaaaaaaaaaaaaaaaaaaaaaaaaaaaaaaaaaaa

SEQ ID NO: 25005 - RNA, 4167 nt, Artificial Sequence
  SARS-CoV-2/Wuhan/WIV05/2019__EPI_ISL_402128 spike protein mRNA gc (1-1273)(A222V_D614G)
aggagagggcgcuuggcuugcaaggacccugagcugcggcauugaagcacacccaacccaacucgacugaagucagccucacugaaccggaucugagaaucuucucucucugggcuugccagggcucuccgaaccuagcuagcauccucuucaauuccaacuagaaagcuuaccauguucguguuccuggugcugcugccccuggugagcagccagugcgugaaccugaccacccggacccagcugcccccugccuacaccaacagcuucacccggggcguguacuaccccgacaagguguuccggagcagcgugcugcacagcacccaggaccuguuccugcccuucuucagcaacgugaccugguuccacgccauccacgugagcggcaccaacggcaccaagcgguucgacaacccagugcugcccuucaacgacggcguguacuucgccagcaccgagaagucaaacaucauccggggcuggaucuucggcaccacccuggacagcaagacacagagccugcugaucgugaacaacgccaccaacguggugaucaaggugugcgaguuucaguucugcaacgaccccuuccugggcguguacuaccacaagaacaacaagagcuggauggagagcgaguuccgggucuacagcagcgcuaacaauugcaccuucgaguacgugagccagcccuuccugauggaccucgagggcaagcagggcaacuucaagaaccugcgggaguucguguucaagaacaucgauggcuacuucaagaucuacagcaagcacacccccaucaaccuggugcgggaccugccccagggauucagcgugcuggagccucugguggaccugcccaucggcaucaacaucaccagguuccagacccugcuggcccugcaccggagcuaccugacccccggcgacagcagcagcggcuggaccgccggcgccgccgccuacuacgugggcuaccugcagccacggaccuuccugcugaaguacaacgagaacggcaccaucaccgacgcaguggacugcgcccuggacccccugagcgagaccaagugcacccuaaagagcuucaccguggagaagggcaucuaccagaccagcaacuuccgggugcagcccacugagagcaucgugcgguuccccaacauuaccaaccugugucccuucggcgagguguucaacgccacccgguucgccagcguguacgccuggaaccggaagcggaucagcaacugcguggccgacuacagcgugcuguacaacagcgccagcuucagcaccuucaagugcuacggcgugagcccuaccaagcugaacgaccugugcuucaccaacguguacgccgacagcuucgugauccggggcgacgaggugcggcagaucgcucccggccagaccggcaagaucgccgacuacaacuacaagcugcccgacgacuucaccggcugcgugaucgccuggaacagcaacaaccuggacagcaaggugggcggcaacuacaacuaccuguaccggcuguuccguaagagcaaccugaagccauucgagcgggacaucagcaccgagaucuaccaggccggcagcacccccugcaacgguguggagggcuuuaacugcuacuucccccugcagagcuacggcuuccagcccaccaacggcgugggcuaccagcccuaccgggugguggugcugagcuucgagcugcugcacgcccccgccaccgugugcggcccuaaaaagagcaccaaccuggugaagaacaagugcgugaacuucaauuucaacggccugaccggcaccggcgugcugaccgagagcaacaagaaguuccugcccuuccagcaguucggccgggauaucgccgacaccaccgacgccgugcgggacccccagacccuggagauccuggacaucaccccaugcagcuucggcggcgucagcgugaucacccccggcacaaacaccagcaaccagguggcagugcuguaccagggagugaacugcaccgaggugcccguggccauccacgccgaccagcugacccccaccuggcggguguacagcaccggcagcaacguguuccagacccgggccggcugccugaucggcgccgagcacgugaacaacuccuacgagugcgacauccccaucggcgccggcaucugcgcuagcuaccagacccagaccaacagcccccggcgggcccggagcguggccagccagagcaucaucgccuacaccaugagcuuaggcgccgagaacagcguggccuacagcaacaacagcaucgccaucccuaccaacuucaccaucagcgugaccaccgagauacugcccgugagcaugaccaagaccagcguggacuguaccauguacaucugcggcgacagcaccgagugcagcaaccugcugcugcaguacggcagcuucugcacccagcugaaccgggcgcugaccggcaucgccguggagcaggacaagaacacccaagagguguucgcccaggugaagcagaucuacaagacucccccaaucaaggacuucggcggcuucaacuucagccagauccugcccgaccccagcaagcccagcaagcggagcuucaucgaggaccugcuguucaacaaggugacccuggccgacgccggcuucaucaagcaguacggcgacugccugggggauaucgccgcccgggaccugaucugcgcucagaaguucaacggccugaccgugcugcccccucugcugaccgacgagaugaucgcccaguacaccagcgcccugcuugccggcaccaucaccagcggcuggaccuucggcgccggcgccgcacugcagauccccuucgccaugcagauggccuaccgguucaacggcaucggcgugacccagaacgugcuguacgagaaccagaagcugaucgccaaccaguucaacagcgccaucggcaagauccaggacagccugagcagcaccgccagcgcccugggcaagcugcaggacguggugaaccagaacgcccaggcucugaacacccuggugaagcagcugagcagcaacuucggcgccaucagcucagugcugaaugacauccugagcaggcuggacaagguggaggccgaggugcagaucgaccggcugaucaccggccggcugcagagccugcagaccuacgugacccagcagcugauccgggccgccgagauccgggccagcgccaaccuggccgcaaccaagaugagcgagugcgugcugggccagagcaagcggguggacuuuugcggcaagggcuaccaccugaugagcuucccccagagcgccccacacggcguggucuuccuccacgugacauacgugcccgcccaggagaagaacuucaccaccgcccccgccauuugccacgacggcaaggcccacuucccccgggagggaguguucgugagcaacggcacccacugguucgugacccagcggaacuucuacgagccccagaucaucaccaccgacaacaccuucgugagcggcaacugcgacguggugaucggcaucgugaacaacaccguguacgacccccugcagccugagcuggacagcuucaaggaggagcuggacaaguacuucaagaaccacaccagccccgacguggaucugggcgacaucagcggcaucaacgcuagcguggugaacauccagaaggagaucgaccggcugaacgagguggccaagaaccugaacgagagccugaucgaccugcaggagcugggcaaguacgagcaguacaucaaguggcccugguacaucuggcugggcuucaucgccggccugaucgccaucgugauggugaccaucaugcugugcugcaugaccagcugcuguagcugccugaagggcugcugcagcugcggcagcugcugcaaguucgacgaggacgacagcgagccagugcugaagggcgugaagcugcacuacaccugaggacuagucccuguucccagagcccacuuuuuuuucuuuuuuugaaauaaaauagccugucuuucagaucuaaaaaaaaaaaaaaaaaaaaaaaaaaaaaaaaaaaaaaaaaaaaaaaaaaaaaaaaaaaaaaaaaaaaaaaaaaaaaaaaaaaaaaaaaaaaaaaaaaaa

SEQ ID NO: 25006 - RNA, 4167 nt, Artificial Sequence
  SARS-CoV-2/Wuhan/WIV05/2019__EPI_ISL_402128 spike protein mRNA gc (1-1273)(N439K_D614G)
aggagagggcgcuuggcuugcaaggacccugagcugcggcauugaagcacacccaacccaacucgacugaagucagccucacugaaccggaucugagaaucuucucucucugggcuugccagggcucuccgaaccuagcuagcauccucuucaauuccaacuagaaagcuuaccauguucguguuccuggugcugcugccccuggugagcagccagugcgugaaccugaccacccggacccagcugcccccugccuacaccaacagcuucacccggggcguguacuaccccgacaagguguuccggagcagcgugcugcacagcacccaggaccuguuccugcccuucuucagcaacgugaccugguuccacgccauccacgugagcggcaccaacggcaccaagcgguucgacaacccagugcugcccuucaacgacggcguguacuucgccagcaccgagaagucaaacaucauccggggcuggaucuucggcaccacccuggacagcaagacacagagccugcugaucgugaacaacgccaccaacguggugaucaaggugugcgaguuucaguucugcaacgaccccuuccugggcguguacuaccacaagaacaacaagagcuggauggagagcgaguuccgggucuacagcagcgcuaacaauugcaccuucgaguacgugagccagcccuuccugauggaccucgagggcaagcagggcaacuucaagaaccugcgggaguucguguucaagaacaucgauggcuacuucaagaucuacagcaagcacacccccaucaaccuggugcgggaccugccccagggauucagcgcccuggagccucugguggaccugcccaucggcaucaacaucaccagguuccagacccugcuggcccugcaccggagcuaccugacccccggcgacagcagcagcggcuggaccgccggcgccgccgcauacuacgugggcuaccugcagccacggaccuuccugcugaaguacaacgagaacggcaccaucaccgacgccguggacugcgcccuggacccccugagcgagaccaagugcacccuaaagagcuucaccguggagaagggcaucuaccagaccagcaacuuccgggugcagcccacugagagcaucgugcgguuccccaacauuaccaaccugugucccuucggcgagguguucaacgccacccgguucgccagcguguacgccuggaaccggaagcggaucagcaacugcguggccgacuacagcgugcuguacaacagcgccagcuucagcaccuucaagugcuacggcgugagcccuaccaagcugaacgaccugugcuucaccaacguguacgcugacagcuucgugauccggggcgacgaggugcggcagaucgcccccggccagaccggcaagaucgccgacuacaacuacaagcugcccgacgacuucaccggcugcgugaucgccuggaacagcaagaaccuggacagcaaggugggcggcaacuacaacuaccuguaccggcuguuccguaagagcaaccugaagccauucgagcgggacaucagcaccgagaucuaccaggccggcagcacccccugcaacgguguggagggcuuuaacugcuacuucccccugcagagcuacggcuuccagcccaccaacggcgugggcuaccagcccuaccgggugguggugcugagcuucgagcugcugcacgcccccgccaccgugugcggcccuaaaaagagcaccaaccuggugaagaacaagugcgugaacuucaacuucaauggccugaccggcaccggcgugcugaccgagagcaacaagaaguuccugcccuuccagcaguucggccgggauaucgccgacaccaccgacgcagugcgggacccccagacccuggagauccuggacaucaccccaugcagcuucggcggcgugagcgucaucacccccggcacaaacaccagcaaccagguggccgugcuguaccagggagugaacugcaccgaggugcccguggccauccacgccgaccagcugacccccaccuggcggguguacagcaccggcagcaacguguuccagacccgggccggcugccugaucggcgccgagcacgugaacaacuccuacgagugcgacauccccaucggcgcuggcaucugcgccagcuaccagacccagaccaacagcccccggcgggcccggagcguggccagccagagcaucaucgccuacaccaugagcuuaggcgccgagaacagcguggccuacagcaacaacagcaucgcgaucccuaccaacuucaccaucagcgugaccaccgagauacugcccgugagcaugaccaagaccagcguggacuguaccauguacaucugcggcgacagcaccgagugcagcaaccugcugcugcaguacggcagcuucugcacccagcugaaccgggcccugaccggcaucgccguggagcaggacaagaacacccaagagguguucgcccaggugaagcagaucuacaagacucccccaaucaaggacuucggcggcuucaacuucagccagauccugcccgaccccagcaagcccagcaagcggagcuucaucgaggaccugcuguucaacaaggugacccuggccgacgccggcuucaucaagcaguacggcgacugccugggggauaucgccgcucgggaccugaucugcgcccagaaguucaacggccugaccgugcugcccccucugcugaccgacgagaugaucgcccaguacaccagcgcccugcuugccggcaccaucaccagcggcuggaccuucggcgccggcgcagcccugcagauccccuucgccaugcagauggccuaccgguucaacggcaucggcgugacccagaacgugcuguacgagaaccagaagcugaucgccaaccaguucaacagcgccaucggcaagauccaggacagccugagcagcaccgccagcgcccugggcaagcugcaggacguggugaaccagaacgcucaggcccugaacacccuggugaagcagcugagcagcaacuucggcgccaucagcucagugcugaacgacauccugagcaggcuggacaagguggaggccgaggugcagaucgaccggcugaucaccggccggcugcagagccugcagaccuacgugacccagcagcugauccgggccgccgagauccgggccagcgccaaucuggcagccaccaagaugagcgagugcgugcugggccagagcaagcggguggacuuuugcggcaagggcuaccaccugaugagcuucccccagagcgccccacacggcgugguguuccuccacgucacauacgugcccgcccaggagaagaacuucaccaccgcccccgccauuugccacgacggcaaggcucacuucccccgggagggaguguucgugagcaacggcacccacugguucgugacccagcggaacuucuacgagccccagaucaucaccaccgacaacaccuucgugagcggcaacugcgacguggugaucggcaucgugaacaacaccguguacgacccccugcagccugagcuggacagcuucaaggaggagcuggacaaguacuucaagaaccacaccagccccgacguggaucugggcgacaucagcggcaucaacgccagcguggugaacauccagaaggagaucgaccggcugaacgagguggccaagaaccugaacgagagccugaucgaccugcaggagcugggcaaguacgagcaguacaucaaguggcccugguacaucuggcugggcuucaucgccggccugaucgccaucgugauggugaccaucaugcugugcugcaugaccagcugcuguagcugccugaagggcugcugcagcugcggcagcugcugcaaguucgacgaggacgacagcgagccagugcugaagggcgugaagcugcacuacaccugaggacuagucccuguucccagagcccacuuuuuuuucuuuuuuugaaauaaaauagccugucuuucagaucuaaaaaaaaaaaaaaaaaaaaaaaaaaaaaaaaaaaaaaaaaaaaaaaaaaaaaaaaaaaaaaaaaaaaaaaaaaaaaaaaaaaaaaaaaaaaaaaaaaaa

SEQ ID NO: 25007 - RNA, 4167 nt, Artificial Sequence
  SARS-CoV-2/Wuhan/WIV05/2019__EPI_ISL_402128 spike protein mRNA gc (1-1273)(S477N_D614G)
aggagagggcgcuuggcuugcaaggacccugagcugcggcauugaagcacacccaacccaacucgacugaagucagccucacugaaccggaucugagaaucuucucucucugggcuugccagggcucuccgaaccuagcuagcauccucuucaauuccaacuagaaagcuuaccauguucguguuccuggugcugcugccccuggugagcagccagugcgugaaccugaccacccggacccagcugcccccugccuacaccaacagcuucacccggggcguguacuaccccgacaagguguuccggagcagcgugcugcacagcacccaggaccuguuccugcccuucuucagcaacgugaccugguuccacgccauccacgugagcggcaccaacggcaccaagcgguucgacaacccagugcugcccuucaacgacggcguguacuucgccagcaccgagaagucaaacaucauccggggcuggaucuucggcaccacccuggacagcaagacacagagccugcugaucgugaacaacgccaccaacguggugaucaaggugugcgaguuucaguucugcaacgaccccuuccugggcguguacuaccacaagaacaacaagagcuggauggagagcgaguuccgggucuacagcagcgcuaacaauugcaccuucgaguacgugagccagcccuuccugauggaccucgagggcaagcagggcaacuucaagaaccugcgggaguucguguucaagaacaucgauggcuacuucaagaucuacagcaagcacacccccaucaaccuggugcgggaccugccccagggauucagcgcccuggagccucugguggaccugcccaucggcaucaacaucaccagguuccagacccugcuggcccugcaccggagcuaccugacccccggcgacagcagcagcggcuggaccgccggcgccgccgcauacuacgugggcuaccugcagccacggaccuuccugcugaaguacaacgagaacggcaccaucaccgacgccguggacugcgcccuggacccccugagcgagaccaagugcacccuaaagagcuucaccguggagaagggcaucuaccagaccagcaacuuccgggugcagcccacugagagcaucgugcgguuccccaacauuaccaaccugugucccuucggcgagguguucaacgccacccgguucgccagcguguacgccuggaaccggaagcggaucagcaacugcguggccgacuacagcgugcuguacaacagcgccagcuucagcaccuucaagugcuacggcgugagcccuaccaagcugaacgaccugugcuucaccaacguguacgcugacagcuucgugauccggggcgacgaggugcggcagaucgcccccggccagaccggcaagaucgccgacuacaacuacaagcugcccgacgacuucaccggcugcgugaucgccuggaacagcaacaaccuggacagcaaggugggcggcaacuacaacuaccuguaccggcuguuccguaagagcaaccugaagccauucgagcgggacaucagcaccgagaucuaccaggccggcaacacccccugcaacgguguggagggcuuuaacugcuacuucccccugcagagcuacggcuuccagcccaccaacggcgugggcuaccagcccuaccgggugguggugcugagcuucgagcugcugcacgcccccgccaccgugugcggcccuaaaaagagcaccaaccuggugaagaacaagugcgugaauuucaacuucaacggccugaccggcaccggcgugcugaccgagagcaacaagaaguuccugcccuuccagcaguucggccgggauaucgccgacaccaccgacgcagugcgggacccccagacccuggagauccuggacaucaccccaugcagcuucggcggcgugagcgucaucacccccggcacaaacaccagcaaccagguggccgugcuguaccagggagugaacugcaccgaggugcccguggccauccacgccgaccagcugacccccaccuggcggguguacagcaccggcagcaacguguuccagacccgggccggcugccugaucggcgccgagcacgugaacaacagcuacgagugcgacauccccaucggcgcuggcaucugcgccuccuaccagacccagaccaacagcccccggcgggcccggagcguggccagccagagcaucaucgccuacaccaugagcuuaggcgccgagaacagcguggccuacagcaacaacagcaucgcgaucccuaccaacuucaccaucagcgugaccaccgagauacugcccgugagcaugaccaagaccagcguggacuguaccauguacaucugcggcgacagcaccgagugcagcaaccugcugcugcaguacggcagcuucugcacccagcugaaccgggcccugaccggcaucgccguggagcaggacaagaacacccaagagguguucgcccaggugaagcagaucuacaagacucccccaaucaaggacuucggcggcuucaacuucagccagauccugcccgaccccagcaagcccagcaagcggagcuucaucgaggaccugcuguucaacaaggugacccuggccgacgccggcuucaucaagcaguacggcgacugccugggggauaucgccgcucgggaccugaucugcgcccagaaguucaacggccugaccgugcugcccccucugcugaccgacgagaugaucgcccaguacaccagcgcccugcuugccggcaccaucaccagcggcuggaccuucggcgccggcgcagcccugcagauccccuucgccaugcagauggccuaccgguucaacggcaucggcgugacccagaacgugcuguacgagaaccagaagcugaucgccaaccaguucaacagcgccaucggcaagauccaggacagccugagcagcaccgccagcgcccugggcaagcugcaggacguggugaaccagaacgcucaggcccugaacacccuggugaagcagcugagcagcaauuucggcgccaucagcagcgugcugaacgacauccugucaaggcuggacaagguggaggccgaggugcagaucgaccggcugaucaccggccggcugcagagccugcagaccuacgugacccagcagcugauccgggccgccgagauccgggccagcgccaaccuggcagccaccaagaugagcgagugcgugcugggccagagcaagcggguggacuuuugcggcaagggcuaccaccugaugagcuucccccagagcgccccacacggcgugguguuccuccacgucacauacgugcccgcccaggagaagaacuucaccaccgcccccgccauuugccacgacggcaaggcucacuucccccgggagggaguguucgugagcaacggcacccacugguucgugacccagcggaacuucuacgagccccagaucaucaccaccgacaacaccuucgugagcggcaacugcgacguggugaucggcaucgugaacaacaccguguacgacccccugcagccugagcuggacagcuucaaggaggagcuggacaaguacuucaagaaccacaccagccccgacguggaucugggcgacaucagcggcaucaacgccagcguggugaacauccagaaggagaucgaccggcugaacgagguggccaagaaccugaacgagagccugaucgaccugcaggagcugggcaaguacgagcaguacaucaaguggcccugguacaucuggcugggcuucaucgccggccugaucgccaucgugauggugaccaucaugcugugcugcaugaccagcugcuguagcugccugaagggcugcugcagcugcggcagcugcugcaaguucgacgaggacgacagcgagccagugcugaagggcgugaagcugcacuacaccugaggacuagucccuguucccagagcccacuuuuuuuucuuuuuuugaaauaaaauagccugucuuucagaucuaaaaaaaaaaaaaaaaaaaaaaaaaaaaaaaaaaaaaaaaaaaaaaaaaaaaaaaaaaaaaaaaaaaaaaaaaaaaaaaaaaaaaaaaaaaaaaaaaaaa

SEQ ID NO: 25008 - RNA, 4167 nt, Artificial Sequence
  SARS-CoV-2/Wuhan/WIV05/2019__EPI_ISL_402128 spike protein mRNA gc (1-1273)(N501Y_D614G)
aggagagggcgcuuggcuugcaaggacccugagcugcggcauugaagcacacccaacccaacucgacugaagucagccucacugaaccggaucugagaaucuucucucucugggcuugccagggcucuccgaaccuagcuagcauccucuucaauuccaacuagaaagcuuaccauguucguguuccuggugcugcugccccuggugagcagccagugcgugaaccugaccacccggacccagcugcccccugccuacaccaacagcuucacccggggcguguacuaccccgacaagguguuccggagcagcgugcugcacagcacccaggaccuguuccugcccuucuucagcaacgugaccugguuccacgccauccacgugagcggcaccaacggcaccaagcgguucgacaacccagugcugcccuucaacgacggcguguacuucgccagcaccgagaagucaaacaucauccggggcuggaucuucggcaccacccuggacagcaagacacagagccugcugaucgugaacaacgccaccaacguggugaucaaggugugcgaguuucaguucugcaacgaccccuuccugggcguguacuaccacaagaacaacaagagcuggauggagagcgaguuccgggucuacagcagcgcuaacaauugcaccuucgaguacgugagccagcccuuccugauggaccucgagggcaagcagggcaacuucaagaaccugcgggaguucguguucaagaacaucgauggcuacuucaagaucuacagcaagcacacccccaucaaccuggugcgggaccugccccagggauucagcgcccuggagccucugguggaccugcccaucggcaucaacaucaccagguuccagacccugcuggcccugcaccggagcuaccugacccccggcgacagcagcagcggcuggaccgccggcgccgccgcauacuacgugggcuaccugcagccacggaccuuccugcugaaguacaacgagaacggcaccaucaccgacgccguggacugcgcccuggacccccugagcgagaccaagugcacccuaaagagcuucaccguggagaagggcaucuaccagaccagcaacuuccgggugcagcccacugagagcaucgugcgguuccccaacauuaccaaccugugucccuucggcgagguguucaacgccacccgguucgccagcguguacgccuggaaccggaagcggaucagcaacugcguggccgacuacagcgugcuguacaacagcgccagcuucagcaccuucaagugcuacggcgugagcccuaccaagcugaacgaccugugcuucaccaacguguacgcugacagcuucgugauccggggcgacgaggugcggcagaucgcccccggccagaccggcaagaucgccgacuacaacuacaagcugcccgacgacuucaccggcugcgugaucgccuggaacagcaacaaccuggacagcaaggugggcggcaacuacaacuaccuguaccggcuguuccguaagagcaaccugaagccauucgagcgggacaucagcaccgagaucuaccaggccggcagcacccccugcaacgguguggagggcuuuaacugcuacuucccccugcagagcuacggcuuccagcccaccuacggcgugggcuaccagcccuaccgggugguggugcugagcuucgagcugcugcacgcccccgccaccgugugcggcccuaaaaagagcaccaaccuggugaagaacaagugcgugaacuucaacuucaauggccugaccggcaccggcgugcugaccgagagcaacaagaaguuccugcccuuccagcaguucggccgggauaucgccgacaccaccgacgcagugcgggacccccagacccuggagauccuggacaucaccccaugcagcuucggcggcgugagcgucaucacccccggcacaaacaccagcaaccagguggccgugcuguaccagggagugaacugcaccgaggugcccguggccauccacgccgaccagcugacccccaccuggcggguguacagcaccggcagcaacguguuccagacccgggccggcugccugaucggcgccgagcacgugaacaacuccuacgagugcgacauccccaucggcgcuggcaucugcgccagcuaccagacccagaccaacagcccccggcgggcccggagcguggccagccagagcaucaucgccuacaccaugagcuuaggcgccgagaacagcguggccuacagcaacaacagcaucgcgaucccuaccaacuucaccaucagcgugaccaccgagauacugcccgugagcaugaccaagaccagcguggacuguaccauguacaucugcggcgacagcaccgagugcagcaaccugcugcugcaguacggcagcuucugcacccagcugaaccgggcccugaccggcaucgccguggagcaggacaagaacacccaagagguguucgcccaggugaagcagaucuacaagacucccccaaucaaggacuucggcggcuucaacuucagccagauccugcccgaccccagcaagcccagcaagcggagcuucaucgaggaccugcuguucaacaaggugacccuggccgacgccggcuucaucaagcaguacggcgacugccugggggauaucgccgcucgggaccugaucugcgcccagaaguucaacggccugaccgugcugcccccucugcugaccgacgagaugaucgcccaguacaccagcgcccugcuugccggcaccaucaccagcggcuggaccuucggcgccggcgcagcccugcagauccccuucgccaugcagauggccuaccgguucaacggcaucggcgugacccagaacgugcuguacgagaaccagaagcugaucgccaaccaguucaacagcgccaucggcaagauccaggacagccugagcagcaccgccagcgcccugggcaagcugcaggacguggugaaccagaacgcucaggcccugaacacccuggugaagcagcugagcagcaacuucggcgccaucagcucagugcugaacgacauccugagcaggcuggacaagguggaggccgaggugcagaucgaccggcugaucaccggccggcugcagagccugcagaccuacgugacccagcagcugauccgggccgccgagauccgggccagcgccaaucuggcagccaccaagaugagcgagugcgugcugggccagagcaagcggguggacuuuugcggcaagggcuaccaccugaugagcuucccccagagcgccccacacggcgugguguuccuccacgucacauacgugcccgcccaggagaagaacuucaccaccgcccccgccauuugccacgacggcaaggcucacuucccccgggagggaguguucgugagcaacggcacccacugguucgugacccagcggaacuucuacgagccccagaucaucaccaccgacaacaccuucgugagcggcaacugcgacguggugaucggcaucgugaacaacaccguguacgacccccugcagccugagcuggacagcuucaaggaggagcuggacaaguacuucaagaaccacaccagccccgacguggaucugggcgacaucagcggcaucaacgccagcguggugaacauccagaaggagaucgaccggcugaacgagguggccaagaaccugaacgagagccugaucgaccugcaggagcugggcaaguacgagcaguacaucaaguggcccugguacaucuggcugggcuucaucgccggccugaucgccaucgugauggugaccaucaugcugugcugcaugaccagcugcuguagcugccugaagggcugcugcagcugcggcagcugcugcaaguucgacgaggacgacagcgagccagugcugaagggcgugaagcugcacuacaccugaggacuagucccuguucccagagcccacuuuuuuuucuuuuuuugaaauaaaauagccugucuuucagaucuaaaaaaaaaaaaaaaaaaaaaaaaaaaaaaaaaaaaaaaaaaaaaaaaaaaaaaaaaaaaaaaaaaaaaaaaaaaaaaaaaaaaaaaaaaaaaaaaaaaa

SEQ ID NO: 25009 - RNA, 4161 nt, Artificial Sequence
  SARS-CoV-2/Wuhan/WIV05/2019__EPI_ISL_402128 spike protein mRNA gc (1-1273)(H69del_V70del_D614G)
aggagagggcgcuuggcuugcaaggacccugagcugcggcauugaagcacacccaacccaacucgacugaagucagccucacugaaccggaucugagaaucuucucucucugggcuugccagggcucuccgaaccuagcuagcauccucuucaauuccaacuagaaagcuuaccauguucguguuccuggugcugcugccccuggugagcagccagugcgugaaccugaccacccggacccagcugcccccugccuacaccaacagcuucacccggggcguguacuaccccgacaagguguuccggagcagcgugcugcacagcacccaggaccuguuccugcccuucuucagcaacgugaccugguuccacgccaucagcggcaccaacggcaccaagcgguucgacaacccagugcugcccuucaacgacggcguguacuucgccagcaccgagaagucaaacaucauccggggcuggaucuucggcaccacccuggacagcaagacacagagccugcugaucgugaacaacgccaccaacguggugaucaaggugugcgaguuucaguucugcaacgaccccuuccugggcguguacuaccacaagaacaacaagagcuggauggagagcgaguuccggguguacagcagcgcuaacaauugcaccuucgaguacgucagccagcccuuccugauggaccucgagggcaagcagggcaacuucaagaaccugcgggaguucguguucaagaacaucgauggcuacuucaagaucuacagcaagcacacccccaucaaccuggugcgggaccugccccagggauucagcgcccuggagccucugguggaccugcccaucggcaucaacaucaccagguuccagacccugcuggcccugcaccggagcuaccugacccccggcgacagcagcagcggcuggaccgccggcgccgccgcauacuacgugggcuaccugcagccacggaccuuccugcugaaguacaacgagaacggcaccaucaccgacgccguggacugcgcccuggacccccugagcgagaccaagugcacccuaaagagcuucaccguggagaagggcaucuaccagaccagcaacuuccgggugcagcccacugagagcaucgugcgguuccccaacauuaccaaccugugucccuucggcgagguguucaacgccacccgguucgccagcguguacgccuggaaccggaagcggaucagcaacugcguggccgacuacagcgugcuguacaacagcgccagcuucagcaccuucaagugcuacggcgugagcccuaccaagcugaacgaccugugcuucaccaacguguacgcugacagcuucgugauccggggcgacgaggugcggcagaucgcccccggccagaccggcaagaucgccgacuacaacuacaagcugcccgacgacuucaccggcugcgugaucgccuggaacagcaacaaccuggacagcaaggugggcggcaacuacaacuaccuguaccggcuguuccguaagagcaaccugaagccauucgagcgggacaucagcaccgagaucuaccaggccggcagcacccccugcaacgguguggagggcuuuaacugcuacuucccccugcagagcuacggcuuccagcccaccaacggcgugggcuaccagcccuaccgggugguggugcugagcuucgagcugcugcacgcccccgccaccgugugcggcccuaaaaagagcaccaaccuggugaagaacaagugcgugaacuucaauuucaacggccugaccggcaccggcgugcugaccgagagcaacaagaaguuccugcccuuccagcaguucggccgggauaucgccgacaccaccgacgcagugcgggacccccagacccuggagauccuggacaucaccccaugcagcuucggcggcgugagcgugaucacccccggcacaaacaccagcaaccaggucgccgugcuguaccagggagugaacugcaccgaggugcccguggccauccacgccgaccagcugacccccaccuggcggguguacagcaccggcagcaacguguuccagacccgggccggcugccugaucggcgccgagcacgugaacaacuccuacgagugcgacauccccaucggcgcuggcaucugcgccagcuaccagacccagaccaacagcccccggcgggcccggagcguggccagccagagcaucaucgccuacaccaugagcuuaggcgccgagaacagcguggccuacagcaacaacagcaucgcgaucccuaccaacuucaccaucagcgugaccaccgagauacugcccgugagcaugaccaagaccagcguggacuguaccauguacaucugcggcgacagcaccgagugcagcaaccugcugcugcaguacggcagcuucugcacccagcugaaccgggcccugaccggcaucgccguggagcaggacaagaacacccaagagguguucgcccaggugaagcagaucuacaagacucccccaaucaaggacuucggcggcuucaacuucagccagauccugcccgaccccagcaagcccagcaagcggagcuucaucgaggaccugcuguucaacaaggugacccuggccgacgccggcuucaucaagcaguacggcgacugccugggggauaucgccgcucgggaccugaucugcgcccagaaguucaacggccugaccgugcugcccccucugcugaccgacgagaugaucgcccaguacaccagcgcccugcuugccggcaccaucaccagcggcuggaccuucggcgccggcgcagcccugcagauccccuucgccaugcagauggccuaccgguucaacggcaucggcgugacccagaacgugcuguacgagaaccagaagcugaucgccaaccaguucaacagcgccaucggcaagauccaggacagccugagcagcaccgccagcgcccugggcaagcugcaggacguggugaaccagaacgcucaggcccugaacacccuggugaagcagcugagcagcaacuucggcgccaucagcucagugcugaaugacauccugagcaggcuggacaagguggaggccgaggugcagaucgaccggcugaucaccggccggcugcagagccugcagaccuacgugacccagcagcugauccgggccgccgagauccgggccagcgccaaccuggcagccaccaagaugagcgagugcgugcugggccagagcaagcggguggacuuuugcggcaagggcuaccaccugaugagcuucccccagagcgccccacacggcgugguguuccuccacgugacauacguccccgcccaggagaagaacuucaccaccgcccccgccauuugccacgacggcaaggcucacuucccccgggagggaguguucgugagcaacggcacccacugguucgugacccagcggaacuucuacgagccccagaucaucaccaccgacaacaccuucgugagcggcaacugcgacguggugaucggcaucgugaacaacaccguguacgacccccugcagccugagcuggacagcuucaaggaggagcuggacaaguacuucaagaaccacaccagccccgacguggaucugggcgacaucagcggcaucaacgccagcguggugaacauccagaaggagaucgaccggcugaacgagguggccaagaaccugaacgagagccugaucgaccugcaggagcugggcaaguacgagcaguacaucaaguggcccugguacaucuggcugggcuucaucgccggccugaucgccaucgugauggugaccaucaugcugugcugcaugaccagcugcuguagcugccugaagggcugcugcagcugcggcagcugcugcaaguucgacgaggacgacagcgagccagugcugaagggcgugaagcugcacuacaccugaggacuagucccuguucccagagcccacuuuuuuuucuuuuuuugaaauaaaauagccugucuuucagaucuaaaaaaaaaaaaaaaaaaaaaaaaaaaaaaaaaaaaaaaaaaaaaaaaaaaaaaaaaaaaaaaaaaaaaaaaaaaaaaaaaaaaaaaaaaaaaaaaaaaa

SEQ ID NO: 25010 - RNA, 4167 nt, Artificial Sequence
  SARS-CoV-2/Wuhan/WIV05/2019__EPI_ISL_402128 spike protein mRNA gc (1-1273)(Y453F_D614G)
aggagagggcgcuuggcuugcaaggacccugagcugcggcauugaagcacacccaacccaacucgacugaagucagccucacugaaccggaucugagaaucuucucucucugggcuugccagggcucuccgaaccuagcuagcauccucuucaauuccaacuagaaagcuuaccauguucguguuccuggugcugcugccccuggugagcagccagugcgugaaccugaccacccggacccagcugcccccugccuacaccaacagcuucacccggggcguguacuaccccgacaagguguuccggagcagcgugcugcacagcacccaggaccuguuccugcccuucuucagcaacgugaccugguuccacgccauccacgugagcggcaccaacggcaccaagcgguucgacaacccagugcugcccuucaacgacggcguguacuucgccagcaccgagaagucaaacaucauccggggcuggaucuucggcaccacccuggacagcaagacacagagccugcugaucgugaacaacgccaccaacguggugaucaaggugugcgaguuucaguucugcaacgaccccuuccugggcguguacuaccacaagaacaacaagagcuggauggagagcgaguuccgggucuacagcagcgcuaacaauugcaccuucgaguacgugagccagcccuuccugauggaccucgagggcaagcagggcaacuucaagaaccugcgggaguucguguucaagaacaucgauggcuacuucaagaucuacagcaagcacacccccaucaaccuggugcgggaccugccccagggauucagcgcccuggagccucugguggaccugcccaucggcaucaacaucaccagguuccagacccugcuggcccugcaccggagcuaccugacccccggcgacagcagcagcggcuggaccgccggcgccgccgcauacuacgugggcuaccugcagccacggaccuuccugcugaaguacaacgagaacggcaccaucaccgacgccguggacugcgcccuggacccccugagcgagaccaagugcacccuaaagagcuucaccguggagaagggcaucuaccagaccagcaacuuccgggugcagcccacugagagcaucgugcgguuccccaacauuaccaaccugugucccuucggcgagguguucaacgccacccgguucgccagcguguacgccuggaaccggaagcggaucagcaacugcguggccgacuacagcgugcuguacaacagcgccagcuucagcaccuucaagugcuacggcgugagcccuaccaagcugaacgaccugugcuucaccaacguguacgcugacagcuucgugauccggggcgacgaggugcggcagaucgcccccggccagaccggcaagaucgccgacuacaacuacaagcugcccgacgacuucaccggcugcgugaucgccuggaacagcaacaaccuggacagcaaggugggcggcaacuacaacuaccuguuccggcuguuccguaagagcaaccugaagccauuugagcgggacaucagcaccgagaucuaccaggccggcagcacccccugcaacgguguggagggcuucaacugcuacuucccccugcagagcuacggcuuccagcccaccaacggcgugggcuaccagcccuaccgggugguggugcugagcuucgagcugcugcacgcccccgccaccgugugcggcccuaaaaagagcaccaaccuggugaagaacaagugcgugaacuucaauuucaacggccugaccggcaccggcgugcugaccgagagcaacaagaaguuccugcccuuccagcaguucggccgggauaucgccgacaccaccgacgcagugcgggacccccagacccuggagauccuggacaucaccccaugcagcuucggcggcgugagcgucaucacccccggcacaaacaccagcaaccagguggccgugcuguaccagggagugaacugcaccgaggugcccguggccauccacgccgaccagcugacccccaccuggcggguguacagcaccggcagcaacguguuccagacccgggccggcugccugaucggcgccgagcacgugaacaacuccuacgagugcgacauccccaucggcgcuggcaucugcgccagcuaccagacccagaccaacagcccccggcgggcccggagcguggccagccagagcaucaucgccuacaccaugagcuuaggcgccgagaacagcguggccuacagcaacaacagcaucgcgaucccuaccaacuucaccaucagcgugaccaccgagauacugcccgugagcaugaccaagaccagcguggacuguaccauguacaucugcggcgacagcaccgagugcagcaaccugcugcugcaguacggcagcuucugcacccagcugaaccgggcccugaccggcaucgccguggagcaggacaagaacacccaagagguguucgcccaggugaagcagaucuacaagacucccccaaucaaggacuucggcggcuucaacuucagccagauccugcccgaccccagcaagcccagcaagcggagcuucaucgaggaccugcuguucaacaaggugacccuggccgacgccggcuucaucaagcaguacggcgacugccugggggauaucgccgcucgggaccugaucugcgcccagaaguucaacggccugaccgugcugcccccucugcugaccgacgagaugaucgcccaguacaccagcgcccugcuugccggcaccaucaccagcggcuggaccuucggcgccggcgcagcccugcagauccccuucgccaugcagauggccuaccgguucaacggcaucggcgugacccagaacgugcuguacgagaaccagaagcugaucgccaaccaguucaacagcgccaucggcaagauccaggacagccugagcagcaccgccagcgcccugggcaagcugcaggacguggugaaccagaacgcucaggcccugaacacccuggugaagcagcugagcagcaacuuuggcgccaucagcucagugcugaaugacauccugagcaggcuggacaagguggaggccgaggugcagaucgaccggcugaucaccggccggcugcagagccugcagaccuacgugacccagcagcugauccgggccgccgagauccgggccagcgccaaccuggcagccaccaagaugagcgagugcgugcugggccagagcaagcggguggacuucugcggcaagggcuaccaccugaugagcuucccccagagcgccccacacggcgugguguuccuccacgucacauacgugcccgcccaggagaagaacuucaccaccgcccccgccauuugccacgacggcaaggcucacuucccccgggagggaguguucgugagcaacggcacccacugguucgugacccagcggaacuucuacgagccccagaucaucaccaccgacaacaccuucgugagcggcaacugcgacguggugaucggcaucgugaacaacaccguguacgacccccugcagccugagcuggacagcuucaaggaggagcuggacaaguacuucaagaaccacaccagccccgacguggaucugggcgacaucagcggcaucaacgccagcguggugaacauccagaaggagaucgaccggcugaacgagguggccaagaaccugaacgagagccugaucgaccugcaggagcugggcaaguacgagcaguacaucaaguggcccugguacaucuggcugggcuucaucgccggccugaucgccaucgugauggugaccaucaugcugugcugcaugaccagcugcuguagcugccugaagggcugcugcagcugcggcagcugcugcaaguucgacgaggacgacagcgagccagugcugaagggcgugaagcugcacuacaccugaggacuagucccuguucccagagcccacuuuuuuuucuuuuuuugaaauaaaauagccugucuuucagaucuaaaaaaaaaaaaaaaaaaaaaaaaaaaaaaaaaaaaaaaaaaaaaaaaaaaaaaaaaaaaaaaaaaaaaaaaaaaaaaaaaaaaaaaaaaaaaaaaaaaa

SEQ ID NO: 25011 - RNA, 4167 nt, Artificial Sequence
  SARS-CoV-2/Wuhan/WIV05/2019__EPI_ISL_402128 spike protein mRNA gc (1-1273)(D614G_I692V)
aggagagggcgcuuggcuugcaaggacccugagcugcggcauugaagcacacccaacccaacucgacugaagucagccucacugaaccggaucugagaaucuucucucucugggcuugccagggcucuccgaaccuagcuagcauccucuucaauuccaacuagaaagcuuaccauguucguguuccuggugcugcugccccuggugagcagccagugcgugaaccugaccacccggacccagcugcccccugccuacaccaacagcuucacccggggcguguacuaccccgacaagguguuccggagcagcgugcugcacagcacccaggaccuguuccugcccuucuucagcaacgugaccugguuccacgccauccacgugagcggcaccaacggcaccaagcgguucgacaacccagugcugcccuucaacgacggcguguacuucgccagcaccgagaagucaaacaucauccggggcuggaucuucggcaccacccuggacagcaagacacagagccugcugaucgugaacaacgccaccaacguggugaucaaggugugcgaguuucaguucugcaacgaccccuuccugggcguguacuaccacaagaacaacaagagcuggauggagagcgaguuccgggucuacagcagcgcuaacaauugcaccuucgaguacgugagccagcccuuccugauggaccucgagggcaagcagggcaacuucaagaaccugcgggaguucguguucaagaacaucgauggcuacuucaagaucuacagcaagcacacccccaucaaccuggugcgggaccugccccagggauucagcgcccuggagccucugguggaccugcccaucggcaucaacaucaccagguuccagacccugcuggcccugcaccggagcuaccugacccccggcgacagcagcagcggcuggaccgccggcgccgccgcauacuacgugggcuaccugcagccacggaccuuccugcugaaguacaacgagaacggcaccaucaccgacgccguggacugcgcccuggacccccugagcgagaccaagugcacccuaaagagcuucaccguggagaagggcaucuaccagaccagcaacuuccgggugcagcccacugagagcaucgugcgguuccccaacauuaccaaccugugucccuucggcgagguguucaacgccacccgguucgccagcguguacgccuggaaccggaagcggaucagcaacugcguggccgacuacagcgugcuguacaacagcgccagcuucagcaccuucaagugcuacggcgugagcccuaccaagcugaacgaccugugcuucaccaacguguacgcugacagcuucgugauccggggcgacgaggugcggcagaucgcccccggccagaccggcaagaucgccgacuacaacuacaagcugcccgacgacuucaccggcugcgugaucgccuggaacagcaacaaccuggacagcaaggugggcggcaacuacaacuaccuguaccggcuguuccguaagagcaaccugaagccauucgagcgggacaucagcaccgagaucuaccaggccggcagcacccccugcaacgguguggagggcuuuaacugcuacuucccccugcagagcuacggcuuccagcccaccaacggcgugggcuaccagcccuaccgggugguggugcugagcuucgagcugcugcacgcccccgccaccgugugcggcccuaaaaagagcaccaaccuggugaagaacaagugcgugaacuucaauuucaacggccugaccggcaccggcgugcugaccgagagcaacaagaaguuccugcccuuccagcaguucggccgggauaucgccgacaccaccgacgcagugcgggacccccagacccuggagauccuggacaucaccccaugcagcuucggcggcgugagcgucaucacccccggcacaaacaccagcaaccagguggccgugcuguaccagggagugaacugcaccgaggugcccguggccauccacgccgaccagcugacccccaccuggcggguguacagcaccggcagcaacguguuccagacccgggccggcugccugaucggcgccgagcacgugaacaacuccuacgagugcgacauccccaucggcgcuggcaucugcgccagcuaccagacccagaccaacagcccccggcgggcccggagcguggccagccagagcgugaucgccuacaccaugagcuuaggcgccgagaacagcguggccuacagcaacaacagcaucgcgaucccuaccaacuucaccaucagcgugaccaccgagauccugcccgugagcaugaccaagaccagcguggacuguaccauguacauaugcggcgacagcaccgagugcagcaaccugcugcugcaguacggcagcuucugcacccagcugaaccgggcccugaccggcaucgccguggagcaggacaagaacacccaagagguguucgcccaggugaagcagaucuacaagacucccccaaucaaggacuucggcggcuucaacuucagccagauccugcccgaccccagcaagcccagcaagcggagcuucaucgaggaccugcuguucaacaaggugacccuggccgacgccggcuucaucaagcaguacggcgacugccugggggauaucgccgcucgggaccugaucugcgcccagaaguucaacggccugaccgugcugcccccucugcugaccgacgagaugaucgcccaguacaccagcgcccugcuugccggcaccaucaccagcggcuggaccuucggcgccggcgcagcccugcagauccccuucgccaugcagauggccuaccgguucaacggcaucggcgugacccagaacgugcuguacgagaaccagaagcugaucgccaaccaguucaacagcgccaucggcaagauccaggacagccugagcagcaccgccagcgcccugggcaagcugcaggacguggugaaccagaacgcucaggcccugaacacccuggugaagcagcugagcagcaacuucggcgccaucagcucagugcugaaugacauccugagcaggcuggacaagguggaggccgaggugcagaucgaccggcugaucaccggccggcugcagagccugcagaccuacgugacccagcagcugauccgggccgccgagauccgggccagcgccaaccuggcagccaccaagaugagcgagugcgugcugggccagagcaagcggguggacuuuugcggcaagggcuaccaccugaugagcuucccccagagcgccccacacggcguggucuuccuccacgugacauacgugcccgcccaggagaagaacuucaccaccgcccccgccaucugccacgacggcaaggcucacuucccccgggagggaguguucgugagcaacggcacccacugguucgugacccagcggaacuucuacgagccccagauuaucaccaccgacaacaccuucgugagcggcaacugcgacguggugaucggcaucgugaacaacaccguguacgacccccugcagccugagcuggacagcuucaaggaggagcuggacaaguacuucaagaaccacaccagccccgacguggaucugggcgacaucagcggcaucaacgccagcguggugaacauccagaaggagaucgaccggcugaacgagguggccaagaaccugaacgagagccugaucgaccugcaggagcugggcaaguacgagcaguacaucaaguggcccugguacaucuggcugggcuucaucgccggccugaucgccaucgugauggugaccaucaugcugugcugcaugaccagcugcuguagcugccugaagggcugcugcagcugcggcagcugcugcaaguucgacgaggacgacagcgagccagugcugaagggcgugaagcugcacuacaccugaggacuagucccuguucccagagcccacuuuuuuuucuuuuuuugaaauaaaauagccugucuuucagaucuaaaaaaaaaaaaaaaaaaaaaaaaaaaaaaaaaaaaaaaaaaaaaaaaaaaaaaaaaaaaaaaaaaaaaaaaaaaaaaaaaaaaaaaaaaaaaaaaaaaa

SEQ ID NO: 25012 - RNA, 4167 nt, Artificial Sequence
  SARS-CoV-2/Wuhan/WIV05/2019__EPI_ISL_402128 spike protein mRNA gc (1-1273)(D614G_M1229I)
aggagagggcgcuuggcuugcaaggacccugagcugcggcauugaagcacacccaacccaacucgacugaagucagccucacugaaccggaucugagaaucuucucucucugggcuugccagggcucuccgaaccuagcuagcauccucuucaauuccaacuagaaagcuuaccauguucguguuccuggugcugcugccccuggugagcagccagugcgugaaccugaccacccggacccagcugcccccugccuacaccaacagcuucacccggggcguguacuaccccgacaagguguuccggagcagcgugcugcacagcacccaggaccuguuccugcccuucuucagcaacgugaccugguuccacgccauccacgugagcggcaccaacggcaccaagcgguucgacaacccagugcugcccuucaacgacggcguguacuucgccagcaccgagaagucaaacaucauccggggcuggaucuucggcaccacccuggacagcaagacacagagccugcugaucgugaacaacgccaccaacguggugaucaaggugugcgaguuucaguucugcaacgaccccuuccugggcguguacuaccacaagaacaacaagagcuggauggagagcgaguuccgggucuacagcagcgcuaacaauugcaccuucgaguacgugagccagcccuuccugauggaccucgagggcaagcagggcaacuucaagaaccugcgggaguucguguucaagaacaucgauggcuacuucaagaucuacagcaagcacacccccaucaaccuggugcgggaccugccccagggauucagcgcccuggagccucugguggaccugcccaucggcaucaacaucaccagguuccagacccugcuggcccugcaccggagcuaccugacccccggcgacagcagcagcggcuggaccgccggcgccgccgcauacuacgugggcuaccugcagccacggaccuuccugcugaaguacaacgagaacggcaccaucaccgacgccguggacugcgcccuggacccccugagcgagaccaagugcacccuaaagagcuucaccguggagaagggcaucuaccagaccagcaacuuccgggugcagcccacugagagcaucgugcgguuccccaacauuaccaaccugugucccuucggcgagguguucaacgccacccgguucgccagcguguacgccuggaaccggaagcggaucagcaacugcguggccgacuacagcgugcuguacaacagcgccagcuucagcaccuucaagugcuacggcgugagcccuaccaagcugaacgaccugugcuucaccaacguguacgcugacagcuucgugauccggggcgacgaggugcggcagaucgcccccggccagaccggcaagaucgccgacuacaacuacaagcugcccgacgacuucaccggcugcgugaucgccuggaacagcaacaaccuggacagcaaggugggcggcaacuacaacuaccuguaccggcuguuccguaagagcaaccugaagccauucgagcgggacaucagcaccgagaucuaccaggccggcagcacccccugcaacgguguggagggcuuuaacugcuacuucccccugcagagcuacggcuuccagcccaccaacggcgugggcuaccagcccuaccgggugguggugcugagcuucgagcugcugcacgcccccgccaccgugugcggcccuaaaaagagcaccaaccuggugaagaacaagugcgugaacuucaauuucaacggccugaccggcaccggcgugcugaccgagagcaacaagaaguuccugcccuuccagcaguucggccgggauaucgccgacaccaccgacgcagugcgggacccccagacccuggagauccuggacaucaccccaugcagcuucggcggcgugagcgucaucacccccggcacaaacaccagcaaccagguggccgugcuguaccagggagugaacugcaccgaggugcccguggccauccacgccgaccagcugacccccaccuggcggguguacagcaccggcagcaacguguuccagacccgggccggcugccugaucggcgccgagcacgugaacaacuccuacgagugcgacauccccaucggcgcuggcaucugcgccagcuaccagacccagaccaacagcccccggcgggcccggagcguggccagccagagcaucaucgccuacaccaugagcuuaggcgccgagaacagcguggccuacagcaacaacagcaucgcgaucccuaccaacuucaccaucagcgugaccaccgagauacugcccgugagcaugaccaagaccagcguggacuguaccauguacaucugcggcgacagcaccgagugcagcaaccugcugcugcaguacggcagcuucugcacccagcugaaccgggcccugaccggcaucgccguggagcaggacaagaacacccaagagguguucgcccaggugaagcagaucuacaagacucccccaaucaaggacuucggcggcuucaacuucagccagauccugcccgaccccagcaagcccagcaagcggagcuucaucgaggaccugcuguucaacaaggugacccuggccgacgccggcuucaucaagcaguacggcgacugccugggggauaucgccgcucgggaccugaucugcgcccagaaguucaacggccugaccgugcugcccccucugcugaccgacgagaugaucgcccaguacaccagcgcccugcuugccggcaccaucaccagcggcuggaccuucggcgccggcgcagcccugcagauccccuucgccaugcagauggccuaccgguucaacggcaucggcgugacccagaacgugcuguacgagaaccagaagcugaucgccaaccaguucaacagcgccaucggcaagauccaggacagccugagcagcaccgccagcgcccugggcaagcugcaggacguggugaaccagaacgcucaggcccugaacacccuggugaagcagcugagcagcaacuucggcgccaucagcucagugcugaaugacauccugagcaggcuggacaagguggaggccgaggugcagaucgaccggcugaucaccggccggcugcagagccugcagaccuacgugacccagcagcugauccgggccgccgagauccgggccagcgccaaccuggcagccaccaagaugagcgagugcgugcugggccagagcaagcggguggacuuuugcggcaagggcuaccaccugaugagcuucccccagagcgccccacacggcgugguguuccuccacgucacauacgugcccgcccaggagaagaacuucaccaccgcccccgccauuugccacgacggcaaggcucacuucccccgggagggaguguucgugagcaacggcacccacugguucgugacccagcggaacuucuacgagccccagaucaucaccaccgacaacaccuucgugagcggcaacugcgacguggugaucggcaucgugaacaacaccguguacgacccccugcagccugagcuggacagcuucaaggaggagcuggacaaguacuucaagaaccacaccagccccgacguggaucugggcgacaucagcggcaucaacgccagcguggugaacauccagaaggagaucgaccggcugaacgagguggccaagaaccugaacgagagccugaucgaccugcaggagcugggcaaguacgagcaguacaucaaguggcccugguacaucuggcugggcuucaucgccggccugaucgccaucgugaucgugaccaucaugcugugcugcaugaccagcugcuguagcugccugaagggcugcugcagcugcggcagcugcugcaaguucgacgaggacgacagcgagccagugcugaagggcgugaagcugcacuacaccugaggacuagucccuguucccagagcccacuuuuuuuucuuuuuuugaaauaaaauagccugucuuucagaucuaaaaaaaaaaaaaaaaaaaaaaaaaaaaaaaaaaaaaaaaaaaaaaaaaaaaaaaaaaaaaaaaaaaaaaaaaaaaaaaaaaaaaaaaaaaaaaaaaaaa

SEQ ID NO: 25013 - RNA, 4161 nt, Artificial Sequence
  SARS-CoV-2/Wuhan/WIV05/2019__EPI_ISL_402128 spike protein mRNA gc (1-1273)(H69del_V70del_A222V_Y453F_S477N_D614G_I692V)
aggagagggcgcuuggcuugcaaggacccugagcugcggcauugaagcacacccaacccaacucgacugaagucagccucacugaaccggaucugagaaucuucucucucugggcuugccagggcucuccgaaccuagcuagcauccucuucaauuccaacuagaaagcuuaccauguucguguuccuggugcugcugccccuggugagcagccagugcgugaaccugaccacccggacccagcugcccccugccuacaccaacagcuucacccggggcguguacuaccccgacaagguguuccggagcagcgugcugcacagcacccaggaccuguuccugcccuucuucagcaacgugaccugguuccacgccaucagcggcaccaacggcaccaagcgguucgacaacccagugcugcccuucaacgacggcguguacuucgccagcaccgagaagucaaacaucauccggggcuggaucuucggcaccacccuggacagcaagacacagagccugcugaucgugaacaacgccaccaacguggugaucaaggugugcgaguuucaguucugcaacgaccccuuccugggcguguacuaccacaagaacaacaagagcuggauggagagcgaguuccggguguacagcagcgcuaacaauugcaccuucgaguacgucagccagcccuuccugauggaccucgagggcaagcagggcaacuucaagaaccugcgggaguucguguucaagaacaucgauggcuacuucaagaucuacagcaagcacacccccaucaaccuggugcgggaccugccccagggauucagcgugcuggagccucugguggaccugcccaucggcaucaacaucaccagguuccagacccugcuggcccugcaccggagcuaccugacccccggcgacagcagcagcggcuggaccgccggcgccgccgccuacuacgugggcuaccugcagccacggaccuuccugcugaaguacaacgagaacggcaccaucaccgacgcaguggacugcgcccuggacccccugagcgagaccaagugcacccuaaagagcuucaccguggagaagggcaucuaccagaccagcaacuuccgggugcagcccacugagagcaucgugcgguuccccaacauuaccaaccugugucccuucggcgagguguucaacgccacccgguucgccagcguguacgccuggaaccggaagcggaucagcaacugcguggccgacuacagcgugcuguacaacagcgccagcuucagcaccuucaagugcuacggcgugagcccuaccaagcugaacgaccugugcuucaccaacguguacgccgacagcuucgugauccggggcgacgaggugcggcagaucgcucccggccagaccggcaagaucgccgacuacaacuacaagcugcccgacgacuucaccggcugcgugaucgccuggaacagcaacaaccuggacagcaaggugggcggcaacuacaacuaccuguuccggcuguuccguaagagcaaccugaagccauuugagcgggacaucagcaccgagaucuaccaggccggcaacacccccugcaacgguguggagggcuucaacugcuacuucccccugcagagcuacggcuuccagcccaccaacggcgugggcuaccagcccuaccgggugguggugcugagcuucgagcugcugcacgcccccgccaccgugugcggcccuaaaaagagcaccaaccuggugaagaacaagugcgugaauuucaacuucaacggccugaccggcaccggcgugcugaccgagagcaacaagaaguuccugcccuuccagcaguucggccgggauaucgccgacaccaccgacgccgugcgggacccccagacccuggagauccuggacaucaccccaugcagcuucggcggcgugagcgucaucacccccggcacaaacaccagcaaccagguggcagugcuguaccagggagugaacugcaccgaggugcccguggccauccacgccgaccagcugacccccaccuggcggguguacagcaccggcagcaacguguuccagacccgggccggcugccugaucggcgccgagcacgugaacaacagcuacgagugcgacauccccaucggcgccggcaucugcgcuuccuaccagacccagaccaacagcccccggcgggcccggagcguggccagccagagcgugaucgccuacaccaugagcuuaggcgccgagaacagcguggccuacagcaacaacagcaucgccaucccuaccaacuucaccaucagcgugaccaccgagauccugcccgugagcaugaccaagaccagcguggacuguaccauguacauaugcggcgacagcaccgagugcagcaaccugcugcugcaguacggcagcuucugcacccagcugaaccgggcgcugaccggcaucgccguggagcaggacaagaacacccaagagguguucgcccaggugaagcagaucuacaagacucccccaaucaaggacuucggcggcuucaacuucagccagauccugcccgaccccagcaagcccagcaagcggagcuucaucgaggaccugcuguucaacaaggugacccuggccgacgccggcuucaucaagcaguacggcgacugccugggggauaucgccgcccgggaccugaucugcgcucagaaguucaacggccugaccgugcugcccccucugcugaccgacgagaugaucgcccaguacaccagcgcccugcuugccggcaccaucaccagcggcuggaccuucggcgccggcgccgcacugcagauccccuucgccaugcagauggccuaccgguucaacggcaucggcgugacccagaacgugcuguacgagaaccagaagcugaucgccaaccaguucaacagcgccaucggcaagauccaggacagccugagcagcaccgccagcgcccugggcaagcugcaggacguggugaaccagaacgcccaggcucugaacacccuggugaagcagcugagcagcaauuuuggcgccaucagcagcgugcugaacgacauccugucaaggcuggacaagguggaggccgaggugcagaucgaccggcugaucaccggccggcugcagagccugcagaccuacgugacccagcagcugauccgggccgccgagauccgggccagcgccaaccuggccgcaaccaagaugagcgagugcgugcugggccagagcaagcggguggacuucugcggcaagggcuaccaccugaugagcuucccccagagcgccccacacggcguggucuuccuccacgugacauacgugcccgcccaggagaagaacuucaccaccgcccccgccaucugccacgacggcaaggcccacuucccccgggagggaguguucgugagcaacggcacccacugguucgugacccagcggaacuucuacgagccccagauuaucaccaccgacaacaccuucgugagcggcaacugcgacguggugaucggcaucgugaacaacaccguguacgacccccugcagccugagcuggacagcuucaaggaggagcuggacaaguacuucaagaaccacaccagccccgacguggaucugggcgacaucagcggcaucaacgcuagcguggugaacauccagaaggagaucgaccggcugaacgagguggccaagaaccugaacgagagccugaucgaccugcaggagcugggcaaguacgagcaguacaucaaguggcccugguacaucuggcugggcuucaucgccggccugaucgccaucgugauggugaccaucaugcugugcugcaugaccagcugcuguagcugccugaagggcugcugcagcugcggcagcugcugcaaguucgacgaggacgacagcgagccagugcugaagggcgugaagcugcacuacaccugaggacuagucccuguucccagagcccacuuuuuuuucuuuuuuugaaauaaaauagccugucuuucagaucuaaaaaaaaaaaaaaaaaaaaaaaaaaaaaaaaaaaaaaaaaaaaaaaaaaaaaaaaaaaaaaaaaaaaaaaaaaaaaaaaaaaaaaaaaaaaaaaaaaaa

SEQ ID NO: 25014 - RNA, 4161 nt, Artificial Sequence
  SARS-CoV-2/Wuhan/WIV05/2019__EPI_ISL_402128 spike protein mRNA gc (1-1273)(H69del_V70del_Y453F_D614G_I692V_M1229I)
aggagagggcgcuuggcuugcaaggacccugagcugcggcauugaagcacacccaacccaacucgacugaagucagccucacugaaccggaucugagaaucuucucucucugggcuugccagggcucuccgaaccuagcuagcauccucuucaauuccaacuagaaagcuuaccauguucguguuccuggugcugcugccccuggugagcagccagugcgugaaccugaccacccggacccagcugcccccugccuacaccaacagcuucacccggggcguguacuaccccgacaagguguuccggagcagcgugcugcacagcacccaggaccuguuccugcccuucuucagcaacgugaccugguuccacgccaucagcggcaccaacggcaccaagcgguucgacaacccagugcugcccuucaacgacggcguguacuucgccagcaccgagaagucaaacaucauccggggcuggaucuucggcaccacccuggacagcaagacacagagccugcugaucgugaacaacgccaccaacguggugaucaaggugugcgaguuucaguucugcaacgaccccuuccugggcguguacuaccacaagaacaacaagagcuggauggagagcgaguuccggguguacagcagcgcuaacaauugcaccuucgaguacgucagccagcccuuccugauggaccucgagggcaagcagggcaacuucaagaaccugcgggaguucguguucaagaacaucgauggcuacuucaagaucuacagcaagcacacccccaucaaccuggugcgggaccugccccagggauucagcgcccuggagccucugguggaccugcccaucggcaucaacaucaccagguuccagacccugcuggcccugcaccggagcuaccugacccccggcgacagcagcagcggcuggaccgccggcgccgccgcauacuacgugggcuaccugcagccacggaccuuccugcugaaguacaacgagaacggcaccaucaccgacgccguggacugcgcccuggacccccugagcgagaccaagugcacccuaaagagcuucaccguggagaagggcaucuaccagaccagcaacuuccgggugcagcccacugagagcaucgugcgguuccccaacauuaccaaccugugucccuucggcgagguguucaacgccacccgguucgccagcguguacgccuggaaccggaagcggaucagcaacugcguggccgacuacagcgugcuguacaacagcgccagcuucagcaccuucaagugcuacggcgugagcccuaccaagcugaacgaccugugcuucaccaacguguacgcugacagcuucgugauccggggcgacgaggugcggcagaucgcccccggccagaccggcaagaucgccgacuacaacuacaagcugcccgacgacuucaccggcugcgugaucgccuggaacagcaacaaccuggacagcaaggugggcggcaacuacaacuaccuguuccggcuguuccguaagagcaaccugaagccauuugagcgggacaucagcaccgagaucuaccaggccggcagcacccccugcaacgguguggagggcuucaacugcuacuucccccugcagagcuacggcuuccagcccaccaacggcgugggcuaccagcccuaccgggugguggugcugagcuucgagcugcugcacgcccccgccaccgugugcggcccuaaaaagagcaccaaccuggugaagaacaagugcgugaacuucaauuucaacggccugaccggcaccggcgugcugaccgagagcaacaagaaguuccugcccuuccagcaguucggccgggauaucgccgacaccaccgacgcagugcgggacccccagacccuggagauccuggacaucaccccaugcagcuucggcggcgugagcgugaucacccccggcacaaacaccagcaaccaggucgccgugcuguaccagggagugaacugcaccgaggugcccguggccauccacgccgaccagcugacccccaccuggcggguguacagcaccggcagcaacguguuccagacccgggccggcugccugaucggcgccgagcacgugaacaacuccuacgagugcgacauccccaucggcgcuggcaucugcgccagcuaccagacccagaccaacagcccccggcgggcccggagcguggccagccagagcgugaucgccuacaccaugagcuuaggcgccgagaacagcguggccuacagcaacaacagcaucgcgaucccuaccaacuucaccaucagcgugaccaccgagauccugcccgugagcaugaccaagaccagcguggacuguaccauguacauaugcggcgacagcaccgagugcagcaaccugcugcugcaguacggcagcuucugcacccagcugaaccgggcccugaccggcaucgccguggagcaggacaagaacacccaagagguguucgcccaggugaagcagaucuacaagacucccccaaucaaggacuucggcggcuucaacuucagccagauccugcccgaccccagcaagcccagcaagcggagcuucaucgaggaccugcuguucaacaaggugacccuggccgacgccggcuucaucaagcaguacggcgacugccugggggauaucgccgcucgggaccugaucugcgcccagaaguucaacggccugaccgugcugcccccucugcugaccgacgagaugaucgcccaguacaccagcgcccugcuugccggcaccaucaccagcggcuggaccuucggcgccggcgcagcccugcagauccccuucgccaugcagauggccuaccgguucaacggcaucggcgugacccagaacgugcuguacgagaaccagaagcugaucgccaaccaguucaacagcgccaucggcaagauccaggacagccugagcagcaccgccagcgcccugggcaagcugcaggacguggugaaccagaacgcucaggcccugaacacccuggugaagcagcugagcagcaacuuuggcgccaucagcucagugcugaaugacauccugagcaggcuggacaagguggaggccgaggugcagaucgaccggcugaucaccggccggcugcagagccugcagaccuacgugacccagcagcugauccgggccgccgagauccgggccagcgccaaccuggcagccaccaagaugagcgagugcgugcugggccagagcaagcggguggacuucugcggcaagggcuaccaccugaugagcuucccccagagcgccccacacggcgugguguuccuccacgucacauacgugcccgcccaggagaagaacuucaccaccgcccccgccaucugccacgacggcaaggcucacuucccccgggagggaguguucgugagcaacggcacccacugguucgugacccagcggaacuucuacgagccccagauuaucaccaccgacaacaccuucgugagcggcaacugcgacguggugaucggcaucgugaacaacaccguguacgacccccugcagccugagcuggacagcuucaaggaggagcuggacaaguacuucaagaaccacaccagccccgacguggaucugggcgacaucagcggcaucaacgccagcguggugaacauccagaaggagaucgaccggcugaacgagguggccaagaaccugaacgagagccugaucgaccugcaggagcugggcaaguacgagcaguacaucaaguggcccugguacaucuggcugggcuucaucgccggccugaucgccaucgugaucgugaccaucaugcugugcugcaugaccagcugcuguagcugccugaagggcugcugcagcugcggcagcugcugcaaguucgacgaggacgacagcgagccagugcugaagggcgugaagcugcacuacaccugaggacuagucccuguucccagagcccacuuuuuuuucuuuuuuugaaauaaaauagccugucuuucagaucuaaaaaaaaaaaaaaaaaaaaaaaaaaaaaaaaaaaaaaaaaaaaaaaaaaaaaaaaaaaaaaaaaaaaaaaaaaaaaaaaaaaaaaaaaaaaaaaaaaaa

SEQ ID NO: 25015 - RNA, 4158 nt, Artificial Sequence
  SARS-CoV-2/Wuhan/WIV05/2019__EPI_ISL_402128 spike protein mRNA gc (1-1273)(H69del_V70del_Y144del_N501Y_A570D_D614G_P681H_T716I_S982 A_D1118H)
aggagagggcgcuuggcuugcaaggacccugagcugcggcauugaagcacacccaacccaacucgacugaagucagccucacugaaccggaucugagaaucuucucucucugggcuugccagggcucuccgaaccuagcuagcauccucuucaauuccaacuagaaagcuuaccauguucguguuccuggugcugcugccccuggugagcagccagugcgugaaccugaccacccggacccagcugcccccugccuacaccaacagcuucacccggggcguguacuaccccgacaagguguuccggagcagcgugcugcacagcacccaggaccuguuccugcccuucuucagcaacgugaccugguuccacgccaucagcggcaccaacggcaccaagcgguucgacaacccagugcugcccuucaacgacggcguguacuucgccagcaccgagaagucaaacaucauccggggcuggaucuucggcaccacccuggacagcaagacacagagccugcugaucgugaacaacgccaccaacguggugaucaaggugugcgaguuucaguucugcaacgaccccuuccugggcguguaccacaagaacaacaagagcuggauggagagcgaguuccggguguacagcagcgcuaacaauugcaccuucgaguacgucagccagcccuuccugauggaccucgagggcaagcagggcaacuucaagaaccugcgggaguucguguucaagaacaucgauggcuacuucaagaucuacagcaagcacacccccaucaaccuggugcgggaccugccccagggauucagcgcccuggagccucugguggaccugcccaucggcaucaacaucaccagguuccagacccugcuggcccugcaccggagcuaccugacccccggcgacagcagcagcggcuggaccgccggcgccgccgcauacuacgugggcuaccugcagccacggaccuuccugcugaaguacaacgagaacggcaccaucaccgacgccguggacugcgcccuggacccccugagcgagaccaagugcacccuaaagagcuucaccguggagaagggcaucuaccagaccagcaacuuccgggugcagcccacugagagcaucgugcgguuccccaacauuaccaaccugugucccuucggcgagguguucaacgccacccgguucgccagcguguacgccuggaaccggaagcggaucagcaacugcguggccgacuacagcgugcuguacaacagcgccagcuucagcaccuucaagugcuacggcgugagcccuaccaagcugaacgaccugugcuucaccaacguguacgcugacagcuucgugauccggggcgacgaggugcggcagaucgcccccggccagaccggcaagaucgccgacuacaacuacaagcugcccgacgacuucaccggcugcgugaucgccuggaacagcaacaaccuggacagcaaggugggcggcaacuacaacuaccuguaccggcuguuccguaagagcaaccugaagccauucgagcgggacaucagcaccgagaucuaccaggccggcagcacccccugcaacgguguggagggcuuuaacugcuacuucccccugcagagcuacggcuuccagcccaccuacggcgugggcuaccagcccuaccgggugguggugcugagcuucgagcugcugcacgcccccgccaccgugugcggcccuaaaaagagcaccaaccuggugaagaacaagugcgugaacuucaacuucaauggccugaccggcaccggcgugcugaccgagagcaacaagaaguuccugcccuuccagcaguucggccgggauaucgacgacaccaccgacgccgugcgggacccccagacccuggagauccuggacaucaccccaugcagcuucggcggcgugagcgugaucacccccggcacaaacaccagcaaccaggucgcagugcuguaccagggagugaacugcaccgaggugcccguggccauccacgccgaccagcugacccccaccuggcggguguacagcaccggcagcaacguguuccagacccgggccggcugccugaucggcgccgagcacgugaacaacuccuacgagugcgacauccccaucggcgccggcaucugcgcuagcuaccagacccagaccaacagccaccggcgggcccggagcguggccagccagagcaucaucgccuacaccaugagcuuaggcgccgagaacagcguggccuacagcaacaacagcaucgccauccccaucaacuucaccauaagcgugaccaccgagauccugccugugagcaugaccaagaccagcguggacuguaccauguacaucugcggcgacagcaccgagugcagcaaccugcugcugcaguacggcagcuucugcacccagcugaaccgggcgcugaccggcaucgccguggagcaggacaagaacacccaagagguguucgcccaggugaagcagaucuacaagaccccacccaucaaggacuucggcggcuucaacuucagccagauccugcccgaccccagcaagcccagcaagcggagcuucaucgaggaccugcuguucaacaaggugacucuggccgacgccggcuucaucaagcaguacggcgauugccugggggacaucgccgcccgggaccugaucugcgcucagaaguucaacggccugaccgugcugccuccccugcugaccgacgagaugaucgcccaguacaccagcgcccugcuugccggcaccaucaccagcggcuggaccuucggcgccggcgccgcacugcagauccccuucgccaugcagauggccuaccgguucaacggcaucggcgugacccagaacgugcuguacgagaaccagaagcugaucgccaaccaguucaacagcgccaucggcaagauccaggacagccugagcagcaccgccagcgcccugggcaagcugcaggacguggugaaccagaacgcccaggcucugaacacccuggugaagcagcugagcagcaacuucggcgccaucagcucagugcugaacgacauccuggccaggcuggacaagguggaggccgaggugcagaucgaccggcugaucaccggccggcugcagagccugcagaccuacgugacccagcagcugauccgggccgccgagauucgggccagcgccaaucuggcagccaccaagaugagcgagugcgugcugggccagagcaagcggguggacuuuugcggcaagggcuaccaccugaugagcuucccccagagcgcuccccacggcgugguguuccuccacgugaccuacgucccagcccaggagaagaacuucacaaccgcccccgccaucugccacgacggcaaggcccacuucccccgggagggaguguucgugagcaacggcacccacugguucgugacccagcggaacuucuacgagccccagaucaucaccacccacaacaccuucgugagcggcaacugcgacguggugaucggcaucgugaacaacaccguguacgacccccugcagcccgagcuggacagcuucaaggaggagcuggacaaguacuucaagaaccacaccagcccugacguggaucugggcgacaucagcggcaucaacgccagcguggugaacauccagaaggagaucgaccggcugaacgagguggccaagaaccugaacgagagccugaucgaccugcaggagcugggcaaguacgagcaguacaucaaguggcccugguacaucuggcugggcuucaucgccggccugaucgccaucgugauggugaccaucaugcugugcugcaugaccagcugcuguagcugccugaagggcugcugcagcugcggcagcugcugcaaguucgacgaggacgacagcgagcccgugcugaagggcgugaagcugcacuacaccugaggacuagucccuguucccagagcccacuuuuuuuucuuuuuuugaaauaaaauagccugucuuucagaucuaaaaaaaaaaaaaaaaaaaaaaaaaaaaaaaaaaaaaaaaaaaaaaaaaaaaaaaaaaaaaaaaaaaaaaaaaaaaaaaaaaaaaaaaaaaaaaaaaaaa

SEQ ID NO: 25016 - RNA, 4167 nt, Artificial Sequence
  SARS-CoV-2/Wuhan/WIV05/2019__EPI_ISL_402128 spike protein mRNA gc (1-1273)(K417N_E484K_N501Y_D614G)
aggagagggcgcuuggcuugcaaggacccugagcugcggcauugaagcacacccaacccaacucgacugaagucagccucacugaaccggaucugagaaucuucucucucugggcuugccagggcucuccgaaccuagcuagcauccucuucaauuccaacuagaaagcuuaccauguucguguuccuggugcugcugccccuggugagcagccagugcgugaaccugaccacccggacccagcugcccccugccuacaccaacagcuucacccggggcguguacuaccccgacaagguguuccggagcagcgugcugcacagcacccaggaccuguuccugcccuucuucagcaacgugaccugguuccacgccauccacgugagcggcaccaacggcaccaagcgguucgacaacccagugcugcccuucaacgacggcguguacuucgccagcaccgagaagucaaacaucauccggggcuggaucuucggcaccacccuggacagcaagacacagagccugcugaucgugaacaacgccaccaacguggugaucaaggugugcgaguuucaguucugcaacgaccccuuccugggcguguacuaccacaagaacaacaagagcuggauggagagcgaguuccgggucuacagcagcgcuaacaauugcaccuucgaguacgugagccagcccuuccugauggaccucgagggcaagcagggcaacuucaagaaccugcgggaguucguguucaagaacaucgauggcuacuucaagaucuacagcaagcacacccccaucaaccuggugcgggaccugccccagggauucagcgcccuggagccucugguggaccugcccaucggcaucaacaucaccagguuccagacccugcuggcccugcaccggagcuaccugacccccggcgacagcagcagcggcuggaccgccggcgccgccgcauacuacgugggcuaccugcagccacggaccuuccugcugaaguacaacgagaacggcaccaucaccgacgccguggacugcgcccuggacccccugagcgagaccaagugcacccuaaagagcuucaccguggagaagggcaucuaccagaccagcaacuuccgggugcagcccacugagagcaucgugcgguuccccaacauuaccaaccugugucccuucggcgagguguucaacgccacccgguucgccagcguguacgccuggaaccggaagcggaucagcaacugcguggccgacuacagcgugcuguacaacagcgccagcuucagcaccuucaagugcuacggcgugagcccuaccaagcugaacgaccugugcuucaccaacguguacgcugacagcuucgugauccggggcgacgaggugcggcagaucgcccccggccagaccggcaacaucgccgacuacaacuacaagcugcccgacgacuucaccggcugcgugaucgccuggaacagcaacaaccuggacagcaaggugggcggcaacuacaacuaccuguaccggcuguuccguaagagcaaccugaagccauucgagcgggacaucagcaccgagaucuaccaggccggcagcacccccugcaacggugugaagggcuuuaacugcuacuucccccugcagagcuacggcuuccagcccaccuacggcgugggcuaccagcccuaccgggugguggugcugagcuucgagcugcugcacgcccccgccaccgugugcggcccuaaaaagagcaccaaccuggugaagaacaagugcgugaacuucaauuucaacggccugaccggcaccggcgugcugaccgagagcaacaagaaguuccugcccuuccagcaguucggccgggauaucgccgacaccaccgacgcagugcgggacccccagacccuggagauccuggacaucaccccaugcagcuucggcggcgugagcgucaucacccccggcacaaacaccagcaaccagguggccgugcuguaccagggagugaacugcaccgaggugcccguggccauccacgccgaccagcugacccccaccuggcggguguacagcaccggcagcaacguguuccagacccgggccggcugccugaucggcgccgagcacgugaacaacuccuacgagugcgacauccccaucggcgcuggcaucugcgccagcuaccagacccagaccaacagcccccggcgggcccggagcguggccagccagagcaucaucgccuacaccaugagcuuaggcgccgagaacagcguggccuacagcaacaacagcaucgcgaucccuaccaacuucaccaucagcgugaccaccgagauacugcccgugagcaugaccaagaccagcguggacuguaccauguacaucugcggcgacagcaccgagugcagcaaccugcugcugcaguacggcagcuucugcacccagcugaaccgggcccugaccggcaucgccguggagcaggacaagaacacccaagagguguucgcccaggugaagcagaucuacaagacucccccaaucaaggacuucggcggcuucaacuucagccagauccugcccgaccccagcaagcccagcaagcggagcuucaucgaggaccugcuguucaacaaggugacccuggccgacgccggcuucaucaagcaguacggcgacugccugggggauaucgccgcucgggaccugaucugcgcccagaaguucaacggccugaccgugcugcccccucugcugaccgacgagaugaucgcccaguacaccagcgcccugcuugccggcaccaucaccagcggcuggaccuucggcgccggcgcagcccugcagauccccuucgccaugcagauggccuaccgguucaacggcaucggcgugacccagaacgugcuguacgagaaccagaagcugaucgccaaccaguucaacagcgccaucggcaagauccaggacagccugagcagcaccgccagcgcccugggcaagcugcaggacguggugaaccagaacgcucaggcccugaacacccuggugaagcagcugagcagcaacuucggcgccaucagcucagugcugaaugacauccugagcaggcuggacaagguggaggccgaggugcagaucgaccggcugaucaccggccggcugcagagccugcagaccuacgugacccagcagcugauccgggccgccgagauccgggccagcgccaaccuggcagccaccaagaugagcgagugcgugcugggccagagcaagcggguggacuuuugcggcaagggcuaccaccugaugagcuucccccagagcgccccacacggcgugguguuccuccacgucacauacgugcccgcccaggagaagaacuucaccaccgcccccgccauuugccacgacggcaaggcucacuucccccgggagggaguguucgugagcaacggcacccacugguucgugacccagcggaacuucuacgagccccagaucaucaccaccgacaacaccuucgugagcggcaacugcgacguggugaucggcaucgugaacaacaccguguacgacccccugcagccugagcuggacagcuucaaggaggagcuggacaaguacuucaagaaccacaccagccccgacguggaucugggcgacaucagcggcaucaacgccagcguggugaacauccagaaggagaucgaccggcugaacgagguggccaagaaccugaacgagagccugaucgaccugcaggagcugggcaaguacgagcaguacaucaaguggcccugguacaucuggcugggcuucaucgccggccugaucgccaucgugauggugaccaucaugcugugcugcaugaccagcugcuguagcugccugaagggcugcugcagcugcggcagcugcugcaaguucgacgaggacgacagcgagccagugcugaagggcgugaagcugcacuacaccugaggacuagucccuguucccagagcccacuuuuuuuucuuuuuuugaaauaaaauagccugucuuucagaucuaaaaaaaaaaaaaaaaaaaaaaaaaaaaaaaaaaaaaaaaaaaaaaaaaaaaaaaaaaaaaaaaaaaaaaaaaaaaaaaaaaaaaaaaaaaaaaaaaaaa

SEQ ID NO: 25017 - RNA, 4158 nt, Artificial Sequence
  SARS-CoV-2/Wuhan/WIV05/2019__EPI_ISL_402128 spike protein mRNA gc (1-1273)(L18F_D80A_D215G_L242del_A243del_L244del_R246I_K417N_E484 K_N501Y_D614G_A701V)
aggagagggcgcuuggcuugcaaggacccugagcugcggcauugaagcacacccaacccaacucgacugaagucagccucacugaaccggaucugagaaucuucucucucugggcuugccagggcucuccgaaccuagcuagcauccucuucaauuccaacuagaaagcuuaccauguucguguuccuggugcugcugccccuggugagcagccagugcgugaacuucaccacccggacccagcugcccccugccuacaccaacagcuucacccggggcguguacuaccccgacaagguguuccggagcagcgugcugcacagcacccaggaccuguuccugcccuucuucagcaacgugaccugguuccacgccauccacgugagcggcaccaacggcaccaagcgguucgccaacccagugcugcccuucaacgacggcguguacuucgccagcaccgagaagucaaacaucauccggggcuggaucuuuggcaccacccuggacagcaagacacagagccugcugaucgugaacaacgcuaccaacguggugaucaaggugugcgaguuccaguucugcaacgaccccuuccugggcguguacuaccacaagaacaacaagagcuggauggagagcgaguuccgggucuacagcagcgccaacaauugcaccuucgaguacgugagccagcccuuccugauggaccuggagggcaagcagggcaacuucaagaaccuccgggaguucguguucaagaacaucgacggcuacuucaagaucuacagcaagcacacccccaucaaccuggugcggggacugccccagggcuucagcgcccuggagccucugguggaucugcccaucggcaucaacaucaccagguuccagacccugcacaucagcuaccugacccccggcgacagcagcagcggcuggaccgccggcgccgccgcauacuacgugggcuaccugcagccacggaccuuccugcugaaguacaacgagaacggcaccaucaccgacgccguggacugcgcccuggacccccugagcgagaccaagugcacccuuaagagcuucaccguggagaagggcaucuaccagaccagcaacuuccgggugcagcccacugagagcauugugcgguuccccaacaucaccaaccugugucccuucggcgagguguucaacgccacccgguucgccagcguguacgccuggaaccggaagcggaucagcaacugcguggccgacuacagcgugcuguacaacagcgccagcuucagcaccuucaagugcuacggcgugagcccuaccaagcugaacgaccugugcuucaccaacguguacgcugacagcuucgugauccggggcgacgaggugcggcagaucgcccccggccagaccggcaacaucgccgacuacaacuacaagcugcccgacgacuucaccggcugcgugaucgccuggaacagcaacaaccuggacagcaaggugggcggcaacuacaacuaccuguaccggcuauuccguaagagcaaccugaagccauuugagcgggacaucagcaccgagaucuaccaggccgguagcacccccugcaacggcgugaagggcuucaacugcuacuucccccugcagagcuacggcuuccagcccaccuacggcgugggcuaccagcccuaccgggugguggugcugagcuucgagcugcugcacgcccccgccaccgugugcggcccuaaaaagagcaccaaccuggugaagaacaagugcgugaacuucaauuucaacggccugaccggcaccggcgugcugaccgagagcaacaagaaguuccugcccuuccagcaguucggccgggacaucgccgacaccaccgaugcagugcgggacccccagacccuggagauccuggacaucaccccaugcagcuucggcggcgugagcgucaucacccccggaacaaacaccagcaaccagguggccgugcuguaccagggcgugaacugcaccgaggugcccguggccauccacgccgaccagcugacccccaccuggcggguguacagcaccggcagcaacguguuccagacccgggccggcugccugaucggcgccgagcacgugaacaacuccuacgagugcgacauccccaucggcgcuggcaucugcgccagcuaccagacccagaccaacagcccccggcgggcccggagcguggccagccagagcaucaucgccuacaccaugagccugggcguggagaacagcguggccuacagcaacaacagcaucgccaucccuaccaacuucaccauaagcgugaccaccgagauccugcccgugagcaugaccaagaccagcguggacuguaccauguacaucugcggcgacagcaccgagugcagcaaccuguuacugcaguacggcagcuucugcacccagcugaaccgggcgcugaccggcaucgccguggagcaggacaagaacacccaagagguguucgcccaggugaagcagaucuacaagacucccccaaucaaggacuucggcggcuucaacuucagccagauccugcccgaccccagcaagcccagcaagcggagcuucaucgaggaccugcuguucaacaaggugacccuggccgacgccggcuucaucaagcaguacggggacugccugggcgacaucgccgcccgggaccugaucugcgcucagaaguucaacggccugaccgugcugcccccucugcugaccgaugagaugaucgcccaguacaccagcgcccugcuggccggcaccaucaccagcggcuggaccuucggcgccggcgccgcacugcagauccccuucgccaugcagauggccuaccgguucaacggcaucggcgugacccagaacgugcuguacgagaaccagaagcugaucgccaaccaguucaacagcgccaucggcaagauccaggacagccugagcagcaccgccagcgcccugggcaagcugcaggacguggugaaccagaacgcccaggcucugaacacccuggugaagcagcugagcagcaacuuuggcgccaucagcucagugcugaaugacauccugagccggcuggacaagguggaggccgaggugcagaucgacaggcugaucaccggccggcugcagagccugcagaccuacgugacccagcagcugauccgggccgccgagauucgggccagcgccaaccuggccgcaaccaagaugagcgagugcgugcugggccagagcaagcggguggacuucugcggcaagggcuaccaccugaugagcuucccccagagcgccccacacggcguggucuuccugcacgugacauacgugcccgcccaggagaagaacuucaccaccgcccccgccaucugccacgacggaaaggcccacuucccccgggagggcguguucgugagcaacggcacccacugguucgugacccagcggaacuucuacgagccccagaucaucaccaccgacaacaccuucgugagcggcaacugcgacguggugaucggcaucgugaacaacaccguguacgacccccugcagccugagcuggacagcuucaaggaggagcucgacaaguacuucaagaaccacaccagccccgacguggaccugggcgacaucagcggcaucaacgcuagcguggugaacauccagaaggagaucgaucggcugaacgagguggccaagaaccugaacgagagccugaucgaccugcaggagcugggcaaguacgagcaguacaucaaguggcccugguacaucuggcugggcuucaucgccggccugaucgccaucgugauggugaccaucaugcugugcugcaugaccagcugcuguagcugccugaagggcugcugcagcugcggcagcugcugcaaguucgacgaggacgacagcgagccagugcugaagggcgugaagcugcacuacaccugaggacuagucccuguucccagagcccacuuuuuuuucuuuuuuugaaauaaaauagccugucuuucagaucuaaaaaaaaaaaaaaaaaaaaaaaaaaaaaaaaaaaaaaaaaaaaaaaaaaaaaaaaaaaaaaaaaaaaaaaaaaaaaaaaaaaaaaaaaaaaaaaaaaaa

SEQ ID NO: 25018 - RNA, 4167 nt, Artificial Sequence
  SARS-CoV-2/Wuhan/WIV05/2019__EPI_ISL_402128 spike protein mRNA gc (1-1273)(E484K_D614G)
aggagagggcgcuuggcuugcaaggacccugagcugcggcauugaagcacacccaacccaacucgacugaagucagccucacugaaccggaucugagaaucuucucucucugggcuugccagggcucuccgaaccuagcuagcauccucuucaauuccaacuagaaagcuuaccauguucguguuccuggugcugcugccccuggugagcagccagugcgugaaccugaccacccggacccagcugcccccugccuacaccaacagcuucacccggggcguguacuaccccgacaagguguuccggagcagcgugcugcacagcacccaggaccuguuccugcccuucuucagcaacgugaccugguuccacgccauccacgugagcggcaccaacggcaccaagcgguucgacaacccagugcugcccuucaacgacggcguguacuucgccagcaccgagaagucaaacaucauccggggcuggaucuucggcaccacccuggacagcaagacacagagccugcugaucgugaacaacgccaccaacguggugaucaaggugugcgaguuucaguucugcaacgaccccuuccugggcguguacuaccacaagaacaacaagagcuggauggagagcgaguuccgggucuacagcagcgcuaacaauugcaccuucgaguacgugagccagcccuuccugauggaccucgagggcaagcagggcaacuucaagaaccugcgggaguucguguucaagaacaucgauggcuacuucaagaucuacagcaagcacacccccaucaaccuggugcgggaccugccccagggauucagcgcccuggagccucugguggaccugcccaucggcaucaacaucaccagguuccagacccugcuggcccugcaccggagcuaccugacccccggcgacagcagcagcggcuggaccgccggcgccgccgcauacuacgugggcuaccugcagccacggaccuuccugcugaaguacaacgagaacggcaccaucaccgacgccguggacugcgcccuggacccccugagcgagaccaagugcacccuaaagagcuucaccguggagaagggcaucuaccagaccagcaacuuccgggugcagcccacugagagcaucgugcgguuccccaacauuaccaaccugugucccuucggcgagguguucaacgccacccgguucgccagcguguacgccuggaaccggaagcggaucagcaacugcguggccgacuacagcgugcuguacaacagcgccagcuucagcaccuucaagugcuacggcgugagcccuaccaagcugaacgaccugugcuucaccaacguguacgcugacagcuucgugauccggggcgacgaggugcggcagaucgcccccggccagaccggcaagaucgccgacuacaacuacaagcugcccgacgacuucaccggcugcgugaucgccuggaacagcaacaaccuggacagcaaggugggcggcaacuacaacuaccuguaccggcuguuccguaagagcaaccugaagccauucgagcgggacaucagcaccgagaucuaccaggccggcagcacccccugcaacggugugaagggcuuuaacugcuacuucccccugcagagcuacggcuuccagcccaccaacggcgugggcuaccagcccuaccgggugguggugcugagcuucgagcugcugcacgcccccgccaccgugugcggcccuaaaaagagcaccaaccuggugaagaacaagugcgugaacuucaauuucaacggccugaccggcaccggcgugcugaccgagagcaacaagaaguuccugcccuuccagcaguucggccgggauaucgccgacaccaccgacgcagugcgggacccccagacccuggagauccuggacaucaccccaugcagcuucggcggcgugagcgucaucacccccggcacaaacaccagcaaccagguggccgugcuguaccagggagugaacugcaccgaggugcccguggccauccacgccgaccagcugacccccaccuggcggguguacagcaccggcagcaacguguuccagacccgggccggcugccugaucggcgccgagcacgugaacaacuccuacgagugcgacauccccaucggcgcuggcaucugcgccagcuaccagacccagaccaacagcccccggcgggcccggagcguggccagccagagcaucaucgccuacaccaugagcuuaggcgccgagaacagcguggccuacagcaacaacagcaucgcgaucccuaccaacuucaccaucagcgugaccaccgagauacugcccgugagcaugaccaagaccagcguggacuguaccauguacaucugcggcgacagcaccgagugcagcaaccugcugcugcaguacggcagcuucugcacccagcugaaccgggcccugaccggcaucgccguggagcaggacaagaacacccaagagguguucgcccaggugaagcagaucuacaagacucccccaaucaaggacuucggcggcuucaacuucagccagauccugcccgaccccagcaagcccagcaagcggagcuucaucgaggaccugcuguucaacaaggugacccuggccgacgccggcuucaucaagcaguacggcgacugccugggggauaucgccgcucgggaccugaucugcgcccagaaguucaacggccugaccgugcugcccccucugcugaccgacgagaugaucgcccaguacaccagcgcccugcuugccggcaccaucaccagcggcuggaccuucggcgccggcgcagcccugcagauccccuucgccaugcagauggccuaccgguucaacggcaucggcgugacccagaacgugcuguacgagaaccagaagcugaucgccaaccaguucaacagcgccaucggcaagauccaggacagccugagcagcaccgccagcgcccugggcaagcugcaggacguggugaaccagaacgcucaggcccugaacacccuggugaagcagcugagcagcaacuucggcgccaucagcucagugcugaaugacauccugagcaggcuggacaagguggaggccgaggugcagaucgaccggcugaucaccggccggcugcagagccugcagaccuacgugacccagcagcugauccgggccgccgagauccgggccagcgccaaccuggcagccaccaagaugagcgagugcgugcugggccagagcaagcggguggacuuuugcggcaagggcuaccaccugaugagcuucccccagagcgccccacacggcgugguguuccuccacgucacauacgugcccgcccaggagaagaacuucaccaccgcccccgccauuugccacgacggcaaggcucacuucccccgggagggaguguucgugagcaacggcacccacugguucgugacccagcggaacuucuacgagccccagaucaucaccaccgacaacaccuucgugagcggcaacugcgacguggugaucggcaucgugaacaacaccguguacgacccccugcagccugagcuggacagcuucaaggaggagcuggacaaguacuucaagaaccacaccagccccgacguggaucugggcgacaucagcggcaucaacgccagcguggugaacauccagaaggagaucgaccggcugaacgagguggccaagaaccugaacgagagccugaucgaccugcaggagcugggcaaguacgagcaguacaucaaguggcccugguacaucuggcugggcuucaucgccggccugaucgccaucgugauggugaccaucaugcugugcugcaugaccagcugcuguagcugccugaagggcugcugcagcugcggcagcugcugcaaguucgacgaggacgacagcgagccagugcugaagggcgugaagcugcacuacaccugaggacuagucccuguucccagagcccacuuuuuuuucuuuuuuugaaauaaaauagccugucuuucagaucuaaaaaaaaaaaaaaaaaaaaaaaaaaaaaaaaaaaaaaaaaaaaaaaaaaaaaaaaaaaaaaaaaaaaaaaaaaaaaaaaaaaaaaaaaaaaaaaaaaaa

SEQ ID NO: 25019 - RNA, 4167 nt, Artificial Sequence
  SARS-CoV-2/Wuhan/WIV05/2019__EPI_ISL_402128 spike protein mRNA gc (1-1273)(L18F_T20N_P26S_D138Y_R190S_K417T_E484K_N501Y_D614G_H655Y _T1027I)
aggagagggcgcuuggcuugcaaggacccugagcugcggcauugaagcacacccaacccaacucgacugaagucagccucacugaaccggaucugagaaucuucucucucugggcuugccagggcucuccgaaccuagcuagcauccucuucaauuccaacuagaaagcuuaccauguucguguuccuggugcugcugccccuggugagcagccagugcgugaacuucaccaaccggacccagcugcccagcgccuacaccaacagcuucacccggggcguguacuacccugacaagguguuccggagcagcgugcugcacagcacccaggaccuguuccugcccuucuucagcaacgugaccugguuccacgccauccacgugagcggcaccaacggcaccaagcgguucgacaaccccgugcugccauucaacgacggcguguacuucgccagcaccgagaagucaaacaucauccggggcuggaucuuuggcaccacccuggacagcaagacccagagccugcugaucgugaacaacgccacaaacguggugaucaaggugugcgaguuccaguucugcaacuaccccuuccugggcguguacuaccacaagaacaacaagagcuggauggagagcgaguuccgggucuacagcagcgcuaauaacugcaccuucgaguacgugagccagcccuuccugauggaccuggagggcaagcagggcaacuucaagaaccucagcgaguucguguucaagaacaucgacggcuacuucaagaucuacagcaagcacacccccaucaaccuggugcgggaucugccccagggauucagcgcccuggagccccugguggaccugccuaucggcaucaacaucacccgguuccagacccugcuggcccugcacaggagcuaccugacccccggcgacagcagcagcggcuggaccgccggcgccgccgcauacuacgugggcuaccugcagccccggaccuuccugcugaaguacaacgagaacggcaccaucaccgacgccguggacugcgcccuggacccacugagcgagaccaagugcacccuaaagagcuucaccguggagaagggcaucuaccagaccagcaacuuccgggugcagcccaccgagagcaucgugcgguuccccaacauuacuaaccugugucccuucggcgagguguucaacgccacccgguucgccagcguguacgccuggaaccggaagcggaucagcaacugcguggccgacuacagcgugcuguacaacagcgccagcuucagcaccuucaagugcuacggcgugagccccaccaagcugaacgaccugugcuucaccaacguguacgcugacagcuucgugauccggggcgacgaggugcggcagaucgccccuggccagaccggcaccaucgccgacuacaacuacaagcugcccgacgacuucaccggcugcgugaucgccuggaacagcaacaaccuggacagcaaggugggcggcaacuacaacuaccuguaccggcuguuccguaagagcaaccugaagcccuuugagcgggacaucagcaccgagaucuaccaggccggcagcaccccaugcaacggugugaagggcuucaacugcuacuucccccugcagagcuacggcuuccagcccaccuacggcgugggcuaccagcccuaccgggugguggugcugagcuucgagcugcugcacgcccccgccaccgugugcggccccaaaaagagcaccaaccuggugaagaacaagugcgugaacuucaauuucaacggccugaccggcaccggcgugcugaccgagagcaacaagaaguuccugccuuuccagcaguucggccgggacaucgccgauaccaccgacgcagugcgggacccccagacccuggagauccuggacaucacccccugcagcuucggcggcgugagcgucaucaccccaggcacaaacaccagcaaccagguggccgugcuguaccagggagugaacugcaccgaggugcccguggccauccacgccgaccagcugacccccaccuggcggguguacuccaccggcagcaacguguuccagacccgggccggcugccugaucggcgccgaguacgugaacaacagcuacgagugcgacauccccaucggcgcuggcaucugcgccagcuaccagacccagaccaacagcccccggcgggcccggagcguggccagccagagcaucaucgccuacaccaugagccugggcgccgagaacagcguggccuacagcaacaacagcaucgcgauccccaccaacuucaccaucagcgugaccaccgagauauuaccugugagcaugaccaagaccagcguggacuguaccauguacaucugcggcgacagcaccgagugcagcaaccugcugcugcaguacggcagcuucugcacccagcugaaccgggcccugaccggcaucgccguggagcaggacaagaacacccaagagguguucgcccaggugaagcagaucuacaagacuccacccaucaaggacuucggcggcuucaacuucagccagauccugcccgaccccagcaagcccagcaagcggagcuucaucgaggaccugcuguucaacaaggugacccuggccgacgccggcuucaucaagcaguacggcgacugccugggggacaucgccgcucgggaucugaucugcgcccagaaguucaacggccugaccgugcugccuccccugcugaccgacgagaugaucgcccaguacaccagcgcccugcuggccggcaccaucaccagcggcuggaccuucggcgccggcgcagcccuucagauccccuucgccaugcagauggccuaccgguucaacggcaucggcgugacccagaacgugcuguacgagaaccagaagcugaucgccaaccaguucaacagcgccaucggcaagauccaggacagccugagcagcaccgccagcgcccugggcaagcugcaggacguggugaaccagaacgcucaggcccugaacacccuggugaagcagcugagcucaaacuuuggcgccaucagcagcgugcugaaugacauccugagccggcuggacaagguggaggccgaggugcagaucgacaggcugaucaccggccggcugcagagccugcagaccuacgugacccagcagcugauccgggccgccgagauccgggccagcgccaaccuggcagccauuaagaugagcgagugcgugcugggccagagcaagcggguggacuucugcggcaagggcuaccaccugaugagcuucccccagagcgcuccccacggcgugguguuccugcacgucaccuacgugccagcccaggagaagaacuucacaaccgcccccgccaucugccacgacggcaaggcccacuucccccgggagggaguguucgugagcaacggcacccacugguucgugacccagcggaacuucuacgagccccagaucaucaccaccgacaacaccuucgugagcggcaacugcgacguggugaucggcaucgugaacaacaccguguacgacccccuccagcccgagcuggacagcuucaaggaggagcuggacaaguacuucaagaaccacaccagcccugacguggaccugggcgauaucagcggcaucaacgccagcguggugaacauccagaaggagaucgaccggcugaacgagguggccaagaaccugaacgagagccugaucgaccugcaggagcugggcaaguacgagcaguacaucaaguggcccugguacaucuggcugggcuucaucgccggccugaucgccaucgugauggugaccaucaugcugugcugcaugaccagcugcuguagcugccugaagggcugcugcagcugcggcagcugcugcaaguucgacgaggacgacagcgagcccgugcugaagggcgugaagcugcacuacaccugaggacuagucccuguucccagagcccacuuuuuuuucuuuuuuugaaauaaaauagccugucuuucagaucuaaaaaaaaaaaaaaaaaaaaaaaaaaaaaaaaaaaaaaaaaaaaaaaaaaaaaaaaaaaaaaaaaaaaaaaaaaaaaaaaaaaaaaaaaaaaaaaaaaaa

SEQ ID NO: 25020 - RNA, 4167 nt, Artificial Sequence
  SARS-CoV-2/Wuhan/WIV05/2019__EPI_ISL_402128 spike protein mRNA gc (1-1273)(S13I_W152C_L452R_D614G)
aggagagggcgcuuggcuugcaaggacccugagcugcggcauugaagcacacccaacccaacucgacugaagucagccucacugaaccggaucugagaaucuucucucucugggcuugccagggcucuccgaaccuagcuagcauccucuucaauuccaacuagaaagcuuaccauguucguguuccuggugcugcugccccuggugagcauccagugcgugaaccugaccacccggacccagcugcccccugccuacaccaacagcuucacccggggcguguacuaccccgacaagguguuccggagcagcgugcugcacagcacccaggaccuguuccugcccuucuucagcaacgugaccugguuccacgccauccacgugagcggcaccaacggcaccaagcgguucgacaacccagugcugcccuucaacgacggcguguacuucgccagcaccgagaagucaaacaucauccggggcuggaucuucggcaccacccuggacagcaagacacagagccugcugaucgugaacaacgccaccaacguggugaucaaggugugcgaguuucaguucugcaacgaccccuuccugggcguguacuaccacaagaacaacaagagcugcauggagagcgaguuccgggucuacagcagcgcuaacaauugcaccuucgaguacgugagccagcccuuccugauggaccucgagggcaagcagggcaacuucaagaaccugcgggaguucguguucaagaacaucgauggcuacuucaagaucuacagcaagcacacccccaucaaccuggugcgggaccugccccagggauucagcgcccuggagccucugguggaccugcccaucggcaucaacaucaccagguuccagacccugcuggcccugcaccggagcuaccugacccccggcgacagcagcagcggcuggaccgccggcgccgccgcauacuacgugggcuaccugcagccacggaccuuccugcugaaguacaacgagaacggcaccaucaccgacgccguggacugcgcccuggacccccugagcgagaccaaguguacccuaaagagcuucaccguggagaagggcaucuaccagaccagcaacuuccgggugcagcccacugagagcauugugcgguuccccaacaucaccaaccugugccccuucggcgagguguucaacgccacccgguucgccagcguguacgccuggaaccggaagcggaucagcaacugcguggccgacuacagcgugcuguacaacagcgccagcuucagcaccuucaagugcuacggcgugagcccuaccaagcugaacgaccugugcuucaccaacguguacgcugacagcuucgugauccggggcgacgaggugcggcagaucgcccccggccagaccggcaagaucgccgacuacaacuacaagcugcccgacgacuucaccggcugcgugaucgccuggaacagcaacaaccuggacagcaaggugggcggcaacuacaacuaccgguaccggcuguuccguaagagcaaccugaagccauucgagcgggacaucagcaccgagaucuaccaggccggcagcacccccugcaacgguguggagggcuuuaacugcuacuucccccugcagagcuacggcuuccagcccaccaacggcgugggcuaccagcccuaccgggugguggugcugagcuucgagcugcugcacgcccccgccaccgugugcggcccuaaaaagagcaccaaccuggugaagaacaagugcgugaacuucaauuucaacggccugaccggcaccggcgugcugaccgagagcaacaagaaguuccugcccuuccagcaguucggccgggauaucgccgacaccaccgacgcagugcgggacccccagacccuggagauccuggacaucaccccaugcagcuucggcggcgugagcgucaucacccccggcacaaacaccagcaaccagguggccgugcuguaccagggagugaacugcaccgaggugcccguggccauccacgccgaccagcugacccccaccuggcggguguacagcaccggcagcaacguguuccagacccgggccggcugccugaucggcgccgagcacgugaacaacagcuacgagugcgacauccccaucggcgcuggcaucugugccuccuaccagacccagaccaacagcccccggcgggcccggagcguggccagccagagcaucaucgccuacaccaugagccugggcgccgagaacagcguggccuacagcaacaacagcaucgcgaucccuaccaacuucaccauaagcgugaccaccgagaucuuacccgugagcaugaccaagaccagcguggacugcaccauguacaucugcggcgacagcaccgagugcagcaaccugcugcugcaguacggcagcuucugcacccagcugaaccgggcccugaccggcaucgccguggagcaggacaagaacacccaagagguguucgcccaggugaagcagaucuacaagacucccccaaucaaggacuucggcggcuucaacuucagccagauccugcccgaccccagcaagcccagcaagcggagcuucaucgaggaccugcuguucaacaaggugacccuggccgacgccggcuucaucaagcaguacggcgacugccugggggauaucgccgcucgggaccugaucugcgcccagaaguucaacggccugaccgugcugcccccucugcugaccgacgagaugaucgcccaguacaccagcgcccugcuggccggcaccaucaccagcggcuggaccuucggcgccggcgcagcccuucagauccccuucgccaugcagauggccuacagguucaacggcaucggcgugacccagaacgugcuguacgagaaccagaagcugaucgccaaccaguucaacagcgccaucggcaagauccaggacagccugagcagcaccgccagcgcccugggcaagcugcaggacguggugaaccagaacgcucaggcccugaacacccuggugaagcagcugagcagcaacuucggcgccaucagcagcgugcugaaugacauccugucacggcuggacaagguggaggccgaggugcagaucgaccggcugaucaccggccggcugcagagccugcagaccuacgugacccagcagcugauccgggccgccgagauucgggccagcgccaaccuggcagccaccaagaugagcgagugcgugcugggccagagcaagcggguggacuuuugcggcaagggcuaccaccugaugagcuucccccagagcgccccacacggcgugguguuccugcacgucacauacgugcccgcccaggagaagaacuucaccaccgcccccgccaucugccacgacggcaaggcucacuucccccgggagggaguguucgugagcaacggcacccacugguucgugacccagcggaacuucuacgagccccagaucaucaccaccgacaacaccuucgugagcggcaacugcgacguggugaucggcaucgugaacaacaccguguacgacccccuccagccugagcuggacagcuucaaggaggagcuggacaaguacuucaagaaccacaccagccccgacguggaucugggcgacaucagcggcaucaacgccagcguggugaacauccagaaggagaucgaccggcugaacgagguggccaagaaccugaacgagagccugaucgaccugcaggagcugggcaaguacgagcaguacaucaaguggcccugguacaucuggcugggcuucaucgccggccugaucgccaucgugauggugaccaucaugcugugcugcaugaccagcuguugcagcugccugaagggcugcugcagcugcggcagcugcugcaaguucgacgaggacgacagcgagccagugcugaagggcgugaagcugcacuacaccugaggacuagucccuguucccagagcccacuuuuuuuucuuuuuuugaaauaaaauagccugucuuucagaucuaaaaaaaaaaaaaaaaaaaaaaaaaaaaaaaaaaaaaaaaaaaaaaaaaaaaaaaaaaaaaaaaaaaaaaaaaaaaaaaaaaaaaaaaaaaaaaaaaaaa

SEQ ID NO: 25021 - RNA, 4167 nt, Artificial Sequence
  SARS-CoV-2/Wuhan/WIV05/2019__EPI_ISL_402128 spike protein mRNA gc mod (1-1273)
aggagagggcgcuuggcuugcaaggacccugagcugcggcauugaagcacacccaacccaacucgacugaagucagccucacugaaccggaucugagaaucuucucucucugggcuugccagggcucuccgaaccuagcuagcauccucuucaauuccaacuagaaagcuuaccauguucguguuucuggugcugcugccccugguguccagccagugugugaaccugaccaccagaacacagcugccuccagccuacaccaacagcuucaccagaggcguguacuaccccgacaagguguucagauccagcgugcugcacucuacccaggaccuguuccugccuuucuucagcaacgugaccugguuccacgccauccacguguccggcaccaauggcaccaagagauucgacaaccccgugcugcccuucaacgacgggguguacuuugccagcaccgagaaguccaacaucaucagaggcuggaucuucggcaccacacuggacagcaagacccagagccugcugaucgugaacaacgccaccaacguggucaucaaagugugcgaguuccaguucugcaacgaccccuuccugggcgucuacuaccacaagaacaacaagagcuggauggaaagcgaguuccggguguacagcagcgccaacaacugcaccuucgaguacgugucccagccuuuccugauggaccuggaaggcaagcagggcaacuucaagaaccugcgcgaguucguguucaagaacaucgacggcuacuucaaaaucuacagcaagcacaccccuaucaaccucgugcgggaucugccucagggcuucucugcucuggaaccccugguggaucugcccaucggcaucaacaucacccgguuucagacacugcuggcccugcacagaagcuaccugacaccuggcgauagcagcagcggauggacagcuggugccgccgcuuacuaugugggcuaccugcagccuagaaccuuccugcugaaguacaacgagaacggcaccaucaccgacgccguggauugugcucuggauccucugagcgagacaaagugcacccugaaguccuucaccguggaaaagggcaucuaccagaccagcaacuuccgggugcagcccaccgaauccaucgugcgguuccccaauaucaccaaucugugccccuucggcgagguguucaaugccaccagauucgccucuguguacgccuggaaccggaagcggaucagcaauugcguggccgacuacuccgugcuguacaacuccgccagcuucagcaccuucaagugcuacggcguguccccuaccaagcugaacgaccugugcuucacaaacguguacgccgacagcuucgugauccggggagaugaagugcggcagauugccccuggacagacaggcaagaucgccgacuacaacuacaagcugcccgacgacuucaccggcugugugauugccuggaacagcaacaaccuggacuccaaagucggcggcaacuacaauuaccuguaccggcuguuccggaaguccaaucugaagcccuucgagcgggacaucagcaccgaaaucuaucaggccggcagcaccccuugcaacggcguggaaggcuucaacugcuacuucccacugcaguccuacggcuuucagcccacaaauggcgugggcuaucagcccuacagagugguggugcugagcuucgaacugcugcaugcuccugccacagugugcggcccuaagaaaagcaccaaucucgugaagaacaaaugcgugaacuucaacuucaacggccugaccggcaccggcgugcugacagagagcaacaagaaguuccugccauuccagcaguuuggccgggauaucgccgauaccacagacgccguuagagauccccagacacuggaaauccuggacaucaccccaugcagcuucggcggagugucugugaucaccccuggcaccaacaccagcaaucagguggcagugcuguaccaggacgugaacuguaccgaagugcccguggccauucacgccgaucagcugacaccuacauggcggguguacuccaccggcagcaauguguuucagaccagagccggcugucugaucggagccgagcacgugaacaauagcuacgagugcgacauccccaucggcgcuggcaucugugccagcuaccagacacagacaaacagccccagacgggcuagaagcguggccagccagagcaucauugccuacacaaugucucugggcgccgagaacagcguggccuacuccaacaacucuaucgcuauccccaccaacuucaccaucagcgugaccaccgagauccugccuguguccaugaccaagaccagcguggacugcaccauguacaucugcggcgauuccaccgagugcuccaaccugcugcugcaguacggcagcuucugcacccagcugaauagagcccugacagggaucgccguggaacaggacaagaacacccaagagguguucgcccaagugaagcaaaucuacaagaccccuccuaucaaggacuucggcggcuucaauuucagccagauucugcccgauccuagcaagcccagcaagcggagcuucaucgaggaccugcuguucaacaaagugacacuggccgacgccggcuucaucaagcaguauggcgauugucugggcgacauugccgccagggaucugauuugcgcccagaaguuuaacggacugacagugcugccuccucugcugaccgaugagaugaucgcccaguacacaucugcccugcuggccggcacaaucacaagcggcuggacauuuggagcuggcgccgcucugcagauccccuuugcuaugcagauggccuaccgguucaacggcaucggagugacccagaaugugcuguacgagaaccagaagcugaucgccaaccaguucaacagcgccaucggcaagauccaggacagccugagcagcacagcaagcgcccugggaaagcugcaggacguggucaaccagaaugcccaggcacugaacacccuggucaagcagcuguccuccaacuucggcgccaucagcucugugcugaacgauauccugagcagacuggacaaggucgaggccgaggugcagaucgacagacugaucacaggcagacugcagagccuccagacauacgugacccagcagcugaucagagccgccgagauuagagccucugccaaucuggccgccaccaagaugucugagugugugcugggccagagcaagagaguggacuuuugcggcaagggcuaccaccugaugagcuucccucagucugccccucacggcgugguguuucugcacgugacauaugugcccgcucaagagaagaauuucaccaccgcuccagccaucugccacgacggcaaagcccacuuuccuagagaaggcguguucguguccaacggcacccauugguucgugacacagcggaacuucuacgagccccagaucaucaccaccgacaacaccuucgugucuggcaacugcgacguugugaucggcauugugaacaauaccguguacgacccucugcagcccgagcuggacagcuucaaagaggaacuggacaaguacuuuaagaaccacacaagccccgacguggaccugggcgauaucagcggaaucaaugccagcgucgugaacauccagaaagagaucgaccggcugaacgagguggccaagaaucugaacgagagccugaucgaccugcaagaacuggggaaguacgagcaguacaucaaguggcccugguacaucuggcugggcuuuaucgccggacugauugccaucgugauggucacaaucaugcuguguugcaugaccagcugcuguagcugccugaagggcuguuguagcuguggcagcugcugcaaguucgacgaggacgauucugagcccgugcugaagggcgugaaacugcacuacaccugaggacuagucccuguucccagagcccacuuuuuuuucuuuuuuugaaauaaaauagccugucuuucagaucuaaaaaaaaaaaaaaaaaaaaaaaaaaaaaaaaaaaaaaaaaaaaaaaaaaaaaaaaaaaaaaaaaaaaaaaaaaaaaaaaaaaaaaaaaaaaaaaaaaaa

SEQ ID NO: 25022 - RNA, 4167 nt, Artificial Sequence
  SARS-CoV-2/Wuhan/WIV05/2019__EPI_ISL_402128 spike protein mRNA gc mod (1-1273)(D614G)
aggagagggcgcuuggcuugcaaggacccugagcugcggcauugaagcacacccaacccaacucgacugaagucagccucacugaaccggaucugagaaucuucucucucugggcuugccagggcucuccgaaccuagcuagcauccucuucaauuccaacuagaaagcuuaccauguucguguuucuggugcugcugccccugguguccagccagugugugaaccugaccaccagaacacagcugccuccagccuacaccaacagcuucaccagaggcguguacuaccccgacaagguguucagauccagcgugcugcacucuacccaggaccuguuccugccuuucuucagcaacgugaccugguuccacgccauccacguguccggcaccaauggcaccaagagauucgacaaccccgugcugcccuucaacgacgggguguacuuugccagcaccgagaaguccaacaucaucagaggcuggaucuucggcaccacacuggacagcaagacccagagccugcugaucgugaacaacgccaccaacguggucaucaaagugugcgaguuccaguucugcaacgaccccuuccugggcgucuacuaccacaagaacaacaagagcuggauggaaagcgaguuccggguguacagcagcgccaacaacugcaccuucgaguacgugucccagccuuuccugauggaccuggaaggcaagcagggcaacuucaagaaccugcgcgaguucguguucaagaacaucgacggcuacuucaaaaucuacagcaagcacaccccuaucaaccucgugcgggaucugccucagggcuucucugcucuggaaccccugguggaucugcccaucggcaucaacaucacccgguuucagacacugcuggcccugcacagaagcuaccugacaccuggcgauagcagcagcggauggacagcuggugccgccgcuuacuaugugggcuaccugcagccuagaaccuuccugcugaaguacaacgagaacggcaccaucaccgacgccguggauugugcucuggauccucugagcgagacaaagugcacccugaaguccuucaccguggaaaagggcaucuaccagaccagcaacuuccgggugcagcccaccgaauccaucgugcgguuccccaauaucaccaaucugugccccuucggcgagguguucaaugccaccagauucgccucuguguacgccuggaaccggaagcggaucagcaauugcguggccgacuacuccgugcuguacaacuccgccagcuucagcaccuucaagugcuacggcguguccccuaccaagcugaacgaccugugcuucacaaacguguacgccgacagcuucgugauccggggagaugaagugcggcagauugccccuggacagacaggcaagaucgccgacuacaacuacaagcugcccgacgacuucaccggcugugugauugccuggaacagcaacaaccuggacuccaaagucggcggcaacuacaauuaccuguaccggcuguuccggaaguccaaucugaagcccuucgagcgggacaucagcaccgaaaucuaucaggccggcagcaccccuugcaacggcguggaaggcuucaacugcuacuucccacugcaguccuacggcuuucagcccacaaauggcgugggcuaucagcccuacagagugguggugcugagcuucgaacugcugcaugcuccugccacagugugcggcccuaagaaaagcaccaaucucgugaagaacaaaugcgugaacuucaacuucaacggccugaccggcaccggcgugcugacagagagcaacaagaaguuccugccauuccagcaguuuggccgggauaucgccgauaccacagacgccguuagagauccccagacacuggaaauccuggacaucaccccaugcagcuucggcggagugucugugaucaccccuggcaccaacaccagcaaucagguggcagugcuguaccagggcgugaacuguaccgaagugcccguggccauucacgccgaucagcugacaccuacauggcggguguacuccaccggcagcaauguguuucagaccagagccggcugucugaucggagccgagcacgugaacaauagcuacgagugcgacauccccaucggcgcuggcaucugugccagcuaccagacacagacaaacagccccagacgggcuagaagcguggccagccagagcaucauugccuacacaaugucucugggcgccgagaacagcguggccuacuccaacaacucuaucgcuauccccaccaacuucaccaucagcgugaccaccgagauccugccuguguccaugaccaagaccagcguggacugcaccauguacaucugcggcgauuccaccgagugcuccaaccugcugcugcaguacggcagcuucugcacccagcugaauagagcccugacagggaucgccguggaacaggacaagaacacccaagagguguucgcccaagugaagcaaaucuacaagaccccuccuaucaaggacuucggcggcuucaauuucagccagauucugcccgauccuagcaagcccagcaagcggagcuucaucgaggaccugcuguucaacaaagugacacuggccgacgccggcuucaucaagcaguauggcgauugucugggcgacauugccgccagggaucugauuugcgcccagaaguuuaacggacugacagugcugccuccucugcugaccgaugagaugaucgcccaguacacaucugcccugcuggccggcacaaucacaagcggcuggacauuuggagcuggcgccgcucugcagauccccuuugcuaugcagauggccuaccgguucaacggcaucggagugacccagaaugugcuguacgagaaccagaagcugaucgccaaccaguucaacagcgccaucggcaagauccaggacagccugagcagcacagcaagcgcccugggaaagcugcaggacguggucaaccagaaugcccaggcacugaacacccuggucaagcagcuguccuccaacuucggcgccaucagcucugugcugaacgauauccugagcagacuggacaaggucgaggccgaggugcagaucgacagacugaucacaggcagacugcagagccuccagacauacgugacccagcagcugaucagagccgccgagauuagagccucugccaaucuggccgccaccaagaugucugagugugugcugggccagagcaagagaguggacuuuugcggcaagggcuaccaccugaugagcuucccucagucugccccucacggcgugguguuucugcacgugacauaugugcccgcucaagagaagaauuucaccaccgcuccagccaucugccacgacggcaaagcccacuuuccuagagaaggcguguucguguccaacggcacccauugguucgugacacagcggaacuucuacgagccccagaucaucaccaccgacaacaccuucgugucuggcaacugcgacguugugaucggcauugugaacaauaccguguacgacccucugcagcccgagcuggacagcuucaaagaggaacuggacaaguacuuuaagaaccacacaagccccgacguggaccugggcgauaucagcggaaucaaugccagcgucgugaacauccagaaagagaucgaccggcugaacgagguggccaagaaucugaacgagagccugaucgaccugcaagaacuggggaaguacgagcaguacaucaaguggcccugguacaucuggcugggcuuuaucgccggacugauugccaucgugauggucacaaucaugcuguguugcaugaccagcugcuguagcugccugaagggcuguuguagcuguggcagcugcugcaaguucgacgaggacgauucugagcccgugcugaagggcgugaaacugcacuacaccugaggacuagucccuguucccagagcccacuuuuuuuucuuuuuuugaaauaaaauagccugucuuucagaucuaaaaaaaaaaaaaaaaaaaaaaaaaaaaaaaaaaaaaaaaaaaaaaaaaaaaaaaaaaaaaaaaaaaaaaaaaaaaaaaaaaaaaaaaaaaaaaaaaaaa

SEQ ID NO: 25023 - RNA, 4167 nt, Artificial Sequence
  SARS-CoV-2/Wuhan/WIV05/2019__EPI_ISL_402128 spike protein mRNA gc mod (1-1273)(A222V_D614G)
aggagagggcgcuuggcuugcaaggacccugagcugcggcauugaagcacacccaacccaacucgacugaagucagccucacugaaccggaucugagaaucuucucucucugggcuugccagggcucuccgaaccuagcuagcauccucuucaauuccaacuagaaagcuuaccauguucguguuucuggugcugcugccccugguguccagccagugugugaaccugaccaccagaacacagcugccuccagccuacaccaacagcuucaccagaggcguguacuaccccgacaagguguucagauccagcgugcugcacucuacccaggaccuguuccugccuuucuucagcaacgugaccugguuccacgccauccacguguccggcaccaauggcaccaagagauucgacaaccccgugcugcccuucaacgacgggguguacuuugccagcaccgagaaguccaacaucaucagaggcuggaucuucggcaccacacuggacagcaagacccagagccugcugaucgugaacaacgccaccaacguggucaucaaagugugcgaguuccaguucugcaacgaccccuuccugggcgucuacuaccacaagaacaacaagagcuggauggaaagcgaguuccggguguacagcagcgccaacaacugcaccuucgaguacgugucccagccuuuccugauggaccuggaaggcaagcagggcaacuucaagaaccugcgcgaguucguguucaagaacaucgacggcuacuucaaaaucuacagcaagcacaccccuaucaaccucgugcgggaucugccucagggcuucucugugcuggaaccccugguggaucugcccaucggcaucaacaucacccgguuucagacacugcuggcccugcacagaagcuaccugacaccuggcgauagcagcagcggauggacagcuggugccgccgcuuacuaugugggcuaccugcagccuagaaccuuccugcugaaguacaacgagaacggcaccaucaccgacgccguggauugugcucuggauccucugagcgagacaaagugcacccugaaguccuucaccguggaaaagggcaucuaccagaccagcaacuuccgggugcagcccaccgaauccaucgugcgguuccccaauaucaccaaucugugccccuucggcgagguguucaaugccaccagauucgccucuguguacgccuggaaccggaagcggaucagcaauugcguggccgacuacuccgugcuguacaacuccgccagcuucagcaccuucaagugcuacggcguguccccuaccaagcugaacgaccugugcuucacaaacguguacgccgacagcuucgugauccggggagaugaagugcggcagauugccccuggacagacaggcaagaucgccgacuacaacuacaagcugcccgacgacuucaccggcugugugauugccuggaacagcaacaaccuggacuccaaagucggcggcaacuacaauuaccuguaccggcuguuccggaaguccaaucugaagcccuucgagcgggacaucagcaccgaaaucuaucaggccggcagcaccccuugcaacggcguggaaggcuucaacugcuacuucccacugcaguccuacggcuuucagcccacaaauggcgugggcuaucagcccuacagagugguggugcugagcuucgaacugcugcaugcuccugccacagugugcggcccuaagaaaagcaccaaucucgugaagaacaaaugcgugaacuucaacuucaacggccugaccggcaccggcgugcugacagagagcaacaagaaguuccugccauuccagcaguuuggccgggauaucgccgauaccacagacgccguuagagauccccagacacuggaaauccuggacaucaccccaugcagcuucggcggagugucugugaucaccccuggcaccaacaccagcaaucagguggcagugcuguaccagggcgugaacuguaccgaagugcccguggccauucacgccgaucagcugacaccuacauggcggguguacuccaccggcagcaauguguuucagaccagagccggcugucugaucggagccgagcacgugaacaauagcuacgagugcgacauccccaucggcgcuggcaucugugccagcuaccagacacagacaaacagccccagacgggcuagaagcguggccagccagagcaucauugccuacacaaugucucugggcgccgagaacagcguggccuacuccaacaacucuaucgcuauccccaccaacuucaccaucagcgugaccaccgagauccugccuguguccaugaccaagaccagcguggacugcaccauguacaucugcggcgauuccaccgagugcuccaaccugcugcugcaguacggcagcuucugcacccagcugaauagagcccugacagggaucgccguggaacaggacaagaacacccaagagguguucgcccaagugaagcaaaucuacaagaccccuccuaucaaggacuucggcggcuucaauuucagccagauucugcccgauccuagcaagcccagcaagcggagcuucaucgaggaccugcuguucaacaaagugacacuggccgacgccggcuucaucaagcaguauggcgauugucugggcgacauugccgccagggaucugauuugcgcccagaaguuuaacggacugacagugcugccuccucugcugaccgaugagaugaucgcccaguacacaucugcccugcuggccggcacaaucacaagcggcuggacauuuggagcuggcgccgcucugcagauccccuuugcuaugcagauggccuaccgguucaacggcaucggagugacccagaaugugcuguacgagaaccagaagcugaucgccaaccaguucaacagcgccaucggcaagauccaggacagccugagcagcacagcaagcgcccugggaaagcugcaggacguggucaaccagaaugcccaggcacugaacacccuggucaagcagcuguccuccaacuucggcgccaucagcucugugcugaacgauauccugagcagacuggacaaggucgaggccgaggugcagaucgacagacugaucacaggcagacugcagagccuccagacauacgugacccagcagcugaucagagccgccgagauuagagccucugccaaucuggccgccaccaagaugucugagugugugcugggccagagcaagagaguggacuuuugcggcaagggcuaccaccugaugagcuucccucagucugccccucacggcgugguguuucugcacgugacauaugugcccgcucaagagaagaauuucaccaccgcuccagccaucugccacgacggcaaagcccacuuuccuagagaaggcguguucguguccaacggcacccauugguucgugacacagcggaacuucuacgagccccagaucaucaccaccgacaacaccuucgugucuggcaacugcgacguugugaucggcauugugaacaauaccguguacgacccucugcagcccgagcuggacagcuucaaagaggaacuggacaaguacuuuaagaaccacacaagccccgacguggaccugggcgauaucagcggaaucaaugccagcgucgugaacauccagaaagagaucgaccggcugaacgagguggccaagaaucugaacgagagccugaucgaccugcaagaacuggggaaguacgagcaguacaucaaguggcccugguacaucuggcugggcuuuaucgccggacugauugccaucgugauggucacaaucaugcuguguugcaugaccagcugcuguagcugccugaagggcuguuguagcuguggcagcugcugcaaguucgacgaggacgauucugagcccgugcugaagggcgugaaacugcacuacaccugaggacuagucccuguucccagagcccacuuuuuuuucuuuuuuugaaauaaaauagccugucuuucagaucuaaaaaaaaaaaaaaaaaaaaaaaaaaaaaaaaaaaaaaaaaaaaaaaaaaaaaaaaaaaaaaaaaaaaaaaaaaaaaaaaaaaaaaaaaaaaaaaaaaaa

SEQ ID NO: 25024 - RNA, 4167 nt, Artificial Sequence
  SARS-CoV-2/Wuhan/WIV05/2019__EPI_ISL_402128 spike protein mRNA gc mod (1-1273)(N439K_D614G)
aggagagggcgcuuggcuugcaaggacccugagcugcggcauugaagcacacccaacccaacucgacugaagucagccucacugaaccggaucugagaaucuucucucucugggcuugccagggcucuccgaaccuagcuagcauccucuucaauuccaacuagaaagcuuaccauguucguguuucuggugcugcugccccugguguccagccagugugugaaccugaccaccagaacacagcugccuccagccuacaccaacagcuucaccagaggcguguacuaccccgacaagguguucagauccagcgugcugcacucuacccaggaccuguuccugccuuucuucagcaacgugaccugguuccacgccauccacguguccggcaccaauggcaccaagagauucgacaaccccgugcugcccuucaacgacgggguguacuuugccagcaccgagaaguccaacaucaucagaggcuggaucuucggcaccacacuggacagcaagacccagagccugcugaucgugaacaacgccaccaacguggucaucaaagugugcgaguuccaguucugcaacgaccccuuccugggcgucuacuaccacaagaacaacaagagcuggauggaaagcgaguuccggguguacagcagcgccaacaacugcaccuucgaguacgugucccagccuuuccugauggaccuggaaggcaagcagggcaacuucaagaaccugcgcgaguucguguucaagaacaucgacggcuacuucaaaaucuacagcaagcacaccccuaucaaccucgugcgggaucugccucagggcuucucugcucuggaaccccugguggaucugcccaucggcaucaacaucacccgguuucagacacugcuggcccugcacagaagcuaccugacaccuggcgauagcagcagcggauggacagcuggugccgccgcuuacuaugugggcuaccugcagccuagaaccuuccugcugaaguacaacgagaacggcaccaucaccgacgccguggauugugcucuggauccucugagcgagacaaagugcacccugaaguccuucaccguggaaaagggcaucuaccagaccagcaacuuccgggugcagcccaccgaauccaucgugcgguuccccaauaucaccaaucugugccccuucggcgagguguucaaugccaccagauucgccucuguguacgccuggaaccggaagcggaucagcaauugcguggccgacuacuccgugcuguacaacuccgccagcuucagcaccuucaagugcuacggcguguccccuaccaagcugaacgaccugugcuucacaaacguguacgccgacagcuucgugauccggggagaugaagugcggcagauugccccuggacagacaggcaagaucgccgacuacaacuacaagcugcccgacgacuucaccggcugugugauugccuggaacagcaagaaccuggacuccaaagucggcggcaacuacaauuaccuguaccggcuguuccggaaguccaaucugaagcccuucgagcgggacaucagcaccgaaaucuaucaggccggcagcaccccuugcaacggcguggaaggcuucaacugcuacuucccacugcaguccuacggcuuucagcccacaaauggcgugggcuaucagcccuacagagugguggugcugagcuucgaacugcugcaugcuccugccacagugugcggcccuaagaaaagcaccaaucucgugaagaacaaaugcgugaacuucaacuucaacggccugaccggcaccggcgugcugacagagagcaacaagaaguuccugccauuccagcaguuuggccgggauaucgccgauaccacagacgccguuagagauccccagacacuggaaauccuggacaucaccccaugcagcuucggcggagugucugugaucaccccuggcaccaacaccagcaaucagguggcagugcuguaccagggcgugaacuguaccgaagugcccguggccauucacgccgaucagcugacaccuacauggcggguguacuccaccggcagcaauguguuucagaccagagccggcugucugaucggagccgagcacgugaacaauagcuacgagugcgacauccccaucggcgcuggcaucugugccagcuaccagacacagacaaacagccccagacgggcuagaagcguggccagccagagcaucauugccuacacaaugucucugggcgccgagaacagcguggccuacuccaacaacucuaucgcuauccccaccaacuucaccaucagcgugaccaccgagauccugccuguguccaugaccaagaccagcguggacugcaccauguacaucugcggcgauuccaccgagugcuccaaccugcugcugcaguacggcagcuucugcacccagcugaauagagcccugacagggaucgccguggaacaggacaagaacacccaagagguguucgcccaagugaagcaaaucuacaagaccccuccuaucaaggacuucggcggcuucaauuucagccagauucugcccgauccuagcaagcccagcaagcggagcuucaucgaggaccugcuguucaacaaagugacacuggccgacgccggcuucaucaagcaguauggcgauugucugggcgacauugccgccagggaucugauuugcgcccagaaguuuaacggacugacagugcugccuccucugcugaccgaugagaugaucgcccaguacacaucugcccugcuggccggcacaaucacaagcggcuggacauuuggagcuggcgccgcucugcagauccccuuugcuaugcagauggccuaccgguucaacggcaucggagugacccagaaugugcuguacgagaaccagaagcugaucgccaaccaguucaacagcgccaucggcaagauccaggacagccugagcagcacagcaagcgcccugggaaagcugcaggacguggucaaccagaaugcccaggcacugaacacccuggucaagcagcuguccuccaacuucggcgccaucagcucugugcugaacgauauccugagcagacuggacaaggucgaggccgaggugcagaucgacagacugaucacaggcagacugcagagccuccagacauacgugacccagcagcugaucagagccgccgagauuagagccucugccaaucuggccgccaccaagaugucugagugugugcugggccagagcaagagaguggacuuuugcggcaagggcuaccaccugaugagcuucccucagucugccccucacggcgugguguuucugcacgugacauaugugcccgcucaagagaagaauuucaccaccgcuccagccaucugccacgacggcaaagcccacuuuccuagagaaggcguguucguguccaacggcacccauugguucgugacacagcggaacuucuacgagccccagaucaucaccaccgacaacaccuucgugucuggcaacugcgacguugugaucggcauugugaacaauaccguguacgacccucugcagcccgagcuggacagcuucaaagaggaacuggacaaguacuuuaagaaccacacaagccccgacguggaccugggcgauaucagcggaaucaaugccagcgucgugaacauccagaaagagaucgaccggcugaacgagguggccaagaaucugaacgagagccugaucgaccugcaagaacuggggaaguacgagcaguacaucaaguggcccugguacaucuggcugggcuuuaucgccggacugauugccaucgugauggucacaaucaugcuguguugcaugaccagcugcuguagcugccugaagggcuguuguagcuguggcagcugcugcaaguucgacgaggacgauucugagcccgugcugaagggcgugaaacugcacuacaccugaggacuagucccuguucccagagcccacuuuuuuuucuuuuuuugaaauaaaauagccugucuuucagaucuaaaaaaaaaaaaaaaaaaaaaaaaaaaaaaaaaaaaaaaaaaaaaaaaaaaaaaaaaaaaaaaaaaaaaaaaaaaaaaaaaaaaaaaaaaaaaaaaaaaa

SEQ ID NO: 25025 - RNA, 4167 nt, Artificial Sequence
  SARS-CoV-2/Wuhan/WIV05/2019__EPI_ISL_402128 spike protein mRNA gc mod (1-1273)(S477N_D614G)
aggagagggcgcuuggcuugcaaggacccugagcugcggcauugaagcacacccaacccaacucgacugaagucagccucacugaaccggaucugagaaucuucucucucugggcuugccagggcucuccgaaccuagcuagcauccucuucaauuccaacuagaaagcuuaccauguucguguuucuggugcugcugccccugguguccagccagugugugaaccugaccaccagaacacagcugccuccagccuacaccaacagcuucaccagaggcguguacuaccccgacaagguguucagauccagcgugcugcacucuacccaggaccuguuccugccuuucuucagcaacgugaccugguuccacgccauccacguguccggcaccaauggcaccaagagauucgacaaccccgugcugcccuucaacgacgggguguacuuugccagcaccgagaaguccaacaucaucagaggcuggaucuucggcaccacacuggacagcaagacccagagccugcugaucgugaacaacgccaccaacguggucaucaaagugugcgaguuccaguucugcaacgaccccuuccugggcgucuacuaccacaagaacaacaagagcuggauggaaagcgaguuccggguguacagcagcgccaacaacugcaccuucgaguacgugucccagccuuuccugauggaccuggaaggcaagcagggcaacuucaagaaccugcgcgaguucguguucaagaacaucgacggcuacuucaaaaucuacagcaagcacaccccuaucaaccucgugcgggaucugccucagggcuucucugcucuggaaccccugguggaucugcccaucggcaucaacaucacccgguuucagacacugcuggcccugcacagaagcuaccugacaccuggcgauagcagcagcggauggacagcuggugccgccgcuuacuaugugggcuaccugcagccuagaaccuuccugcugaaguacaacgagaacggcaccaucaccgacgccguggauugugcucuggauccucugagcgagacaaagugcacccugaaguccuucaccguggaaaagggcaucuaccagaccagcaacuuccgggugcagcccaccgaauccaucgugcgguuccccaauaucaccaaucugugccccuucggcgagguguucaaugccaccagauucgccucuguguacgccuggaaccggaagcggaucagcaauugcguggccgacuacuccgugcuguacaacuccgccagcuucagcaccuucaagugcuacggcguguccccuaccaagcugaacgaccugugcuucacaaacguguacgccgacagcuucgugauccggggagaugaagugcggcagauugccccuggacagacaggcaagaucgccgacuacaacuacaagcugcccgacgacuucaccggcugugugauugccuggaacagcaacaaccuggacuccaaagucggcggcaacuacaauuaccuguaccggcuguuccggaaguccaaucugaagcccuucgagcgggacaucagcaccgaaaucuaucaggccggcaacaccccuugcaacggcguggaaggcuucaacugcuacuucccacugcaguccuacggcuuucagcccacaaauggcgugggcuaucagcccuacagagugguggugcugagcuucgaacugcugcaugcuccugccacagugugcggcccuaagaaaagcaccaaucucgugaagaacaaaugcgugaacuucaacuucaacggccugaccggcaccggcgugcugacagagagcaacaagaaguuccugccauuccagcaguuuggccgggauaucgccgauaccacagacgccguuagagauccccagacacuggaaauccuggacaucaccccaugcagcuucggcggagugucugugaucaccccuggcaccaacaccagcaaucagguggcagugcuguaccagggcgugaacuguaccgaagugcccguggccauucacgccgaucagcugacaccuacauggcggguguacuccaccggcagcaauguguuucagaccagagccggcugucugaucggagccgagcacgugaacaauagcuacgagugcgacauccccaucggcgcuggcaucugugccagcuaccagacacagacaaacagccccagacgggcuagaagcguggccagccagagcaucauugccuacacaaugucucugggcgccgagaacagcguggccuacuccaacaacucuaucgcuauccccaccaacuucaccaucagcgugaccaccgagauccugccuguguccaugaccaagaccagcguggacugcaccauguacaucugcggcgauuccaccgagugcuccaaccugcugcugcaguacggcagcuucugcacccagcugaauagagcccugacagggaucgccguggaacaggacaagaacacccaagagguguucgcccaagugaagcaaaucuacaagaccccuccuaucaaggacuucggcggcuucaauuucagccagauucugcccgauccuagcaagcccagcaagcggagcuucaucgaggaccugcuguucaacaaagugacacuggccgacgccggcuucaucaagcaguauggcgauugucugggcgacauugccgccagggaucugauuugcgcccagaaguuuaacggacugacagugcugccuccucugcugaccgaugagaugaucgcccaguacacaucugcccugcuggccggcacaaucacaagcggcuggacauuuggagcuggcgccgcucugcagauccccuuugcuaugcagauggccuaccgguucaacggcaucggagugacccagaaugugcuguacgagaaccagaagcugaucgccaaccaguucaacagcgccaucggcaagauccaggacagccugagcagcacagcaagcgcccugggaaagcugcaggacguggucaaccagaaugcccaggcacugaacacccuggucaagcagcuguccuccaacuucggcgccaucagcucugugcugaacgauauccugagcagacuggacaaggucgaggccgaggugcagaucgacagacugaucacaggcagacugcagagccuccagacauacgugacccagcagcugaucagagccgccgagauuagagccucugccaaucuggccgccaccaagaugucugagugugugcugggccagagcaagagaguggacuuuugcggcaagggcuaccaccugaugagcuucccucagucugccccucacggcgugguguuucugcacgugacauaugugcccgcucaagagaagaauuucaccaccgcuccagccaucugccacgacggcaaagcccacuuuccuagagaaggcguguucguguccaacggcacccauugguucgugacacagcggaacuucuacgagccccagaucaucaccaccgacaacaccuucgugucuggcaacugcgacguugugaucggcauugugaacaauaccguguacgacccucugcagcccgagcuggacagcuucaaagaggaacuggacaaguacuuuaagaaccacacaagccccgacguggaccugggcgauaucagcggaaucaaugccagcgucgugaacauccagaaagagaucgaccggcugaacgagguggccaagaaucugaacgagagccugaucgaccugcaagaacuggggaaguacgagcaguacaucaaguggcccugguacaucuggcugggcuuuaucgccggacugauugccaucgugauggucacaaucaugcuguguugcaugaccagcugcuguagcugccugaagggcuguuguagcuguggcagcugcugcaaguucgacgaggacgauucugagcccgugcugaagggcgugaaacugcacuacaccugaggacuagucccuguucccagagcccacuuuuuuuucuuuuuuugaaauaaaauagccugucuuucagaucuaaaaaaaaaaaaaaaaaaaaaaaaaaaaaaaaaaaaaaaaaaaaaaaaaaaaaaaaaaaaaaaaaaaaaaaaaaaaaaaaaaaaaaaaaaaaaaaaaaaa

SEQ ID NO: 25026 - RNA, 4167 nt, Artificial Sequence
  SARS-CoV-2/Wuhan/WIV05/2019__EPI_ISL_402128 spike protein mRNA gc mod (1-1273)(N501Y_D614G)
aggagagggcgcuuggcuugcaaggacccugagcugcggcauugaagcacacccaacccaacucgacugaagucagccucacugaaccggaucugagaaucuucucucucugggcuugccagggcucuccgaaccuagcuagcauccucuucaauuccaacuagaaagcuuaccauguucguguuucuggugcugcugccccugguguccagccagugugugaaccugaccaccagaacacagcugccuccagccuacaccaacagcuucaccagaggcguguacuaccccgacaagguguucagauccagcgugcugcacucuacccaggaccuguuccugccuuucuucagcaacgugaccugguuccacgccauccacguguccggcaccaauggcaccaagagauucgacaaccccgugcugcccuucaacgacgggguguacuuugccagcaccgagaaguccaacaucaucagaggcuggaucuucggcaccacacuggacagcaagacccagagccugcugaucgugaacaacgccaccaacguggucaucaaagugugcgaguuccaguucugcaacgaccccuuccugggcgucuacuaccacaagaacaacaagagcuggauggaaagcgaguuccggguguacagcagcgccaacaacugcaccuucgaguacgugucccagccuuuccugauggaccuggaaggcaagcagggcaacuucaagaaccugcgcgaguucguguucaagaacaucgacggcuacuucaaaaucuacagcaagcacaccccuaucaaccucgugcgggaucugccucagggcuucucugcucuggaaccccugguggaucugcccaucggcaucaacaucacccgguuucagacacugcuggcccugcacagaagcuaccugacaccuggcgauagcagcagcggauggacagcuggugccgccgcuuacuaugugggcuaccugcagccuagaaccuuccugcugaaguacaacgagaacggcaccaucaccgacgccguggauugugcucuggauccucugagcgagacaaagugcacccugaaguccuucaccguggaaaagggcaucuaccagaccagcaacuuccgggugcagcccaccgaauccaucgugcgguuccccaauaucaccaaucugugccccuucggcgagguguucaaugccaccagauucgccucuguguacgccuggaaccggaagcggaucagcaauugcguggccgacuacuccgugcuguacaacuccgccagcuucagcaccuucaagugcuacggcguguccccuaccaagcugaacgaccugugcuucacaaacguguacgccgacagcuucgugauccggggagaugaagugcggcagauugccccuggacagacaggcaagaucgccgacuacaacuacaagcugcccgacgacuucaccggcugugugauugccuggaacagcaacaaccuggacuccaaagucggcggcaacuacaauuaccuguaccggcuguuccggaaguccaaucugaagcccuucgagcgggacaucagcaccgaaaucuaucaggccggcagcaccccuugcaacggcguggaaggcuucaacugcuacuucccacugcaguccuacggcuuucagcccacauacggcgugggcuaucagcccuacagagugguggugcugagcuucgaacugcugcaugcuccugccacagugugcggcccuaagaaaagcaccaaucucgugaagaacaaaugcgugaacuucaacuucaacggccugaccggcaccggcgugcugacagagagcaacaagaaguuccugccauuccagcaguuuggccgggauaucgccgauaccacagacgccguuagagauccccagacacuggaaauccuggacaucaccccaugcagcuucggcggagugucugugaucaccccuggcaccaacaccagcaaucagguggcagugcuguaccagggcgugaacuguaccgaagugcccguggccauucacgccgaucagcugacaccuacauggcggguguacuccaccggcagcaauguguuucagaccagagccggcugucugaucggagccgagcacgugaacaauagcuacgagugcgacauccccaucggcgcuggcaucugugccagcuaccagacacagacaaacagccccagacgggcuagaagcguggccagccagagcaucauugccuacacaaugucucugggcgccgagaacagcguggccuacuccaacaacucuaucgcuauccccaccaacuucaccaucagcgugaccaccgagauccugccuguguccaugaccaagaccagcguggacugcaccauguacaucugcggcgauuccaccgagugcuccaaccugcugcugcaguacggcagcuucugcacccagcugaauagagcccugacagggaucgccguggaacaggacaagaacacccaagagguguucgcccaagugaagcaaaucuacaagaccccuccuaucaaggacuucggcggcuucaauuucagccagauucugcccgauccuagcaagcccagcaagcggagcuucaucgaggaccugcuguucaacaaagugacacuggccgacgccggcuucaucaagcaguauggcgauugucugggcgacauugccgccagggaucugauuugcgcccagaaguuuaacggacugacagugcugccuccucugcugaccgaugagaugaucgcccaguacacaucugcccugcuggccggcacaaucacaagcggcuggacauuuggagcuggcgccgcucugcagauccccuuugcuaugcagauggccuaccgguucaacggcaucggagugacccagaaugugcuguacgagaaccagaagcugaucgccaaccaguucaacagcgccaucggcaagauccaggacagccugagcagcacagcaagcgcccugggaaagcugcaggacguggucaaccagaaugcccaggcacugaacacccuggucaagcagcuguccuccaacuucggcgccaucagcucugugcugaacgauauccugagcagacuggacaaggucgaggccgaggugcagaucgacagacugaucacaggcagacugcagagccuccagacauacgugacccagcagcugaucagagccgccgagauuagagccucugccaaucuggccgccaccaagaugucugagugugugcugggccagagcaagagaguggacuuuugcggcaagggcuaccaccugaugagcuucccucagucugccccucacggcgugguguuucugcacgugacauaugugcccgcucaagagaagaauuucaccaccgcuccagccaucugccacgacggcaaagcccacuuuccuagagaaggcguguucguguccaacggcacccauugguucgugacacagcggaacuucuacgagccccagaucaucaccaccgacaacaccuucgugucuggcaacugcgacguugugaucggcauugugaacaauaccguguacgacccucugcagcccgagcuggacagcuucaaagaggaacuggacaaguacuuuaagaaccacacaagccccgacguggaccugggcgauaucagcggaaucaaugccagcgucgugaacauccagaaagagaucgaccggcugaacgagguggccaagaaucugaacgagagccugaucgaccugcaagaacuggggaaguacgagcaguacaucaaguggcccugguacaucuggcugggcuuuaucgccggacugauugccaucgugauggucacaaucaugcuguguugcaugaccagcugcuguagcugccugaagggcuguuguagcuguggcagcugcugcaaguucgacgaggacgauucugagcccgugcugaagggcgugaaacugcacuacaccugaggacuagucccuguucccagagcccacuuuuuuuucuuuuuuugaaauaaaauagccugucuuucagaucuaaaaaaaaaaaaaaaaaaaaaaaaaaaaaaaaaaaaaaaaaaaaaaaaaaaaaaaaaaaaaaaaaaaaaaaaaaaaaaaaaaaaaaaaaaaaaaaaaaaa

SEQ ID NO: 25027 - RNA, 4161 nt, Artificial Sequence
  SARS-CoV-2/Wuhan/WIV05/2019__EPI_ISL_402128 spike protein mRNA gc mod (1-1273)(H69del_V70del_D614G)
aggagagggcgcuuggcuugcaaggacccugagcugcggcauugaagcacacccaacccaacucgacugaagucagccucacugaaccggaucugagaaucuucucucucugggcuugccagggcucuccgaaccuagcuagcauccucuucaauuccaacuagaaagcuuaccauguucguguuucuggugcugcugccccugguguccagccagugugugaaccugaccaccagaacacagcugccuccagccuacaccaacagcuucaccagaggcguguacuaccccgacaagguguucagauccagcgugcugcacucuacccaggaccuguuccugccuuucuucagcaacgugaccugguuccacgccaucuccggcaccaauggcaccaagagauucgacaaccccgugcugcccuucaacgacgggguguacuuugccagcaccgagaaguccaacaucaucagaggcuggaucuucggcaccacacuggacagcaagacccagagccugcugaucgugaacaacgccaccaacguggucaucaaagugugcgaguuccaguucugcaacgaccccuuccugggcgucuacuaccacaagaacaacaagagcuggauggaaagcgaguuccggguguacagcagcgccaacaacugcaccuucgaguacgugucccagccuuuccugauggaccuggaaggcaagcagggcaacuucaagaaccugcgcgaguucguguucaagaacaucgacggcuacuucaaaaucuacagcaagcacaccccuaucaaccucgugcgggaucugccucagggcuucucugcucuggaaccccugguggaucugcccaucggcaucaacaucacccgguuucagacacugcuggcccugcacagaagcuaccugacaccuggcgauagcagcagcggauggacagcuggugccgccgcuuacuaugugggcuaccugcagccuagaaccuuccugcugaaguacaacgagaacggcaccaucaccgacgccguggauugugcucuggauccucugagcgagacaaagugcacccugaaguccuucaccguggaaaagggcaucuaccagaccagcaacuuccgggugcagcccaccgaauccaucgugcgguuccccaauaucaccaaucugugccccuucggcgagguguucaaugccaccagauucgccucuguguacgccuggaaccggaagcggaucagcaauugcguggccgacuacuccgugcuguacaacuccgccagcuucagcaccuucaagugcuacggcguguccccuaccaagcugaacgaccugugcuucacaaacguguacgccgacagcuucgugauccggggagaugaagugcggcagauugccccuggacagacaggcaagaucgccgacuacaacuacaagcugcccgacgacuucaccggcugugugauugccuggaacagcaacaaccuggacuccaaagucggcggcaacuacaauuaccuguaccggcuguuccggaaguccaaucugaagcccuucgagcgggacaucagcaccgaaaucuaucaggccggcagcaccccuugcaacggcguggaaggcuucaacugcuacuucccacugcaguccuacggcuuucagcccacaaauggcgugggcuaucagcccuacagagugguggugcugagcuucgaacugcugcaugcuccugccacagugugcggcccuaagaaaagcaccaaucucgugaagaacaaaugcgugaacuucaacuucaacggccugaccggcaccggcgugcugacagagagcaacaagaaguuccugccauuccagcaguuuggccgggauaucgccgauaccacagacgccguuagagauccccagacacuggaaauccuggacaucaccccaugcagcuucggcggagugucugugaucaccccuggcaccaacaccagcaaucagguggcagugcuguaccagggcgugaacuguaccgaagugcccguggccauucacgccgaucagcugacaccuacauggcggguguacuccaccggcagcaauguguuucagaccagagccggcugucugaucggagccgagcacgugaacaauagcuacgagugcgacauccccaucggcgcuggcaucugugccagcuaccagacacagacaaacagccccagacgggcuagaagcguggccagccagagcaucauugccuacacaaugucucugggcgccgagaacagcguggccuacuccaacaacucuaucgcuauccccaccaacuucaccaucagcgugaccaccgagauccugccuguguccaugaccaagaccagcguggacugcaccauguacaucugcggcgauuccaccgagugcuccaaccugcugcugcaguacggcagcuucugcacccagcugaauagagcccugacagggaucgccguggaacaggacaagaacacccaagagguguucgcccaagugaagcaaaucuacaagaccccuccuaucaaggacuucggcggcuucaauuucagccagauucugcccgauccuagcaagcccagcaagcggagcuucaucgaggaccugcuguucaacaaagugacacuggccgacgccggcuucaucaagcaguauggcgauugucugggcgacauugccgccagggaucugauuugcgcccagaaguuuaacggacugacagugcugccuccucugcugaccgaugagaugaucgcccaguacacaucugcccugcuggccggcacaaucacaagcggcuggacauuuggagcuggcgccgcucugcagauccccuuugcuaugcagauggccuaccgguucaacggcaucggagugacccagaaugugcuguacgagaaccagaagcugaucgccaaccaguucaacagcgccaucggcaagauccaggacagccugagcagcacagcaagcgcccugggaaagcugcaggacguggucaaccagaaugcccaggcacugaacacccuggucaagcagcuguccuccaacuucggcgccaucagcucugugcugaacgauauccugagcagacuggacaaggucgaggccgaggugcagaucgacagacugaucacaggcagacugcagagccuccagacauacgugacccagcagcugaucagagccgccgagauuagagccucugccaaucuggccgccaccaagaugucugagugugugcugggccagagcaagagaguggacuuuugcggcaagggcuaccaccugaugagcuucccucagucugccccucacggcgugguguuucugcacgugacauaugugcccgcucaagagaagaauuucaccaccgcuccagccaucugccacgacggcaaagcccacuuuccuagagaaggcguguucguguccaacggcacccauugguucgugacacagcggaacuucuacgagccccagaucaucaccaccgacaacaccuucgugucuggcaacugcgacguugugaucggcauugugaacaauaccguguacgacccucugcagcccgagcuggacagcuucaaagaggaacuggacaaguacuuuaagaaccacacaagccccgacguggaccugggcgauaucagcggaaucaaugccagcgucgugaacauccagaaagagaucgaccggcugaacgagguggccaagaaucugaacgagagccugaucgaccugcaagaacuggggaaguacgagcaguacaucaaguggcccugguacaucuggcugggcuuuaucgccggacugauugccaucgugauggucacaaucaugcuguguugcaugaccagcugcuguagcugccugaagggcuguuguagcuguggcagcugcugcaaguucgacgaggacgauucugagcccgugcugaagggcgugaaacugcacuacaccugaggacuagucccuguucccagagcccacuuuuuuuucuuuuuuugaaauaaaauagccugucuuucagaucuaaaaaaaaaaaaaaaaaaaaaaaaaaaaaaaaaaaaaaaaaaaaaaaaaaaaaaaaaaaaaaaaaaaaaaaaaaaaaaaaaaaaaaaaaaaaaaaaaaaa

SEQ ID NO: 25028 - RNA, 4167 nt, Artificial Sequence
  SARS-CoV-2/Wuhan/WIV05/2019__EPI_ISL_402128 spike protein mRNA gc mod (1-1273)(Y453F_D614G)
aggagagggcgcuuggcuugcaaggacccugagcugcggcauugaagcacacccaacccaacucgacugaagucagccucacugaaccggaucugagaaucuucucucucugggcuugccagggcucuccgaaccuagcuagcauccucuucaauuccaacuagaaagcuuaccauguucguguuucuggugcugcugccccugguguccagccagugugugaaccugaccaccagaacacagcugccuccagccuacaccaacagcuucaccagaggcguguacuaccccgacaagguguucagauccagcgugcugcacucuacccaggaccuguuccugccuuucuucagcaacgugaccugguuccacgccauccacguguccggcaccaauggcaccaagagauucgacaaccccgugcugcccuucaacgacgggguguacuuugccagcaccgagaaguccaacaucaucagaggcuggaucuucggcaccacacuggacagcaagacccagagccugcugaucgugaacaacgccaccaacguggucaucaaagugugcgaguuccaguucugcaacgaccccuuccugggcgucuacuaccacaagaacaacaagagcuggauggaaagcgaguuccggguguacagcagcgccaacaacugcaccuucgaguacgugucccagccuuuccugauggaccuggaaggcaagcagggcaacuucaagaaccugcgcgaguucguguucaagaacaucgacggcuacuucaaaaucuacagcaagcacaccccuaucaaccucgugcgggaucugccucagggcuucucugcucuggaaccccugguggaucugcccaucggcaucaacaucacccgguuucagacacugcuggcccugcacagaagcuaccugacaccuggcgauagcagcagcggauggacagcuggugccgccgcuuacuaugugggcuaccugcagccuagaaccuuccugcugaaguacaacgagaacggcaccaucaccgacgccguggauugugcucuggauccucugagcgagacaaagugcacccugaaguccuucaccguggaaaagggcaucuaccagaccagcaacuuccgggugcagcccaccgaauccaucgugcgguuccccaauaucaccaaucugugccccuucggcgagguguucaaugccaccagauucgccucuguguacgccuggaaccggaagcggaucagcaauugcguggccgacuacuccgugcuguacaacuccgccagcuucagcaccuucaagugcuacggcguguccccuaccaagcugaacgaccugugcuucacaaacguguacgccgacagcuucgugauccggggagaugaagugcggcagauugccccuggacagacaggcaagaucgccgacuacaacuacaagcugcccgacgacuucaccggcugugugauugccuggaacagcaacaaccuggacuccaaagucggcggcaacuacaauuaccuguuccggcuguuccggaaguccaaucugaagcccuucgagcgggacaucagcaccgaaaucuaucaggccggcagcaccccuugcaacggcguggaaggcuucaacugcuacuucccacugcaguccuacggcuuucagcccacaaauggcgugggcuaucagcccuacagagugguggugcugagcuucgaacugcugcaugcuccugccacagugugcggcccuaagaaaagcaccaaucucgugaagaacaaaugcgugaacuucaacuucaacggccugaccggcaccggcgugcugacagagagcaacaagaaguuccugccauuccagcaguuuggccgggauaucgccgauaccacagacgccguuagagauccccagacacuggaaauccuggacaucaccccaugcagcuucggcggagugucugugaucaccccuggcaccaacaccagcaaucagguggcagugcuguaccagggcgugaacuguaccgaagugcccguggccauucacgccgaucagcugacaccuacauggcggguguacuccaccggcagcaauguguuucagaccagagccggcugucugaucggagccgagcacgugaacaauagcuacgagugcgacauccccaucggcgcuggcaucugugccagcuaccagacacagacaaacagccccagacgggcuagaagcguggccagccagagcaucauugccuacacaaugucucugggcgccgagaacagcguggccuacuccaacaacucuaucgcuauccccaccaacuucaccaucagcgugaccaccgagauccugccuguguccaugaccaagaccagcguggacugcaccauguacaucugcggcgauuccaccgagugcuccaaccugcugcugcaguacggcagcuucugcacccagcugaauagagcccugacagggaucgccguggaacaggacaagaacacccaagagguguucgcccaagugaagcaaaucuacaagaccccuccuaucaaggacuucggcggcuucaauuucagccagauucugcccgauccuagcaagcccagcaagcggagcuucaucgaggaccugcuguucaacaaagugacacuggccgacgccggcuucaucaagcaguauggcgauugucugggcgacauugccgccagggaucugauuugcgcccagaaguuuaacggacugacagugcugccuccucugcugaccgaugagaugaucgcccaguacacaucugcccugcuggccggcacaaucacaagcggcuggacauuuggagcuggcgccgcucugcagauccccuuugcuaugcagauggccuaccgguucaacggcaucggagugacccagaaugugcuguacgagaaccagaagcugaucgccaaccaguucaacagcgccaucggcaagauccaggacagccugagcagcacagcaagcgcccugggaaagcugcaggacguggucaaccagaaugcccaggcacugaacacccuggucaagcagcuguccuccaacuucggcgccaucagcucugugcugaacgauauccugagcagacuggacaaggucgaggccgaggugcagaucgacagacugaucacaggcagacugcagagccuccagacauacgugacccagcagcugaucagagccgccgagauuagagccucugccaaucuggccgccaccaagaugucugagugugugcugggccagagcaagagaguggacuuuugcggcaagggcuaccaccugaugagcuucccucagucugccccucacggcgugguguuucugcacgugacauaugugcccgcucaagagaagaauuucaccaccgcuccagccaucugccacgacggcaaagcccacuuuccuagagaaggcguguucguguccaacggcacccauugguucgugacacagcggaacuucuacgagccccagaucaucaccaccgacaacaccuucgugucuggcaacugcgacguugugaucggcauugugaacaauaccguguacgacccucugcagcccgagcuggacagcuucaaagaggaacuggacaaguacuuuaagaaccacacaagccccgacguggaccugggcgauaucagcggaaucaaugccagcgucgugaacauccagaaagagaucgaccggcugaacgagguggccaagaaucugaacgagagccugaucgaccugcaagaacuggggaaguacgagcaguacaucaaguggcccugguacaucuggcugggcuuuaucgccggacugauugccaucgugauggucacaaucaugcuguguugcaugaccagcugcuguagcugccugaagggcuguuguagcuguggcagcugcugcaaguucgacgaggacgauucugagcccgugcugaagggcgugaaacugcacuacaccugaggacuagucccuguucccagagcccacuuuuuuuucuuuuuuugaaauaaaauagccugucuuucagaucuaaaaaaaaaaaaaaaaaaaaaaaaaaaaaaaaaaaaaaaaaaaaaaaaaaaaaaaaaaaaaaaaaaaaaaaaaaaaaaaaaaaaaaaaaaaaaaaaaaaa

SEQ ID NO: 25029 - RNA, 4167 nt, Artificial Sequence
  SARS-CoV-2/Wuhan/WIV05/2019__EPI_ISL_402128 spike protein mRNA gc mod (1-1273)(D614G_I692V)
aggagagggcgcuuggcuugcaaggacccugagcugcggcauugaagcacacccaacccaacucgacugaagucagccucacugaaccggaucugagaaucuucucucucugggcuugccagggcucuccgaaccuagcuagcauccucuucaauuccaacuagaaagcuuaccauguucguguuucuggugcugcugccccugguguccagccagugugugaaccugaccaccagaacacagcugccuccagccuacaccaacagcuucaccagaggcguguacuaccccgacaagguguucagauccagcgugcugcacucuacccaggaccuguuccugccuuucuucagcaacgugaccugguuccacgccauccacguguccggcaccaauggcaccaagagauucgacaaccccgugcugcccuucaacgacgggguguacuuugccagcaccgagaaguccaacaucaucagaggcuggaucuucggcaccacacuggacagcaagacccagagccugcugaucgugaacaacgccaccaacguggucaucaaagugugcgaguuccaguucugcaacgaccccuuccugggcgucuacuaccacaagaacaacaagagcuggauggaaagcgaguuccggguguacagcagcgccaacaacugcaccuucgaguacgugucccagccuuuccugauggaccuggaaggcaagcagggcaacuucaagaaccugcgcgaguucguguucaagaacaucgacggcuacuucaaaaucuacagcaagcacaccccuaucaaccucgugcgggaucugccucagggcuucucugcucuggaaccccugguggaucugcccaucggcaucaacaucacccgguuucagacacugcuggcccugcacagaagcuaccugacaccuggcgauagcagcagcggauggacagcuggugccgccgcuuacuaugugggcuaccugcagccuagaaccuuccugcugaaguacaacgagaacggcaccaucaccgacgccguggauugugcucuggauccucugagcgagacaaagugcacccugaaguccuucaccguggaaaagggcaucuaccagaccagcaacuuccgggugcagcccaccgaauccaucgugcgguuccccaauaucaccaaucugugccccuucggcgagguguucaaugccaccagauucgccucuguguacgccuggaaccggaagcggaucagcaauugcguggccgacuacuccgugcuguacaacuccgccagcuucagcaccuucaagugcuacggcguguccccuaccaagcugaacgaccugugcuucacaaacguguacgccgacagcuucgugauccggggagaugaagugcggcagauugccccuggacagacaggcaagaucgccgacuacaacuacaagcugcccgacgacuucaccggcugugugauugccuggaacagcaacaaccuggacuccaaagucggcggcaacuacaauuaccuguaccggcuguuccggaaguccaaucugaagcccuucgagcgggacaucagcaccgaaaucuaucaggccggcagcaccccuugcaacggcguggaaggcuucaacugcuacuucccacugcaguccuacggcuuucagcccacaaauggcgugggcuaucagcccuacagagugguggugcugagcuucgaacugcugcaugcuccugccacagugugcggcccuaagaaaagcaccaaucucgugaagaacaaaugcgugaacuucaacuucaacggccugaccggcaccggcgugcugacagagagcaacaagaaguuccugccauuccagcaguuuggccgggauaucgccgauaccacagacgccguuagagauccccagacacuggaaauccuggacaucaccccaugcagcuucggcggagugucugugaucaccccuggcaccaacaccagcaaucagguggcagugcuguaccagggcgugaacuguaccgaagugcccguggccauucacgccgaucagcugacaccuacauggcggguguacuccaccggcagcaauguguuucagaccagagccggcugucugaucggagccgagcacgugaacaauagcuacgagugcgacauccccaucggcgcuggcaucugugccagcuaccagacacagacaaacagccccagacgggcuagaagcguggccagccagagcgugauugccuacacaaugucucugggcgccgagaacagcguggccuacuccaacaacucuaucgcuauccccaccaacuucaccaucagcgugaccaccgagauccugccuguguccaugaccaagaccagcguggacugcaccauguacaucugcggcgauuccaccgagugcuccaaccugcugcugcaguacggcagcuucugcacccagcugaauagagcccugacagggaucgccguggaacaggacaagaacacccaagagguguucgcccaagugaagcaaaucuacaagaccccuccuaucaaggacuucggcggcuucaauuucagccagauucugcccgauccuagcaagcccagcaagcggagcuucaucgaggaccugcuguucaacaaagugacacuggccgacgccggcuucaucaagcaguauggcgauugucugggcgacauugccgccagggaucugauuugcgcccagaaguuuaacggacugacagugcugccuccucugcugaccgaugagaugaucgcccaguacacaucugcccugcuggccggcacaaucacaagcggcuggacauuuggagcuggcgccgcucugcagauccccuuugcuaugcagauggccuaccgguucaacggcaucggagugacccagaaugugcuguacgagaaccagaagcugaucgccaaccaguucaacagcgccaucggcaagauccaggacagccugagcagcacagcaagcgcccugggaaagcugcaggacguggucaaccagaaugcccaggcacugaacacccuggucaagcagcuguccuccaacuucggcgccaucagcucugugcugaacgauauccugagcagacuggacaaggucgaggccgaggugcagaucgacagacugaucacaggcagacugcagagccuccagacauacgugacccagcagcugaucagagccgccgagauuagagccucugccaaucuggccgccaccaagaugucugagugugugcugggccagagcaagagaguggacuuuugcggcaagggcuaccaccugaugagcuucccucagucugccccucacggcgugguguuucugcacgugacauaugugcccgcucaagagaagaauuucaccaccgcuccagccaucugccacgacggcaaagcccacuuuccuagagaaggcguguucguguccaacggcacccauugguucgugacacagcggaacuucuacgagccccagaucaucaccaccgacaacaccuucgugucuggcaacugcgacguugugaucggcauugugaacaauaccguguacgacccucugcagcccgagcuggacagcuucaaagaggaacuggacaaguacuuuaagaaccacacaagccccgacguggaccugggcgauaucagcggaaucaaugccagcgucgugaacauccagaaagagaucgaccggcugaacgagguggccaagaaucugaacgagagccugaucgaccugcaagaacuggggaaguacgagcaguacaucaaguggcccugguacaucuggcugggcuuuaucgccggacugauugccaucgugauggucacaaucaugcuguguugcaugaccagcugcuguagcugccugaagggcuguuguagcuguggcagcugcugcaaguucgacgaggacgauucugagcccgugcugaagggcgugaaacugcacuacaccugaggacuagucccuguucccagagcccacuuuuuuuucuuuuuuugaaauaaaauagccugucuuucagaucuaaaaaaaaaaaaaaaaaaaaaaaaaaaaaaaaaaaaaaaaaaaaaaaaaaaaaaaaaaaaaaaaaaaaaaaaaaaaaaaaaaaaaaaaaaaaaaaaaaaa

SEQ ID NO: 25030 - RNA, 4167 nt, Artificial Sequence
  SARS-CoV-2/Wuhan/WIV05/2019__EPI_ISL_402128 spike protein mRNA gc mod (1-1273)(D614G_M1229I)
aggagagggcgcuuggcuugcaaggacccugagcugcggcauugaagcacacccaacccaacucgacugaagucagccucacugaaccggaucugagaaucuucucucucugggcuugccagggcucuccgaaccuagcuagcauccucuucaauuccaacuagaaagcuuaccauguucguguuucuggugcugcugccccugguguccagccagugugugaaccugaccaccagaacacagcugccuccagccuacaccaacagcuucaccagaggcguguacuaccccgacaagguguucagauccagcgugcugcacucuacccaggaccuguuccugccuuucuucagcaacgugaccugguuccacgccauccacguguccggcaccaauggcaccaagagauucgacaaccccgugcugcccuucaacgacgggguguacuuugccagcaccgagaaguccaacaucaucagaggcuggaucuucggcaccacacuggacagcaagacccagagccugcugaucgugaacaacgccaccaacguggucaucaaagugugcgaguuccaguucugcaacgaccccuuccugggcgucuacuaccacaagaacaacaagagcuggauggaaagcgaguuccggguguacagcagcgccaacaacugcaccuucgaguacgugucccagccuuuccugauggaccuggaaggcaagcagggcaacuucaagaaccugcgcgaguucguguucaagaacaucgacggcuacuucaaaaucuacagcaagcacaccccuaucaaccucgugcgggaucugccucagggcuucucugcucuggaaccccugguggaucugcccaucggcaucaacaucacccgguuucagacacugcuggcccugcacagaagcuaccugacaccuggcgauagcagcagcggauggacagcuggugccgccgcuuacuaugugggcuaccugcagccuagaaccuuccugcugaaguacaacgagaacggcaccaucaccgacgccguggauugugcucuggauccucugagcgagacaaagugcacccugaaguccuucaccguggaaaagggcaucuaccagaccagcaacuuccgggugcagcccaccgaauccaucgugcgguuccccaauaucaccaaucugugccccuucggcgagguguucaaugccaccagauucgccucuguguacgccuggaaccggaagcggaucagcaauugcguggccgacuacuccgugcuguacaacuccgccagcuucagcaccuucaagugcuacggcguguccccuaccaagcugaacgaccugugcuucacaaacguguacgccgacagcuucgugauccggggagaugaagugcggcagauugccccuggacagacaggcaagaucgccgacuacaacuacaagcugcccgacgacuucaccggcugugugauugccuggaacagcaacaaccuggacuccaaagucggcggcaacuacaauuaccuguaccggcuguuccggaaguccaaucugaagcccuucgagcgggacaucagcaccgaaaucuaucaggccggcagcaccccuugcaacggcguggaaggcuucaacugcuacuucccacugcaguccuacggcuuucagcccacaaauggcgugggcuaucagcccuacagagugguggugcugagcuucgaacugcugcaugcuccugccacagugugcggcccuaagaaaagcaccaaucucgugaagaacaaaugcgugaacuucaacuucaacggccugaccggcaccggcgugcugacagagagcaacaagaaguuccugccauuccagcaguuuggccgggauaucgccgauaccacagacgccguuagagauccccagacacuggaaauccuggacaucaccccaugcagcuucggcggagugucugugaucaccccuggcaccaacaccagcaaucagguggcagugcuguaccagggcgugaacuguaccgaagugcccguggccauucacgccgaucagcugacaccuacauggcggguguacuccaccggcagcaauguguuucagaccagagccggcugucugaucggagccgagcacgugaacaauagcuacgagugcgacauccccaucggcgcuggcaucugugccagcuaccagacacagacaaacagccccagacgggcuagaagcguggccagccagagcaucauugccuacacaaugucucugggcgccgagaacagcguggccuacuccaacaacucuaucgcuauccccaccaacuucaccaucagcgugaccaccgagauccugccuguguccaugaccaagaccagcguggacugcaccauguacaucugcggcgauuccaccgagugcuccaaccugcugcugcaguacggcagcuucugcacccagcugaauagagcccugacagggaucgccguggaacaggacaagaacacccaagagguguucgcccaagugaagcaaaucuacaagaccccuccuaucaaggacuucggcggcuucaauuucagccagauucugcccgauccuagcaagcccagcaagcggagcuucaucgaggaccugcuguucaacaaagugacacuggccgacgccggcuucaucaagcaguauggcgauugucugggcgacauugccgccagggaucugauuugcgcccagaaguuuaacggacugacagugcugccuccucugcugaccgaugagaugaucgcccaguacacaucugcccugcuggccggcacaaucacaagcggcuggacauuuggagcuggcgccgcucugcagauccccuuugcuaugcagauggccuaccgguucaacggcaucggagugacccagaaugugcuguacgagaaccagaagcugaucgccaaccaguucaacagcgccaucggcaagauccaggacagccugagcagcacagcaagcgcccugggaaagcugcaggacguggucaaccagaaugcccaggcacugaacacccuggucaagcagcuguccuccaacuucggcgccaucagcucugugcugaacgauauccugagcagacuggacaaggucgaggccgaggugcagaucgacagacugaucacaggcagacugcagagccuccagacauacgugacccagcagcugaucagagccgccgagauuagagccucugccaaucuggccgccaccaagaugucugagugugugcugggccagagcaagagaguggacuuuugcggcaagggcuaccaccugaugagcuucccucagucugccccucacggcgugguguuucugcacgugacauaugugcccgcucaagagaagaauuucaccaccgcuccagccaucugccacgacggcaaagcccacuuuccuagagaaggcguguucguguccaacggcacccauugguucgugacacagcggaacuucuacgagccccagaucaucaccaccgacaacaccuucgugucuggcaacugcgacguugugaucggcauugugaacaauaccguguacgacccucugcagcccgagcuggacagcuucaaagaggaacuggacaaguacuuuaagaaccacacaagccccgacguggaccugggcgauaucagcggaaucaaugccagcgucgugaacauccagaaagagaucgaccggcugaacgagguggccaagaaucugaacgagagccugaucgaccugcaagaacuggggaaguacgagcaguacaucaaguggcccugguacaucuggcugggcuuuaucgccggacugauugccaucgugaucgucacaaucaugcuguguugcaugaccagcugcuguagcugccugaagggcuguuguagcuguggcagcugcugcaaguucgacgaggacgauucugagcccgugcugaagggcgugaaacugcacuacaccugaggacuagucccuguucccagagcccacuuuuuuuucuuuuuuugaaauaaaauagccugucuuucagaucuaaaaaaaaaaaaaaaaaaaaaaaaaaaaaaaaaaaaaaaaaaaaaaaaaaaaaaaaaaaaaaaaaaaaaaaaaaaaaaaaaaaaaaaaaaaaaaaaaaaa

SEQ ID NO: 25031 - RNA, 4161 nt, Artificial Sequence
  SARS-CoV-2/Wuhan/WIV05/2019__EPI_ISL_402128 spike protein mRNA gc mod (1-1273)(H69del_V70del_A222V_Y453F_S477N_D614G_I692V)
aggagagggcgcuuggcuugcaaggacccugagcugcggcauugaagcacacccaacccaacucgacugaagucagccucacugaaccggaucugagaaucuucucucucugggcuugccagggcucuccgaaccuagcuagcauccucuucaauuccaacuagaaagcuuaccauguucguguuucuggugcugcugccccugguguccagccagugugugaaccugaccaccagaacacagcugccuccagccuacaccaacagcuucaccagaggcguguacuaccccgacaagguguucagauccagcgugcugcacucuacccaggaccuguuccugccuuucuucagcaacgugaccugguuccacgccaucuccggcaccaauggcaccaagagauucgacaaccccgugcugcccuucaacgacgggguguacuuugccagcaccgagaaguccaacaucaucagaggcuggaucuucggcaccacacuggacagcaagacccagagccugcugaucgugaacaacgccaccaacguggucaucaaagugugcgaguuccaguucugcaacgaccccuuccugggcgucuacuaccacaagaacaacaagagcuggauggaaagcgaguuccggguguacagcagcgccaacaacugcaccuucgaguacgugucccagccuuuccugauggaccuggaaggcaagcagggcaacuucaagaaccugcgcgaguucguguucaagaacaucgacggcuacuucaaaaucuacagcaagcacaccccuaucaaccucgugcgggaucugccucagggcuucucugugcuggaaccccugguggaucugcccaucggcaucaacaucacccgguuucagacacugcuggcccugcacagaagcuaccugacaccuggcgauagcagcagcggauggacagcuggugccgccgcuuacuaugugggcuaccugcagccuagaaccuuccugcugaaguacaacgagaacggcaccaucaccgacgccguggauugugcucuggauccucugagcgagacaaagugcacccugaaguccuucaccguggaaaagggcaucuaccagaccagcaacuuccgggugcagcccaccgaauccaucgugcgguuccccaauaucaccaaucugugccccuucggcgagguguucaaugccaccagauucgccucuguguacgccuggaaccggaagcggaucagcaauugcguggccgacuacuccgugcuguacaacuccgccagcuucagcaccuucaagugcuacggcguguccccuaccaagcugaacgaccugugcuucacaaacguguacgccgacagcuucgugauccggggagaugaagugcggcagauugccccuggacagacaggcaagaucgccgacuacaacuacaagcugcccgacgacuucaccggcugugugauugccuggaacagcaacaaccuggacuccaaagucggcggcaacuacaauuaccuguuccggcuguuccggaaguccaaucugaagcccuucgagcgggacaucagcaccgaaaucuaucaggccggcaacaccccuugcaacggcguggaaggcuucaacugcuacuucccacugcaguccuacggcuuucagcccacaaauggcgugggcuaucagcccuacagagugguggugcugagcuucgaacugcugcaugcuccugccacagugugcggcccuaagaaaagcaccaaucucgugaagaacaaaugcgugaacuucaacuucaacggccugaccggcaccggcgugcugacagagagcaacaagaaguuccugccauuccagcaguuuggccgggauaucgccgauaccacagacgccguuagagauccccagacacuggaaauccuggacaucaccccaugcagcuucggcggagugucugugaucaccccuggcaccaacaccagcaaucagguggcagugcuguaccagggcgugaacuguaccgaagugcccguggccauucacgccgaucagcugacaccuacauggcggguguacuccaccggcagcaauguguuucagaccagagccggcugucugaucggagccgagcacgugaacaauagcuacgagugcgacauccccaucggcgcuggcaucugugccagcuaccagacacagacaaacagccccagacgggcuagaagcguggccagccagagcgugauugccuacacaaugucucugggcgccgagaacagcguggccuacuccaacaacucuaucgcuauccccaccaacuucaccaucagcgugaccaccgagauccugccuguguccaugaccaagaccagcguggacugcaccauguacaucugcggcgauuccaccgagugcuccaaccugcugcugcaguacggcagcuucugcacccagcugaauagagcccugacagggaucgccguggaacaggacaagaacacccaagagguguucgcccaagugaagcaaaucuacaagaccccuccuaucaaggacuucggcggcuucaauuucagccagauucugcccgauccuagcaagcccagcaagcggagcuucaucgaggaccugcuguucaacaaagugacacuggccgacgccggcuucaucaagcaguauggcgauugucugggcgacauugccgccagggaucugauuugcgcccagaaguuuaacggacugacagugcugccuccucugcugaccgaugagaugaucgcccaguacacaucugcccugcuggccggcacaaucacaagcggcuggacauuuggagcuggcgccgcucugcagauccccuuugcuaugcagauggccuaccgguucaacggcaucggagugacccagaaugugcuguacgagaaccagaagcugaucgccaaccaguucaacagcgccaucggcaagauccaggacagccugagcagcacagcaagcgcccugggaaagcugcaggacguggucaaccagaaugcccaggcacugaacacccuggucaagcagcuguccuccaacuucggcgccaucagcucugugcugaacgauauccugagcagacuggacaaggucgaggccgaggugcagaucgacagacugaucacaggcagacugcagagccuccagacauacgugacccagcagcugaucagagccgccgagauuagagccucugccaaucuggccgccaccaagaugucugagugugugcugggccagagcaagagaguggacuuuugcggcaagggcuaccaccugaugagcuucccucagucugccccucacggcgugguguuucugcacgugacauaugugcccgcucaagagaagaauuucaccaccgcuccagccaucugccacgacggcaaagcccacuuuccuagagaaggcguguucguguccaacggcacccauugguucgugacacagcggaacuucuacgagccccagaucaucaccaccgacaacaccuucgugucuggcaacugcgacguugugaucggcauugugaacaauaccguguacgacccucugcagcccgagcuggacagcuucaaagaggaacuggacaaguacuuuaagaaccacacaagccccgacguggaccugggcgauaucagcggaaucaaugccagcgucgugaacauccagaaagagaucgaccggcugaacgagguggccaagaaucugaacgagagccugaucgaccugcaagaacuggggaaguacgagcaguacaucaaguggcccugguacaucuggcugggcuuuaucgccggacugauugccaucgugauggucacaaucaugcuguguugcaugaccagcugcuguagcugccugaagggcuguuguagcuguggcagcugcugcaaguucgacgaggacgauucugagcccgugcugaagggcgugaaacugcacuacaccugaggacuagucccuguucccagagcccacuuuuuuuucuuuuuuugaaauaaaauagccugucuuucagaucuaaaaaaaaaaaaaaaaaaaaaaaaaaaaaaaaaaaaaaaaaaaaaaaaaaaaaaaaaaaaaaaaaaaaaaaaaaaaaaaaaaaaaaaaaaaaaaaaaaaa

SEQ ID NO: 25032 - RNA, 4161 nt, Artificial Sequence
  SARS-CoV-2/Wuhan/WIV05/2019__EPI_ISL_402128 spike protein mRNA gc mod (1-1273)(H69del_V70del_Y453F_D614G_I692V_M1229I)
aggagagggcgcuuggcuugcaaggacccugagcugcggcauugaagcacacccaacccaacucgacugaagucagccucacugaaccggaucugagaaucuucucucucugggcuugccagggcucuccgaaccuagcuagcauccucuucaauuccaacuagaaagcuuaccauguucguguuucuggugcugcugccccugguguccagccagugugugaaccugaccaccagaacacagcugccuccagccuacaccaacagcuucaccagaggcguguacuaccccgacaagguguucagauccagcgugcugcacucuacccaggaccuguuccugccuuucuucagcaacgugaccugguuccacgccaucuccggcaccaauggcaccaagagauucgacaaccccgugcugcccuucaacgacgggguguacuuugccagcaccgagaaguccaacaucaucagaggcuggaucuucggcaccacacuggacagcaagacccagagccugcugaucgugaacaacgccaccaacguggucaucaaagugugcgaguuccaguucugcaacgaccccuuccugggcgucuacuaccacaagaacaacaagagcuggauggaaagcgaguuccggguguacagcagcgccaacaacugcaccuucgaguacgugucccagccuuuccugauggaccuggaaggcaagcagggcaacuucaagaaccugcgcgaguucguguucaagaacaucgacggcuacuucaaaaucuacagcaagcacaccccuaucaaccucgugcgggaucugccucagggcuucucugcucuggaaccccugguggaucugcccaucggcaucaacaucacccgguuucagacacugcuggcccugcacagaagcuaccugacaccuggcgauagcagcagcggauggacagcuggugccgccgcuuacuaugugggcuaccugcagccuagaaccuuccugcugaaguacaacgagaacggcaccaucaccgacgccguggauugugcucuggauccucugagcgagacaaagugcacccugaaguccuucaccguggaaaagggcaucuaccagaccagcaacuuccgggugcagcccaccgaauccaucgugcgguuccccaauaucaccaaucugugccccuucggcgagguguucaaugccaccagauucgccucuguguacgccuggaaccggaagcggaucagcaauugcguggccgacuacuccgugcuguacaacuccgccagcuucagcaccuucaagugcuacggcguguccccuaccaagcugaacgaccugugcuucacaaacguguacgccgacagcuucgugauccggggagaugaagugcggcagauugccccuggacagacaggcaagaucgccgacuacaacuacaagcugcccgacgacuucaccggcugugugauugccuggaacagcaacaaccuggacuccaaagucggcggcaacuacaauuaccuguuccggcuguuccggaaguccaaucugaagcccuucgagcgggacaucagcaccgaaaucuaucaggccggcagcaccccuugcaacggcguggaaggcuucaacugcuacuucccacugcaguccuacggcuuucagcccacaaauggcgugggcuaucagcccuacagagugguggugcugagcuucgaacugcugcaugcuccugccacagugugcggcccuaagaaaagcaccaaucucgugaagaacaaaugcgugaacuucaacuucaacggccugaccggcaccggcgugcugacagagagcaacaagaaguuccugccauuccagcaguuuggccgggauaucgccgauaccacagacgccguuagagauccccagacacuggaaauccuggacaucaccccaugcagcuucggcggagugucugugaucaccccuggcaccaacaccagcaaucagguggcagugcuguaccagggcgugaacuguaccgaagugcccguggccauucacgccgaucagcugacaccuacauggcggguguacuccaccggcagcaauguguuucagaccagagccggcugucugaucggagccgagcacgugaacaauagcuacgagugcgacauccccaucggcgcuggcaucugugccagcuaccagacacagacaaacagccccagacgggcuagaagcguggccagccagagcgugauugccuacacaaugucucugggcgccgagaacagcguggccuacuccaacaacucuaucgcuauccccaccaacuucaccaucagcgugaccaccgagauccugccuguguccaugaccaagaccagcguggacugcaccauguacaucugcggcgauuccaccgagugcuccaaccugcugcugcaguacggcagcuucugcacccagcugaauagagcccugacagggaucgccguggaacaggacaagaacacccaagagguguucgcccaagugaagcaaaucuacaagaccccuccuaucaaggacuucggcggcuucaauuucagccagauucugcccgauccuagcaagcccagcaagcggagcuucaucgaggaccugcuguucaacaaagugacacuggccgacgccggcuucaucaagcaguauggcgauugucugggcgacauugccgccagggaucugauuugcgcccagaaguuuaacggacugacagugcugccuccucugcugaccgaugagaugaucgcccaguacacaucugcccugcuggccggcacaaucacaagcggcuggacauuuggagcuggcgccgcucugcagauccccuuugcuaugcagauggccuaccgguucaacggcaucggagugacccagaaugugcuguacgagaaccagaagcugaucgccaaccaguucaacagcgccaucggcaagauccaggacagccugagcagcacagcaagcgcccugggaaagcugcaggacguggucaaccagaaugcccaggcacugaacacccuggucaagcagcuguccuccaacuucggcgccaucagcucugugcugaacgauauccugagcagacuggacaaggucgaggccgaggugcagaucgacagacugaucacaggcagacugcagagccuccagacauacgugacccagcagcugaucagagccgccgagauuagagccucugccaaucuggccgccaccaagaugucugagugugugcugggccagagcaagagaguggacuuuugcggcaagggcuaccaccugaugagcuucccucagucugccccucacggcgugguguuucugcacgugacauaugugcccgcucaagagaagaauuucaccaccgcuccagccaucugccacgacggcaaagcccacuuuccuagagaaggcguguucguguccaacggcacccauugguucgugacacagcggaacuucuacgagccccagaucaucaccaccgacaacaccuucgugucuggcaacugcgacguugugaucggcauugugaacaauaccguguacgacccucugcagcccgagcuggacagcuucaaagaggaacuggacaaguacuuuaagaaccacacaagccccgacguggaccugggcgauaucagcggaaucaaugccagcgucgugaacauccagaaagagaucgaccggcugaacgagguggccaagaaucugaacgagagccugaucgaccugcaagaacuggggaaguacgagcaguacaucaaguggcccugguacaucuggcugggcuuuaucgccggacugauugccaucgugaucgucacaaucaugcuguguugcaugaccagcugcuguagcugccugaagggcuguuguagcuguggcagcugcugcaaguucgacgaggacgauucugagcccgugcugaagggcgugaaacugcacuacaccugaggacuagucccuguucccagagcccacuuuuuuuucuuuuuuugaaauaaaauagccugucuuucagaucuaaaaaaaaaaaaaaaaaaaaaaaaaaaaaaaaaaaaaaaaaaaaaaaaaaaaaaaaaaaaaaaaaaaaaaaaaaaaaaaaaaaaaaaaaaaaaaaaaaaa

SEQ ID NO: 25033 - RNA, 4158 nt, Artificial Sequence
  SARS-CoV-2/Wuhan/WIV05/2019__EPI_ISL_402128 spike protein mRNA gc mod (1-1273)(H69del_V70del_Y144del_N501Y_A570D_D614G_P681H_T716I_S982 A_D1118H)
aggagagggcgcuuggcuugcaaggacccugagcugcggcauugaagcacacccaacccaacucgacugaagucagccucacugaaccggaucugagaaucuucucucucugggcuugccagggcucuccgaaccuagcuagcauccucuucaauuccaacuagaaagcuuaccauguucguguuucuggugcugcugccccugguguccagccagugugugaaccugaccaccagaacacagcugccuccagccuacaccaacagcuucaccagaggcguguacuaccccgacaagguguucagauccagcgugcugcacucuacccaggaccuguuccugccuuucuucagcaacgugaccugguuccacgccaucuccggcaccaauggcaccaagagauucgacaaccccgugcugcccuucaacgacgggguguacuuugccagcaccgagaaguccaacaucaucagaggcuggaucuucggcaccacacuggacagcaagacccagagccugcugaucgugaacaacgccaccaacguggucaucaaagugugcgaguuccaguucugcaacgaccccuuccugggcgucuaccacaagaacaacaagagcuggauggaaagcgaguuccggguguacagcagcgccaacaacugcaccuucgaguacgugucccagccuuuccugauggaccuggaaggcaagcagggcaacuucaagaaccugcgcgaguucguguucaagaacaucgacggcuacuucaaaaucuacagcaagcacaccccuaucaaccucgugcgggaucugccucagggcuucucugcucuggaaccccugguggaucugcccaucggcaucaacaucacccgguuucagacacugcuggcccugcacagaagcuaccugacaccuggcgauagcagcagcggauggacagcuggugccgccgcuuacuaugugggcuaccugcagccuagaaccuuccugcugaaguacaacgagaacggcaccaucaccgacgccguggauugugcucuggauccucugagcgagacaaagugcacccugaaguccuucaccguggaaaagggcaucuaccagaccagcaacuuccgggugcagcccaccgaauccaucgugcgguuccccaauaucaccaaucugugccccuucggcgagguguucaaugccaccagauucgccucuguguacgccuggaaccggaagcggaucagcaauugcguggccgacuacuccgugcuguacaacuccgccagcuucagcaccuucaagugcuacggcguguccccuaccaagcugaacgaccugugcuucacaaacguguacgccgacagcuucgugauccggggagaugaagugcggcagauugccccuggacagacaggcaagaucgccgacuacaacuacaagcugcccgacgacuucaccggcugugugauugccuggaacagcaacaaccuggacuccaaagucggcggcaacuacaauuaccuguaccggcuguuccggaaguccaaucugaagcccuucgagcgggacaucagcaccgaaaucuaucaggccggcagcaccccuugcaacggcguggaaggcuucaacugcuacuucccacugcaguccuacggcuuucagcccacauacggcgugggcuaucagcccuacagagugguggugcugagcuucgaacugcugcaugcuccugccacagugugcggcccuaagaaaagcaccaaucucgugaagaacaaaugcgugaacuucaacuucaacggccugaccggcaccggcgugcugacagagagcaacaagaaguuccugccauuccagcaguuuggccgggauaucgacgauaccacagacgccguuagagauccccagacacuggaaauccuggacaucaccccaugcagcuucggcggagugucugugaucaccccuggcaccaacaccagcaaucagguggcagugcuguaccagggcgugaacuguaccgaagugcccguggccauucacgccgaucagcugacaccuacauggcggguguacuccaccggcagcaauguguuucagaccagagccggcugucugaucggagccgagcacgugaacaauagcuacgagugcgacauccccaucggcgcuggcaucugugccagcuaccagacacagacaaacagccacagacgggcuagaagcguggccagccagagcaucauugccuacacaaugucucugggcgccgagaacagcguggccuacuccaacaacucuaucgcuauccccaucaacuucaccaucagcgugaccaccgagauccugccuguguccaugaccaagaccagcguggacugcaccauguacaucugcggcgauuccaccgagugcuccaaccugcugcugcaguacggcagcuucugcacccagcugaauagagcccugacagggaucgccguggaacaggacaagaacacccaagagguguucgcccaagugaagcaaaucuacaagaccccuccuaucaaggacuucggcggcuucaauuucagccagauucugcccgauccuagcaagcccagcaagcggagcuucaucgaggaccugcuguucaacaaagugacacuggccgacgccggcuucaucaagcaguauggcgauugucugggcgacauugccgccagggaucugauuugcgcccagaaguuuaacggacugacagugcugccuccucugcugaccgaugagaugaucgcccaguacacaucugcccugcuggccggcacaaucacaagcggcuggacauuuggagcuggcgccgcucugcagauccccuuugcuaugcagauggccuaccgguucaacggcaucggagugacccagaaugugcuguacgagaaccagaagcugaucgccaaccaguucaacagcgccaucggcaagauccaggacagccugagcagcacagcaagcgcccugggaaagcugcaggacguggucaaccagaaugcccaggcacugaacacccuggucaagcagcuguccuccaacuucggcgccaucagcucugugcugaacgauauccuggccagacuggacaaggucgaggccgaggugcagaucgacagacugaucacaggcagacugcagagccuccagacauacgugacccagcagcugaucagagccgccgagauuagagccucugccaaucuggccgccaccaagaugucugagugugugcugggccagagcaagagaguggacuuuugcggcaagggcuaccaccugaugagcuucccucagucugccccucacggcgugguguuucugcacgugacauaugugcccgcucaagagaagaauuucaccaccgcuccagccaucugccacgacggcaaagcccacuuuccuagagaaggcguguucguguccaacggcacccauugguucgugacacagcggaacuucuacgagccccagaucaucaccacccacaacaccuucgugucuggcaacugcgacguugugaucggcauugugaacaauaccguguacgacccucugcagcccgagcuggacagcuucaaagaggaacuggacaaguacuuuaagaaccacacaagccccgacguggaccugggcgauaucagcggaaucaaugccagcgucgugaacauccagaaagagaucgaccggcugaacgagguggccaagaaucugaacgagagccugaucgaccugcaagaacuggggaaguacgagcaguacaucaaguggcccugguacaucuggcugggcuuuaucgccggacugauugccaucgugauggucacaaucaugcuguguugcaugaccagcugcuguagcugccugaagggcuguuguagcuguggcagcugcugcaaguucgacgaggacgauucugagcccgugcugaagggcgugaaacugcacuacaccugaggacuagucccuguucccagagcccacuuuuuuuucuuuuuuugaaauaaaauagccugucuuucagaucuaaaaaaaaaaaaaaaaaaaaaaaaaaaaaaaaaaaaaaaaaaaaaaaaaaaaaaaaaaaaaaaaaaaaaaaaaaaaaaaaaaaaaaaaaaaaaaaaaaaa

SEQ ID NO: 25034 - RNA, 4167 nt, Artificial Sequence
  SARS-CoV-2/Wuhan/WIV05/2019__EPI_ISL_402128 spike protein mRNA gc mod (1-1273)(K417N_E484K_N501Y_D614G)
aggagagggcgcuuggcuugcaaggacccugagcugcggcauugaagcacacccaacccaacucgacugaagucagccucacugaaccggaucugagaaucuucucucucugggcuugccagggcucuccgaaccuagcuagcauccucuucaauuccaacuagaaagcuuaccauguucguguuucuggugcugcugccccugguguccagccagugugugaaccugaccaccagaacacagcugccuccagccuacaccaacagcuucaccagaggcguguacuaccccgacaagguguucagauccagcgugcugcacucuacccaggaccuguuccugccuuucuucagcaacgugaccugguuccacgccauccacguguccggcaccaauggcaccaagagauucgacaaccccgugcugcccuucaacgacgggguguacuuugccagcaccgagaaguccaacaucaucagaggcuggaucuucggcaccacacuggacagcaagacccagagccugcugaucgugaacaacgccaccaacguggucaucaaagugugcgaguuccaguucugcaacgaccccuuccugggcgucuacuaccacaagaacaacaagagcuggauggaaagcgaguuccggguguacagcagcgccaacaacugcaccuucgaguacgugucccagccuuuccugauggaccuggaaggcaagcagggcaacuucaagaaccugcgcgaguucguguucaagaacaucgacggcuacuucaaaaucuacagcaagcacaccccuaucaaccucgugcgggaucugccucagggcuucucugcucuggaaccccugguggaucugcccaucggcaucaacaucacccgguuucagacacugcuggcccugcacagaagcuaccugacaccuggcgauagcagcagcggauggacagcuggugccgccgcuuacuaugugggcuaccugcagccuagaaccuuccugcugaaguacaacgagaacggcaccaucaccgacgccguggauugugcucuggauccucugagcgagacaaagugcacccugaaguccuucaccguggaaaagggcaucuaccagaccagcaacuuccgggugcagcccaccgaauccaucgugcgguuccccaauaucaccaaucugugccccuucggcgagguguucaaugccaccagauucgccucuguguacgccuggaaccggaagcggaucagcaauugcguggccgacuacuccgugcuguacaacuccgccagcuucagcaccuucaagugcuacggcguguccccuaccaagcugaacgaccugugcuucacaaacguguacgccgacagcuucgugauccggggagaugaagugcggcagauugccccuggacagacaggcaacaucgccgacuacaacuacaagcugcccgacgacuucaccggcugugugauugccuggaacagcaacaaccuggacuccaaagucggcggcaacuacaauuaccuguaccggcuguuccggaaguccaaucugaagcccuucgagcgggacaucagcaccgaaaucuaucaggccggcagcaccccuugcaacggcgugaagggcuucaacugcuacuucccacugcaguccuacggcuuucagcccacauacggcgugggcuaucagcccuacagagugguggugcugagcuucgaacugcugcaugcuccugccacagugugcggcccuaagaaaagcaccaaucucgugaagaacaaaugcgugaacuucaacuucaacggccugaccggcaccggcgugcugacagagagcaacaagaaguuccugccauuccagcaguuuggccgggauaucgccgauaccacagacgccguuagagauccccagacacuggaaauccuggacaucaccccaugcagcuucggcggagugucugugaucaccccuggcaccaacaccagcaaucagguggcagugcuguaccagggcgugaacuguaccgaagugcccguggccauucacgccgaucagcugacaccuacauggcggguguacuccaccggcagcaauguguuucagaccagagccggcugucugaucggagccgagcacgugaacaauagcuacgagugcgacauccccaucggcgcuggcaucugugccagcuaccagacacagacaaacagccccagacgggcuagaagcguggccagccagagcaucauugccuacacaaugucucugggcgccgagaacagcguggccuacuccaacaacucuaucgcuauccccaccaacuucaccaucagcgugaccaccgagauccugccuguguccaugaccaagaccagcguggacugcaccauguacaucugcggcgauuccaccgagugcuccaaccugcugcugcaguacggcagcuucugcacccagcugaauagagcccugacagggaucgccguggaacaggacaagaacacccaagagguguucgcccaagugaagcaaaucuacaagaccccuccuaucaaggacuucggcggcuucaauuucagccagauucugcccgauccuagcaagcccagcaagcggagcuucaucgaggaccugcuguucaacaaagugacacuggccgacgccggcuucaucaagcaguauggcgauugucugggcgacauugccgccagggaucugauuugcgcccagaaguuuaacggacugacagugcugccuccucugcugaccgaugagaugaucgcccaguacacaucugcccugcuggccggcacaaucacaagcggcuggacauuuggagcuggcgccgcucugcagauccccuuugcuaugcagauggccuaccgguucaacggcaucggagugacccagaaugugcuguacgagaaccagaagcugaucgccaaccaguucaacagcgccaucggcaagauccaggacagccugagcagcacagcaagcgcccugggaaagcugcaggacguggucaaccagaaugcccaggcacugaacacccuggucaagcagcuguccuccaacuucggcgccaucagcucugugcugaacgauauccugagcagacuggacaaggucgaggccgaggugcagaucgacagacugaucacaggcagacugcagagccuccagacauacgugacccagcagcugaucagagccgccgagauuagagccucugccaaucuggccgccaccaagaugucugagugugugcugggccagagcaagagaguggacuuuugcggcaagggcuaccaccugaugagcuucccucagucugccccucacggcgugguguuucugcacgugacauaugugcccgcucaagagaagaauuucaccaccgcuccagccaucugccacgacggcaaagcccacuuuccuagagaaggcguguucguguccaacggcacccauugguucgugacacagcggaacuucuacgagccccagaucaucaccaccgacaacaccuucgugucuggcaacugcgacguugugaucggcauugugaacaauaccguguacgacccucugcagcccgagcuggacagcuucaaagaggaacuggacaaguacuuuaagaaccacacaagccccgacguggaccugggcgauaucagcggaaucaaugccagcgucgugaacauccagaaagagaucgaccggcugaacgagguggccaagaaucugaacgagagccugaucgaccugcaagaacuggggaaguacgagcaguacaucaaguggcccugguacaucuggcugggcuuuaucgccggacugauugccaucgugauggucacaaucaugcuguguugcaugaccagcugcuguagcugccugaagggcuguuguagcuguggcagcugcugcaaguucgacgaggacgauucugagcccgugcugaagggcgugaaacugcacuacaccugaggacuagucccuguucccagagcccacuuuuuuuucuuuuuuugaaauaaaauagccugucuuucagaucuaaaaaaaaaaaaaaaaaaaaaaaaaaaaaaaaaaaaaaaaaaaaaaaaaaaaaaaaaaaaaaaaaaaaaaaaaaaaaaaaaaaaaaaaaaaaaaaaaaaa

SEQ ID NO: 25035 - RNA, 4158 nt, Artificial Sequence
  SARS-CoV-2/Wuhan/WIV05/2019__EPI_ISL_402128 spike protein mRNA gc mod (1-1273)(L18F_D80A_D215G_L242del_A243del_L244del_R246I_K417N_E484 K_N501Y_D614G_A701V)
aggagagggcgcuuggcuugcaaggacccugagcugcggcauugaagcacacccaacccaacucgacugaagucagccucacugaaccggaucugagaaucuucucucucugggcuugccagggcucuccgaaccuagcuagcauccucuucaauuccaacuagaaagcuuaccauguucguguuucuggugcugcugccccugguguccagccagugugugaacuucaccaccagaacacagcugccuccagccuacaccaacagcuucaccagaggcguguacuaccccgacaagguguucagauccagcgugcugcacucuacccaggaccuguuccugccuuucuucagcaacgugaccugguuccacgccauccacguguccggcaccaauggcaccaagagauucgccaaccccgugcugcccuucaacgacgggguguacuuugccagcaccgagaaguccaacaucaucagaggcuggaucuucggcaccacacuggacagcaagacccagagccugcugaucgugaacaacgccaccaacguggucaucaaagugugcgaguuccaguucugcaacgaccccuuccugggcgucuacuaccacaagaacaacaagagcuggauggaaagcgaguuccggguguacagcagcgccaacaacugcaccuucgaguacgugucccagccuuuccugauggaccuggaaggcaagcagggcaacuucaagaaccugcgcgaguucguguucaagaacaucgacggcuacuucaaaaucuacagcaagcacaccccuaucaaccucgugcggggccugccucagggcuucucugcucuggaaccccugguggaucugcccaucggcaucaacaucacccgguuucagacacugcacaucagcuaccugacaccuggcgauagcagcagcggauggacagcuggugccgccgcuuacuaugugggcuaccugcagccuagaaccuuccugcugaaguacaacgagaacggcaccaucaccgacgccguggauugugcucuggauccucugagcgagacaaagugcacccugaaguccuucaccguggaaaagggcaucuaccagaccagcaacuuccgggugcagcccaccgaauccaucgugcgguuccccaauaucaccaaucugugccccuucggcgagguguucaaugccaccagauucgccucuguguacgccuggaaccggaagcggaucagcaauugcguggccgacuacuccgugcuguacaacuccgccagcuucagcaccuucaagugcuacggcguguccccuaccaagcugaacgaccugugcuucacaaacguguacgccgacagcuucgugauccggggagaugaagugcggcagauugccccuggacagacaggcaacaucgccgacuacaacuacaagcugcccgacgacuucaccggcugugugauugccuggaacagcaacaaccuggacuccaaagucggcggcaacuacaauuaccuguaccggcuguuccggaaguccaaucugaagcccuucgagcgggacaucagcaccgaaaucuaucaggccggcagcaccccuugcaacggcgugaagggcuucaacugcuacuucccacugcaguccuacggcuuucagcccacauacggcgugggcuaucagcccuacagagugguggugcugagcuucgaacugcugcaugcuccugccacagugugcggcccuaagaaaagcaccaaucucgugaagaacaaaugcgugaacuucaacuucaacggccugaccggcaccggcgugcugacagagagcaacaagaaguuccugccauuccagcaguuuggccgggauaucgccgauaccacagacgccguuagagauccccagacacuggaaauccuggacaucaccccaugcagcuucggcggagugucugugaucaccccuggcaccaacaccagcaaucagguggcagugcuguaccagggcgugaacuguaccgaagugcccguggccauucacgccgaucagcugacaccuacauggcggguguacuccaccggcagcaauguguuucagaccagagccggcugucugaucggagccgagcacgugaacaauagcuacgagugcgacauccccaucggcgcuggcaucugugccagcuaccagacacagacaaacagccccagacgggcuagaagcguggccagccagagcaucauugccuacacaaugucucugggcguggagaacagcguggccuacuccaacaacucuaucgcuauccccaccaacuucaccaucagcgugaccaccgagauccugccuguguccaugaccaagaccagcguggacugcaccauguacaucugcggcgauuccaccgagugcuccaaccugcugcugcaguacggcagcuucugcacccagcugaauagagcccugacagggaucgccguggaacaggacaagaacacccaagagguguucgcccaagugaagcaaaucuacaagaccccuccuaucaaggacuucggcggcuucaauuucagccagauucugcccgauccuagcaagcccagcaagcggagcuucaucgaggaccugcuguucaacaaagugacacuggccgacgccggcuucaucaagcaguauggcgauugucugggcgacauugccgccagggaucugauuugcgcccagaaguuuaacggacugacagugcugccuccucugcugaccgaugagaugaucgcccaguacacaucugcccugcuggccggcacaaucacaagcggcuggacauuuggagcuggcgccgcucugcagauccccuuugcuaugcagauggccuaccgguucaacggcaucggagugacccagaaugugcuguacgagaaccagaagcugaucgccaaccaguucaacagcgccaucggcaagauccaggacagccugagcagcacagcaagcgcccugggaaagcugcaggacguggucaaccagaaugcccaggcacugaacacccuggucaagcagcuguccuccaacuucggcgccaucagcucugugcugaacgauauccugagcagacuggacaaggucgaggccgaggugcagaucgacagacugaucacaggcagacugcagagccuccagacauacgugacccagcagcugaucagagccgccgagauuagagccucugccaaucuggccgccaccaagaugucugagugugugcugggccagagcaagagaguggacuuuugcggcaagggcuaccaccugaugagcuucccucagucugccccucacggcgugguguuucugcacgugacauaugugcccgcucaagagaagaauuucaccaccgcuccagccaucugccacgacggcaaagcccacuuuccuagagaaggcguguucguguccaacggcacccauugguucgugacacagcggaacuucuacgagccccagaucaucaccaccgacaacaccuucgugucuggcaacugcgacguugugaucggcauugugaacaauaccguguacgacccucugcagcccgagcuggacagcuucaaagaggaacuggacaaguacuuuaagaaccacacaagccccgacguggaccugggcgauaucagcggaaucaaugccagcgucgugaacauccagaaagagaucgaccggcugaacgagguggccaagaaucugaacgagagccugaucgaccugcaagaacuggggaaguacgagcaguacaucaaguggcccugguacaucuggcugggcuuuaucgccggacugauugccaucgugauggucacaaucaugcuguguugcaugaccagcugcuguagcugccugaagggcuguuguagcuguggcagcugcugcaaguucgacgaggacgauucugagcccgugcugaagggcgugaaacugcacuacaccugaggacuagucccuguucccagagcccacuuuuuuuucuuuuuuugaaauaaaauagccugucuuucagaucuaaaaaaaaaaaaaaaaaaaaaaaaaaaaaaaaaaaaaaaaaaaaaaaaaaaaaaaaaaaaaaaaaaaaaaaaaaaaaaaaaaaaaaaaaaaaaaaaaaaa

SEQ ID NO: 25036 - RNA, 4167 nt, Artificial Sequence
  SARS-CoV-2/Wuhan/WIV05/2019__EPI_ISL_402128 spike protein mRNA gc mod (1-1273)(E484K_D614G)
aggagagggcgcuuggcuugcaaggacccugagcugcggcauugaagcacacccaacccaacucgacugaagucagccucacugaaccggaucugagaaucuucucucucugggcuugccagggcucuccgaaccuagcuagcauccucuucaauuccaacuagaaagcuuaccauguucguguuucuggugcugcugccccugguguccagccagugugugaaccugaccaccagaacacagcugccuccagccuacaccaacagcuucaccagaggcguguacuaccccgacaagguguucagauccagcgugcugcacucuacccaggaccuguuccugccuuucuucagcaacgugaccugguuccacgccauccacguguccggcaccaauggcaccaagagauucgacaaccccgugcugcccuucaacgacgggguguacuuugccagcaccgagaaguccaacaucaucagaggcuggaucuucggcaccacacuggacagcaagacccagagccugcugaucgugaacaacgccaccaacguggucaucaaagugugcgaguuccaguucugcaacgaccccuuccugggcgucuacuaccacaagaacaacaagagcuggauggaaagcgaguuccggguguacagcagcgccaacaacugcaccuucgaguacgugucccagccuuuccugauggaccuggaaggcaagcagggcaacuucaagaaccugcgcgaguucguguucaagaacaucgacggcuacuucaaaaucuacagcaagcacaccccuaucaaccucgugcgggaucugccucagggcuucucugcucuggaaccccugguggaucugcccaucggcaucaacaucacccgguuucagacacugcuggcccugcacagaagcuaccugacaccuggcgauagcagcagcggauggacagcuggugccgccgcuuacuaugugggcuaccugcagccuagaaccuuccugcugaaguacaacgagaacggcaccaucaccgacgccguggauugugcucuggauccucugagcgagacaaagugcacccugaaguccuucaccguggaaaagggcaucuaccagaccagcaacuuccgggugcagcccaccgaauccaucgugcgguuccccaauaucaccaaucugugccccuucggcgagguguucaaugccaccagauucgccucuguguacgccuggaaccggaagcggaucagcaauugcguggccgacuacuccgugcuguacaacuccgccagcuucagcaccuucaagugcuacggcguguccccuaccaagcugaacgaccugugcuucacaaacguguacgccgacagcuucgugauccggggagaugaagugcggcagauugccccuggacagacaggcaagaucgccgacuacaacuacaagcugcccgacgacuucaccggcugugugauugccuggaacagcaacaaccuggacuccaaagucggcggcaacuacaauuaccuguaccggcuguuccggaaguccaaucugaagcccuucgagcgggacaucagcaccgaaaucuaucaggccggcagcaccccuugcaacggcgugaagggcuucaacugcuacuucccacugcaguccuacggcuuucagcccacaaauggcgugggcuaucagcccuacagagugguggugcugagcuucgaacugcugcaugcuccugccacagugugcggcccuaagaaaagcaccaaucucgugaagaacaaaugcgugaacuucaacuucaacggccugaccggcaccggcgugcugacagagagcaacaagaaguuccugccauuccagcaguuuggccgggauaucgccgauaccacagacgccguuagagauccccagacacuggaaauccuggacaucaccccaugcagcuucggcggagugucugugaucaccccuggcaccaacaccagcaaucagguggcagugcuguaccagggcgugaacuguaccgaagugcccguggccauucacgccgaucagcugacaccuacauggcggguguacuccaccggcagcaauguguuucagaccagagccggcugucugaucggagccgagcacgugaacaauagcuacgagugcgacauccccaucggcgcuggcaucugugccagcuaccagacacagacaaacagccccagacgggcuagaagcguggccagccagagcaucauugccuacacaaugucucugggcgccgagaacagcguggccuacuccaacaacucuaucgcuauccccaccaacuucaccaucagcgugaccaccgagauccugccuguguccaugaccaagaccagcguggacugcaccauguacaucugcggcgauuccaccgagugcuccaaccugcugcugcaguacggcagcuucugcacccagcugaauagagcccugacagggaucgccguggaacaggacaagaacacccaagagguguucgcccaagugaagcaaaucuacaagaccccuccuaucaaggacuucggcggcuucaauuucagccagauucugcccgauccuagcaagcccagcaagcggagcuucaucgaggaccugcuguucaacaaagugacacuggccgacgccggcuucaucaagcaguauggcgauugucugggcgacauugccgccagggaucugauuugcgcccagaaguuuaacggacugacagugcugccuccucugcugaccgaugagaugaucgcccaguacacaucugcccugcuggccggcacaaucacaagcggcuggacauuuggagcuggcgccgcucugcagauccccuuugcuaugcagauggccuaccgguucaacggcaucggagugacccagaaugugcuguacgagaaccagaagcugaucgccaaccaguucaacagcgccaucggcaagauccaggacagccugagcagcacagcaagcgcccugggaaagcugcaggacguggucaaccagaaugcccaggcacugaacacccuggucaagcagcuguccuccaacuucggcgccaucagcucugugcugaacgauauccugagcagacuggacaaggucgaggccgaggugcagaucgacagacugaucacaggcagacugcagagccuccagacauacgugacccagcagcugaucagagccgccgagauuagagccucugccaaucuggccgccaccaagaugucugagugugugcugggccagagcaagagaguggacuuuugcggcaagggcuaccaccugaugagcuucccucagucugccccucacggcgugguguuucugcacgugacauaugugcccgcucaagagaagaauuucaccaccgcuccagccaucugccacgacggcaaagcccacuuuccuagagaaggcguguucguguccaacggcacccauugguucgugacacagcggaacuucuacgagccccagaucaucaccaccgacaacaccuucgugucuggcaacugcgacguugugaucggcauugugaacaauaccguguacgacccucugcagcccgagcuggacagcuucaaagaggaacuggacaaguacuuuaagaaccacacaagccccgacguggaccugggcgauaucagcggaaucaaugccagcgucgugaacauccagaaagagaucgaccggcugaacgagguggccaagaaucugaacgagagccugaucgaccugcaagaacuggggaaguacgagcaguacaucaaguggcccugguacaucuggcugggcuuuaucgccggacugauugccaucgugauggucacaaucaugcuguguugcaugaccagcugcuguagcugccugaagggcuguuguagcuguggcagcugcugcaaguucgacgaggacgauucugagcccgugcugaagggcgugaaacugcacuacaccugaggacuagucccuguucccagagcccacuuuuuuuucuuuuuuugaaauaaaauagccugucuuucagaucuaaaaaaaaaaaaaaaaaaaaaaaaaaaaaaaaaaaaaaaaaaaaaaaaaaaaaaaaaaaaaaaaaaaaaaaaaaaaaaaaaaaaaaaaaaaaaaaaaaaa

SEQ ID NO: 25037 - RNA, 4167 nt, Artificial Sequence
  SARS-CoV-2/Wuhan/WIV05/2019__EPI_ISL_402128 spike protein mRNA gc mod (1-1273)(L18F_T20N_P26S_D138Y_R190S_K417T_E484K_N501Y_D614G_H655Y _T1027I)
aggagagggcgcuuggcuugcaaggacccugagcugcggcauugaagcacacccaacccaacucgacugaagucagccucacugaaccggaucugagaaucuucucucucugggcuugccagggcucuccgaaccuagcuagcauccucuucaauuccaacuagaaagcuuaccauguucguguuucuggugcugcugccccugguguccagccagugugugaacuucaccaacagaacacagcugccuagcgccuacaccaacagcuucaccagaggcguguacuaccccgacaagguguucagauccagcgugcugcacucuacccaggaccuguuccugccuuucuucagcaacgugaccugguuccacgccauccacguguccggcaccaauggcaccaagagauucgacaaccccgugcugcccuucaacgacgggguguacuuugccagcaccgagaaguccaacaucaucagaggcuggaucuucggcaccacacuggacagcaagacccagagccugcugaucgugaacaacgccaccaacguggucaucaaagugugcgaguuccaguucugcaacuaccccuuccugggcgucuacuaccacaagaacaacaagagcuggauggaaagcgaguuccggguguacagcagcgccaacaacugcaccuucgaguacgugucccagccuuuccugauggaccuggaaggcaagcagggcaacuucaagaaccugagcgaguucguguucaagaacaucgacggcuacuucaaaaucuacagcaagcacaccccuaucaaccucgugcgggaucugccucagggcuucucugcucuggaaccccugguggaucugcccaucggcaucaacaucacccgguuucagacacugcuggcccugcacagaagcuaccugacaccuggcgauagcagcagcggauggacagcuggugccgccgcuuacuaugugggcuaccugcagccuagaaccuuccugcugaaguacaacgagaacggcaccaucaccgacgccguggauugugcucuggauccucugagcgagacaaagugcacccugaaguccuucaccguggaaaagggcaucuaccagaccagcaacuuccgggugcagcccaccgaauccaucgugcgguuccccaauaucaccaaucugugccccuucggcgagguguucaaugccaccagauucgccucuguguacgccuggaaccggaagcggaucagcaauugcguggccgacuacuccgugcuguacaacuccgccagcuucagcaccuucaagugcuacggcguguccccuaccaagcugaacgaccugugcuucacaaacguguacgccgacagcuucgugauccggggagaugaagugcggcagauugccccuggacagacaggcaccaucgccgacuacaacuacaagcugcccgacgacuucaccggcugugugauugccuggaacagcaacaaccuggacuccaaagucggcggcaacuacaauuaccuguaccggcuguuccggaaguccaaucugaagcccuucgagcgggacaucagcaccgaaaucuaucaggccggcagcaccccuugcaacggcgugaagggcuucaacugcuacuucccacugcaguccuacggcuuucagcccacauacggcgugggcuaucagcccuacagagugguggugcugagcuucgaacugcugcaugcuccugccacagugugcggcccuaagaaaagcaccaaucucgugaagaacaaaugcgugaacuucaacuucaacggccugaccggcaccggcgugcugacagagagcaacaagaaguuccugccauuccagcaguuuggccgggauaucgccgauaccacagacgccguuagagauccccagacacuggaaauccuggacaucaccccaugcagcuucggcggagugucugugaucaccccuggcaccaacaccagcaaucagguggcagugcuguaccagggcgugaacuguaccgaagugcccguggccauucacgccgaucagcugacaccuacauggcggguguacuccaccggcagcaauguguuucagaccagagccggcugucugaucggagccgaguacgugaacaauagcuacgagugcgacauccccaucggcgcuggcaucugugccagcuaccagacacagacaaacagccccagacgggcuagaagcguggccagccagagcaucauugccuacacaaugucucugggcgccgagaacagcguggccuacuccaacaacucuaucgcuauccccaccaacuucaccaucagcgugaccaccgagauccugccuguguccaugaccaagaccagcguggacugcaccauguacaucugcggcgauuccaccgagugcuccaaccugcugcugcaguacggcagcuucugcacccagcugaauagagcccugacagggaucgccguggaacaggacaagaacacccaagagguguucgcccaagugaagcaaaucuacaagaccccuccuaucaaggacuucggcggcuucaauuucagccagauucugcccgauccuagcaagcccagcaagcggagcuucaucgaggaccugcuguucaacaaagugacacuggccgacgccggcuucaucaagcaguauggcgauugucugggcgacauugccgccagggaucugauuugcgcccagaaguuuaacggacugacagugcugccuccucugcugaccgaugagaugaucgcccaguacacaucugcccugcuggccggcacaaucacaagcggcuggacauuuggagcuggcgccgcucugcagauccccuuugcuaugcagauggccuaccgguucaacggcaucggagugacccagaaugugcuguacgagaaccagaagcugaucgccaaccaguucaacagcgccaucggcaagauccaggacagccugagcagcacagcaagcgcccugggaaagcugcaggacguggucaaccagaaugcccaggcacugaacacccuggucaagcagcuguccuccaacuucggcgccaucagcucugugcugaacgauauccugagcagacuggacaaggucgaggccgaggugcagaucgacagacugaucacaggcagacugcagagccuccagacauacgugacccagcagcugaucagagccgccgagauuagagccucugccaaucuggccgccaucaagaugucugagugugugcugggccagagcaagagaguggacuuuugcggcaagggcuaccaccugaugagcuucccucagucugccccucacggcgugguguuucugcacgugacauaugugcccgcucaagagaagaauuucaccaccgcuccagccaucugccacgacggcaaagcccacuuuccuagagaaggcguguucguguccaacggcacccauugguucgugacacagcggaacuucuacgagccccagaucaucaccaccgacaacaccuucgugucuggcaacugcgacguugugaucggcauugugaacaauaccguguacgacccucugcagcccgagcuggacagcuucaaagaggaacuggacaaguacuuuaagaaccacacaagccccgacguggaccugggcgauaucagcggaaucaaugccagcgucgugaacauccagaaagagaucgaccggcugaacgagguggccaagaaucugaacgagagccugaucgaccugcaagaacuggggaaguacgagcaguacaucaaguggcccugguacaucuggcugggcuuuaucgccggacugauugccaucgugauggucacaaucaugcuguguugcaugaccagcugcuguagcugccugaagggcuguuguagcuguggcagcugcugcaaguucgacgaggacgauucugagcccgugcugaagggcgugaaacugcacuacaccugaggacuagucccuguucccagagcccacuuuuuuuucuuuuuuugaaauaaaauagccugucuuucagaucuaaaaaaaaaaaaaaaaaaaaaaaaaaaaaaaaaaaaaaaaaaaaaaaaaaaaaaaaaaaaaaaaaaaaaaaaaaaaaaaaaaaaaaaaaaaaaaaaaaaa

SEQ ID NO: 25038 - RNA, 4167 nt, Artificial Sequence
  SARS-CoV-2/Wuhan/WIV05/2019__EPI_ISL_402128 spike protein mRNA gc mod (1-1273)(S13I_W152C_L452R_D614G)
aggagagggcgcuuggcuugcaaggacccugagcugcggcauugaagcacacccaacccaacucgacugaagucagccucacugaaccggaucugagaaucuucucucucugggcuugccagggcucuccgaaccuagcuagcauccucuucaauuccaacuagaaagcuuaccauguucguguuucuggugcugcugccccugguguccauccagugugugaaccugaccaccagaacacagcugccuccagccuacaccaacagcuucaccagaggcguguacuaccccgacaagguguucagauccagcgugcugcacucuacccaggaccuguuccugccuuucuucagcaacgugaccugguuccacgccauccacguguccggcaccaauggcaccaagagauucgacaaccccgugcugcccuucaacgacgggguguacuuugccagcaccgagaaguccaacaucaucagaggcuggaucuucggcaccacacuggacagcaagacccagagccugcugaucgugaacaacgccaccaacguggucaucaaagugugcgaguuccaguucugcaacgaccccuuccugggcgucuacuaccacaagaacaacaagagcugcauggaaagcgaguuccggguguacagcagcgccaacaacugcaccuucgaguacgugucccagccuuuccugauggaccuggaaggcaagcagggcaacuucaagaaccugcgcgaguucguguucaagaacaucgacggcuacuucaaaaucuacagcaagcacaccccuaucaaccucgugcgggaucugccucagggcuucucugcucuggaaccccugguggaucugcccaucggcaucaacaucacccgguuucagacacugcuggcccugcacagaagcuaccugacaccuggcgauagcagcagcggauggacagcuggugccgccgcuuacuaugugggcuaccugcagccuagaaccuuccugcugaaguacaacgagaacggcaccaucaccgacgccguggauugugcucuggauccucugagcgagacaaagugcacccugaaguccuucaccguggaaaagggcaucuaccagaccagcaacuuccgggugcagcccaccgaauccaucgugcgguuccccaauaucaccaaucugugccccuucggcgagguguucaaugccaccagauucgccucuguguacgccuggaaccggaagcggaucagcaauugcguggccgacuacuccgugcuguacaacuccgccagcuucagcaccuucaagugcuacggcguguccccuaccaagcugaacgaccugugcuucacaaacguguacgccgacagcuucgugauccggggagaugaagugcggcagauugccccuggacagacaggcaagaucgccgacuacaacuacaagcugcccgacgacuucaccggcugugugauugccuggaacagcaacaaccuggacuccaaagucggcggcaacuacaauuaccgcuaccggcuguuccggaaguccaaucugaagcccuucgagcgggacaucagcaccgaaaucuaucaggccggcagcaccccuugcaacggcguggaaggcuucaacugcuacuucccacugcaguccuacggcuuucagcccacaaauggcgugggcuaucagcccuacagagugguggugcugagcuucgaacugcugcaugcuccugccacagugugcggcccuaagaaaagcaccaaucucgugaagaacaaaugcgugaacuucaacuucaacggccugaccggcaccggcgugcugacagagagcaacaagaaguuccugccauuccagcaguuuggccgggauaucgccgauaccacagacgccguuagagauccccagacacuggaaauccuggacaucaccccaugcagcuucggcggagugucugugaucaccccuggcaccaacaccagcaaucagguggcagugcuguaccagggcgugaacuguaccgaagugcccguggccauucacgccgaucagcugacaccuacauggcggguguacuccaccggcagcaauguguuucagaccagagccggcugucugaucggagccgagcacgugaacaauagcuacgagugcgacauccccaucggcgcuggcaucugugccagcuaccagacacagacaaacagccccagacgggcuagaagcguggccagccagagcaucauugccuacacaaugucucugggcgccgagaacagcguggccuacuccaacaacucuaucgcuauccccaccaacuucaccaucagcgugaccaccgagauccugccuguguccaugaccaagaccagcguggacugcaccauguacaucugcggcgauuccaccgagugcuccaaccugcugcugcaguacggcagcuucugcacccagcugaauagagcccugacagggaucgccguggaacaggacaagaacacccaagagguguucgcccaagugaagcaaaucuacaagaccccuccuaucaaggacuucggcggcuucaauuucagccagauucugcccgauccuagcaagcccagcaagcggagcuucaucgaggaccugcuguucaacaaagugacacuggccgacgccggcuucaucaagcaguauggcgauugucugggcgacauugccgccagggaucugauuugcgcccagaaguuuaacggacugacagugcugccuccucugcugaccgaugagaugaucgcccaguacacaucugcccugcuggccggcacaaucacaagcggcuggacauuuggagcuggcgccgcucugcagauccccuuugcuaugcagauggccuaccgguucaacggcaucggagugacccagaaugugcuguacgagaaccagaagcugaucgccaaccaguucaacagcgccaucggcaagauccaggacagccugagcagcacagcaagcgcccugggaaagcugcaggacguggucaaccagaaugcccaggcacugaacacccuggucaagcagcuguccuccaacuucggcgccaucagcucugugcugaacgauauccugagcagacuggacaaggucgaggccgaggugcagaucgacagacugaucacaggcagacugcagagccuccagacauacgugacccagcagcugaucagagccgccgagauuagagccucugccaaucuggccgccaccaagaugucugagugugugcugggccagagcaagagaguggacuuuugcggcaagggcuaccaccugaugagcuucccucagucugccccucacggcgugguguuucugcacgugacauaugugcccgcucaagagaagaauuucaccaccgcuccagccaucugccacgacggcaaagcccacuuuccuagagaaggcguguucguguccaacggcacccauugguucgugacacagcggaacuucuacgagccccagaucaucaccaccgacaacaccuucgugucuggcaacugcgacguugugaucggcauugugaacaauaccguguacgacccucugcagcccgagcuggacagcuucaaagaggaacuggacaaguacuuuaagaaccacacaagccccgacguggaccugggcgauaucagcggaaucaaugccagcgucgugaacauccagaaagagaucgaccggcugaacgagguggccaagaaucugaacgagagccugaucgaccugcaagaacuggggaaguacgagcaguacaucaaguggcccugguacaucuggcugggcuuuaucgccggacugauugccaucgugauggucacaaucaugcuguguugcaugaccagcugcuguagcugccugaagggcuguuguagcuguggcagcugcugcaaguucgacgaggacgauucugagcccgugcugaagggcgugaaacugcacuacaccugaggacuagucccuguucccagagcccacuuuuuuuucuuuuuuugaaauaaaauagccugucuuucagaucuaaaaaaaaaaaaaaaaaaaaaaaaaaaaaaaaaaaaaaaaaaaaaaaaaaaaaaaaaaaaaaaaaaaaaaaaaaaaaaaaaaaaaaaaaaaaaaaaaaaa

SEQ ID NO: 25039 - RNA, 4167 nt, Artificial Sequence
  SARS-CoV-2/Wuhan/WIV05/2019__EPI_ISL_402128 spike protein mRNA gc mod (1-1273)
aggagagggcgcuuggcuugcaaggacccugagcugcggcauugaagcacacccaacccaacucgacugaagucagccucacugaaccggaucugagaaucuucucucucugggcuugccagggcucuccgaaccuagcuagcauccucuucaauuccaacuagaaagcuuaccauguucguguuccuggugcugcugccucugguguccagccagugugugaaccugaccaccagaacacagcugccuccagccuacaccaacagcuuuaccagaggcguguacuaccccgacaagguguucagauccagcgugcugcacucuacccaggaccuguuccugccuuucuucagcaacgugaccugguuccacgccauccacguguccggcaccaauggcaccaagagauucgacaaccccgugcugcccuucaacgacgggguguacuuugccagcaccgagaaguccaacaucaucagaggcuggaucuucggcaccacacuggacagcaagacccagagccugcugaucgugaacaacgccaccaacguggucaucaaagugugcgaguuccaguucugcaacgaccccuuccugggcgucuacuaccacaagaacaacaagagcuggauggaaagcgaguuccggguguacagcagcgccaacaacugcaccuucgaguacgugucccagccuuuccugauggaccuggaaggcaagcagggcaacuucaagaaccugcgcgaguucguguuuaagaacaucgacggcuacuucaagaucuacagcaagcacaccccuaucaaccucgugcgggaucugccucagggcuucucugcucuggaaccccugguggaucugcccaucggcaucaacaucacccgguuucagacacugcuggcccugcacagaagcuaccugacaccuggcgauagcagcagcggauggacagcuggugccgccgcuuacuaugugggcuaccugcagccuagaaccuuccugcugaaguacaacgagaacggcaccaucaccgacgccguggauugugcucuggauccucugagcgagacaaagugcacccugaaguccuucaccguggaaaagggcaucuaccagaccagcaacuuccgggugcagcccaccgaauccaucgugcgguuccccaauaucaccaaucugugccccuucggcgagguguucaaugccaccagauucgccucuguguacgccuggaaccggaagcggaucagcaauugcguggccgacuacuccgugcuguacaacuccgccagcuucagcaccuucaagugcuacggcguguccccuaccaagcugaacgaccugugcuucacaaacguguacgccgacagcuucgugauccggggagaugaagugcggcagauugccccuggacagacaggcaagaucgccgacuacaacuacaagcugcccgacgacuucaccggcugugugauugccuggaacagcaacaaccuggacuccaaagucggcggcaacuacaauuaccuguaccggcuguuccggaaguccaaucugaagcccuucgagcgggacaucuccaccgagaucuaucaggccggcagcaccccuuguaacggcguggaaggcuucaacugcuacuucccacugcaguccuacggcuuucagcccacaaauggcgugggcuaucagcccuacagagugguggugcugagcuucgaacugcugcaugccccugccacagugugcggcccuaagaaaagcaccaaucucgugaagaacaaaugcgugaacuucaacuucaacggccugaccggcaccggcgugcugacagagagcaacaagaaguuccugccauuccagcaguuuggccgggauaucgccgauaccacagacgccguuagagauccccagacacuggaaauccuggacaucaccccuugcagcuucggcggagugucugugaucaccccuggcaccaacaccagcaaucagguggcagugcuguaccaggacgugaacuguaccgaagugcccguggccauucacgccgaucagcugacaccuacauggcggguguacuccaccggcagcaauguguuucagaccagagccggcugucugaucggagccgagcacgugaacaauagcuacgagugcgacauccccaucggcgcuggaaucugcgccagcuaccagacacagacaaacagcccucggagagccagaagcguggccagccagagcaucauugccuacacaaugucucugggcgccgagaacagcguggccuacuccaacaacucuaucgcuauccccaccaacuucaccaucagcgugaccacagagauccugccuguguccaugaccaagaccagcguggacugcaccauguacaucugcggcgauuccaccgagugcuccaaccugcugcugcaguacggcagcuucugcacccagcugaauagagcccugacagggaucgccguggaacaggacaagaacacccaagagguguucgcccaagugaagcagaucuacaagaccccuccuaucaaggacuucggcggcuucaauuucagccagauucugcccgauccuagcaagcccagcaagcggagcuucaucgaggaccugcuguucaacaaagugacacuggccgacgccggcuucaucaagcaguauggcgauugucugggcgacauugccgccagggaucugauuugcgcccagaaguuuaacggacugacagugcugccuccucugcugaccgaugagaugaucgcccaguacacaucugcccugcuggccggcacaaucacaagcggcuggacauuuggagcaggcgccgcucugcagauccccuuugcuaugcagauggccuaccgguucaacggcaucggagugacccagaaugugcuguacgagaaccagaagcugaucgccaaccaguucaacagcgccaucggcaagauccaggacagccugagcagcacagcaagcgcccugggaaagcugcaggacguggucaaccagaaugcccaggcacugaacacccuggucaagcagcuguccuccaacuucggcgccaucagcucugugcugaacgauauccugagcagacuggacaaggucgaggccgaggugcagaucgacagacugaucacaggcagacugcagagccuccagacauacgugacccagcagcugaucagagccgccgagauuagagccucugccaaucuggccgccaccaagaugucugagugugugcugggccagagcaagagaguggacuuuugcggcaagggcuaccaccugaugagcuucccucagucugccccucacggcgugguguuucugcacgugacauaugugcccgcucaagagaagaauuucaccaccgcuccagccaucugccacgacggcaaagcccacuuuccuagagaaggcguguucguguccaacggcacccauugguucgugacacagcggaacuucuacgagccccagaucaucaccaccgacaacaccuucgugucuggcaacugcgacgucgugaucggcauugugaacaauaccguguacgacccucugcagcccgagcuggacagcuucaaagaggaacuggacaaguacuuuaagaaccacacaagccccgacguggaccugggcgauaucagcggaaucaaugccagcgucgugaacauccagaaagagaucgaccggcugaacgagguggccaagaaucugaacgagagccugaucgaccugcaagaacuggggaaguacgagcaguacaucaaguggcccugguacaucuggcugggcuuuaucgccggacugauugccaucgugauggucacaaucaugcuguguugcaugaccagcugcuguagcugccugaagggcuguuguagcuguggcagcugcugcaaguucgacgaggacgauucugagcccgugcugaagggcgugaaacugcacuacacaugaggacuagucccuguucccagagcccacuuuuuuuucuuuuuuugaaauaaaauagccugucuuucagaucuaaaaaaaaaaaaaaaaaaaaaaaaaaaaaaaaaaaaaaaaaaaaaaaaaaaaaaaaaaaaaaaaaaaaaaaaaaaaaaaaaaaaaaaaaaaaaaaaaaaa

SEQ ID NO: 25040 - RNA, 4167 nt, Artificial Sequence
  SARS-CoV-2/Wuhan/WIV05/2019__EPI_ISL_402128 spike protein mRNA gc mod (1-1273)(D614G)
aggagagggcgcuuggcuugcaaggacccugagcugcggcauugaagcacacccaacccaacucgacugaagucagccucacugaaccggaucugagaaucuucucucucugggcuugccagggcucuccgaaccuagcuagcauccucuucaauuccaacuagaaagcuuaccauguucguguuccuggugcugcugccucugguguccagccagugugugaaccugaccaccagaacacagcugccuccagccuacaccaacagcuuuaccagaggcguguacuaccccgacaagguguucagauccagcgugcugcacucuacccaggaccuguuccugccuuucuucagcaacgugaccugguuccacgccauccacguguccggcaccaauggcaccaagagauucgacaaccccgugcugcccuucaacgacgggguguacuuugccagcaccgagaaguccaacaucaucagaggcuggaucuucggcaccacacuggacagcaagacccagagccugcugaucgugaacaacgccaccaacguggucaucaaagugugcgaguuccaguucugcaacgaccccuuccugggcgucuacuaccacaagaacaacaagagcuggauggaaagcgaguuccggguguacagcagcgccaacaacugcaccuucgaguacgugucccagccuuuccugauggaccuggaaggcaagcagggcaacuucaagaaccugcgcgaguucguguuuaagaacaucgacggcuacuucaagaucuacagcaagcacaccccuaucaaccucgugcgggaucugccucagggcuucucugcucuggaaccccugguggaucugcccaucggcaucaacaucacccgguuucagacacugcuggcccugcacagaagcuaccugacaccuggcgauagcagcagcggauggacagcuggugccgccgcuuacuaugugggcuaccugcagccuagaaccuuccugcugaaguacaacgagaacggcaccaucaccgacgccguggauugugcucuggauccucugagcgagacaaagugcacccugaaguccuucaccguggaaaagggcaucuaccagaccagcaacuuccgggugcagcccaccgaauccaucgugcgguuccccaauaucaccaaucugugccccuucggcgagguguucaaugccaccagauucgccucuguguacgccuggaaccggaagcggaucagcaauugcguggccgacuacuccgugcuguacaacuccgccagcuucagcaccuucaagugcuacggcguguccccuaccaagcugaacgaccugugcuucacaaacguguacgccgacagcuucgugauccggggagaugaagugcggcagauugccccuggacagacaggcaagaucgccgacuacaacuacaagcugcccgacgacuucaccggcugugugauugccuggaacagcaacaaccuggacuccaaagucggcggcaacuacaauuaccuguaccggcuguuccggaaguccaaucugaagcccuucgagcgggacaucuccaccgagaucuaucaggccggcagcaccccuuguaacggcguggaaggcuucaacugcuacuucccacugcaguccuacggcuuucagcccacaaauggcgugggcuaucagcccuacagagugguggugcugagcuucgaacugcugcaugccccugccacagugugcggcccuaagaaaagcaccaaucucgugaagaacaaaugcgugaacuucaacuucaacggccugaccggcaccggcgugcugacagagagcaacaagaaguuccugccauuccagcaguuuggccgggauaucgccgauaccacagacgccguuagagauccccagacacuggaaauccuggacaucaccccuugcagcuucggcggagugucugugaucaccccuggcaccaacaccagcaaucagguggcagugcuguaccagggcgugaacuguaccgaagugcccguggccauucacgccgaucagcugacaccuacauggcggguguacuccaccggcagcaauguguuucagaccagagccggcugucugaucggagccgagcacgugaacaauagcuacgagugcgacauccccaucggcgcuggaaucugcgccagcuaccagacacagacaaacagcccucggagagccagaagcguggccagccagagcaucauugccuacacaaugucucugggcgccgagaacagcguggccuacuccaacaacucuaucgcuauccccaccaacuucaccaucagcgugaccacagagauccugccuguguccaugaccaagaccagcguggacugcaccauguacaucugcggcgauuccaccgagugcuccaaccugcugcugcaguacggcagcuucugcacccagcugaauagagcccugacagggaucgccguggaacaggacaagaacacccaagagguguucgcccaagugaagcagaucuacaagaccccuccuaucaaggacuucggcggcuucaauuucagccagauucugcccgauccuagcaagcccagcaagcggagcuucaucgaggaccugcuguucaacaaagugacacuggccgacgccggcuucaucaagcaguauggcgauugucugggcgacauugccgccagggaucugauuugcgcccagaaguuuaacggacugacagugcugccuccucugcugaccgaugagaugaucgcccaguacacaucugcccugcuggccggcacaaucacaagcggcuggacauuuggagcaggcgccgcucugcagauccccuuugcuaugcagauggccuaccgguucaacggcaucggagugacccagaaugugcuguacgagaaccagaagcugaucgccaaccaguucaacagcgccaucggcaagauccaggacagccugagcagcacagcaagcgcccugggaaagcugcaggacguggucaaccagaaugcccaggcacugaacacccuggucaagcagcuguccuccaacuucggcgccaucagcucugugcugaacgauauccugagcagacuggacaaggucgaggccgaggugcagaucgacagacugaucacaggcagacugcagagccuccagacauacgugacccagcagcugaucagagccgccgagauuagagccucugccaaucuggccgccaccaagaugucugagugugugcugggccagagcaagagaguggacuuuugcggcaagggcuaccaccugaugagcuucccucagucugccccucacggcgugguguuucugcacgugacauaugugcccgcucaagagaagaauuucaccaccgcuccagccaucugccacgacggcaaagcccacuuuccuagagaaggcguguucguguccaacggcacccauugguucgugacacagcggaacuucuacgagccccagaucaucaccaccgacaacaccuucgugucuggcaacugcgacgucgugaucggcauugugaacaauaccguguacgacccucugcagcccgagcuggacagcuucaaagaggaacuggacaaguacuuuaagaaccacacaagccccgacguggaccugggcgauaucagcggaaucaaugccagcgucgugaacauccagaaagagaucgaccggcugaacgagguggccaagaaucugaacgagagccugaucgaccugcaagaacuggggaaguacgagcaguacaucaaguggcccugguacaucuggcugggcuuuaucgccggacugauugccaucgugauggucacaaucaugcuguguugcaugaccagcugcuguagcugccugaagggcuguuguagcuguggcagcugcugcaaguucgacgaggacgauucugagcccgugcugaagggcgugaaacugcacuacacaugaggacuagucccuguucccagagcccacuuuuuuuucuuuuuuugaaauaaaauagccugucuuucagaucuaaaaaaaaaaaaaaaaaaaaaaaaaaaaaaaaaaaaaaaaaaaaaaaaaaaaaaaaaaaaaaaaaaaaaaaaaaaaaaaaaaaaaaaaaaaaaaaaaaaa

SEQ ID NO: 25041 - RNA, 4167 nt, Artificial Sequence
  SARS-CoV-2/Wuhan/WIV05/2019__EPI_ISL_402128 spike protein mRNA gc mod (1-1273)(A222V_D614G)
aggagagggcgcuuggcuugcaaggacccugagcugcggcauugaagcacacccaacccaacucgacugaagucagccucacugaaccggaucugagaaucuucucucucugggcuugccagggcucuccgaaccuagcuagcauccucuucaauuccaacuagaaagcuuaccauguucguguuccuggugcugcugccucugguguccagccagugugugaaccugaccaccagaacacagcugccuccagccuacaccaacagcuuuaccagaggcguguacuaccccgacaagguguucagauccagcgugcugcacucuacccaggaccuguuccugccuuucuucagcaacgugaccugguuccacgccauccacguguccggcaccaauggcaccaagagauucgacaaccccgugcugcccuucaacgacgggguguacuuugccagcaccgagaaguccaacaucaucagaggcuggaucuucggcaccacacuggacagcaagacccagagccugcugaucgugaacaacgccaccaacguggucaucaaagugugcgaguuccaguucugcaacgaccccuuccugggcgucuacuaccacaagaacaacaagagcuggauggaaagcgaguuccggguguacagcagcgccaacaacugcaccuucgaguacgugucccagccuuuccugauggaccuggaaggcaagcagggcaacuucaagaaccugcgcgaguucguguuuaagaacaucgacggcuacuucaagaucuacagcaagcacaccccuaucaaccucgugcgggaucugccucagggcuucucugugcuggaaccccugguggaucugcccaucggcaucaacaucacccgguuucagacacugcuggcccugcacagaagcuaccugacaccuggcgauagcagcagcggauggacagcuggugccgccgcuuacuaugugggcuaccugcagccuagaaccuuccugcugaaguacaacgagaacggcaccaucaccgacgccguggauugugcucuggauccucugagcgagacaaagugcacccugaaguccuucaccguggaaaagggcaucuaccagaccagcaacuuccgggugcagcccaccgaauccaucgugcgguuccccaauaucaccaaucugugccccuucggcgagguguucaaugccaccagauucgccucuguguacgccuggaaccggaagcggaucagcaauugcguggccgacuacuccgugcuguacaacuccgccagcuucagcaccuucaagugcuacggcguguccccuaccaagcugaacgaccugugcuucacaaacguguacgccgacagcuucgugauccggggagaugaagugcggcagauugccccuggacagacaggcaagaucgccgacuacaacuacaagcugcccgacgacuucaccggcugugugauugccuggaacagcaacaaccuggacuccaaagucggcggcaacuacaauuaccuguaccggcuguuccggaaguccaaucugaagcccuucgagcgggacaucuccaccgagaucuaucaggccggcagcaccccuuguaacggcguggaaggcuucaacugcuacuucccacugcaguccuacggcuuucagcccacaaauggcgugggcuaucagcccuacagagugguggugcugagcuucgaacugcugcaugccccugccacagugugcggcccuaagaaaagcaccaaucucgugaagaacaaaugcgugaacuucaacuucaacggccugaccggcaccggcgugcugacagagagcaacaagaaguuccugccauuccagcaguuuggccgggauaucgccgauaccacagacgccguuagagauccccagacacuggaaauccuggacaucaccccuugcagcuucggcggagugucugugaucaccccuggcaccaacaccagcaaucagguggcagugcuguaccagggcgugaacuguaccgaagugcccguggccauucacgccgaucagcugacaccuacauggcggguguacuccaccggcagcaauguguuucagaccagagccggcugucugaucggagccgagcacgugaacaauagcuacgagugcgacauccccaucggcgcuggaaucugcgccagcuaccagacacagacaaacagcccucggagagccagaagcguggccagccagagcaucauugccuacacaaugucucugggcgccgagaacagcguggccuacuccaacaacucuaucgcuauccccaccaacuucaccaucagcgugaccacagagauccugccuguguccaugaccaagaccagcguggacugcaccauguacaucugcggcgauuccaccgagugcuccaaccugcugcugcaguacggcagcuucugcacccagcugaauagagcccugacagggaucgccguggaacaggacaagaacacccaagagguguucgcccaagugaagcagaucuacaagaccccuccuaucaaggacuucggcggcuucaauuucagccagauucugcccgauccuagcaagcccagcaagcggagcuucaucgaggaccugcuguucaacaaagugacacuggccgacgccggcuucaucaagcaguauggcgauugucugggcgacauugccgccagggaucugauuugcgcccagaaguuuaacggacugacagugcugccuccucugcugaccgaugagaugaucgcccaguacacaucugcccugcuggccggcacaaucacaagcggcuggacauuuggagcaggcgccgcucugcagauccccuuugcuaugcagauggccuaccgguucaacggcaucggagugacccagaaugugcuguacgagaaccagaagcugaucgccaaccaguucaacagcgccaucggcaagauccaggacagccugagcagcacagcaagcgcccugggaaagcugcaggacguggucaaccagaaugcccaggcacugaacacccuggucaagcagcuguccuccaacuucggcgccaucagcucugugcugaacgauauccugagcagacuggacaaggucgaggccgaggugcagaucgacagacugaucacaggcagacugcagagccuccagacauacgugacccagcagcugaucagagccgccgagauuagagccucugccaaucuggccgccaccaagaugucugagugugugcugggccagagcaagagaguggacuuuugcggcaagggcuaccaccugaugagcuucccucagucugccccucacggcgugguguuucugcacgugacauaugugcccgcucaagagaagaauuucaccaccgcuccagccaucugccacgacggcaaagcccacuuuccuagagaaggcguguucguguccaacggcacccauugguucgugacacagcggaacuucuacgagccccagaucaucaccaccgacaacaccuucgugucuggcaacugcgacgucgugaucggcauugugaacaauaccguguacgacccucugcagcccgagcuggacagcuucaaagaggaacuggacaaguacuuuaagaaccacacaagccccgacguggaccugggcgauaucagcggaaucaaugccagcgucgugaacauccagaaagagaucgaccggcugaacgagguggccaagaaucugaacgagagccugaucgaccugcaagaacuggggaaguacgagcaguacaucaaguggcccugguacaucuggcugggcuuuaucgccggacugauugccaucgugauggucacaaucaugcuguguugcaugaccagcugcuguagcugccugaagggcuguuguagcuguggcagcugcugcaaguucgacgaggacgauucugagcccgugcugaagggcgugaaacugcacuacacaugaggacuagucccuguucccagagcccacuuuuuuuucuuuuuuugaaauaaaauagccugucuuucagaucuaaaaaaaaaaaaaaaaaaaaaaaaaaaaaaaaaaaaaaaaaaaaaaaaaaaaaaaaaaaaaaaaaaaaaaaaaaaaaaaaaaaaaaaaaaaaaaaaaaaa

SEQ ID NO: 25042 - RNA, 4167 nt, Artificial Sequence
  SARS-CoV-2/Wuhan/WIV05/2019__EPI_ISL_402128 spike protein mRNA gc mod (1-1273)(N439K_D614G)
aggagagggcgcuuggcuugcaaggacccugagcugcggcauugaagcacacccaacccaacucgacugaagucagccucacugaaccggaucugagaaucuucucucucugggcuugccagggcucuccgaaccuagcuagcauccucuucaauuccaacuagaaagcuuaccauguucguguuccuggugcugcugccucugguguccagccagugugugaaccugaccaccagaacacagcugccuccagccuacaccaacagcuuuaccagaggcguguacuaccccgacaagguguucagauccagcgugcugcacucuacccaggaccuguuccugccuuucuucagcaacgugaccugguuccacgccauccacguguccggcaccaauggcaccaagagauucgacaaccccgugcugcccuucaacgacgggguguacuuugccagcaccgagaaguccaacaucaucagaggcuggaucuucggcaccacacuggacagcaagacccagagccugcugaucgugaacaacgccaccaacguggucaucaaagugugcgaguuccaguucugcaacgaccccuuccugggcgucuacuaccacaagaacaacaagagcuggauggaaagcgaguuccggguguacagcagcgccaacaacugcaccuucgaguacgugucccagccuuuccugauggaccuggaaggcaagcagggcaacuucaagaaccugcgcgaguucguguuuaagaacaucgacggcuacuucaagaucuacagcaagcacaccccuaucaaccucgugcgggaucugccucagggcuucucugcucuggaaccccugguggaucugcccaucggcaucaacaucacccgguuucagacacugcuggcccugcacagaagcuaccugacaccuggcgauagcagcagcggauggacagcuggugccgccgcuuacuaugugggcuaccugcagccuagaaccuuccugcugaaguacaacgagaacggcaccaucaccgacgccguggauugugcucuggauccucugagcgagacaaagugcacccugaaguccuucaccguggaaaagggcaucuaccagaccagcaacuuccgggugcagcccaccgaauccaucgugcgguuccccaauaucaccaaucugugccccuucggcgagguguucaaugccaccagauucgccucuguguacgccuggaaccggaagcggaucagcaauugcguggccgacuacuccgugcuguacaacuccgccagcuucagcaccuucaagugcuacggcguguccccuaccaagcugaacgaccugugcuucacaaacguguacgccgacagcuucgugauccggggagaugaagugcggcagauugccccuggacagacaggcaagaucgccgacuacaacuacaagcugcccgacgacuucaccggcugugugauugccuggaacagcaagaaccuggacuccaaagucggcggcaacuacaauuaccuguaccggcuguuccggaaguccaaucugaagcccuucgagcgggacaucuccaccgagaucuaucaggccggcagcaccccuuguaacggcguggaaggcuucaacugcuacuucccacugcaguccuacggcuuucagcccacaaauggcgugggcuaucagcccuacagagugguggugcugagcuucgaacugcugcaugccccugccacagugugcggcccuaagaaaagcaccaaucucgugaagaacaaaugcgugaacuucaacuucaacggccugaccggcaccggcgugcugacagagagcaacaagaaguuccugccauuccagcaguuuggccgggauaucgccgauaccacagacgccguuagagauccccagacacuggaaauccuggacaucaccccuugcagcuucggcggagugucugugaucaccccuggcaccaacaccagcaaucagguggcagugcuguaccagggcgugaacuguaccgaagugcccguggccauucacgccgaucagcugacaccuacauggcggguguacuccaccggcagcaauguguuucagaccagagccggcugucugaucggagccgagcacgugaacaauagcuacgagugcgacauccccaucggcgcuggaaucugcgccagcuaccagacacagacaaacagcccucggagagccagaagcguggccagccagagcaucauugccuacacaaugucucugggcgccgagaacagcguggccuacuccaacaacucuaucgcuauccccaccaacuucaccaucagcgugaccacagagauccugccuguguccaugaccaagaccagcguggacugcaccauguacaucugcggcgauuccaccgagugcuccaaccugcugcugcaguacggcagcuucugcacccagcugaauagagcccugacagggaucgccguggaacaggacaagaacacccaagagguguucgcccaagugaagcagaucuacaagaccccuccuaucaaggacuucggcggcuucaauuucagccagauucugcccgauccuagcaagcccagcaagcggagcuucaucgaggaccugcuguucaacaaagugacacuggccgacgccggcuucaucaagcaguauggcgauugucugggcgacauugccgccagggaucugauuugcgcccagaaguuuaacggacugacagugcugccuccucugcugaccgaugagaugaucgcccaguacacaucugcccugcuggccggcacaaucacaagcggcuggacauuuggagcaggcgccgcucugcagauccccuuugcuaugcagauggccuaccgguucaacggcaucggagugacccagaaugugcuguacgagaaccagaagcugaucgccaaccaguucaacagcgccaucggcaagauccaggacagccugagcagcacagcaagcgcccugggaaagcugcaggacguggucaaccagaaugcccaggcacugaacacccuggucaagcagcuguccuccaacuucggcgccaucagcucugugcugaacgauauccugagcagacuggacaaggucgaggccgaggugcagaucgacagacugaucacaggcagacugcagagccuccagacauacgugacccagcagcugaucagagccgccgagauuagagccucugccaaucuggccgccaccaagaugucugagugugugcugggccagagcaagagaguggacuuuugcggcaagggcuaccaccugaugagcuucccucagucugccccucacggcgugguguuucugcacgugacauaugugcccgcucaagagaagaauuucaccaccgcuccagccaucugccacgacggcaaagcccacuuuccuagagaaggcguguucguguccaacggcacccauugguucgugacacagcggaacuucuacgagccccagaucaucaccaccgacaacaccuucgugucuggcaacugcgacgucgugaucggcauugugaacaauaccguguacgacccucugcagcccgagcuggacagcuucaaagaggaacuggacaaguacuuuaagaaccacacaagccccgacguggaccugggcgauaucagcggaaucaaugccagcgucgugaacauccagaaagagaucgaccggcugaacgagguggccaagaaucugaacgagagccugaucgaccugcaagaacuggggaaguacgagcaguacaucaaguggcccugguacaucuggcugggcuuuaucgccggacugauugccaucgugauggucacaaucaugcuguguugcaugaccagcugcuguagcugccugaagggcuguuguagcuguggcagcugcugcaaguucgacgaggacgauucugagcccgugcugaagggcgugaaacugcacuacacaugaggacuagucccuguucccagagcccacuuuuuuuucuuuuuuugaaauaaaauagccugucuuucagaucuaaaaaaaaaaaaaaaaaaaaaaaaaaaaaaaaaaaaaaaaaaaaaaaaaaaaaaaaaaaaaaaaaaaaaaaaaaaaaaaaaaaaaaaaaaaaaaaaaaaa

SEQ ID NO: 25043 - RNA, 4167 nt, Artificial Sequence
  SARS-CoV-2/Wuhan/WIV05/2019__EPI_ISL_402128 spike protein mRNA gc mod (1-1273)(S477N_D614G)
aggagagggcgcuuggcuugcaaggacccugagcugcggcauugaagcacacccaacccaacucgacugaagucagccucacugaaccggaucugagaaucuucucucucugggcuugccagggcucuccgaaccuagcuagcauccucuucaauuccaacuagaaagcuuaccauguucguguuccuggugcugcugccucugguguccagccagugugugaaccugaccaccagaacacagcugccuccagccuacaccaacagcuuuaccagaggcguguacuaccccgacaagguguucagauccagcgugcugcacucuacccaggaccuguuccugccuuucuucagcaacgugaccugguuccacgccauccacguguccggcaccaauggcaccaagagauucgacaaccccgugcugcccuucaacgacgggguguacuuugccagcaccgagaaguccaacaucaucagaggcuggaucuucggcaccacacuggacagcaagacccagagccugcugaucgugaacaacgccaccaacguggucaucaaagugugcgaguuccaguucugcaacgaccccuuccugggcgucuacuaccacaagaacaacaagagcuggauggaaagcgaguuccggguguacagcagcgccaacaacugcaccuucgaguacgugucccagccuuuccugauggaccuggaaggcaagcagggcaacuucaagaaccugcgcgaguucguguuuaagaacaucgacggcuacuucaagaucuacagcaagcacaccccuaucaaccucgugcgggaucugccucagggcuucucugcucuggaaccccugguggaucugcccaucggcaucaacaucacccgguuucagacacugcuggcccugcacagaagcuaccugacaccuggcgauagcagcagcggauggacagcuggugccgccgcuuacuaugugggcuaccugcagccuagaaccuuccugcugaaguacaacgagaacggcaccaucaccgacgccguggauugugcucuggauccucugagcgagacaaagugcacccugaaguccuucaccguggaaaagggcaucuaccagaccagcaacuuccgggugcagcccaccgaauccaucgugcgguuccccaauaucaccaaucugugccccuucggcgagguguucaaugccaccagauucgccucuguguacgccuggaaccggaagcggaucagcaauugcguggccgacuacuccgugcuguacaacuccgccagcuucagcaccuucaagugcuacggcguguccccuaccaagcugaacgaccugugcuucacaaacguguacgccgacagcuucgugauccggggagaugaagugcggcagauugccccuggacagacaggcaagaucgccgacuacaacuacaagcugcccgacgacuucaccggcugugugauugccuggaacagcaacaaccuggacuccaaagucggcggcaacuacaauuaccuguaccggcuguuccggaaguccaaucugaagcccuucgagcgggacaucuccaccgagaucuaucaggccggcaacaccccuuguaacggcguggaaggcuucaacugcuacuucccacugcaguccuacggcuuucagcccacaaauggcgugggcuaucagcccuacagagugguggugcugagcuucgaacugcugcaugccccugccacagugugcggcccuaagaaaagcaccaaucucgugaagaacaaaugcgugaacuucaacuucaacggccugaccggcaccggcgugcugacagagagcaacaagaaguuccugccauuccagcaguuuggccgggauaucgccgauaccacagacgccguuagagauccccagacacuggaaauccuggacaucaccccuugcagcuucggcggagugucugugaucaccccuggcaccaacaccagcaaucagguggcagugcuguaccagggcgugaacuguaccgaagugcccguggccauucacgccgaucagcugacaccuacauggcggguguacuccaccggcagcaauguguuucagaccagagccggcugucugaucggagccgagcacgugaacaauagcuacgagugcgacauccccaucggcgcuggaaucugcgccagcuaccagacacagacaaacagcccucggagagccagaagcguggccagccagagcaucauugccuacacaaugucucugggcgccgagaacagcguggccuacuccaacaacucuaucgcuauccccaccaacuucaccaucagcgugaccacagagauccugccuguguccaugaccaagaccagcguggacugcaccauguacaucugcggcgauuccaccgagugcuccaaccugcugcugcaguacggcagcuucugcacccagcugaauagagcccugacagggaucgccguggaacaggacaagaacacccaagagguguucgcccaagugaagcagaucuacaagaccccuccuaucaaggacuucggcggcuucaauuucagccagauucugcccgauccuagcaagcccagcaagcggagcuucaucgaggaccugcuguucaacaaagugacacuggccgacgccggcuucaucaagcaguauggcgauugucugggcgacauugccgccagggaucugauuugcgcccagaaguuuaacggacugacagugcugccuccucugcugaccgaugagaugaucgcccaguacacaucugcccugcuggccggcacaaucacaagcggcuggacauuuggagcaggcgccgcucugcagauccccuuugcuaugcagauggccuaccgguucaacggcaucggagugacccagaaugugcuguacgagaaccagaagcugaucgccaaccaguucaacagcgccaucggcaagauccaggacagccugagcagcacagcaagcgcccugggaaagcugcaggacguggucaaccagaaugcccaggcacugaacacccuggucaagcagcuguccuccaacuucggcgccaucagcucugugcugaacgauauccugagcagacuggacaaggucgaggccgaggugcagaucgacagacugaucacaggcagacugcagagccuccagacauacgugacccagcagcugaucagagccgccgagauuagagccucugccaaucuggccgccaccaagaugucugagugugugcugggccagagcaagagaguggacuuuugcggcaagggcuaccaccugaugagcuucccucagucugccccucacggcgugguguuucugcacgugacauaugugcccgcucaagagaagaauuucaccaccgcuccagccaucugccacgacggcaaagcccacuuuccuagagaaggcguguucguguccaacggcacccauugguucgugacacagcggaacuucuacgagccccagaucaucaccaccgacaacaccuucgugucuggcaacugcgacgucgugaucggcauugugaacaauaccguguacgacccucugcagcccgagcuggacagcuucaaagaggaacuggacaaguacuuuaagaaccacacaagccccgacguggaccugggcgauaucagcggaaucaaugccagcgucgugaacauccagaaagagaucgaccggcugaacgagguggccaagaaucugaacgagagccugaucgaccugcaagaacuggggaaguacgagcaguacaucaaguggcccugguacaucuggcugggcuuuaucgccggacugauugccaucgugauggucacaaucaugcuguguugcaugaccagcugcuguagcugccugaagggcuguuguagcuguggcagcugcugcaaguucgacgaggacgauucugagcccgugcugaagggcgugaaacugcacuacacaugaggacuagucccuguucccagagcccacuuuuuuuucuuuuuuugaaauaaaauagccugucuuucagaucuaaaaaaaaaaaaaaaaaaaaaaaaaaaaaaaaaaaaaaaaaaaaaaaaaaaaaaaaaaaaaaaaaaaaaaaaaaaaaaaaaaaaaaaaaaaaaaaaaaaa

SEQ ID NO: 25044 - RNA, 4167 nt, Artificial Sequence
  SARS-CoV-2/Wuhan/WIV05/2019__EPI_ISL_402128 spike protein mRNA gc mod (1-1273)(N501Y_D614G)
aggagagggcgcuuggcuugcaaggacccugagcugcggcauugaagcacacccaacccaacucgacugaagucagccucacugaaccggaucugagaaucuucucucucugggcuugccagggcucuccgaaccuagcuagcauccucuucaauuccaacuagaaagcuuaccauguucguguuccuggugcugcugccucugguguccagccagugugugaaccugaccaccagaacacagcugccuccagccuacaccaacagcuuuaccagaggcguguacuaccccgacaagguguucagauccagcgugcugcacucuacccaggaccuguuccugccuuucuucagcaacgugaccugguuccacgccauccacguguccggcaccaauggcaccaagagauucgacaaccccgugcugcccuucaacgacgggguguacuuugccagcaccgagaaguccaacaucaucagaggcuggaucuucggcaccacacuggacagcaagacccagagccugcugaucgugaacaacgccaccaacguggucaucaaagugugcgaguuccaguucugcaacgaccccuuccugggcgucuacuaccacaagaacaacaagagcuggauggaaagcgaguuccggguguacagcagcgccaacaacugcaccuucgaguacgugucccagccuuuccugauggaccuggaaggcaagcagggcaacuucaagaaccugcgcgaguucguguuuaagaacaucgacggcuacuucaagaucuacagcaagcacaccccuaucaaccucgugcgggaucugccucagggcuucucugcucuggaaccccugguggaucugcccaucggcaucaacaucacccgguuucagacacugcuggcccugcacagaagcuaccugacaccuggcgauagcagcagcggauggacagcuggugccgccgcuuacuaugugggcuaccugcagccuagaaccuuccugcugaaguacaacgagaacggcaccaucaccgacgccguggauugugcucuggauccucugagcgagacaaagugcacccugaaguccuucaccguggaaaagggcaucuaccagaccagcaacuuccgggugcagcccaccgaauccaucgugcgguuccccaauaucaccaaucugugccccuucggcgagguguucaaugccaccagauucgccucuguguacgccuggaaccggaagcggaucagcaauugcguggccgacuacuccgugcuguacaacuccgccagcuucagcaccuucaagugcuacggcguguccccuaccaagcugaacgaccugugcuucacaaacguguacgccgacagcuucgugauccggggagaugaagugcggcagauugccccuggacagacaggcaagaucgccgacuacaacuacaagcugcccgacgacuucaccggcugugugauugccuggaacagcaacaaccuggacuccaaagucggcggcaacuacaauuaccuguaccggcuguuccggaaguccaaucugaagcccuucgagcgggacaucuccaccgagaucuaucaggccggcagcaccccuuguaacggcguggaaggcuucaacugcuacuucccacugcaguccuacggcuuucagcccacauacggcgugggcuaucagcccuacagagugguggugcugagcuucgaacugcugcaugccccugccacagugugcggcccuaagaaaagcaccaaucucgugaagaacaaaugcgugaacuucaacuucaacggccugaccggcaccggcgugcugacagagagcaacaagaaguuccugccauuccagcaguuuggccgggauaucgccgauaccacagacgccguuagagauccccagacacuggaaauccuggacaucaccccuugcagcuucggcggagugucugugaucaccccuggcaccaacaccagcaaucagguggcagugcuguaccagggcgugaacuguaccgaagugcccguggccauucacgccgaucagcugacaccuacauggcggguguacuccaccggcagcaauguguuucagaccagagccggcugucugaucggagccgagcacgugaacaauagcuacgagugcgacauccccaucggcgcuggaaucugcgccagcuaccagacacagacaaacagcccucggagagccagaagcguggccagccagagcaucauugccuacacaaugucucugggcgccgagaacagcguggccuacuccaacaacucuaucgcuauccccaccaacuucaccaucagcgugaccacagagauccugccuguguccaugaccaagaccagcguggacugcaccauguacaucugcggcgauuccaccgagugcuccaaccugcugcugcaguacggcagcuucugcacccagcugaauagagcccugacagggaucgccguggaacaggacaagaacacccaagagguguucgcccaagugaagcagaucuacaagaccccuccuaucaaggacuucggcggcuucaauuucagccagauucugcccgauccuagcaagcccagcaagcggagcuucaucgaggaccugcuguucaacaaagugacacuggccgacgccggcuucaucaagcaguauggcgauugucugggcgacauugccgccagggaucugauuugcgcccagaaguuuaacggacugacagugcugccuccucugcugaccgaugagaugaucgcccaguacacaucugcccugcuggccggcacaaucacaagcggcuggacauuuggagcaggcgccgcucugcagauccccuuugcuaugcagauggccuaccgguucaacggcaucggagugacccagaaugugcuguacgagaaccagaagcugaucgccaaccaguucaacagcgccaucggcaagauccaggacagccugagcagcacagcaagcgcccugggaaagcugcaggacguggucaaccagaaugcccaggcacugaacacccuggucaagcagcuguccuccaacuucggcgccaucagcucugugcugaacgauauccugagcagacuggacaaggucgaggccgaggugcagaucgacagacugaucacaggcagacugcagagccuccagacauacgugacccagcagcugaucagagccgccgagauuagagccucugccaaucuggccgccaccaagaugucugagugugugcugggccagagcaagagaguggacuuuugcggcaagggcuaccaccugaugagcuucccucagucugccccucacggcgugguguuucugcacgugacauaugugcccgcucaagagaagaauuucaccaccgcuccagccaucugccacgacggcaaagcccacuuuccuagagaaggcguguucguguccaacggcacccauugguucgugacacagcggaacuucuacgagccccagaucaucaccaccgacaacaccuucgugucuggcaacugcgacgucgugaucggcauugugaacaauaccguguacgacccucugcagcccgagcuggacagcuucaaagaggaacuggacaaguacuuuaagaaccacacaagccccgacguggaccugggcgauaucagcggaaucaaugccagcgucgugaacauccagaaagagaucgaccggcugaacgagguggccaagaaucugaacgagagccugaucgaccugcaagaacuggggaaguacgagcaguacaucaaguggcccugguacaucuggcugggcuuuaucgccggacugauugccaucgugauggucacaaucaugcuguguugcaugaccagcugcuguagcugccugaagggcuguuguagcuguggcagcugcugcaaguucgacgaggacgauucugagcccgugcugaagggcgugaaacugcacuacacaugaggacuagucccuguucccagagcccacuuuuuuuucuuuuuuugaaauaaaauagccugucuuucagaucuaaaaaaaaaaaaaaaaaaaaaaaaaaaaaaaaaaaaaaaaaaaaaaaaaaaaaaaaaaaaaaaaaaaaaaaaaaaaaaaaaaaaaaaaaaaaaaaaaaaa

SEQ ID NO: 25045 - RNA, 4161 nt, Artificial Sequence
  SARS-CoV-2/Wuhan/WIV05/2019__EPI_ISL_402128 spike protein mRNA gc mod (1-1273)(H69del_V70del_D614G)
aggagagggcgcuuggcuugcaaggacccugagcugcggcauugaagcacacccaacccaacucgacugaagucagccucacugaaccggaucugagaaucuucucucucugggcuugccagggcucuccgaaccuagcuagcauccucuucaauuccaacuagaaagcuuaccauguucguguuccuggugcugcugccucugguguccagccagugugugaaccugaccaccagaacacagcugccuccagccuacaccaacagcuuuaccagaggcguguacuaccccgacaagguguucagauccagcgugcugcacucuacccaggaccuguuccugccuuucuucagcaacgugaccugguuccacgccaucuccggcaccaauggcaccaagagauucgacaaccccgugcugcccuucaacgacgggguguacuuugccagcaccgagaaguccaacaucaucagaggcuggaucuucggcaccacacuggacagcaagacccagagccugcugaucgugaacaacgccaccaacguggucaucaaagugugcgaguuccaguucugcaacgaccccuuccugggcgucuacuaccacaagaacaacaagagcuggauggaaagcgaguuccggguguacagcagcgccaacaacugcaccuucgaguacgugucccagccuuuccugauggaccuggaaggcaagcagggcaacuucaagaaccugcgcgaguucguguuuaagaacaucgacggcuacuucaagaucuacagcaagcacaccccuaucaaccucgugcgggaucugccucagggcuucucugcucuggaaccccugguggaucugcccaucggcaucaacaucacccgguuucagacacugcuggcccugcacagaagcuaccugacaccuggcgauagcagcagcggauggacagcuggugccgccgcuuacuaugugggcuaccugcagccuagaaccuuccugcugaaguacaacgagaacggcaccaucaccgacgccguggauugugcucuggauccucugagcgagacaaagugcacccugaaguccuucaccguggaaaagggcaucuaccagaccagcaacuuccgggugcagcccaccgaauccaucgugcgguuccccaauaucaccaaucugugccccuucggcgagguguucaaugccaccagauucgccucuguguacgccuggaaccggaagcggaucagcaauugcguggccgacuacuccgugcuguacaacuccgccagcuucagcaccuucaagugcuacggcguguccccuaccaagcugaacgaccugugcuucacaaacguguacgccgacagcuucgugauccggggagaugaagugcggcagauugccccuggacagacaggcaagaucgccgacuacaacuacaagcugcccgacgacuucaccggcugugugauugccuggaacagcaacaaccuggacuccaaagucggcggcaacuacaauuaccuguaccggcuguuccggaaguccaaucugaagcccuucgagcgggacaucuccaccgagaucuaucaggccggcagcaccccuuguaacggcguggaaggcuucaacugcuacuucccacugcaguccuacggcuuucagcccacaaauggcgugggcuaucagcccuacagagugguggugcugagcuucgaacugcugcaugccccugccacagugugcggcccuaagaaaagcaccaaucucgugaagaacaaaugcgugaacuucaacuucaacggccugaccggcaccggcgugcugacagagagcaacaagaaguuccugccauuccagcaguuuggccgggauaucgccgauaccacagacgccguuagagauccccagacacuggaaauccuggacaucaccccuugcagcuucggcggagugucugugaucaccccuggcaccaacaccagcaaucagguggcagugcuguaccagggcgugaacuguaccgaagugcccguggccauucacgccgaucagcugacaccuacauggcggguguacuccaccggcagcaauguguuucagaccagagccggcugucugaucggagccgagcacgugaacaauagcuacgagugcgacauccccaucggcgcuggaaucugcgccagcuaccagacacagacaaacagcccucggagagccagaagcguggccagccagagcaucauugccuacacaaugucucugggcgccgagaacagcguggccuacuccaacaacucuaucgcuauccccaccaacuucaccaucagcgugaccacagagauccugccuguguccaugaccaagaccagcguggacugcaccauguacaucugcggcgauuccaccgagugcuccaaccugcugcugcaguacggcagcuucugcacccagcugaauagagcccugacagggaucgccguggaacaggacaagaacacccaagagguguucgcccaagugaagcagaucuacaagaccccuccuaucaaggacuucggcggcuucaauuucagccagauucugcccgauccuagcaagcccagcaagcggagcuucaucgaggaccugcuguucaacaaagugacacuggccgacgccggcuucaucaagcaguauggcgauugucugggcgacauugccgccagggaucugauuugcgcccagaaguuuaacggacugacagugcugccuccucugcugaccgaugagaugaucgcccaguacacaucugcccugcuggccggcacaaucacaagcggcuggacauuuggagcaggcgccgcucugcagauccccuuugcuaugcagauggccuaccgguucaacggcaucggagugacccagaaugugcuguacgagaaccagaagcugaucgccaaccaguucaacagcgccaucggcaagauccaggacagccugagcagcacagcaagcgcccugggaaagcugcaggacguggucaaccagaaugcccaggcacugaacacccuggucaagcagcuguccuccaacuucggcgccaucagcucugugcugaacgauauccugagcagacuggacaaggucgaggccgaggugcagaucgacagacugaucacaggcagacugcagagccuccagacauacgugacccagcagcugaucagagccgccgagauuagagccucugccaaucuggccgccaccaagaugucugagugugugcugggccagagcaagagaguggacuuuugcggcaagggcuaccaccugaugagcuucccucagucugccccucacggcgugguguuucugcacgugacauaugugcccgcucaagagaagaauuucaccaccgcuccagccaucugccacgacggcaaagcccacuuuccuagagaaggcguguucguguccaacggcacccauugguucgugacacagcggaacuucuacgagccccagaucaucaccaccgacaacaccuucgugucuggcaacugcgacgucgugaucggcauugugaacaauaccguguacgacccucugcagcccgagcuggacagcuucaaagaggaacuggacaaguacuuuaagaaccacacaagccccgacguggaccugggcgauaucagcggaaucaaugccagcgucgugaacauccagaaagagaucgaccggcugaacgagguggccaagaaucugaacgagagccugaucgaccugcaagaacuggggaaguacgagcaguacaucaaguggcccugguacaucuggcugggcuuuaucgccggacugauugccaucgugauggucacaaucaugcuguguugcaugaccagcugcuguagcugccugaagggcuguuguagcuguggcagcugcugcaaguucgacgaggacgauucugagcccgugcugaagggcgugaaacugcacuacacaugaggacuagucccuguucccagagcccacuuuuuuuucuuuuuuugaaauaaaauagccugucuuucagaucuaaaaaaaaaaaaaaaaaaaaaaaaaaaaaaaaaaaaaaaaaaaaaaaaaaaaaaaaaaaaaaaaaaaaaaaaaaaaaaaaaaaaaaaaaaaaaaaaaaaa

SEQ ID NO: 25046 - RNA, 4167 nt, Artificial Sequence
  SARS-CoV-2/Wuhan/WIV05/2019__EPI_ISL_402128 spike protein mRNA gc mod (1-1273)(Y453F_D614G)
aggagagggcgcuuggcuugcaaggacccugagcugcggcauugaagcacacccaacccaacucgacugaagucagccucacugaaccggaucugagaaucuucucucucugggcuugccagggcucuccgaaccuagcuagcauccucuucaauuccaacuagaaagcuuaccauguucguguuccuggugcugcugccucugguguccagccagugugugaaccugaccaccagaacacagcugccuccagccuacaccaacagcuuuaccagaggcguguacuaccccgacaagguguucagauccagcgugcugcacucuacccaggaccuguuccugccuuucuucagcaacgugaccugguuccacgccauccacguguccggcaccaauggcaccaagagauucgacaaccccgugcugcccuucaacgacgggguguacuuugccagcaccgagaaguccaacaucaucagaggcuggaucuucggcaccacacuggacagcaagacccagagccugcugaucgugaacaacgccaccaacguggucaucaaagugugcgaguuccaguucugcaacgaccccuuccugggcgucuacuaccacaagaacaacaagagcuggauggaaagcgaguuccggguguacagcagcgccaacaacugcaccuucgaguacgugucccagccuuuccugauggaccuggaaggcaagcagggcaacuucaagaaccugcgcgaguucguguuuaagaacaucgacggcuacuucaagaucuacagcaagcacaccccuaucaaccucgugcgggaucugccucagggcuucucugcucuggaaccccugguggaucugcccaucggcaucaacaucacccgguuucagacacugcuggcccugcacagaagcuaccugacaccuggcgauagcagcagcggauggacagcuggugccgccgcuuacuaugugggcuaccugcagccuagaaccuuccugcugaaguacaacgagaacggcaccaucaccgacgccguggauugugcucuggauccucugagcgagacaaagugcacccugaaguccuucaccguggaaaagggcaucuaccagaccagcaacuuccgggugcagcccaccgaauccaucgugcgguuccccaauaucaccaaucugugccccuucggcgagguguucaaugccaccagauucgccucuguguacgccuggaaccggaagcggaucagcaauugcguggccgacuacuccgugcuguacaacuccgccagcuucagcaccuucaagugcuacggcguguccccuaccaagcugaacgaccugugcuucacaaacguguacgccgacagcuucgugauccggggagaugaagugcggcagauugccccuggacagacaggcaagaucgccgacuacaacuacaagcugcccgacgacuucaccggcugugugauugccuggaacagcaacaaccuggacuccaaagucggcggcaacuacaauuaccuguuccggcuguuccggaaguccaaucugaagcccuucgagcgggacaucuccaccgagaucuaucaggccggcagcaccccuuguaacggcguggaaggcuucaacugcuacuucccacugcaguccuacggcuuucagcccacaaauggcgugggcuaucagcccuacagagugguggugcugagcuucgaacugcugcaugccccugccacagugugcggcccuaagaaaagcaccaaucucgugaagaacaaaugcgugaacuucaacuucaacggccugaccggcaccggcgugcugacagagagcaacaagaaguuccugccauuccagcaguuuggccgggauaucgccgauaccacagacgccguuagagauccccagacacuggaaauccuggacaucaccccuugcagcuucggcggagugucugugaucaccccuggcaccaacaccagcaaucagguggcagugcuguaccagggcgugaacuguaccgaagugcccguggccauucacgccgaucagcugacaccuacauggcggguguacuccaccggcagcaauguguuucagaccagagccggcugucugaucggagccgagcacgugaacaauagcuacgagugcgacauccccaucggcgcuggaaucugcgccagcuaccagacacagacaaacagcccucggagagccagaagcguggccagccagagcaucauugccuacacaaugucucugggcgccgagaacagcguggccuacuccaacaacucuaucgcuauccccaccaacuucaccaucagcgugaccacagagauccugccuguguccaugaccaagaccagcguggacugcaccauguacaucugcggcgauuccaccgagugcuccaaccugcugcugcaguacggcagcuucugcacccagcugaauagagcccugacagggaucgccguggaacaggacaagaacacccaagagguguucgcccaagugaagcagaucuacaagaccccuccuaucaaggacuucggcggcuucaauuucagccagauucugcccgauccuagcaagcccagcaagcggagcuucaucgaggaccugcuguucaacaaagugacacuggccgacgccggcuucaucaagcaguauggcgauugucugggcgacauugccgccagggaucugauuugcgcccagaaguuuaacggacugacagugcugccuccucugcugaccgaugagaugaucgcccaguacacaucugcccugcuggccggcacaaucacaagcggcuggacauuuggagcaggcgccgcucugcagauccccuuugcuaugcagauggccuaccgguucaacggcaucggagugacccagaaugugcuguacgagaaccagaagcugaucgccaaccaguucaacagcgccaucggcaagauccaggacagccugagcagcacagcaagcgcccugggaaagcugcaggacguggucaaccagaaugcccaggcacugaacacccuggucaagcagcuguccuccaacuucggcgccaucagcucugugcugaacgauauccugagcagacuggacaaggucgaggccgaggugcagaucgacagacugaucacaggcagacugcagagccuccagacauacgugacccagcagcugaucagagccgccgagauuagagccucugccaaucuggccgccaccaagaugucugagugugugcugggccagagcaagagaguggacuuuugcggcaagggcuaccaccugaugagcuucccucagucugccccucacggcgugguguuucugcacgugacauaugugcccgcucaagagaagaauuucaccaccgcuccagccaucugccacgacggcaaagcccacuuuccuagagaaggcguguucguguccaacggcacccauugguucgugacacagcggaacuucuacgagccccagaucaucaccaccgacaacaccuucgugucuggcaacugcgacgucgugaucggcauugugaacaauaccguguacgacccucugcagcccgagcuggacagcuucaaagaggaacuggacaaguacuuuaagaaccacacaagccccgacguggaccugggcgauaucagcggaaucaaugccagcgucgugaacauccagaaagagaucgaccggcugaacgagguggccaagaaucugaacgagagccugaucgaccugcaagaacuggggaaguacgagcaguacaucaaguggcccugguacaucuggcugggcuuuaucgccggacugauugccaucgugauggucacaaucaugcuguguugcaugaccagcugcuguagcugccugaagggcuguuguagcuguggcagcugcugcaaguucgacgaggacgauucugagcccgugcugaagggcgugaaacugcacuacacaugaggacuagucccuguucccagagcccacuuuuuuuucuuuuuuugaaauaaaauagccugucuuucagaucuaaaaaaaaaaaaaaaaaaaaaaaaaaaaaaaaaaaaaaaaaaaaaaaaaaaaaaaaaaaaaaaaaaaaaaaaaaaaaaaaaaaaaaaaaaaaaaaaaaaa

SEQ ID NO: 25047 - RNA, 4167 nt, Artificial Sequence
  SARS-CoV-2/Wuhan/WIV05/2019__EPI_ISL_402128 spike protein mRNA gc mod (1-1273)(D614G_I692V)
aggagagggcgcuuggcuugcaaggacccugagcugcggcauugaagcacacccaacccaacucgacugaagucagccucacugaaccggaucugagaaucuucucucucugggcuugccagggcucuccgaaccuagcuagcauccucuucaauuccaacuagaaagcuuaccauguucguguuccuggugcugcugccucugguguccagccagugugugaaccugaccaccagaacacagcugccuccagccuacaccaacagcuuuaccagaggcguguacuaccccgacaagguguucagauccagcgugcugcacucuacccaggaccuguuccugccuuucuucagcaacgugaccugguuccacgccauccacguguccggcaccaauggcaccaagagauucgacaaccccgugcugcccuucaacgacgggguguacuuugccagcaccgagaaguccaacaucaucagaggcuggaucuucggcaccacacuggacagcaagacccagagccugcugaucgugaacaacgccaccaacguggucaucaaagugugcgaguuccaguucugcaacgaccccuuccugggcgucuacuaccacaagaacaacaagagcuggauggaaagcgaguuccggguguacagcagcgccaacaacugcaccuucgaguacgugucccagccuuuccugauggaccuggaaggcaagcagggcaacuucaagaaccugcgcgaguucguguuuaagaacaucgacggcuacuucaagaucuacagcaagcacaccccuaucaaccucgugcgggaucugccucagggcuucucugcucuggaaccccugguggaucugcccaucggcaucaacaucacccgguuucagacacugcuggcccugcacagaagcuaccugacaccuggcgauagcagcagcggauggacagcuggugccgccgcuuacuaugugggcuaccugcagccuagaaccuuccugcugaaguacaacgagaacggcaccaucaccgacgccguggauugugcucuggauccucugagcgagacaaagugcacccugaaguccuucaccguggaaaagggcaucuaccagaccagcaacuuccgggugcagcccaccgaauccaucgugcgguuccccaauaucaccaaucugugccccuucggcgagguguucaaugccaccagauucgccucuguguacgccuggaaccggaagcggaucagcaauugcguggccgacuacuccgugcuguacaacuccgccagcuucagcaccuucaagugcuacggcguguccccuaccaagcugaacgaccugugcuucacaaacguguacgccgacagcuucgugauccggggagaugaagugcggcagauugccccuggacagacaggcaagaucgccgacuacaacuacaagcugcccgacgacuucaccggcugugugauugccuggaacagcaacaaccuggacuccaaagucggcggcaacuacaauuaccuguaccggcuguuccggaaguccaaucugaagcccuucgagcgggacaucuccaccgagaucuaucaggccggcagcaccccuuguaacggcguggaaggcuucaacugcuacuucccacugcaguccuacggcuuucagcccacaaauggcgugggcuaucagcccuacagagugguggugcugagcuucgaacugcugcaugccccugccacagugugcggcccuaagaaaagcaccaaucucgugaagaacaaaugcgugaacuucaacuucaacggccugaccggcaccggcgugcugacagagagcaacaagaaguuccugccauuccagcaguuuggccgggauaucgccgauaccacagacgccguuagagauccccagacacuggaaauccuggacaucaccccuugcagcuucggcggagugucugugaucaccccuggcaccaacaccagcaaucagguggcagugcuguaccagggcgugaacuguaccgaagugcccguggccauucacgccgaucagcugacaccuacauggcggguguacuccaccggcagcaauguguuucagaccagagccggcugucugaucggagccgagcacgugaacaauagcuacgagugcgacauccccaucggcgcuggaaucugcgccagcuaccagacacagacaaacagcccucggagagccagaagcguggccagccagagcgugauugccuacacaaugucucugggcgccgagaacagcguggccuacuccaacaacucuaucgcuauccccaccaacuucaccaucagcgugaccacagagauccugccuguguccaugaccaagaccagcguggacugcaccauguacaucugcggcgauuccaccgagugcuccaaccugcugcugcaguacggcagcuucugcacccagcugaauagagcccugacagggaucgccguggaacaggacaagaacacccaagagguguucgcccaagugaagcagaucuacaagaccccuccuaucaaggacuucggcggcuucaauuucagccagauucugcccgauccuagcaagcccagcaagcggagcuucaucgaggaccugcuguucaacaaagugacacuggccgacgccggcuucaucaagcaguauggcgauugucugggcgacauugccgccagggaucugauuugcgcccagaaguuuaacggacugacagugcugccuccucugcugaccgaugagaugaucgcccaguacacaucugcccugcuggccggcacaaucacaagcggcuggacauuuggagcaggcgccgcucugcagauccccuuugcuaugcagauggccuaccgguucaacggcaucggagugacccagaaugugcuguacgagaaccagaagcugaucgccaaccaguucaacagcgccaucggcaagauccaggacagccugagcagcacagcaagcgcccugggaaagcugcaggacguggucaaccagaaugcccaggcacugaacacccuggucaagcagcuguccuccaacuucggcgccaucagcucugugcugaacgauauccugagcagacuggacaaggucgaggccgaggugcagaucgacagacugaucacaggcagacugcagagccuccagacauacgugacccagcagcugaucagagccgccgagauuagagccucugccaaucuggccgccaccaagaugucugagugugugcugggccagagcaagagaguggacuuuugcggcaagggcuaccaccugaugagcuucccucagucugccccucacggcgugguguuucugcacgugacauaugugcccgcucaagagaagaauuucaccaccgcuccagccaucugccacgacggcaaagcccacuuuccuagagaaggcguguucguguccaacggcacccauugguucgugacacagcggaacuucuacgagccccagaucaucaccaccgacaacaccuucgugucuggcaacugcgacgucgugaucggcauugugaacaauaccguguacgacccucugcagcccgagcuggacagcuucaaagaggaacuggacaaguacuuuaagaaccacacaagccccgacguggaccugggcgauaucagcggaaucaaugccagcgucgugaacauccagaaagagaucgaccggcugaacgagguggccaagaaucugaacgagagccugaucgaccugcaagaacuggggaaguacgagcaguacaucaaguggcccugguacaucuggcugggcuuuaucgccggacugauugccaucgugauggucacaaucaugcuguguugcaugaccagcugcuguagcugccugaagggcuguuguagcuguggcagcugcugcaaguucgacgaggacgauucugagcccgugcugaagggcgugaaacugcacuacacaugaggacuagucccuguucccagagcccacuuuuuuuucuuuuuuugaaauaaaauagccugucuuucagaucuaaaaaaaaaaaaaaaaaaaaaaaaaaaaaaaaaaaaaaaaaaaaaaaaaaaaaaaaaaaaaaaaaaaaaaaaaaaaaaaaaaaaaaaaaaaaaaaaaaaa

SEQ ID NO: 25048 - RNA, 4167 nt, Artificial Sequence
  SARS-CoV-2/Wuhan/WIV05/2019__EPI_ISL_402128 spike protein mRNA gc mod (1-1273)(D614G_M1229I)
aggagagggcgcuuggcuugcaaggacccugagcugcggcauugaagcacacccaacccaacucgacugaagucagccucacugaaccggaucugagaaucuucucucucugggcuugccagggcucuccgaaccuagcuagcauccucuucaauuccaacuagaaagcuuaccauguucguguuccuggugcugcugccucugguguccagccagugugugaaccugaccaccagaacacagcugccuccagccuacaccaacagcuuuaccagaggcguguacuaccccgacaagguguucagauccagcgugcugcacucuacccaggaccuguuccugccuuucuucagcaacgugaccugguuccacgccauccacguguccggcaccaauggcaccaagagauucgacaaccccgugcugcccuucaacgacgggguguacuuugccagcaccgagaaguccaacaucaucagaggcuggaucuucggcaccacacuggacagcaagacccagagccugcugaucgugaacaacgccaccaacguggucaucaaagugugcgaguuccaguucugcaacgaccccuuccugggcgucuacuaccacaagaacaacaagagcuggauggaaagcgaguuccggguguacagcagcgccaacaacugcaccuucgaguacgugucccagccuuuccugauggaccuggaaggcaagcagggcaacuucaagaaccugcgcgaguucguguuuaagaacaucgacggcuacuucaagaucuacagcaagcacaccccuaucaaccucgugcgggaucugccucagggcuucucugcucuggaaccccugguggaucugcccaucggcaucaacaucacccgguuucagacacugcuggcccugcacagaagcuaccugacaccuggcgauagcagcagcggauggacagcuggugccgccgcuuacuaugugggcuaccugcagccuagaaccuuccugcugaaguacaacgagaacggcaccaucaccgacgccguggauugugcucuggauccucugagcgagacaaagugcacccugaaguccuucaccguggaaaagggcaucuaccagaccagcaacuuccgggugcagcccaccgaauccaucgugcgguuccccaauaucaccaaucugugccccuucggcgagguguucaaugccaccagauucgccucuguguacgccuggaaccggaagcggaucagcaauugcguggccgacuacuccgugcuguacaacuccgccagcuucagcaccuucaagugcuacggcguguccccuaccaagcugaacgaccugugcuucacaaacguguacgccgacagcuucgugauccggggagaugaagugcggcagauugccccuggacagacaggcaagaucgccgacuacaacuacaagcugcccgacgacuucaccggcugugugauugccuggaacagcaacaaccuggacuccaaagucggcggcaacuacaauuaccuguaccggcuguuccggaaguccaaucugaagcccuucgagcgggacaucuccaccgagaucuaucaggccggcagcaccccuuguaacggcguggaaggcuucaacugcuacuucccacugcaguccuacggcuuucagcccacaaauggcgugggcuaucagcccuacagagugguggugcugagcuucgaacugcugcaugccccugccacagugugcggcccuaagaaaagcaccaaucucgugaagaacaaaugcgugaacuucaacuucaacggccugaccggcaccggcgugcugacagagagcaacaagaaguuccugccauuccagcaguuuggccgggauaucgccgauaccacagacgccguuagagauccccagacacuggaaauccuggacaucaccccuugcagcuucggcggagugucugugaucaccccuggcaccaacaccagcaaucagguggcagugcuguaccagggcgugaacuguaccgaagugcccguggccauucacgccgaucagcugacaccuacauggcggguguacuccaccggcagcaauguguuucagaccagagccggcugucugaucggagccgagcacgugaacaauagcuacgagugcgacauccccaucggcgcuggaaucugcgccagcuaccagacacagacaaacagcccucggagagccagaagcguggccagccagagcaucauugccuacacaaugucucugggcgccgagaacagcguggccuacuccaacaacucuaucgcuauccccaccaacuucaccaucagcgugaccacagagauccugccuguguccaugaccaagaccagcguggacugcaccauguacaucugcggcgauuccaccgagugcuccaaccugcugcugcaguacggcagcuucugcacccagcugaauagagcccugacagggaucgccguggaacaggacaagaacacccaagagguguucgcccaagugaagcagaucuacaagaccccuccuaucaaggacuucggcggcuucaauuucagccagauucugcccgauccuagcaagcccagcaagcggagcuucaucgaggaccugcuguucaacaaagugacacuggccgacgccggcuucaucaagcaguauggcgauugucugggcgacauugccgccagggaucugauuugcgcccagaaguuuaacggacugacagugcugccuccucugcugaccgaugagaugaucgcccaguacacaucugcccugcuggccggcacaaucacaagcggcuggacauuuggagcaggcgccgcucugcagauccccuuugcuaugcagauggccuaccgguucaacggcaucggagugacccagaaugugcuguacgagaaccagaagcugaucgccaaccaguucaacagcgccaucggcaagauccaggacagccugagcagcacagcaagcgcccugggaaagcugcaggacguggucaaccagaaugcccaggcacugaacacccuggucaagcagcuguccuccaacuucggcgccaucagcucugugcugaacgauauccugagcagacuggacaaggucgaggccgaggugcagaucgacagacugaucacaggcagacugcagagccuccagacauacgugacccagcagcugaucagagccgccgagauuagagccucugccaaucuggccgccaccaagaugucugagugugugcugggccagagcaagagaguggacuuuugcggcaagggcuaccaccugaugagcuucccucagucugccccucacggcgugguguuucugcacgugacauaugugcccgcucaagagaagaauuucaccaccgcuccagccaucugccacgacggcaaagcccacuuuccuagagaaggcguguucguguccaacggcacccauugguucgugacacagcggaacuucuacgagccccagaucaucaccaccgacaacaccuucgugucuggcaacugcgacgucgugaucggcauugugaacaauaccguguacgacccucugcagcccgagcuggacagcuucaaagaggaacuggacaaguacuuuaagaaccacacaagccccgacguggaccugggcgauaucagcggaaucaaugccagcgucgugaacauccagaaagagaucgaccggcugaacgagguggccaagaaucugaacgagagccugaucgaccugcaagaacuggggaaguacgagcaguacaucaaguggcccugguacaucuggcugggcuuuaucgccggacugauugccaucgugaucgucacaaucaugcuguguugcaugaccagcugcuguagcugccugaagggcuguuguagcuguggcagcugcugcaaguucgacgaggacgauucugagcccgugcugaagggcgugaaacugcacuacacaugaggacuagucccuguucccagagcccacuuuuuuuucuuuuuuugaaauaaaauagccugucuuucagaucuaaaaaaaaaaaaaaaaaaaaaaaaaaaaaaaaaaaaaaaaaaaaaaaaaaaaaaaaaaaaaaaaaaaaaaaaaaaaaaaaaaaaaaaaaaaaaaaaaaaa

SEQ ID NO: 25049 - RNA, 4161 nt, Artificial Sequence
  SARS-CoV-2/Wuhan/WIV05/2019__EPI_ISL_402128 spike protein mRNA gc mod (1-1273)(H69del_V70del_A222V_Y453F_S477N_D614G_I692V)
aggagagggcgcuuggcuugcaaggacccugagcugcggcauugaagcacacccaacccaacucgacugaagucagccucacugaaccggaucugagaaucuucucucucugggcuugccagggcucuccgaaccuagcuagcauccucuucaauuccaacuagaaagcuuaccauguucguguuccuggugcugcugccucugguguccagccagugugugaaccugaccaccagaacacagcugccuccagccuacaccaacagcuuuaccagaggcguguacuaccccgacaagguguucagauccagcgugcugcacucuacccaggaccuguuccugccuuucuucagcaacgugaccugguuccacgccaucuccggcaccaauggcaccaagagauucgacaaccccgugcugcccuucaacgacgggguguacuuugccagcaccgagaaguccaacaucaucagaggcuggaucuucggcaccacacuggacagcaagacccagagccugcugaucgugaacaacgccaccaacguggucaucaaagugugcgaguuccaguucugcaacgaccccuuccugggcgucuacuaccacaagaacaacaagagcuggauggaaagcgaguuccggguguacagcagcgccaacaacugcaccuucgaguacgugucccagccuuuccugauggaccuggaaggcaagcagggcaacuucaagaaccugcgcgaguucguguuuaagaacaucgacggcuacuucaagaucuacagcaagcacaccccuaucaaccucgugcgggaucugccucagggcuucucugugcuggaaccccugguggaucugcccaucggcaucaacaucacccgguuucagacacugcuggcccugcacagaagcuaccugacaccuggcgauagcagcagcggauggacagcuggugccgccgcuuacuaugugggcuaccugcagccuagaaccuuccugcugaaguacaacgagaacggcaccaucaccgacgccguggauugugcucuggauccucugagcgagacaaagugcacccugaaguccuucaccguggaaaagggcaucuaccagaccagcaacuuccgggugcagcccaccgaauccaucgugcgguuccccaauaucaccaaucugugccccuucggcgagguguucaaugccaccagauucgccucuguguacgccuggaaccggaagcggaucagcaauugcguggccgacuacuccgugcuguacaacuccgccagcuucagcaccuucaagugcuacggcguguccccuaccaagcugaacgaccugugcuucacaaacguguacgccgacagcuucgugauccggggagaugaagugcggcagauugccccuggacagacaggcaagaucgccgacuacaacuacaagcugcccgacgacuucaccggcugugugauugccuggaacagcaacaaccuggacuccaaagucggcggcaacuacaauuaccuguuccggcuguuccggaaguccaaucugaagcccuucgagcgggacaucuccaccgagaucuaucaggccggcaacaccccuuguaacggcguggaaggcuucaacugcuacuucccacugcaguccuacggcuuucagcccacaaauggcgugggcuaucagcccuacagagugguggugcugagcuucgaacugcugcaugccccugccacagugugcggcccuaagaaaagcaccaaucucgugaagaacaaaugcgugaacuucaacuucaacggccugaccggcaccggcgugcugacagagagcaacaagaaguuccugccauuccagcaguuuggccgggauaucgccgauaccacagacgccguuagagauccccagacacuggaaauccuggacaucaccccuugcagcuucggcggagugucugugaucaccccuggcaccaacaccagcaaucagguggcagugcuguaccagggcgugaacuguaccgaagugcccguggccauucacgccgaucagcugacaccuacauggcggguguacuccaccggcagcaauguguuucagaccagagccggcugucugaucggagccgagcacgugaacaauagcuacgagugcgacauccccaucggcgcuggaaucugcgccagcuaccagacacagacaaacagcccucggagagccagaagcguggccagccagagcgugauugccuacacaaugucucugggcgccgagaacagcguggccuacuccaacaacucuaucgcuauccccaccaacuucaccaucagcgugaccacagagauccugccuguguccaugaccaagaccagcguggacugcaccauguacaucugcggcgauuccaccgagugcuccaaccugcugcugcaguacggcagcuucugcacccagcugaauagagcccugacagggaucgccguggaacaggacaagaacacccaagagguguucgcccaagugaagcagaucuacaagaccccuccuaucaaggacuucggcggcuucaauuucagccagauucugcccgauccuagcaagcccagcaagcggagcuucaucgaggaccugcuguucaacaaagugacacuggccgacgccggcuucaucaagcaguauggcgauugucugggcgacauugccgccagggaucugauuugcgcccagaaguuuaacggacugacagugcugccuccucugcugaccgaugagaugaucgcccaguacacaucugcccugcuggccggcacaaucacaagcggcuggacauuuggagcaggcgccgcucugcagauccccuuugcuaugcagauggccuaccgguucaacggcaucggagugacccagaaugugcuguacgagaaccagaagcugaucgccaaccaguucaacagcgccaucggcaagauccaggacagccugagcagcacagcaagcgcccugggaaagcugcaggacguggucaaccagaaugcccaggcacugaacacccuggucaagcagcuguccuccaacuucggcgccaucagcucugugcugaacgauauccugagcagacuggacaaggucgaggccgaggugcagaucgacagacugaucacaggcagacugcagagccuccagacauacgugacccagcagcugaucagagccgccgagauuagagccucugccaaucuggccgccaccaagaugucugagugugugcugggccagagcaagagaguggacuuuugcggcaagggcuaccaccugaugagcuucccucagucugccccucacggcgugguguuucugcacgugacauaugugcccgcucaagagaagaauuucaccaccgcuccagccaucugccacgacggcaaagcccacuuuccuagagaaggcguguucguguccaacggcacccauugguucgugacacagcggaacuucuacgagccccagaucaucaccaccgacaacaccuucgugucuggcaacugcgacgucgugaucggcauugugaacaauaccguguacgacccucugcagcccgagcuggacagcuucaaagaggaacuggacaaguacuuuaagaaccacacaagccccgacguggaccugggcgauaucagcggaaucaaugccagcgucgugaacauccagaaagagaucgaccggcugaacgagguggccaagaaucugaacgagagccugaucgaccugcaagaacuggggaaguacgagcaguacaucaaguggcccugguacaucuggcugggcuuuaucgccggacugauugccaucgugauggucacaaucaugcuguguugcaugaccagcugcuguagcugccugaagggcuguuguagcuguggcagcugcugcaaguucgacgaggacgauucugagcccgugcugaagggcgugaaacugcacuacacaugaggacuagucccuguucccagagcccacuuuuuuuucuuuuuuugaaauaaaauagccugucuuucagaucuaaaaaaaaaaaaaaaaaaaaaaaaaaaaaaaaaaaaaaaaaaaaaaaaaaaaaaaaaaaaaaaaaaaaaaaaaaaaaaaaaaaaaaaaaaaaaaaaaaaa

SEQ ID NO: 25050 - RNA, 4161 nt, Artificial Sequence
  SARS-CoV-2/Wuhan/WIV05/2019__EPI_ISL_402128 spike protein mRNA gc mod (1-1273)(H69del_V70del_Y453F_D614G_I692V_M1229I)
aggagagggcgcuuggcuugcaaggacccugagcugcggcauugaagcacacccaacccaacucgacugaagucagccucacugaaccggaucugagaaucuucucucucugggcuugccagggcucuccgaaccuagcuagcauccucuucaauuccaacuagaaagcuuaccauguucguguuccuggugcugcugccucugguguccagccagugugugaaccugaccaccagaacacagcugccuccagccuacaccaacagcuuuaccagaggcguguacuaccccgacaagguguucagauccagcgugcugcacucuacccaggaccuguuccugccuuucuucagcaacgugaccugguuccacgccaucuccggcaccaauggcaccaagagauucgacaaccccgugcugcccuucaacgacgggguguacuuugccagcaccgagaaguccaacaucaucagaggcuggaucuucggcaccacacuggacagcaagacccagagccugcugaucgugaacaacgccaccaacguggucaucaaagugugcgaguuccaguucugcaacgaccccuuccugggcgucuacuaccacaagaacaacaagagcuggauggaaagcgaguuccggguguacagcagcgccaacaacugcaccuucgaguacgugucccagccuuuccugauggaccuggaaggcaagcagggcaacuucaagaaccugcgcgaguucguguuuaagaacaucgacggcuacuucaagaucuacagcaagcacaccccuaucaaccucgugcgggaucugccucagggcuucucugcucuggaaccccugguggaucugcccaucggcaucaacaucacccgguuucagacacugcuggcccugcacagaagcuaccugacaccuggcgauagcagcagcggauggacagcuggugccgccgcuuacuaugugggcuaccugcagccuagaaccuuccugcugaaguacaacgagaacggcaccaucaccgacgccguggauugugcucuggauccucugagcgagacaaagugcacccugaaguccuucaccguggaaaagggcaucuaccagaccagcaacuuccgggugcagcccaccgaauccaucgugcgguuccccaauaucaccaaucugugccccuucggcgagguguucaaugccaccagauucgccucuguguacgccuggaaccggaagcggaucagcaauugcguggccgacuacuccgugcuguacaacuccgccagcuucagcaccuucaagugcuacggcguguccccuaccaagcugaacgaccugugcuucacaaacguguacgccgacagcuucgugauccggggagaugaagugcggcagauugccccuggacagacaggcaagaucgccgacuacaacuacaagcugcccgacgacuucaccggcugugugauugccuggaacagcaacaaccuggacuccaaagucggcggcaacuacaauuaccuguuccggcuguuccggaaguccaaucugaagcccuucgagcgggacaucuccaccgagaucuaucaggccggcagcaccccuuguaacggcguggaaggcuucaacugcuacuucccacugcaguccuacggcuuucagcccacaaauggcgugggcuaucagcccuacagagugguggugcugagcuucgaacugcugcaugccccugccacagugugcggcccuaagaaaagcaccaaucucgugaagaacaaaugcgugaacuucaacuucaacggccugaccggcaccggcgugcugacagagagcaacaagaaguuccugccauuccagcaguuuggccgggauaucgccgauaccacagacgccguuagagauccccagacacuggaaauccuggacaucaccccuugcagcuucggcggagugucugugaucaccccuggcaccaacaccagcaaucagguggcagugcuguaccagggcgugaacuguaccgaagugcccguggccauucacgccgaucagcugacaccuacauggcggguguacuccaccggcagcaauguguuucagaccagagccggcugucugaucggagccgagcacgugaacaauagcuacgagugcgacauccccaucggcgcuggaaucugcgccagcuaccagacacagacaaacagcccucggagagccagaagcguggccagccagagcgugauugccuacacaaugucucugggcgccgagaacagcguggccuacuccaacaacucuaucgcuauccccaccaacuucaccaucagcgugaccacagagauccugccuguguccaugaccaagaccagcguggacugcaccauguacaucugcggcgauuccaccgagugcuccaaccugcugcugcaguacggcagcuucugcacccagcugaauagagcccugacagggaucgccguggaacaggacaagaacacccaagagguguucgcccaagugaagcagaucuacaagaccccuccuaucaaggacuucggcggcuucaauuucagccagauucugcccgauccuagcaagcccagcaagcggagcuucaucgaggaccugcuguucaacaaagugacacuggccgacgccggcuucaucaagcaguauggcgauugucugggcgacauugccgccagggaucugauuugcgcccagaaguuuaacggacugacagugcugccuccucugcugaccgaugagaugaucgcccaguacacaucugcccugcuggccggcacaaucacaagcggcuggacauuuggagcaggcgccgcucugcagauccccuuugcuaugcagauggccuaccgguucaacggcaucggagugacccagaaugugcuguacgagaaccagaagcugaucgccaaccaguucaacagcgccaucggcaagauccaggacagccugagcagcacagcaagcgcccugggaaagcugcaggacguggucaaccagaaugcccaggcacugaacacccuggucaagcagcuguccuccaacuucggcgccaucagcucugugcugaacgauauccugagcagacuggacaaggucgaggccgaggugcagaucgacagacugaucacaggcagacugcagagccuccagacauacgugacccagcagcugaucagagccgccgagauuagagccucugccaaucuggccgccaccaagaugucugagugugugcugggccagagcaagagaguggacuuuugcggcaagggcuaccaccugaugagcuucccucagucugccccucacggcgugguguuucugcacgugacauaugugcccgcucaagagaagaauuucaccaccgcuccagccaucugccacgacggcaaagcccacuuuccuagagaaggcguguucguguccaacggcacccauugguucgugacacagcggaacuucuacgagccccagaucaucaccaccgacaacaccuucgugucuggcaacugcgacgucgugaucggcauugugaacaauaccguguacgacccucugcagcccgagcuggacagcuucaaagaggaacuggacaaguacuuuaagaaccacacaagccccgacguggaccugggcgauaucagcggaaucaaugccagcgucgugaacauccagaaagagaucgaccggcugaacgagguggccaagaaucugaacgagagccugaucgaccugcaagaacuggggaaguacgagcaguacaucaaguggcccugguacaucuggcugggcuuuaucgccggacugauugccaucgugaucgucacaaucaugcuguguugcaugaccagcugcuguagcugccugaagggcuguuguagcuguggcagcugcugcaaguucgacgaggacgauucugagcccgugcugaagggcgugaaacugcacuacacaugaggacuagucccuguucccagagcccacuuuuuuuucuuuuuuugaaauaaaauagccugucuuucagaucuaaaaaaaaaaaaaaaaaaaaaaaaaaaaaaaaaaaaaaaaaaaaaaaaaaaaaaaaaaaaaaaaaaaaaaaaaaaaaaaaaaaaaaaaaaaaaaaaaaaa

SEQ ID NO: 25051 - RNA, 4158 nt, Artificial Sequence
  SARS-CoV-2/Wuhan/WIV05/2019__EPI_ISL_402128 spike protein mRNA gc mod (1-1273)(H69del_V70del_Y144del_N501Y_A570D_D614G_P681H_T716I_S982 A_D1118H)
aggagagggcgcuuggcuugcaaggacccugagcugcggcauugaagcacacccaacccaacucgacugaagucagccucacugaaccggaucugagaaucuucucucucugggcuugccagggcucuccgaaccuagcuagcauccucuucaauuccaacuagaaagcuuaccauguucguguuccuggugcugcugccucugguguccagccagugugugaaccugaccaccagaacacagcugccuccagccuacaccaacagcuuuaccagaggcguguacuaccccgacaagguguucagauccagcgugcugcacucuacccaggaccuguuccugccuuucuucagcaacgugaccugguuccacgccaucuccggcaccaauggcaccaagagauucgacaaccccgugcugcccuucaacgacgggguguacuuugccagcaccgagaaguccaacaucaucagaggcuggaucuucggcaccacacuggacagcaagacccagagccugcugaucgugaacaacgccaccaacguggucaucaaagugugcgaguuccaguucugcaacgaccccuuccugggcgucuaccacaagaacaacaagagcuggauggaaagcgaguuccggguguacagcagcgccaacaacugcaccuucgaguacgugucccagccuuuccugauggaccuggaaggcaagcagggcaacuucaagaaccugcgcgaguucguguuuaagaacaucgacggcuacuucaagaucuacagcaagcacaccccuaucaaccucgugcgggaucugccucagggcuucucugcucuggaaccccugguggaucugcccaucggcaucaacaucacccgguuucagacacugcuggcccugcacagaagcuaccugacaccuggcgauagcagcagcggauggacagcuggugccgccgcuuacuaugugggcuaccugcagccuagaaccuuccugcugaaguacaacgagaacggcaccaucaccgacgccguggauugugcucuggauccucugagcgagacaaagugcacccugaaguccuucaccguggaaaagggcaucuaccagaccagcaacuuccgggugcagcccaccgaauccaucgugcgguuccccaauaucaccaaucugugccccuucggcgagguguucaaugccaccagauucgccucuguguacgccuggaaccggaagcggaucagcaauugcguggccgacuacuccgugcuguacaacuccgccagcuucagcaccuucaagugcuacggcguguccccuaccaagcugaacgaccugugcuucacaaacguguacgccgacagcuucgugauccggggagaugaagugcggcagauugccccuggacagacaggcaagaucgccgacuacaacuacaagcugcccgacgacuucaccggcugugugauugccuggaacagcaacaaccuggacuccaaagucggcggcaacuacaauuaccuguaccggcuguuccggaaguccaaucugaagcccuucgagcgggacaucuccaccgagaucuaucaggccggcagcaccccuuguaacggcguggaaggcuucaacugcuacuucccacugcaguccuacggcuuucagcccacauacggcgugggcuaucagcccuacagagugguggugcugagcuucgaacugcugcaugccccugccacagugugcggcccuaagaaaagcaccaaucucgugaagaacaaaugcgugaacuucaacuucaacggccugaccggcaccggcgugcugacagagagcaacaagaaguuccugccauuccagcaguuuggccgggauaucgacgauaccacagacgccguuagagauccccagacacuggaaauccuggacaucaccccuugcagcuucggcggagugucugugaucaccccuggcaccaacaccagcaaucagguggcagugcuguaccagggcgugaacuguaccgaagugcccguggccauucacgccgaucagcugacaccuacauggcggguguacuccaccggcagcaauguguuucagaccagagccggcugucugaucggagccgagcacgugaacaauagcuacgagugcgacauccccaucggcgcuggaaucugcgccagcuaccagacacagacaaacagccaccggagagccagaagcguggccagccagagcaucauugccuacacaaugucucugggcgccgagaacagcguggccuacuccaacaacucuaucgcuauccccaucaacuucaccaucagcgugaccacagagauccugccuguguccaugaccaagaccagcguggacugcaccauguacaucugcggcgauuccaccgagugcuccaaccugcugcugcaguacggcagcuucugcacccagcugaauagagcccugacagggaucgccguggaacaggacaagaacacccaagagguguucgcccaagugaagcagaucuacaagaccccuccuaucaaggacuucggcggcuucaauuucagccagauucugcccgauccuagcaagcccagcaagcggagcuucaucgaggaccugcuguucaacaaagugacacuggccgacgccggcuucaucaagcaguauggcgauugucugggcgacauugccgccagggaucugauuugcgcccagaaguuuaacggacugacagugcugccuccucugcugaccgaugagaugaucgcccaguacacaucugcccugcuggccggcacaaucacaagcggcuggacauuuggagcaggcgccgcucugcagauccccuuugcuaugcagauggccuaccgguucaacggcaucggagugacccagaaugugcuguacgagaaccagaagcugaucgccaaccaguucaacagcgccaucggcaagauccaggacagccugagcagcacagcaagcgcccugggaaagcugcaggacguggucaaccagaaugcccaggcacugaacacccuggucaagcagcuguccuccaacuucggcgccaucagcucugugcugaacgauauccuggccagacuggacaaggucgaggccgaggugcagaucgacagacugaucacaggcagacugcagagccuccagacauacgugacccagcagcugaucagagccgccgagauuagagccucugccaaucuggccgccaccaagaugucugagugugugcugggccagagcaagagaguggacuuuugcggcaagggcuaccaccugaugagcuucccucagucugccccucacggcgugguguuucugcacgugacauaugugcccgcucaagagaagaauuucaccaccgcuccagccaucugccacgacggcaaagcccacuuuccuagagaaggcguguucguguccaacggcacccauugguucgugacacagcggaacuucuacgagccccagaucaucaccacccacaacaccuucgugucuggcaacugcgacgucgugaucggcauugugaacaauaccguguacgacccucugcagcccgagcuggacagcuucaaagaggaacuggacaaguacuuuaagaaccacacaagccccgacguggaccugggcgauaucagcggaaucaaugccagcgucgugaacauccagaaagagaucgaccggcugaacgagguggccaagaaucugaacgagagccugaucgaccugcaagaacuggggaaguacgagcaguacaucaaguggcccugguacaucuggcugggcuuuaucgccggacugauugccaucgugauggucacaaucaugcuguguugcaugaccagcugcuguagcugccugaagggcuguuguagcuguggcagcugcugcaaguucgacgaggacgauucugagcccgugcugaagggcgugaaacugcacuacacaugaggacuagucccuguucccagagcccacuuuuuuuucuuuuuuugaaauaaaauagccugucuuucagaucuaaaaaaaaaaaaaaaaaaaaaaaaaaaaaaaaaaaaaaaaaaaaaaaaaaaaaaaaaaaaaaaaaaaaaaaaaaaaaaaaaaaaaaaaaaaaaaaaaaaa

SEQ ID NO: 25052 - RNA, 4167 nt, Artificial Sequence
  SARS-CoV-2/Wuhan/WIV05/2019__EPI_ISL_402128 spike protein mRNA gc mod (1-1273)(K417N_E484K_N501Y_D614G)
aggagagggcgcuuggcuugcaaggacccugagcugcggcauugaagcacacccaacccaacucgacugaagucagccucacugaaccggaucugagaaucuucucucucugggcuugccagggcucuccgaaccuagcuagcauccucuucaauuccaacuagaaagcuuaccauguucguguuccuggugcugcugccucugguguccagccagugugugaaccugaccaccagaacacagcugccuccagccuacaccaacagcuuuaccagaggcguguacuaccccgacaagguguucagauccagcgugcugcacucuacccaggaccuguuccugccuuucuucagcaacgugaccugguuccacgccauccacguguccggcaccaauggcaccaagagauucgacaaccccgugcugcccuucaacgacgggguguacuuugccagcaccgagaaguccaacaucaucagaggcuggaucuucggcaccacacuggacagcaagacccagagccugcugaucgugaacaacgccaccaacguggucaucaaagugugcgaguuccaguucugcaacgaccccuuccugggcgucuacuaccacaagaacaacaagagcuggauggaaagcgaguuccggguguacagcagcgccaacaacugcaccuucgaguacgugucccagccuuuccugauggaccuggaaggcaagcagggcaacuucaagaaccugcgcgaguucguguuuaagaacaucgacggcuacuucaagaucuacagcaagcacaccccuaucaaccucgugcgggaucugccucagggcuucucugcucuggaaccccugguggaucugcccaucggcaucaacaucacccgguuucagacacugcuggcccugcacagaagcuaccugacaccuggcgauagcagcagcggauggacagcuggugccgccgcuuacuaugugggcuaccugcagccuagaaccuuccugcugaaguacaacgagaacggcaccaucaccgacgccguggauugugcucuggauccucugagcgagacaaagugcacccugaaguccuucaccguggaaaagggcaucuaccagaccagcaacuuccgggugcagcccaccgaauccaucgugcgguuccccaauaucaccaaucugugccccuucggcgagguguucaaugccaccagauucgccucuguguacgccuggaaccggaagcggaucagcaauugcguggccgacuacuccgugcuguacaacuccgccagcuucagcaccuucaagugcuacggcguguccccuaccaagcugaacgaccugugcuucacaaacguguacgccgacagcuucgugauccggggagaugaagugcggcagauugccccuggacagacaggcaacaucgccgacuacaacuacaagcugcccgacgacuucaccggcugugugauugccuggaacagcaacaaccuggacuccaaagucggcggcaacuacaauuaccuguaccggcuguuccggaaguccaaucugaagcccuucgagcgggacaucuccaccgagaucuaucaggccggcagcaccccuuguaacggcgugaagggcuucaacugcuacuucccacugcaguccuacggcuuucagcccacauacggcgugggcuaucagcccuacagagugguggugcugagcuucgaacugcugcaugccccugccacagugugcggcccuaagaaaagcaccaaucucgugaagaacaaaugcgugaacuucaacuucaacggccugaccggcaccggcgugcugacagagagcaacaagaaguuccugccauuccagcaguuuggccgggauaucgccgauaccacagacgccguuagagauccccagacacuggaaauccuggacaucaccccuugcagcuucggcggagugucugugaucaccccuggcaccaacaccagcaaucagguggcagugcuguaccagggcgugaacuguaccgaagugcccguggccauucacgccgaucagcugacaccuacauggcggguguacuccaccggcagcaauguguuucagaccagagccggcugucugaucggagccgagcacgugaacaauagcuacgagugcgacauccccaucggcgcuggaaucugcgccagcuaccagacacagacaaacagcccucggagagccagaagcguggccagccagagcaucauugccuacacaaugucucugggcgccgagaacagcguggccuacuccaacaacucuaucgcuauccccaccaacuucaccaucagcgugaccacagagauccugccuguguccaugaccaagaccagcguggacugcaccauguacaucugcggcgauuccaccgagugcuccaaccugcugcugcaguacggcagcuucugcacccagcugaauagagcccugacagggaucgccguggaacaggacaagaacacccaagagguguucgcccaagugaagcagaucuacaagaccccuccuaucaaggacuucggcggcuucaauuucagccagauucugcccgauccuagcaagcccagcaagcggagcuucaucgaggaccugcuguucaacaaagugacacuggccgacgccggcuucaucaagcaguauggcgauugucugggcgacauugccgccagggaucugauuugcgcccagaaguuuaacggacugacagugcugccuccucugcugaccgaugagaugaucgcccaguacacaucugcccugcuggccggcacaaucacaagcggcuggacauuuggagcaggcgccgcucugcagauccccuuugcuaugcagauggccuaccgguucaacggcaucggagugacccagaaugugcuguacgagaaccagaagcugaucgccaaccaguucaacagcgccaucggcaagauccaggacagccugagcagcacagcaagcgcccugggaaagcugcaggacguggucaaccagaaugcccaggcacugaacacccuggucaagcagcuguccuccaacuucggcgccaucagcucugugcugaacgauauccugagcagacuggacaaggucgaggccgaggugcagaucgacagacugaucacaggcagacugcagagccuccagacauacgugacccagcagcugaucagagccgccgagauuagagccucugccaaucuggccgccaccaagaugucugagugugugcugggccagagcaagagaguggacuuuugcggcaagggcuaccaccugaugagcuucccucagucugccccucacggcgugguguuucugcacgugacauaugugcccgcucaagagaagaauuucaccaccgcuccagccaucugccacgacggcaaagcccacuuuccuagagaaggcguguucguguccaacggcacccauugguucgugacacagcggaacuucuacgagccccagaucaucaccaccgacaacaccuucgugucuggcaacugcgacgucgugaucggcauugugaacaauaccguguacgacccucugcagcccgagcuggacagcuucaaagaggaacuggacaaguacuuuaagaaccacacaagccccgacguggaccugggcgauaucagcggaaucaaugccagcgucgugaacauccagaaagagaucgaccggcugaacgagguggccaagaaucugaacgagagccugaucgaccugcaagaacuggggaaguacgagcaguacaucaaguggcccugguacaucuggcugggcuuuaucgccggacugauugccaucgugauggucacaaucaugcuguguugcaugaccagcugcuguagcugccugaagggcuguuguagcuguggcagcugcugcaaguucgacgaggacgauucugagcccgugcugaagggcgugaaacugcacuacacaugaggacuagucccuguucccagagcccacuuuuuuuucuuuuuuugaaauaaaauagccugucuuucagaucuaaaaaaaaaaaaaaaaaaaaaaaaaaaaaaaaaaaaaaaaaaaaaaaaaaaaaaaaaaaaaaaaaaaaaaaaaaaaaaaaaaaaaaaaaaaaaaaaaaaa

SEQ ID NO: 25053 - RNA, 4158 nt, Artificial Sequence
  SARS-CoV-2/Wuhan/WIV05/2019__EPI_ISL_402128 spike protein mRNA gc mod (1-1273)(L18F_D80A_D215G_L242del_A243del_L244del_R246I_K417N_E484 K_N501Y_D614G_A701V)
aggagagggcgcuuggcuugcaaggacccugagcugcggcauugaagcacacccaacccaacucgacugaagucagccucacugaaccggaucugagaaucuucucucucugggcuugccagggcucuccgaaccuagcuagcauccucuucaauuccaacuagaaagcuuaccauguucguguuccuggugcugcugccucugguguccagccagugugugaacuucaccaccagaacacagcugccuccagccuacaccaacagcuuuaccagaggcguguacuaccccgacaagguguucagauccagcgugcugcacucuacccaggaccuguuccugccuuucuucagcaacgugaccugguuccacgccauccacguguccggcaccaauggcaccaagagauucgccaaccccgugcugcccuucaacgacgggguguacuuugccagcaccgagaaguccaacaucaucagaggcuggaucuucggcaccacacuggacagcaagacccagagccugcugaucgugaacaacgccaccaacguggucaucaaagugugcgaguuccaguucugcaacgaccccuuccugggcgucuacuaccacaagaacaacaagagcuggauggaaagcgaguuccggguguacagcagcgccaacaacugcaccuucgaguacgugucccagccuuuccugauggaccuggaaggcaagcagggcaacuucaagaaccugcgcgaguucguguuuaagaacaucgacggcuacuucaagaucuacagcaagcacaccccuaucaaccucgugcggggccugccucagggcuucucugcucuggaaccccugguggaucugcccaucggcaucaacaucacccgguuucagacacugcacaucagcuaccugacaccuggcgauagcagcagcggauggacagcuggugccgccgcuuacuaugugggcuaccugcagccuagaaccuuccugcugaaguacaacgagaacggcaccaucaccgacgccguggauugugcucuggauccucugagcgagacaaagugcacccugaaguccuucaccguggaaaagggcaucuaccagaccagcaacuuccgggugcagcccaccgaauccaucgugcgguuccccaauaucaccaaucugugccccuucggcgagguguucaaugccaccagauucgccucuguguacgccuggaaccggaagcggaucagcaauugcguggccgacuacuccgugcuguacaacuccgccagcuucagcaccuucaagugcuacggcguguccccuaccaagcugaacgaccugugcuucacaaacguguacgccgacagcuucgugauccggggagaugaagugcggcagauugccccuggacagacaggcaacaucgccgacuacaacuacaagcugcccgacgacuucaccggcugugugauugccuggaacagcaacaaccuggacuccaaagucggcggcaacuacaauuaccuguaccggcuguuccggaaguccaaucugaagcccuucgagcgggacaucuccaccgagaucuaucaggccggcagcaccccuuguaacggcgugaagggcuucaacugcuacuucccacugcaguccuacggcuuucagcccacauacggcgugggcuaucagcccuacagagugguggugcugagcuucgaacugcugcaugccccugccacagugugcggcccuaagaaaagcaccaaucucgugaagaacaaaugcgugaacuucaacuucaacggccugaccggcaccggcgugcugacagagagcaacaagaaguuccugccauuccagcaguuuggccgggauaucgccgauaccacagacgccguuagagauccccagacacuggaaauccuggacaucaccccuugcagcuucggcggagugucugugaucaccccuggcaccaacaccagcaaucagguggcagugcuguaccagggcgugaacuguaccgaagugcccguggccauucacgccgaucagcugacaccuacauggcggguguacuccaccggcagcaauguguuucagaccagagccggcugucugaucggagccgagcacgugaacaauagcuacgagugcgacauccccaucggcgcuggaaucugcgccagcuaccagacacagacaaacagcccucggagagccagaagcguggccagccagagcaucauugccuacacaaugucucugggcguggagaacagcguggccuacuccaacaacucuaucgcuauccccaccaacuucaccaucagcgugaccacagagauccugccuguguccaugaccaagaccagcguggacugcaccauguacaucugcggcgauuccaccgagugcuccaaccugcugcugcaguacggcagcuucugcacccagcugaauagagcccugacagggaucgccguggaacaggacaagaacacccaagagguguucgcccaagugaagcagaucuacaagaccccuccuaucaaggacuucggcggcuucaauuucagccagauucugcccgauccuagcaagcccagcaagcggagcuucaucgaggaccugcuguucaacaaagugacacuggccgacgccggcuucaucaagcaguauggcgauugucugggcgacauugccgccagggaucugauuugcgcccagaaguuuaacggacugacagugcugccuccucugcugaccgaugagaugaucgcccaguacacaucugcccugcuggccggcacaaucacaagcggcuggacauuuggagcaggcgccgcucugcagauccccuuugcuaugcagauggccuaccgguucaacggcaucggagugacccagaaugugcuguacgagaaccagaagcugaucgccaaccaguucaacagcgccaucggcaagauccaggacagccugagcagcacagcaagcgcccugggaaagcugcaggacguggucaaccagaaugcccaggcacugaacacccuggucaagcagcuguccuccaacuucggcgccaucagcucugugcugaacgauauccugagcagacuggacaaggucgaggccgaggugcagaucgacagacugaucacaggcagacugcagagccuccagacauacgugacccagcagcugaucagagccgccgagauuagagccucugccaaucuggccgccaccaagaugucugagugugugcugggccagagcaagagaguggacuuuugcggcaagggcuaccaccugaugagcuucccucagucugccccucacggcgugguguuucugcacgugacauaugugcccgcucaagagaagaauuucaccaccgcuccagccaucugccacgacggcaaagcccacuuuccuagagaaggcguguucguguccaacggcacccauugguucgugacacagcggaacuucuacgagccccagaucaucaccaccgacaacaccuucgugucuggcaacugcgacgucgugaucggcauugugaacaauaccguguacgacccucugcagcccgagcuggacagcuucaaagaggaacuggacaaguacuuuaagaaccacacaagccccgacguggaccugggcgauaucagcggaaucaaugccagcgucgugaacauccagaaagagaucgaccggcugaacgagguggccaagaaucugaacgagagccugaucgaccugcaagaacuggggaaguacgagcaguacaucaaguggcccugguacaucuggcugggcuuuaucgccggacugauugccaucgugauggucacaaucaugcuguguugcaugaccagcugcuguagcugccugaagggcuguuguagcuguggcagcugcugcaaguucgacgaggacgauucugagcccgugcugaagggcgugaaacugcacuacacaugaggacuagucccuguucccagagcccacuuuuuuuucuuuuuuugaaauaaaauagccugucuuucagaucuaaaaaaaaaaaaaaaaaaaaaaaaaaaaaaaaaaaaaaaaaaaaaaaaaaaaaaaaaaaaaaaaaaaaaaaaaaaaaaaaaaaaaaaaaaaaaaaaaaaa

SEQ ID NO: 25054 - RNA, 4167 nt, Artificial Sequence
  SARS-CoV-2/Wuhan/WIV05/2019__EPI_ISL_402128 spike protein mRNA gc mod (1-1273)(E484K_D614G)
aggagagggcgcuuggcuugcaaggacccugagcugcggcauugaagcacacccaacccaacucgacugaagucagccucacugaaccggaucugagaaucuucucucucugggcuugccagggcucuccgaaccuagcuagcauccucuucaauuccaacuagaaagcuuaccauguucguguuccuggugcugcugccucugguguccagccagugugugaaccugaccaccagaacacagcugccuccagccuacaccaacagcuuuaccagaggcguguacuaccccgacaagguguucagauccagcgugcugcacucuacccaggaccuguuccugccuuucuucagcaacgugaccugguuccacgccauccacguguccggcaccaauggcaccaagagauucgacaaccccgugcugcccuucaacgacgggguguacuuugccagcaccgagaaguccaacaucaucagaggcuggaucuucggcaccacacuggacagcaagacccagagccugcugaucgugaacaacgccaccaacguggucaucaaagugugcgaguuccaguucugcaacgaccccuuccugggcgucuacuaccacaagaacaacaagagcuggauggaaagcgaguuccggguguacagcagcgccaacaacugcaccuucgaguacgugucccagccuuuccugauggaccuggaaggcaagcagggcaacuucaagaaccugcgcgaguucguguuuaagaacaucgacggcuacuucaagaucuacagcaagcacaccccuaucaaccucgugcgggaucugccucagggcuucucugcucuggaaccccugguggaucugcccaucggcaucaacaucacccgguuucagacacugcuggcccugcacagaagcuaccugacaccuggcgauagcagcagcggauggacagcuggugccgccgcuuacuaugugggcuaccugcagccuagaaccuuccugcugaaguacaacgagaacggcaccaucaccgacgccguggauugugcucuggauccucugagcgagacaaagugcacccugaaguccuucaccguggaaaagggcaucuaccagaccagcaacuuccgggugcagcccaccgaauccaucgugcgguuccccaauaucaccaaucugugccccuucggcgagguguucaaugccaccagauucgccucuguguacgccuggaaccggaagcggaucagcaauugcguggccgacuacuccgugcuguacaacuccgccagcuucagcaccuucaagugcuacggcguguccccuaccaagcugaacgaccugugcuucacaaacguguacgccgacagcuucgugauccggggagaugaagugcggcagauugccccuggacagacaggcaagaucgccgacuacaacuacaagcugcccgacgacuucaccggcugugugauugccuggaacagcaacaaccuggacuccaaagucggcggcaacuacaauuaccuguaccggcuguuccggaaguccaaucugaagcccuucgagcgggacaucuccaccgagaucuaucaggccggcagcaccccuuguaacggcgugaagggcuucaacugcuacuucccacugcaguccuacggcuuucagcccacaaauggcgugggcuaucagcccuacagagugguggugcugagcuucgaacugcugcaugccccugccacagugugcggcccuaagaaaagcaccaaucucgugaagaacaaaugcgugaacuucaacuucaacggccugaccggcaccggcgugcugacagagagcaacaagaaguuccugccauuccagcaguuuggccgggauaucgccgauaccacagacgccguuagagauccccagacacuggaaauccuggacaucaccccuugcagcuucggcggagugucugugaucaccccuggcaccaacaccagcaaucagguggcagugcuguaccagggcgugaacuguaccgaagugcccguggccauucacgccgaucagcugacaccuacauggcggguguacuccaccggcagcaauguguuucagaccagagccggcugucugaucggagccgagcacgugaacaauagcuacgagugcgacauccccaucggcgcuggaaucugcgccagcuaccagacacagacaaacagcccucggagagccagaagcguggccagccagagcaucauugccuacacaaugucucugggcgccgagaacagcguggccuacuccaacaacucuaucgcuauccccaccaacuucaccaucagcgugaccacagagauccugccuguguccaugaccaagaccagcguggacugcaccauguacaucugcggcgauuccaccgagugcuccaaccugcugcugcaguacggcagcuucugcacccagcugaauagagcccugacagggaucgccguggaacaggacaagaacacccaagagguguucgcccaagugaagcagaucuacaagaccccuccuaucaaggacuucggcggcuucaauuucagccagauucugcccgauccuagcaagcccagcaagcggagcuucaucgaggaccugcuguucaacaaagugacacuggccgacgccggcuucaucaagcaguauggcgauugucugggcgacauugccgccagggaucugauuugcgcccagaaguuuaacggacugacagugcugccuccucugcugaccgaugagaugaucgcccaguacacaucugcccugcuggccggcacaaucacaagcggcuggacauuuggagcaggcgccgcucugcagauccccuuugcuaugcagauggccuaccgguucaacggcaucggagugacccagaaugugcuguacgagaaccagaagcugaucgccaaccaguucaacagcgccaucggcaagauccaggacagccugagcagcacagcaagcgcccugggaaagcugcaggacguggucaaccagaaugcccaggcacugaacacccuggucaagcagcuguccuccaacuucggcgccaucagcucugugcugaacgauauccugagcagacuggacaaggucgaggccgaggugcagaucgacagacugaucacaggcagacugcagagccuccagacauacgugacccagcagcugaucagagccgccgagauuagagccucugccaaucuggccgccaccaagaugucugagugugugcugggccagagcaagagaguggacuuuugcggcaagggcuaccaccugaugagcuucccucagucugccccucacggcgugguguuucugcacgugacauaugugcccgcucaagagaagaauuucaccaccgcuccagccaucugccacgacggcaaagcccacuuuccuagagaaggcguguucguguccaacggcacccauugguucgugacacagcggaacuucuacgagccccagaucaucaccaccgacaacaccuucgugucuggcaacugcgacgucgugaucggcauugugaacaauaccguguacgacccucugcagcccgagcuggacagcuucaaagaggaacuggacaaguacuuuaagaaccacacaagccccgacguggaccugggcgauaucagcggaaucaaugccagcgucgugaacauccagaaagagaucgaccggcugaacgagguggccaagaaucugaacgagagccugaucgaccugcaagaacuggggaaguacgagcaguacaucaaguggcccugguacaucuggcugggcuuuaucgccggacugauugccaucgugauggucacaaucaugcuguguugcaugaccagcugcuguagcugccugaagggcuguuguagcuguggcagcugcugcaaguucgacgaggacgauucugagcccgugcugaagggcgugaaacugcacuacacaugaggacuagucccuguucccagagcccacuuuuuuuucuuuuuuugaaauaaaauagccugucuuucagaucuaaaaaaaaaaaaaaaaaaaaaaaaaaaaaaaaaaaaaaaaaaaaaaaaaaaaaaaaaaaaaaaaaaaaaaaaaaaaaaaaaaaaaaaaaaaaaaaaaaaa

SEQ ID NO: 25055 - RNA, 4167 nt, Artificial Sequence
  SARS-CoV-2/Wuhan/WIV05/2019__EPI_ISL_402128 spike protein mRNA gc mod (1-1273)(L18F_T20N_P26S_D138Y_R190S_K417T_E484K_N501Y_D614G_H655Y _T1027I)
aggagagggcgcuuggcuugcaaggacccugagcugcggcauugaagcacacccaacccaacucgacugaagucagccucacugaaccggaucugagaaucuucucucucugggcuugccagggcucuccgaaccuagcuagcauccucuucaauuccaacuagaaagcuuaccauguucguguuccuggugcugcugccucugguguccagccagugugugaacuucaccaacagaacacagcugccuagcgccuacaccaacagcuuuaccagaggcguguacuaccccgacaagguguucagauccagcgugcugcacucuacccaggaccuguuccugccuuucuucagcaacgugaccugguuccacgccauccacguguccggcaccaauggcaccaagagauucgacaaccccgugcugcccuucaacgacgggguguacuuugccagcaccgagaaguccaacaucaucagaggcuggaucuucggcaccacacuggacagcaagacccagagccugcugaucgugaacaacgccaccaacguggucaucaaagugugcgaguuccaguucugcaacuaccccuuccugggcgucuacuaccacaagaacaacaagagcuggauggaaagcgaguuccggguguacagcagcgccaacaacugcaccuucgaguacgugucccagccuuuccugauggaccuggaaggcaagcagggcaacuucaagaaccugagcgaguucguguuuaagaacaucgacggcuacuucaagaucuacagcaagcacaccccuaucaaccucgugcgggaucugccucagggcuucucugcucuggaaccccugguggaucugcccaucggcaucaacaucacccgguuucagacacugcuggcccugcacagaagcuaccugacaccuggcgauagcagcagcggauggacagcuggugccgccgcuuacuaugugggcuaccugcagccuagaaccuuccugcugaaguacaacgagaacggcaccaucaccgacgccguggauugugcucuggauccucugagcgagacaaagugcacccugaaguccuucaccguggaaaagggcaucuaccagaccagcaacuuccgggugcagcccaccgaauccaucgugcgguuccccaauaucaccaaucugugccccuucggcgagguguucaaugccaccagauucgccucuguguacgccuggaaccggaagcggaucagcaauugcguggccgacuacuccgugcuguacaacuccgccagcuucagcaccuucaagugcuacggcguguccccuaccaagcugaacgaccugugcuucacaaacguguacgccgacagcuucgugauccggggagaugaagugcggcagauugccccuggacagacaggcaccaucgccgacuacaacuacaagcugcccgacgacuucaccggcugugugauugccuggaacagcaacaaccuggacuccaaagucggcggcaacuacaauuaccuguaccggcuguuccggaaguccaaucugaagcccuucgagcgggacaucuccaccgagaucuaucaggccggcagcaccccuuguaacggcgugaagggcuucaacugcuacuucccacugcaguccuacggcuuucagcccacauacggcgugggcuaucagcccuacagagugguggugcugagcuucgaacugcugcaugccccugccacagugugcggcccuaagaaaagcaccaaucucgugaagaacaaaugcgugaacuucaacuucaacggccugaccggcaccggcgugcugacagagagcaacaagaaguuccugccauuccagcaguuuggccgggauaucgccgauaccacagacgccguuagagauccccagacacuggaaauccuggacaucaccccuugcagcuucggcggagugucugugaucaccccuggcaccaacaccagcaaucagguggcagugcuguaccagggcgugaacuguaccgaagugcccguggccauucacgccgaucagcugacaccuacauggcggguguacuccaccggcagcaauguguuucagaccagagccggcugucugaucggagccgaguacgugaacaauagcuacgagugcgacauccccaucggcgcuggaaucugcgccagcuaccagacacagacaaacagcccucggagagccagaagcguggccagccagagcaucauugccuacacaaugucucugggcgccgagaacagcguggccuacuccaacaacucuaucgcuauccccaccaacuucaccaucagcgugaccacagagauccugccuguguccaugaccaagaccagcguggacugcaccauguacaucugcggcgauuccaccgagugcuccaaccugcugcugcaguacggcagcuucugcacccagcugaauagagcccugacagggaucgccguggaacaggacaagaacacccaagagguguucgcccaagugaagcagaucuacaagaccccuccuaucaaggacuucggcggcuucaauuucagccagauucugcccgauccuagcaagcccagcaagcggagcuucaucgaggaccugcuguucaacaaagugacacuggccgacgccggcuucaucaagcaguauggcgauugucugggcgacauugccgccagggaucugauuugcgcccagaaguuuaacggacugacagugcugccuccucugcugaccgaugagaugaucgcccaguacacaucugcccugcuggccggcacaaucacaagcggcuggacauuuggagcaggcgccgcucugcagauccccuuugcuaugcagauggccuaccgguucaacggcaucggagugacccagaaugugcuguacgagaaccagaagcugaucgccaaccaguucaacagcgccaucggcaagauccaggacagccugagcagcacagcaagcgcccugggaaagcugcaggacguggucaaccagaaugcccaggcacugaacacccuggucaagcagcuguccuccaacuucggcgccaucagcucugugcugaacgauauccugagcagacuggacaaggucgaggccgaggugcagaucgacagacugaucacaggcagacugcagagccuccagacauacgugacccagcagcugaucagagccgccgagauuagagccucugccaaucuggccgccaucaagaugucugagugugugcugggccagagcaagagaguggacuuuugcggcaagggcuaccaccugaugagcuucccucagucugccccucacggcgugguguuucugcacgugacauaugugcccgcucaagagaagaauuucaccaccgcuccagccaucugccacgacggcaaagcccacuuuccuagagaaggcguguucguguccaacggcacccauugguucgugacacagcggaacuucuacgagccccagaucaucaccaccgacaacaccuucgugucuggcaacugcgacgucgugaucggcauugugaacaauaccguguacgacccucugcagcccgagcuggacagcuucaaagaggaacuggacaaguacuuuaagaaccacacaagccccgacguggaccugggcgauaucagcggaaucaaugccagcgucgugaacauccagaaagagaucgaccggcugaacgagguggccaagaaucugaacgagagccugaucgaccugcaagaacuggggaaguacgagcaguacaucaaguggcccugguacaucuggcugggcuuuaucgccggacugauugccaucgugauggucacaaucaugcuguguugcaugaccagcugcuguagcugccugaagggcuguuguagcuguggcagcugcugcaaguucgacgaggacgauucugagcccgugcugaagggcgugaaacugcacuacacaugaggacuagucccuguucccagagcccacuuuuuuuucuuuuuuugaaauaaaauagccugucuuucagaucuaaaaaaaaaaaaaaaaaaaaaaaaaaaaaaaaaaaaaaaaaaaaaaaaaaaaaaaaaaaaaaaaaaaaaaaaaaaaaaaaaaaaaaaaaaaaaaaaaaaa

SEQ ID NO: 25056 - RNA, 4167 nt, Artificial Sequence
  SARS-CoV-2/Wuhan/WIV05/2019__EPI_ISL_402128 spike protein mRNA gc mod (1-1273)(S13I_W152C_L452R_D614G)
aggagagggcgcuuggcuugcaaggacccugagcugcggcauugaagcacacccaacccaacucgacugaagucagccucacugaaccggaucugagaaucuucucucucugggcuugccagggcucuccgaaccuagcuagcauccucuucaauuccaacuagaaagcuuaccauguucguguuccuggugcugcugccucugguguccauccagugugugaaccugaccaccagaacacagcugccuccagccuacaccaacagcuuuaccagaggcguguacuaccccgacaagguguucagauccagcgugcugcacucuacccaggaccuguuccugccuuucuucagcaacgugaccugguuccacgccauccacguguccggcaccaauggcaccaagagauucgacaaccccgugcugcccuucaacgacgggguguacuuugccagcaccgagaaguccaacaucaucagaggcuggaucuucggcaccacacuggacagcaagacccagagccugcugaucgugaacaacgccaccaacguggucaucaaagugugcgaguuccaguucugcaacgaccccuuccugggcgucuacuaccacaagaacaacaagagcugcauggaaagcgaguuccggguguacagcagcgccaacaacugcaccuucgaguacgugucccagccuuuccugauggaccuggaaggcaagcagggcaacuucaagaaccugcgcgaguucguguuuaagaacaucgacggcuacuucaagaucuacagcaagcacaccccuaucaaccucgugcgggaucugccucagggcuucucugcucuggaaccccugguggaucugcccaucggcaucaacaucacccgguuucagacacugcuggcccugcacagaagcuaccugacaccuggcgauagcagcagcggauggacagcuggugccgccgcuuacuaugugggcuaccugcagccuagaaccuuccugcugaaguacaacgagaacggcaccaucaccgacgccguggauugugcucuggauccucugagcgagacaaagugcacccugaaguccuucaccguggaaaagggcaucuaccagaccagcaacuuccgggugcagcccaccgaauccaucgugcgguuccccaauaucaccaaucugugccccuucggcgagguguucaaugccaccagauucgccucuguguacgccuggaaccggaagcggaucagcaauugcguggccgacuacuccgugcuguacaacuccgccagcuucagcaccuucaagugcuacggcguguccccuaccaagcugaacgaccugugcuucacaaacguguacgccgacagcuucgugauccggggagaugaagugcggcagauugccccuggacagacaggcaagaucgccgacuacaacuacaagcugcccgacgacuucaccggcugugugauugccuggaacagcaacaaccuggacuccaaagucggcggcaacuacaauuaccgcuaccggcuguuccggaaguccaaucugaagcccuucgagcgggacaucuccaccgagaucuaucaggccggcagcaccccuuguaacggcguggaaggcuucaacugcuacuucccacugcaguccuacggcuuucagcccacaaauggcgugggcuaucagcccuacagagugguggugcugagcuucgaacugcugcaugccccugccacagugugcggcccuaagaaaagcaccaaucucgugaagaacaaaugcgugaacuucaacuucaacggccugaccggcaccggcgugcugacagagagcaacaagaaguuccugccauuccagcaguuuggccgggauaucgccgauaccacagacgccguuagagauccccagacacuggaaauccuggacaucaccccuugcagcuucggcggagugucugugaucaccccuggcaccaacaccagcaaucagguggcagugcuguaccagggcgugaacuguaccgaagugcccguggccauucacgccgaucagcugacaccuacauggcggguguacuccaccggcagcaauguguuucagaccagagccggcugucugaucggagccgagcacgugaacaauagcuacgagugcgacauccccaucggcgcuggaaucugcgccagcuaccagacacagacaaacagcccucggagagccagaagcguggccagccagagcaucauugccuacacaaugucucugggcgccgagaacagcguggccuacuccaacaacucuaucgcuauccccaccaacuucaccaucagcgugaccacagagauccugccuguguccaugaccaagaccagcguggacugcaccauguacaucugcggcgauuccaccgagugcuccaaccugcugcugcaguacggcagcuucugcacccagcugaauagagcccugacagggaucgccguggaacaggacaagaacacccaagagguguucgcccaagugaagcagaucuacaagaccccuccuaucaaggacuucggcggcuucaauuucagccagauucugcccgauccuagcaagcccagcaagcggagcuucaucgaggaccugcuguucaacaaagugacacuggccgacgccggcuucaucaagcaguauggcgauugucugggcgacauugccgccagggaucugauuugcgcccagaaguuuaacggacugacagugcugccuccucugcugaccgaugagaugaucgcccaguacacaucugcccugcuggccggcacaaucacaagcggcuggacauuuggagcaggcgccgcucugcagauccccuuugcuaugcagauggccuaccgguucaacggcaucggagugacccagaaugugcuguacgagaaccagaagcugaucgccaaccaguucaacagcgccaucggcaagauccaggacagccugagcagcacagcaagcgcccugggaaagcugcaggacguggucaaccagaaugcccaggcacugaacacccuggucaagcagcuguccuccaacuucggcgccaucagcucugugcugaacgauauccugagcagacuggacaaggucgaggccgaggugcagaucgacagacugaucacaggcagacugcagagccuccagacauacgugacccagcagcugaucagagccgccgagauuagagccucugccaaucuggccgccaccaagaugucugagugugugcugggccagagcaagagaguggacuuuugcggcaagggcuaccaccugaugagcuucccucagucugccccucacggcgugguguuucugcacgugacauaugugcccgcucaagagaagaauuucaccaccgcuccagccaucugccacgacggcaaagcccacuuuccuagagaaggcguguucguguccaacggcacccauugguucgugacacagcggaacuucuacgagccccagaucaucaccaccgacaacaccuucgugucuggcaacugcgacgucgugaucggcauugugaacaauaccguguacgacccucugcagcccgagcuggacagcuucaaagaggaacuggacaaguacuuuaagaaccacacaagccccgacguggaccugggcgauaucagcggaaucaaugccagcgucgugaacauccagaaagagaucgaccggcugaacgagguggccaagaaucugaacgagagccugaucgaccugcaagaacuggggaaguacgagcaguacaucaaguggcccugguacaucuggcugggcuuuaucgccggacugauugccaucgugauggucacaaucaugcuguguugcaugaccagcugcuguagcugccugaagggcuguuguagcuguggcagcugcugcaaguucgacgaggacgauucugagcccgugcugaagggcgugaaacugcacuacacaugaggacuagucccuguucccagagcccacuuuuuuuucuuuuuuugaaauaaaauagccugucuuucagaucuaaaaaaaaaaaaaaaaaaaaaaaaaaaaaaaaaaaaaaaaaaaaaaaaaaaaaaaaaaaaaaaaaaaaaaaaaaaaaaaaaaaaaaaaaaaaaaaaaaaa

SEQ ID NO: 25057 - RNA, 4167 nt, Artificial Sequence
  SARS-CoV-2/Wuhan/WIV05/2019__EPI_ISL_402128 spike protein mRNA gc (1-1273)(K986P_V987P) R10184
aggagagggcgcuuggcuugcaaggacccugagcugcggcauugaagcacacccaacccaacucgacugaagucagccucacugaaccggaucugagaaucuucucucucugggcuugccagggcucuccgaaccuagcuagcauccucuucaauuccaacuagaaagcuuaccauguucguguuccugguccuccugccccuggugagcucccagugcgugaaccucaccacccgcacgcagcugccgcccgccuacaccaacagcuucacccggggcgucuacuaccccgacaagguguuccgcuccagcgugcugcacuccacccaggaccucuuccugcccuucuucagcaacgucacgugguuccacgccauccacguguccgggaccaacggcaccaagcgguucgacaacccggugcugcccuucaacgacggggucuacuucgcgagcaccgagaaguccaacaucauccgcggcuggaucuucgggacgacccucgacagcaagacccagucccugcugaucgugaacaacgccaccaacguggucaucaaggugugcgaguuccaguucugcaacgaccccuuccucggcguguacuaccacaagaacaacaagagcuggauggaguccgaguuccgggucuacagcuccgccaacaacugcacguucgaguacgugagccagcccuuccugauggaccuggagggcaagcaggggaacuucaagaaccuccgcgaguucguguucaagaacaucgacggcuacuucaagaucuacuccaagcacaccccgaucaaccugguccgggaccugccccagggguucagcgcccucgagccccugguggaccugcccaucggcaucaacaucacccgcuuccagacccuccuggcccugcaccgguccuaccucacgccgggggacagcagcuccggcuggaccgcgggcgccgccgccuacuacgugggguaccugcagccccgcaccuuccugcucaaguacaacgagaacggcaccaucacggacgcggucgacugcgcccuggacccccugagcgagaccaagugcacccucaaguccuucaccguggagaaggggaucuaccagacgagcaacuuccgggugcagcccaccgaguccaucguccgcuucccgaacaucaccaaccugugccccuucggcgagguguucaacgccacccgguucgccagcgucuacgccuggaaccgcaagcggaucuccaacugcguggcggacuacagcgugcuguacaacuccgccagcuucuccacguucaagugcuacggcgucagccccaccaagcucaacgaccugugcuucaccaacguguacgccgacuccuucgugauccgcggggacgagguccggcagaucgcccccggccagaccgggaagaucgccgacuacaacuacaagcugccggacgacuucacgggcugcgugaucgcguggaacagcaacaaccucgacuccaaggucgggggcaacuacaacuaccuguaccgccuguuccgcaagagcaaccucaagcccuucgagcgggacaucuccaccgagaucuaccaggccggcagcacccccugcaacgggguggagggcuucaacugcuacuucccccugcaguccuacggguuccagccgaccaacggcgugggguaccagcccuaccggguggucgugcugagcuucgagcuccugcacgcccccgccacggugugcggccccaagaaguccaccaaccuggucaagaacaagugcgugaacuucaacuucaacggccucaccgggaccggcgugcugaccgagagcaacaagaaguuccugccguuccagcaguucgggcgcgacaucgccgacacgaccgacgcgguccgcgacccccagacccuggagauccucgacaucacccccugcagcuucggcgggguguccgugaucacgccgggcaccaacaccagcaaccaggucgccgugcuguaccaggacgugaacugcaccgagguccccguggccauccacgccgaccagcugacgcccaccuggcggguguacuccaccggcagcaacgucuuccagacccgcgccgggugccucaucggcgcggagcacgugaacaacuccuacgagugcgacauccccaucggggccggcaucugcgccagcuaccagacgcagaccaacuccccgcggcgcgcccggagcguggcgucccagagcaucaucgccuacaccaugucccugggcgccgagaacagcgucgccuacuccaacaacagcaucgccauccccaccaacuucacgaucuccgugaccaccgagauccugcccgugagcaugaccaagacgagcgucgacugcaccauguacaucugcggggacuccaccgagugcagcaaccuccugcugcaguacggcuccuucugcacccagcucaaccgcgcgcugacggggaucgccguggagcaggacaagaacacccaggagguguucgcccaggucaagcagaucuacaagacgcccccgaucaaggacuucggcggguucaacuucagccagauccugcccgaccccuccaagcccagcaagcgguccuucaucgaggaccuccuguucaacaaggugacccuggccgacgccggcuucaucaagcaguacggcgacugccucggggacaucgcggcccgcgaccugaucugcgcccagaaguucaacggccugaccgugcucccgccccugcugaccgacgagaugaucgcccaguacaccagcgcccuccuggcggggaccaucacguccggcuggaccuucggggccggcgccgcccugcagauccccuucgcgaugcagauggccuaccgguucaacggcaucggggucacccagaacgugcucuacgagaaccagaagcugaucgccaaccaguucaacagcgccaucggcaagauccaggacucccugagcuccaccgccagcgcgcucgggaagcugcaggacguggucaaccagaacgcccaggcccugaacacgcucgugaagcagcuguccagcaacuucggcgccaucuccagcgugcugaacgacauccucucccgccuggacccgcccgaggccgaggugcagaucgaccggcugaucaccgggcgccuccagagccugcagaccuacgugacccagcagcugauccgggcggccgagauccgcgccagcgccaaccucgccgcgaccaagauguccgagugcguccugggccagagcaagcggguggacuucugcggcaagggguaccaccugauguccuucccccagagcgccccgcacggcguggucuuccuccacgugacguacguccccgcccaggagaagaacuucaccaccgcccccgcgaucugccacgacgggaaggcccacuucccccgcgagggcguguucguguccaacgggacccacugguucgucacgcagcggaacuucuacgagccgcagaucaucaccaccgacaacaccuucgugagcggcaacugcgacguggucaucggcaucgugaacaacacgguguacgacccccugcagcccgagcuggacuccuucaaggaggagcucgacaaguacuucaagaaccacaccagccccgacgucgaccugggggacaucuccggcaucaacgccagcguggugaacauccagaaggagaucgaccgccugaacgaggucgccaagaaccucaacgagucccugaucgaccugcaggagcucgggaaguacgagcaguacaucaaguggccgugguacaucuggcugggcuucaucgccggccugaucgcgaucgugauggugaccaucaugcucugcugcaugaccagcugcugcuccugccugaaggggugcugcagcugcggcuccugcugcaaguucgacgaggacgacagcgagcccguccugaagggggugaagcuccacuacacgugaggacuagucccuguucccagagcccacuuuuuuuucuuuuuuugaaauaaaauagccugucuuucagaucuaaaaaaaaaaaaaaaaaaaaaaaaaaaaaaaaaaaaaaaaaaaaaaaaaaaaaaaaaaaaaaaaaaaaaaaaaaaaaaaaaaaaaaaaaaaaaaaaaaaa

SEQ ID NO: 25058 - RNA, 4167 nt, Artificial Sequence
  SARS-CoV-2/Wuhan/WIV05/2019__EPI_ISL_402128 spike protein mRNA gc (1-1273)(K986P_V987P_ D614G)
aggagagggcgcuuggcuugcaaggacccugagcugcggcauugaagcacacccaacccaacucgacugaagucagccucacugaaccggaucugagaaucuucucucucugggcuugccagggcucuccgaaccuagcuagcauccucuucaauuccaacuagaaagcuuaccauguucguguuccugguccuccugccccuggugagcucccagugcgugaaccucaccacccgcacgcagcugccgcccgccuacaccaacagcuucacccggggcgucuacuaccccgacaagguguuccgcuccagcgugcugcacuccacccaggaccucuuccugcccuucuucagcaacgucacgugguuccacgccauccacguguccgggaccaacggcaccaagcgguucgacaacccggugcugcccuucaacgacggggucuacuucgcgagcaccgagaaguccaacaucauccgcggcuggaucuucgggacgacccucgacagcaagacccagucccugcugaucgugaacaacgccaccaacguggucaucaaggugugcgaguuccaguucugcaacgaccccuuccucggcguguacuaccacaagaacaacaagagcuggauggaguccgaguuccgggucuacagcuccgccaacaacugcacguucgaguacgugagccagcccuuccugauggaccuggagggcaagcaggggaacuucaagaaccuccgcgaguucguguucaagaacaucgacggcuacuucaagaucuacuccaagcacaccccgaucaaccugguccgggaccugccccagggguucagcgcccucgagccccugguggaccugcccaucggcaucaacaucacccgcuuccagacccuccuggcccugcaccgguccuaccucacgccgggggacagcagcuccggcuggaccgcgggcgccgccgccuacuacgugggguaccugcagccccgcaccuuccugcucaaguacaacgagaacggcaccaucacggacgcggucgacugcgcccuggacccccugagcgagaccaagugcacccucaaguccuucaccguggagaaggggaucuaccagacgagcaacuuccgggugcagcccaccgaguccaucguccgcuucccgaacaucaccaaccugugccccuucggcgagguguucaacgccacccgguucgccagcgucuacgccuggaaccgcaagcggaucuccaacugcguggcggacuacagcgugcuguacaacuccgccagcuucuccacguucaagugcuacggcgucagccccaccaagcucaacgaccugugcuucaccaacguguacgccgacuccuucgugauccgcggggacgagguccggcagaucgcccccggccagaccgggaagaucgccgacuacaacuacaagcugccggacgacuucacgggcugcgugaucgcguggaacagcaacaaccucgacuccaaggucgggggcaacuacaacuaccuguaccgccuguuccgcaagagcaaccucaagcccuucgagcgggacaucuccaccgagaucuaccaggccggcagcacccccugcaacgggguggagggcuucaacugcuacuucccccugcaguccuacggguuccagccgaccaacggcgugggguaccagcccuaccggguggucgugcugagcuucgagcuccugcacgcccccgccacggugugcggccccaagaaguccaccaaccuggucaagaacaagugcgugaacuucaacuucaacggccucaccgggaccggcgugcugaccgagagcaacaagaaguuccugccguuccagcaguucgggcgcgacaucgccgacacgaccgacgcgguccgcgacccccagacccuggagauccucgacaucacccccugcagcuucggcgggguguccgugaucacgccgggcaccaacaccagcaaccaggucgccgugcuguaccagggcgugaacugcaccgagguccccguggccauccacgccgaccagcugacgcccaccuggcggguguacuccaccggcagcaacgucuuccagacccgcgccgggugccucaucggcgcggagcacgugaacaacuccuacgagugcgacauccccaucggggccggcaucugcgccagcuaccagacgcagaccaacuccccgcggcgcgcccggagcguggcgucccagagcaucaucgccuacaccaugucccugggcgccgagaacagcgucgccuacuccaacaacagcaucgccauccccaccaacuucacgaucuccgugaccaccgagauccugcccgugagcaugaccaagacgagcgucgacugcaccauguacaucugcggggacuccaccgagugcagcaaccuccugcugcaguacggcuccuucugcacccagcucaaccgcgcgcugacggggaucgccguggagcaggacaagaacacccaggagguguucgcccaggucaagcagaucuacaagacgcccccgaucaaggacuucggcggguucaacuucagccagauccugcccgaccccuccaagcccagcaagcgguccuucaucgaggaccuccuguucaacaaggugacccuggccgacgccggcuucaucaagcaguacggcgacugccucggggacaucgcggcccgcgaccugaucugcgcccagaaguucaacggccugaccgugcucccgccccugcugaccgacgagaugaucgcccaguacaccagcgcccuccuggcggggaccaucacguccggcuggaccuucggggccggcgccgcccugcagauccccuucgcgaugcagauggccuaccgguucaacggcaucggggucacccagaacgugcucuacgagaaccagaagcugaucgccaaccaguucaacagcgccaucggcaagauccaggacucccugagcuccaccgccagcgcgcucgggaagcugcaggacguggucaaccagaacgcccaggcccugaacacgcucgugaagcagcuguccagcaacuucggcgccaucuccagcgugcugaacgacauccucucccgccuggacccgcccgaggccgaggugcagaucgaccggcugaucaccgggcgccuccagagccugcagaccuacgugacccagcagcugauccgggcggccgagauccgcgccagcgccaaccucgccgcgaccaagauguccgagugcguccugggccagagcaagcggguggacuucugcggcaagggguaccaccugauguccuucccccagagcgccccgcacggcguggucuuccuccacgugacguacguccccgcccaggagaagaacuucaccaccgcccccgcgaucugccacgacgggaaggcccacuucccccgcgagggcguguucguguccaacgggacccacugguucgucacgcagcggaacuucuacgagccgcagaucaucaccaccgacaacaccuucgugagcggcaacugcgacguggucaucggcaucgugaacaacacgguguacgacccccugcagcccgagcuggacuccuucaaggaggagcucgacaaguacuucaagaaccacaccagccccgacgucgaccugggggacaucuccggcaucaacgccagcguggugaacauccagaaggagaucgaccgccugaacgaggucgccaagaaccucaacgagucccugaucgaccugcaggagcucgggaaguacgagcaguacaucaaguggccgugguacaucuggcugggcuucaucgccggccugaucgcgaucgugauggugaccaucaugcucugcugcaugaccagcugcugcuccugccugaaggggugcugcagcugcggcuccugcugcaaguucgacgaggacgacagcgagcccguccugaagggggugaagcuccacuacacgugaggacuagucccuguucccagagcccacuuuuuuuucuuuuuuugaaauaaaauagccugucuuucagaucuaaaaaaaaaaaaaaaaaaaaaaaaaaaaaaaaaaaaaaaaaaaaaaaaaaaaaaaaaaaaaaaaaaaaaaaaaaaaaaaaaaaaaaaaaaaaaaaaaaaa

SEQ ID NO: 25059 - RNA, 4167 nt, Artificial Sequence
  SARS-CoV-2/Wuhan/WIV05/2019__EPI_ISL_402128 spike protein mRNA gc (1-1273)(K986P_V987P_A222V_D614G)
aggagagggcgcuuggcuugcaaggacccugagcugcggcauugaagcacacccaacccaacucgacugaagucagccucacugaaccggaucugagaaucuucucucucugggcuugccagggcucuccgaaccuagcuagcauccucuucaauuccaacuagaaagcuuaccauguucguguuccugguccuccugccccuggugagcucccagugcgugaaccucaccacccgcacgcagcugccgcccgccuacaccaacagcuucacccggggcgucuacuaccccgacaagguguuccgcuccagcgugcugcacuccacccaggaccucuuccugcccuucuucagcaacgucacgugguuccacgccauccacguguccgggaccaacggcaccaagcgguucgacaacccggugcugcccuucaacgacggggucuacuucgcgagcaccgagaaguccaacaucauccgcggcuggaucuucgggacgacccucgacagcaagacccagucccugcugaucgugaacaacgccaccaacguggucaucaaggugugcgaguuccaguucugcaacgaccccuuccucggcguguacuaccacaagaacaacaagagcuggauggaguccgaguuccgggucuacagcuccgccaacaacugcacguucgaguacgugagccagcccuuccugauggaccuggagggcaagcaggggaacuucaagaaccuccgcgaguucguguucaagaacaucgacggcuacuucaagaucuacuccaagcacaccccgaucaaccugguccgggaccugccccagggguucagcguccucgagccccugguggaccugcccaucggcaucaacaucacccgcuuccagacccuccuggcccugcaccgguccuaccucacgccgggggacagcagcuccggcuggaccgcgggcgccgccgccuacuacgugggguaccugcagccccgcaccuuccugcucaaguacaacgagaacggcaccaucacggacgcggucgacugcgcccuggacccccugagcgagaccaagugcacccucaaguccuucaccguggagaaggggaucuaccagacgagcaacuuccgggugcagcccaccgaguccaucguccgcuucccgaacaucaccaaccugugccccuucggcgagguguucaacgccacccgguucgccagcgucuacgccuggaaccgcaagcggaucuccaacugcguggcggacuacagcgugcuguacaacuccgccagcuucuccacguucaagugcuacggcgucagccccaccaagcucaacgaccugugcuucaccaacguguacgccgacuccuucgugauccgcggggacgagguccggcagaucgcccccggccagaccgggaagaucgccgacuacaacuacaagcugccggacgacuucacgggcugcgugaucgcguggaacagcaacaaccucgacuccaaggucgggggcaacuacaacuaccuguaccgccuguuccgcaagagcaaccucaagcccuucgagcgggacaucuccaccgagaucuaccaggccggcagcacccccugcaacgggguggagggcuucaacugcuacuucccccugcaguccuacggguuccagccgaccaacggcgugggguaccagcccuaccggguggucgugcugagcuucgagcuccugcacgcccccgccacggugugcggccccaagaaguccaccaaccuggucaagaacaagugcgugaacuucaacuucaacggccucaccgggaccggcgugcugaccgagagcaacaagaaguuccugccguuccagcaguucgggcgcgacaucgccgacacgaccgacgcgguccgcgacccccagacccuggagauccucgacaucacccccugcagcuucggcgggguguccgugaucacgccgggcaccaacaccagcaaccaggucgccgugcuguaccagggcgugaacugcaccgagguccccguggccauccacgccgaccagcugacgcccaccuggcggguguacuccaccggcagcaacgucuuccagacccgcgccgggugccucaucggcgcggagcacgugaacaacuccuacgagugcgacauccccaucggggccggcaucugcgccagcuaccagacgcagaccaacuccccgcggcgcgcccggagcguggcgucccagagcaucaucgccuacaccaugucccugggcgccgagaacagcgucgccuacuccaacaacagcaucgccauccccaccaacuucacgaucuccgugaccaccgagauccugcccgugagcaugaccaagacgagcgucgacugcaccauguacaucugcggggacuccaccgagugcagcaaccuccugcugcaguacggcuccuucugcacccagcucaaccgcgcgcugacggggaucgccguggagcaggacaagaacacccaggagguguucgcccaggucaagcagaucuacaagacgcccccgaucaaggacuucggcggguucaacuucagccagauccugcccgaccccuccaagcccagcaagcgguccuucaucgaggaccuccuguucaacaaggugacccuggccgacgccggcuucaucaagcaguacggcgacugccucggggacaucgcggcccgcgaccugaucugcgcccagaaguucaacggccugaccgugcucccgccccugcugaccgacgagaugaucgcccaguacaccagcgcccuccuggcggggaccaucacguccggcuggaccuucggggccggcgccgcccugcagauccccuucgcgaugcagauggccuaccgguucaacggcaucggggucacccagaacgugcucuacgagaaccagaagcugaucgccaaccaguucaacagcgccaucggcaagauccaggacucccugagcuccaccgccagcgcgcucgggaagcugcaggacguggucaaccagaacgcccaggcccugaacacgcucgugaagcagcuguccagcaacuucggcgccaucuccagcgugcugaacgacauccucucccgccuggacccgcccgaggccgaggugcagaucgaccggcugaucaccgggcgccuccagagccugcagaccuacgugacccagcagcugauccgggcggccgagauccgcgccagcgccaaccucgccgcgaccaagauguccgagugcguccugggccagagcaagcggguggacuucugcggcaagggguaccaccugauguccuucccccagagcgccccgcacggcguggucuuccuccacgugacguacguccccgcccaggagaagaacuucaccaccgcccccgcgaucugccacgacgggaaggcccacuucccccgcgagggcguguucguguccaacgggacccacugguucgucacgcagcggaacuucuacgagccgcagaucaucaccaccgacaacaccuucgugagcggcaacugcgacguggucaucggcaucgugaacaacacgguguacgacccccugcagcccgagcuggacuccuucaaggaggagcucgacaaguacuucaagaaccacaccagccccgacgucgaccugggggacaucuccggcaucaacgccagcguggugaacauccagaaggagaucgaccgccugaacgaggucgccaagaaccucaacgagucccugaucgaccugcaggagcucgggaaguacgagcaguacaucaaguggccgugguacaucuggcugggcuucaucgccggccugaucgcgaucgugauggugaccaucaugcucugcugcaugaccagcugcugcuccugccugaaggggugcugcagcugcggcuccugcugcaaguucgacgaggacgacagcgagcccguccugaagggggugaagcuccacuacacgugaggacuagucccuguucccagagcccacuuuuuuuucuuuuuuugaaauaaaauagccugucuuucagaucuaaaaaaaaaaaaaaaaaaaaaaaaaaaaaaaaaaaaaaaaaaaaaaaaaaaaaaaaaaaaaaaaaaaaaaaaaaaaaaaaaaaaaaaaaaaaaaaaaaaa

SEQ ID NO: 25060 - RNA, 4167 nt, Artificial Sequence
  SARS-CoV-2/Wuhan/WIV05/2019__EPI_ISL_402128 spike protein mRNA gc (1-1273)(K986P_V987P_N439K_D614G)
aggagagggcgcuuggcuugcaaggacccugagcugcggcauugaagcacacccaacccaacucgacugaagucagccucacugaaccggaucugagaaucuucucucucugggcuugccagggcucuccgaaccuagcuagcauccucuucaauuccaacuagaaagcuuaccauguucguguuccugguccuccugccccuggugagcucccagugcgugaaccucaccacccgcacgcagcugccgcccgccuacaccaacagcuucacccggggcgucuacuaccccgacaagguguuccgcuccagcgugcugcacuccacccaggaccucuuccugcccuucuucagcaacgucacgugguuccacgccauccacguguccgggaccaacggcaccaagcgguucgacaacccggugcugcccuucaacgacggggucuacuucgcgagcaccgagaaguccaacaucauccgcggcuggaucuucgggacgacccucgacagcaagacccagucccugcugaucgugaacaacgccaccaacguggucaucaaggugugcgaguuccaguucugcaacgaccccuuccucggcguguacuaccacaagaacaacaagagcuggauggaguccgaguuccgggucuacagcuccgccaacaacugcacguucgaguacgugagccagcccuuccugauggaccuggagggcaagcaggggaacuucaagaaccuccgcgaguucguguucaagaacaucgacggcuacuucaagaucuacuccaagcacaccccgaucaaccugguccgggaccugccccagggguucagcgcccucgagccccugguggaccugcccaucggcaucaacaucacccgcuuccagacccuccuggcccugcaccgguccuaccucacgccgggggacagcagcuccggcuggaccgcgggcgccgccgccuacuacgugggguaccugcagccccgcaccuuccugcucaaguacaacgagaacggcaccaucacggacgcggucgacugcgcccuggacccccugagcgagaccaagugcacccucaaguccuucaccguggagaaggggaucuaccagacgagcaacuuccgggugcagcccaccgaguccaucguccgcuucccgaacaucaccaaccugugccccuucggcgagguguucaacgccacccgguucgccagcgucuacgccuggaaccgcaagcggaucuccaacugcguggcggacuacagcgugcuguacaacuccgccagcuucuccacguucaagugcuacggcgucagccccaccaagcucaacgaccugugcuucaccaacguguacgccgacuccuucgugauccgcggggacgagguccggcagaucgcccccggccagaccgggaagaucgccgacuacaacuacaagcugccggacgacuucacgggcugcgugaucgcguggaacagcaagaaccucgacuccaaggucgggggcaacuacaacuaccuguaccgccuguuccgcaagagcaaccucaagcccuucgagcgggacaucuccaccgagaucuaccaggccggcagcacccccugcaacgggguggagggcuucaacugcuacuucccccugcaguccuacggguuccagccgaccaacggcgugggguaccagcccuaccggguggucgugcugagcuucgagcuccugcacgcccccgccacggugugcggccccaagaaguccaccaaccuggucaagaacaagugcgugaacuucaacuucaacggccucaccgggaccggcgugcugaccgagagcaacaagaaguuccugccguuccagcaguucgggcgcgacaucgccgacacgaccgacgcgguccgcgacccccagacccuggagauccucgacaucacccccugcagcuucggcgggguguccgugaucacgccgggcaccaacaccagcaaccaggucgccgugcuguaccagggcgugaacugcaccgagguccccguggccauccacgccgaccagcugacgcccaccuggcggguguacuccaccggcagcaacgucuuccagacccgcgccgggugccucaucggcgcggagcacgugaacaacuccuacgagugcgacauccccaucggggccggcaucugcgccagcuaccagacgcagaccaacuccccgcggcgcgcccggagcguggcgucccagagcaucaucgccuacaccaugucccugggcgccgagaacagcgucgccuacuccaacaacagcaucgccauccccaccaacuucacgaucuccgugaccaccgagauccugcccgugagcaugaccaagacgagcgucgacugcaccauguacaucugcggggacuccaccgagugcagcaaccuccugcugcaguacggcuccuucugcacccagcucaaccgcgcgcugacggggaucgccguggagcaggacaagaacacccaggagguguucgcccaggucaagcagaucuacaagacgcccccgaucaaggacuucggcggguucaacuucagccagauccugcccgaccccuccaagcccagcaagcgguccuucaucgaggaccuccuguucaacaaggugacccuggccgacgccggcuucaucaagcaguacggcgacugccucggggacaucgcggcccgcgaccugaucugcgcccagaaguucaacggccugaccgugcucccgccccugcugaccgacgagaugaucgcccaguacaccagcgcccuccuggcggggaccaucacguccggcuggaccuucggggccggcgccgcccugcagauccccuucgcgaugcagauggccuaccgguucaacggcaucggggucacccagaacgugcucuacgagaaccagaagcugaucgccaaccaguucaacagcgccaucggcaagauccaggacucccugagcuccaccgccagcgcgcucgggaagcugcaggacguggucaaccagaacgcccaggcccugaacacgcucgugaagcagcuguccagcaacuucggcgccaucuccagcgugcugaacgacauccucucccgccuggacccgcccgaggccgaggugcagaucgaccggcugaucaccgggcgccuccagagccugcagaccuacgugacccagcagcugauccgggcggccgagauccgcgccagcgccaaccucgccgcgaccaagauguccgagugcguccugggccagagcaagcggguggacuucugcggcaagggguaccaccugauguccuucccccagagcgccccgcacggcguggucuuccuccacgugacguacguccccgcccaggagaagaacuucaccaccgcccccgcgaucugccacgacgggaaggcccacuucccccgcgagggcguguucguguccaacgggacccacugguucgucacgcagcggaacuucuacgagccgcagaucaucaccaccgacaacaccuucgugagcggcaacugcgacguggucaucggcaucgugaacaacacgguguacgacccccugcagcccgagcuggacuccuucaaggaggagcucgacaaguacuucaagaaccacaccagccccgacgucgaccugggggacaucuccggcaucaacgccagcguggugaacauccagaaggagaucgaccgccugaacgaggucgccaagaaccucaacgagucccugaucgaccugcaggagcucgggaaguacgagcaguacaucaaguggccgugguacaucuggcugggcuucaucgccggccugaucgcgaucgugauggugaccaucaugcucugcugcaugaccagcugcugcuccugccugaaggggugcugcagcugcggcuccugcugcaaguucgacgaggacgacagcgagcccguccugaagggggugaagcuccacuacacgugaggacuagucccuguucccagagcccacuuuuuuuucuuuuuuugaaauaaaauagccugucuuucagaucuaaaaaaaaaaaaaaaaaaaaaaaaaaaaaaaaaaaaaaaaaaaaaaaaaaaaaaaaaaaaaaaaaaaaaaaaaaaaaaaaaaaaaaaaaaaaaaaaaaaa

SEQ ID NO: 25061 - RNA, 4167 nt, Artificial Sequence
  SARS-CoV-2/Wuhan/WIV05/2019__EPI_ISL_402128 spike protein mRNA gc (1-1273)(K986P_V987P_S477N_D614G)
aggagagggcgcuuggcuugcaaggacccugagcugcggcauugaagcacacccaacccaacucgacugaagucagccucacugaaccggaucugagaaucuucucucucugggcuugccagggcucuccgaaccuagcuagcauccucuucaauuccaacuagaaagcuuaccauguucguguuccugguccuccugccccuggugagcucccagugcgugaaccucaccacccgcacgcagcugccgcccgccuacaccaacagcuucacccggggcgucuacuaccccgacaagguguuccgcuccagcgugcugcacuccacccaggaccucuuccugcccuucuucagcaacgucacgugguuccacgccauccacguguccgggaccaacggcaccaagcgguucgacaacccggugcugcccuucaacgacggggucuacuucgcgagcaccgagaaguccaacaucauccgcggcuggaucuucgggacgacccucgacagcaagacccagucccugcugaucgugaacaacgccaccaacguggucaucaaggugugcgaguuccaguucugcaacgaccccuuccucggcguguacuaccacaagaacaacaagagcuggauggaguccgaguuccgggucuacagcuccgccaacaacugcacguucgaguacgugagccagcccuuccugauggaccuggagggcaagcaggggaacuucaagaaccuccgcgaguucguguucaagaacaucgacggcuacuucaagaucuacuccaagcacaccccgaucaaccugguccgggaccugccccagggguucagcgcccucgagccccugguggaccugcccaucggcaucaacaucacccgcuuccagacccuccuggcccugcaccgguccuaccucacgccgggggacagcagcuccggcuggaccgcgggcgccgccgccuacuacgugggguaccugcagccccgcaccuuccugcucaaguacaacgagaacggcaccaucacggacgcggucgacugcgcccuggacccccugagcgagaccaagugcacccucaaguccuucaccguggagaaggggaucuaccagacgagcaacuuccgggugcagcccaccgaguccaucguccgcuucccgaacaucaccaaccugugccccuucggcgagguguucaacgccacccgguucgccagcgucuacgccuggaaccgcaagcggaucuccaacugcguggcggacuacagcgugcuguacaacuccgccagcuucuccacguucaagugcuacggcgucagccccaccaagcucaacgaccugugcuucaccaacguguacgccgacuccuucgugauccgcggggacgagguccggcagaucgcccccggccagaccgggaagaucgccgacuacaacuacaagcugccggacgacuucacgggcugcgugaucgcguggaacagcaacaaccucgacuccaaggucgggggcaacuacaacuaccuguaccgccuguuccgcaagagcaaccucaagcccuucgagcgggacaucuccaccgagaucuaccaggccggcaacacccccugcaacgggguggagggcuucaacugcuacuucccccugcaguccuacggguuccagccgaccaacggcgugggguaccagcccuaccggguggucgugcugagcuucgagcuccugcacgcccccgccacggugugcggccccaagaaguccaccaaccuggucaagaacaagugcgugaacuucaacuucaacggccucaccgggaccggcgugcugaccgagagcaacaagaaguuccugccguuccagcaguucgggcgcgacaucgccgacacgaccgacgcgguccgcgacccccagacccuggagauccucgacaucacccccugcagcuucggcgggguguccgugaucacgccgggcaccaacaccagcaaccaggucgccgugcuguaccagggcgugaacugcaccgagguccccguggccauccacgccgaccagcugacgcccaccuggcggguguacuccaccggcagcaacgucuuccagacccgcgccgggugccucaucggcgcggagcacgugaacaacuccuacgagugcgacauccccaucggggccggcaucugcgccagcuaccagacgcagaccaacuccccgcggcgcgcccggagcguggcgucccagagcaucaucgccuacaccaugucccugggcgccgagaacagcgucgccuacuccaacaacagcaucgccauccccaccaacuucacgaucuccgugaccaccgagauccugcccgugagcaugaccaagacgagcgucgacugcaccauguacaucugcggggacuccaccgagugcagcaaccuccugcugcaguacggcuccuucugcacccagcucaaccgcgcgcugacggggaucgccguggagcaggacaagaacacccaggagguguucgcccaggucaagcagaucuacaagacgcccccgaucaaggacuucggcggguucaacuucagccagauccugcccgaccccuccaagcccagcaagcgguccuucaucgaggaccuccuguucaacaaggugacccuggccgacgccggcuucaucaagcaguacggcgacugccucggggacaucgcggcccgcgaccugaucugcgcccagaaguucaacggccugaccgugcucccgccccugcugaccgacgagaugaucgcccaguacaccagcgcccuccuggcggggaccaucacguccggcuggaccuucggggccggcgccgcccugcagauccccuucgcgaugcagauggccuaccgguucaacggcaucggggucacccagaacgugcucuacgagaaccagaagcugaucgccaaccaguucaacagcgccaucggcaagauccaggacucccugagcuccaccgccagcgcgcucgggaagcugcaggacguggucaaccagaacgcccaggcccugaacacgcucgugaagcagcuguccagcaacuucggcgccaucuccagcgugcugaacgacauccucucccgccuggacccgcccgaggccgaggugcagaucgaccggcugaucaccgggcgccuccagagccugcagaccuacgugacccagcagcugauccgggcggccgagauccgcgccagcgccaaccucgccgcgaccaagauguccgagugcguccugggccagagcaagcggguggacuucugcggcaagggguaccaccugauguccuucccccagagcgccccgcacggcguggucuuccuccacgugacguacguccccgcccaggagaagaacuucaccaccgcccccgcgaucugccacgacgggaaggcccacuucccccgcgagggcguguucguguccaacgggacccacugguucgucacgcagcggaacuucuacgagccgcagaucaucaccaccgacaacaccuucgugagcggcaacugcgacguggucaucggcaucgugaacaacacgguguacgacccccugcagcccgagcuggacuccuucaaggaggagcucgacaaguacuucaagaaccacaccagccccgacgucgaccugggggacaucuccggcaucaacgccagcguggugaacauccagaaggagaucgaccgccugaacgaggucgccaagaaccucaacgagucccugaucgaccugcaggagcucgggaaguacgagcaguacaucaaguggccgugguacaucuggcugggcuucaucgccggccugaucgcgaucgugauggugaccaucaugcucugcugcaugaccagcugcugcuccugccugaaggggugcugcagcugcggcuccugcugcaaguucgacgaggacgacagcgagcccguccugaagggggugaagcuccacuacacgugaggacuagucccuguucccagagcccacuuuuuuuucuuuuuuugaaauaaaauagccugucuuucagaucuaaaaaaaaaaaaaaaaaaaaaaaaaaaaaaaaaaaaaaaaaaaaaaaaaaaaaaaaaaaaaaaaaaaaaaaaaaaaaaaaaaaaaaaaaaaaaaaaaaaa

SEQ ID NO: 25062 - RNA, 4167 nt, Artificial Sequence
  SARS-CoV-2/Wuhan/WIV05/2019__EPI_ISL_402128 spike protein mRNA gc (1-1273)(K986P_V987P_N501Y_D614G)
aggagagggcgcuuggcuugcaaggacccugagcugcggcauugaagcacacccaacccaacucgacugaagucagccucacugaaccggaucugagaaucuucucucucugggcuugccagggcucuccgaaccuagcuagcauccucuucaauuccaacuagaaagcuuaccauguucguguuccugguccuccugccccuggugagcucccagugcgugaaccucaccacccgcacgcagcugccgcccgccuacaccaacagcuucacccggggcgucuacuaccccgacaagguguuccgcuccagcgugcugcacuccacccaggaccucuuccugcccuucuucagcaacgucacgugguuccacgccauccacguguccgggaccaacggcaccaagcgguucgacaacccggugcugcccuucaacgacggggucuacuucgcgagcaccgagaaguccaacaucauccgcggcuggaucuucgggacgacccucgacagcaagacccagucccugcugaucgugaacaacgccaccaacguggucaucaaggugugcgaguuccaguucugcaacgaccccuuccucggcguguacuaccacaagaacaacaagagcuggauggaguccgaguuccgggucuacagcuccgccaacaacugcacguucgaguacgugagccagcccuuccugauggaccuggagggcaagcaggggaacuucaagaaccuccgcgaguucguguucaagaacaucgacggcuacuucaagaucuacuccaagcacaccccgaucaaccugguccgggaccugccccagggguucagcgcccucgagccccugguggaccugcccaucggcaucaacaucacccgcuuccagacccuccuggcccugcaccgguccuaccucacgccgggggacagcagcuccggcuggaccgcgggcgccgccgccuacuacgugggguaccugcagccccgcaccuuccugcucaaguacaacgagaacggcaccaucacggacgcggucgacugcgcccuggacccccugagcgagaccaagugcacccucaaguccuucaccguggagaaggggaucuaccagacgagcaacuuccgggugcagcccaccgaguccaucguccgcuucccgaacaucaccaaccugugccccuucggcgagguguucaacgccacccgguucgccagcgucuacgccuggaaccgcaagcggaucuccaacugcguggcggacuacagcgugcuguacaacuccgccagcuucuccacguucaagugcuacggcgucagccccaccaagcucaacgaccugugcuucaccaacguguacgccgacuccuucgugauccgcggggacgagguccggcagaucgcccccggccagaccgggaagaucgccgacuacaacuacaagcugccggacgacuucacgggcugcgugaucgcguggaacagcaacaaccucgacuccaaggucgggggcaacuacaacuaccuguaccgccuguuccgcaagagcaaccucaagcccuucgagcgggacaucuccaccgagaucuaccaggccggcagcacccccugcaacgggguggagggcuucaacugcuacuucccccugcaguccuacggguuccagccgaccuacggcgugggguaccagcccuaccggguggucgugcugagcuucgagcuccugcacgcccccgccacggugugcggccccaagaaguccaccaaccuggucaagaacaagugcgugaacuucaacuucaacggccucaccgggaccggcgugcugaccgagagcaacaagaaguuccugccguuccagcaguucgggcgcgacaucgccgacacgaccgacgcgguccgcgacccccagacccuggagauccucgacaucacccccugcagcuucggcgggguguccgugaucacgccgggcaccaacaccagcaaccaggucgccgugcuguaccagggcgugaacugcaccgagguccccguggccauccacgccgaccagcugacgcccaccuggcggguguacuccaccggcagcaacgucuuccagacccgcgccgggugccucaucggcgcggagcacgugaacaacuccuacgagugcgacauccccaucggggccggcaucugcgccagcuaccagacgcagaccaacuccccgcggcgcgcccggagcguggcgucccagagcaucaucgccuacaccaugucccugggcgccgagaacagcgucgccuacuccaacaacagcaucgccauccccaccaacuucacgaucuccgugaccaccgagauccugcccgugagcaugaccaagacgagcgucgacugcaccauguacaucugcggggacuccaccgagugcagcaaccuccugcugcaguacggcuccuucugcacccagcucaaccgcgcgcugacggggaucgccguggagcaggacaagaacacccaggagguguucgcccaggucaagcagaucuacaagacgcccccgaucaaggacuucggcggguucaacuucagccagauccugcccgaccccuccaagcccagcaagcgguccuucaucgaggaccuccuguucaacaaggugacccuggccgacgccggcuucaucaagcaguacggcgacugccucggggacaucgcggcccgcgaccugaucugcgcccagaaguucaacggccugaccgugcucccgccccugcugaccgacgagaugaucgcccaguacaccagcgcccuccuggcggggaccaucacguccggcuggaccuucggggccggcgccgcccugcagauccccuucgcgaugcagauggccuaccgguucaacggcaucggggucacccagaacgugcucuacgagaaccagaagcugaucgccaaccaguucaacagcgccaucggcaagauccaggacucccugagcuccaccgccagcgcgcucgggaagcugcaggacguggucaaccagaacgcccaggcccugaacacgcucgugaagcagcuguccagcaacuucggcgccaucuccagcgugcugaacgacauccucucccgccuggacccgcccgaggccgaggugcagaucgaccggcugaucaccgggcgccuccagagccugcagaccuacgugacccagcagcugauccgggcggccgagauccgcgccagcgccaaccucgccgcgaccaagauguccgagugcguccugggccagagcaagcggguggacuucugcggcaagggguaccaccugauguccuucccccagagcgccccgcacggcguggucuuccuccacgugacguacguccccgcccaggagaagaacuucaccaccgcccccgcgaucugccacgacgggaaggcccacuucccccgcgagggcguguucguguccaacgggacccacugguucgucacgcagcggaacuucuacgagccgcagaucaucaccaccgacaacaccuucgugagcggcaacugcgacguggucaucggcaucgugaacaacacgguguacgacccccugcagcccgagcuggacuccuucaaggaggagcucgacaaguacuucaagaaccacaccagccccgacgucgaccugggggacaucuccggcaucaacgccagcguggugaacauccagaaggagaucgaccgccugaacgaggucgccaagaaccucaacgagucccugaucgaccugcaggagcucgggaaguacgagcaguacaucaaguggccgugguacaucuggcugggcuucaucgccggccugaucgcgaucgugauggugaccaucaugcucugcugcaugaccagcugcugcuccugccugaaggggugcugcagcugcggcuccugcugcaaguucgacgaggacgacagcgagcccguccugaagggggugaagcuccacuacacgugaggacuagucccuguucccagagcccacuuuuuuuucuuuuuuugaaauaaaauagccugucuuucagaucuaaaaaaaaaaaaaaaaaaaaaaaaaaaaaaaaaaaaaaaaaaaaaaaaaaaaaaaaaaaaaaaaaaaaaaaaaaaaaaaaaaaaaaaaaaaaaaaaaaaa

SEQ ID NO: 25063 - RNA, 4161 nt, Artificial Sequence
  SARS-CoV-2/Wuhan/WIV05/2019__EPI_ISL_402128 spike protein mRNA gc (1-1273)(K986P_V987P_H69del_V70del_D614G)
aggagagggcgcuuggcuugcaaggacccugagcugcggcauugaagcacacccaacccaacucgacugaagucagccucacugaaccggaucugagaaucuucucucucugggcuugccagggcucuccgaaccuagcuagcauccucuucaauuccaacuagaaagcuuaccauguucguguuccugguccuccugccccuggugagcucccagugcgugaaccucaccacccgcacgcagcugccgcccgccuacaccaacagcuucacccggggcgucuacuaccccgacaagguguuccgcuccagcgugcugcacuccacccaggaccucuuccugcccuucuucagcaacgucacgugguuccacgccaucuccgggaccaacggcaccaagcgguucgacaacccggugcugcccuucaacgacggggucuacuucgcgagcaccgagaaguccaacaucauccgcggcuggaucuucgggacgacccucgacagcaagacccagucccugcugaucgugaacaacgccaccaacguggucaucaaggugugcgaguuccaguucugcaacgaccccuuccucggcguguacuaccacaagaacaacaagagcuggauggaguccgaguuccgggucuacagcuccgccaacaacugcacguucgaguacgugagccagcccuuccugauggaccuggagggcaagcaggggaacuucaagaaccuccgcgaguucguguucaagaacaucgacggcuacuucaagaucuacuccaagcacaccccgaucaaccugguccgggaccugccccagggguucagcgcccucgagccccugguggaccugcccaucggcaucaacaucacccgcuuccagacccuccuggcccugcaccgguccuaccucacgccgggggacagcagcuccggcuggaccgcgggcgccgccgccuacuacgugggguaccugcagccccgcaccuuccugcucaaguacaacgagaacggcaccaucacggacgcggucgacugcgcccuggacccccugagcgagaccaagugcacccucaaguccuucaccguggagaaggggaucuaccagacgagcaacuuccgggugcagcccaccgaguccaucguccgcuucccgaacaucaccaaccugugccccuucggcgagguguucaacgccacccgguucgccagcgucuacgccuggaaccgcaagcggaucuccaacugcguggcggacuacagcgugcuguacaacuccgccagcuucuccacguucaagugcuacggcgucagccccaccaagcucaacgaccugugcuucaccaacguguacgccgacuccuucgugauccgcggggacgagguccggcagaucgcccccggccagaccgggaagaucgccgacuacaacuacaagcugccggacgacuucacgggcugcgugaucgcguggaacagcaacaaccucgacuccaaggucgggggcaacuacaacuaccuguaccgccuguuccgcaagagcaaccucaagcccuucgagcgggacaucuccaccgagaucuaccaggccggcagcacccccugcaacgggguggagggcuucaacugcuacuucccccugcaguccuacggguuccagccgaccaacggcgugggguaccagcccuaccggguggucgugcugagcuucgagcuccugcacgcccccgccacggugugcggccccaagaaguccaccaaccuggucaagaacaagugcgugaacuucaacuucaacggccucaccgggaccggcgugcugaccgagagcaacaagaaguuccugccguuccagcaguucgggcgcgacaucgccgacacgaccgacgcgguccgcgacccccagacccuggagauccucgacaucacccccugcagcuucggcgggguguccgugaucacgccgggcaccaacaccagcaaccaggucgccgugcuguaccagggcgugaacugcaccgagguccccguggccauccacgccgaccagcugacgcccaccuggcggguguacuccaccggcagcaacgucuuccagacccgcgccgggugccucaucggcgcggagcacgugaacaacuccuacgagugcgacauccccaucggggccggcaucugcgccagcuaccagacgcagaccaacuccccgcggcgcgcccggagcguggcgucccagagcaucaucgccuacaccaugucccugggcgccgagaacagcgucgccuacuccaacaacagcaucgccauccccaccaacuucacgaucuccgugaccaccgagauccugcccgugagcaugaccaagacgagcgucgacugcaccauguacaucugcggggacuccaccgagugcagcaaccuccugcugcaguacggcuccuucugcacccagcucaaccgcgcgcugacggggaucgccguggagcaggacaagaacacccaggagguguucgcccaggucaagcagaucuacaagacgcccccgaucaaggacuucggcggguucaacuucagccagauccugcccgaccccuccaagcccagcaagcgguccuucaucgaggaccuccuguucaacaaggugacccuggccgacgccggcuucaucaagcaguacggcgacugccucggggacaucgcggcccgcgaccugaucugcgcccagaaguucaacggccugaccgugcucccgccccugcugaccgacgagaugaucgcccaguacaccagcgcccuccuggcggggaccaucacguccggcuggaccuucggggccggcgccgcccugcagauccccuucgcgaugcagauggccuaccgguucaacggcaucggggucacccagaacgugcucuacgagaaccagaagcugaucgccaaccaguucaacagcgccaucggcaagauccaggacucccugagcuccaccgccagcgcgcucgggaagcugcaggacguggucaaccagaacgcccaggcccugaacacgcucgugaagcagcuguccagcaacuucggcgccaucuccagcgugcugaacgacauccucucccgccuggacccgcccgaggccgaggugcagaucgaccggcugaucaccgggcgccuccagagccugcagaccuacgugacccagcagcugauccgggcggccgagauccgcgccagcgccaaccucgccgcgaccaagauguccgagugcguccugggccagagcaagcggguggacuucugcggcaagggguaccaccugauguccuucccccagagcgccccgcacggcguggucuuccuccacgugacguacguccccgcccaggagaagaacuucaccaccgcccccgcgaucugccacgacgggaaggcccacuucccccgcgagggcguguucguguccaacgggacccacugguucgucacgcagcggaacuucuacgagccgcagaucaucaccaccgacaacaccuucgugagcggcaacugcgacguggucaucggcaucgugaacaacacgguguacgacccccugcagcccgagcuggacuccuucaaggaggagcucgacaaguacuucaagaaccacaccagccccgacgucgaccugggggacaucuccggcaucaacgccagcguggugaacauccagaaggagaucgaccgccugaacgaggucgccaagaaccucaacgagucccugaucgaccugcaggagcucgggaaguacgagcaguacaucaaguggccgugguacaucuggcugggcuucaucgccggccugaucgcgaucgugauggugaccaucaugcucugcugcaugaccagcugcugcuccugccugaaggggugcugcagcugcggcuccugcugcaaguucgacgaggacgacagcgagcccguccugaagggggugaagcuccacuacacgugaggacuagucccuguucccagagcccacuuuuuuuucuuuuuuugaaauaaaauagccugucuuucagaucuaaaaaaaaaaaaaaaaaaaaaaaaaaaaaaaaaaaaaaaaaaaaaaaaaaaaaaaaaaaaaaaaaaaaaaaaaaaaaaaaaaaaaaaaaaaaaaaaaaaa

SEQ ID NO: 25064 - RNA, 4167 nt, Artificial Sequence
  SARS-CoV-2/Wuhan/WIV05/2019__EPI_ISL_402128 spike protein mRNA gc (1-1273)(K986P_V987P_Y453F_D614G)
aggagagggcgcuuggcuugcaaggacccugagcugcggcauugaagcacacccaacccaacucgacugaagucagccucacugaaccggaucugagaaucuucucucucugggcuugccagggcucuccgaaccuagcuagcauccucuucaauuccaacuagaaagcuuaccauguucguguuccugguccuccugccccuggugagcucccagugcgugaaccucaccacccgcacgcagcugccgcccgccuacaccaacagcuucacccggggcgucuacuaccccgacaagguguuccgcuccagcgugcugcacuccacccaggaccucuuccugcccuucuucagcaacgucacgugguuccacgccauccacguguccgggaccaacggcaccaagcgguucgacaacccggugcugcccuucaacgacggggucuacuucgcgagcaccgagaaguccaacaucauccgcggcuggaucuucgggacgacccucgacagcaagacccagucccugcugaucgugaacaacgccaccaacguggucaucaaggugugcgaguuccaguucugcaacgaccccuuccucggcguguacuaccacaagaacaacaagagcuggauggaguccgaguuccgggucuacagcuccgccaacaacugcacguucgaguacgugagccagcccuuccugauggaccuggagggcaagcaggggaacuucaagaaccuccgcgaguucguguucaagaacaucgacggcuacuucaagaucuacuccaagcacaccccgaucaaccugguccgggaccugccccagggguucagcgcccucgagccccugguggaccugcccaucggcaucaacaucacccgcuuccagacccuccuggcccugcaccgguccuaccucacgccgggggacagcagcuccggcuggaccgcgggcgccgccgccuacuacgugggguaccugcagccccgcaccuuccugcucaaguacaacgagaacggcaccaucacggacgcggucgacugcgcccuggacccccugagcgagaccaagugcacccucaaguccuucaccguggagaaggggaucuaccagacgagcaacuuccgggugcagcccaccgaguccaucguccgcuucccgaacaucaccaaccugugccccuucggcgagguguucaacgccacccgguucgccagcgucuacgccuggaaccgcaagcggaucuccaacugcguggcggacuacagcgugcuguacaacuccgccagcuucuccacguucaagugcuacggcgucagccccaccaagcucaacgaccugugcuucaccaacguguacgccgacuccuucgugauccgcggggacgagguccggcagaucgcccccggccagaccgggaagaucgccgacuacaacuacaagcugccggacgacuucacgggcugcgugaucgcguggaacagcaacaaccucgacuccaaggucgggggcaacuacaacuaccuguuccgccuguuccgcaagagcaaccucaagcccuucgagcgggacaucuccaccgagaucuaccaggccggcagcacccccugcaacgggguggagggcuucaacugcuacuucccccugcaguccuacggguuccagccgaccaacggcgugggguaccagcccuaccggguggucgugcugagcuucgagcuccugcacgcccccgccacggugugcggccccaagaaguccaccaaccuggucaagaacaagugcgugaacuucaacuucaacggccucaccgggaccggcgugcugaccgagagcaacaagaaguuccugccguuccagcaguucgggcgcgacaucgccgacacgaccgacgcgguccgcgacccccagacccuggagauccucgacaucacccccugcagcuucggcgggguguccgugaucacgccgggcaccaacaccagcaaccaggucgccgugcuguaccagggcgugaacugcaccgagguccccguggccauccacgccgaccagcugacgcccaccuggcggguguacuccaccggcagcaacgucuuccagacccgcgccgggugccucaucggcgcggagcacgugaacaacuccuacgagugcgacauccccaucggggccggcaucugcgccagcuaccagacgcagaccaacuccccgcggcgcgcccggagcguggcgucccagagcaucaucgccuacaccaugucccugggcgccgagaacagcgucgccuacuccaacaacagcaucgccauccccaccaacuucacgaucuccgugaccaccgagauccugcccgugagcaugaccaagacgagcgucgacugcaccauguacaucugcggggacuccaccgagugcagcaaccuccugcugcaguacggcuccuucugcacccagcucaaccgcgcgcugacggggaucgccguggagcaggacaagaacacccaggagguguucgcccaggucaagcagaucuacaagacgcccccgaucaaggacuucggcggguucaacuucagccagauccugcccgaccccuccaagcccagcaagcgguccuucaucgaggaccuccuguucaacaaggugacccuggccgacgccggcuucaucaagcaguacggcgacugccucggggacaucgcggcccgcgaccugaucugcgcccagaaguucaacggccugaccgugcucccgccccugcugaccgacgagaugaucgcccaguacaccagcgcccuccuggcggggaccaucacguccggcuggaccuucggggccggcgccgcccugcagauccccuucgcgaugcagauggccuaccgguucaacggcaucggggucacccagaacgugcucuacgagaaccagaagcugaucgccaaccaguucaacagcgccaucggcaagauccaggacucccugagcuccaccgccagcgcgcucgggaagcugcaggacguggucaaccagaacgcccaggcccugaacacgcucgugaagcagcuguccagcaacuucggcgccaucuccagcgugcugaacgacauccucucccgccuggacccgcccgaggccgaggugcagaucgaccggcugaucaccgggcgccuccagagccugcagaccuacgugacccagcagcugauccgggcggccgagauccgcgccagcgccaaccucgccgcgaccaagauguccgagugcguccugggccagagcaagcggguggacuucugcggcaagggguaccaccugauguccuucccccagagcgccccgcacggcguggucuuccuccacgugacguacguccccgcccaggagaagaacuucaccaccgcccccgcgaucugccacgacgggaaggcccacuucccccgcgagggcguguucguguccaacgggacccacugguucgucacgcagcggaacuucuacgagccgcagaucaucaccaccgacaacaccuucgugagcggcaacugcgacguggucaucggcaucgugaacaacacgguguacgacccccugcagcccgagcuggacuccuucaaggaggagcucgacaaguacuucaagaaccacaccagccccgacgucgaccugggggacaucuccggcaucaacgccagcguggugaacauccagaaggagaucgaccgccugaacgaggucgccaagaaccucaacgagucccugaucgaccugcaggagcucgggaaguacgagcaguacaucaaguggccgugguacaucuggcugggcuucaucgccggccugaucgcgaucgugauggugaccaucaugcucugcugcaugaccagcugcugcuccugccugaaggggugcugcagcugcggcuccugcugcaaguucgacgaggacgacagcgagcccguccugaagggggugaagcuccacuacacgugaggacuagucccuguucccagagcccacuuuuuuuucuuuuuuugaaauaaaauagccugucuuucagaucuaaaaaaaaaaaaaaaaaaaaaaaaaaaaaaaaaaaaaaaaaaaaaaaaaaaaaaaaaaaaaaaaaaaaaaaaaaaaaaaaaaaaaaaaaaaaaaaaaaaa

SEQ ID NO: 25065 - RNA, 4167 nt, Artificial Sequence
  SARS-CoV-2/Wuhan/WIV05/2019__EPI_ISL_402128 spike protein mRNA gc (1-1273)(K986P_V987P_D614G_I692V)
aggagagggcgcuuggcuugcaaggacccugagcugcggcauugaagcacacccaacccaacucgacugaagucagccucacugaaccggaucugagaaucuucucucucugggcuugccagggcucuccgaaccuagcuagcauccucuucaauuccaacuagaaagcuuaccauguucguguuccugguccuccugccccuggugagcucccagugcgugaaccucaccacccgcacgcagcugccgcccgccuacaccaacagcuucacccggggcgucuacuaccccgacaagguguuccgcuccagcgugcugcacuccacccaggaccucuuccugcccuucuucagcaacgucacgugguuccacgccauccacguguccgggaccaacggcaccaagcgguucgacaacccggugcugcccuucaacgacggggucuacuucgcgagcaccgagaaguccaacaucauccgcggcuggaucuucgggacgacccucgacagcaagacccagucccugcugaucgugaacaacgccaccaacguggucaucaaggugugcgaguuccaguucugcaacgaccccuuccucggcguguacuaccacaagaacaacaagagcuggauggaguccgaguuccgggucuacagcuccgccaacaacugcacguucgaguacgugagccagcccuuccugauggaccuggagggcaagcaggggaacuucaagaaccuccgcgaguucguguucaagaacaucgacggcuacuucaagaucuacuccaagcacaccccgaucaaccugguccgggaccugccccagggguucagcgcccucgagccccugguggaccugcccaucggcaucaacaucacccgcuuccagacccuccuggcccugcaccgguccuaccucacgccgggggacagcagcuccggcuggaccgcgggcgccgccgccuacuacgugggguaccugcagccccgcaccuuccugcucaaguacaacgagaacggcaccaucacggacgcggucgacugcgcccuggacccccugagcgagaccaagugcacccucaaguccuucaccguggagaaggggaucuaccagacgagcaacuuccgggugcagcccaccgaguccaucguccgcuucccgaacaucaccaaccugugccccuucggcgagguguucaacgccacccgguucgccagcgucuacgccuggaaccgcaagcggaucuccaacugcguggcggacuacagcgugcuguacaacuccgccagcuucuccacguucaagugcuacggcgucagccccaccaagcucaacgaccugugcuucaccaacguguacgccgacuccuucgugauccgcggggacgagguccggcagaucgcccccggccagaccgggaagaucgccgacuacaacuacaagcugccggacgacuucacgggcugcgugaucgcguggaacagcaacaaccucgacuccaaggucgggggcaacuacaacuaccuguaccgccuguuccgcaagagcaaccucaagcccuucgagcgggacaucuccaccgagaucuaccaggccggcagcacccccugcaacgggguggagggcuucaacugcuacuucccccugcaguccuacggguuccagccgaccaacggcgugggguaccagcccuaccggguggucgugcugagcuucgagcuccugcacgcccccgccacggugugcggccccaagaaguccaccaaccuggucaagaacaagugcgugaacuucaacuucaacggccucaccgggaccggcgugcugaccgagagcaacaagaaguuccugccguuccagcaguucgggcgcgacaucgccgacacgaccgacgcgguccgcgacccccagacccuggagauccucgacaucacccccugcagcuucggcgggguguccgugaucacgccgggcaccaacaccagcaaccaggucgccgugcuguaccagggcgugaacugcaccgagguccccguggccauccacgccgaccagcugacgcccaccuggcggguguacuccaccggcagcaacgucuuccagacccgcgccgggugccucaucggcgcggagcacgugaacaacuccuacgagugcgacauccccaucggggccggcaucugcgccagcuaccagacgcagaccaacuccccgcggcgcgcccggagcguggcgucccagagcgucaucgccuacaccaugucccugggcgccgagaacagcgucgccuacuccaacaacagcaucgccauccccaccaacuucacgaucuccgugaccaccgagauccugcccgugagcaugaccaagacgagcgucgacugcaccauguacaucugcggggacuccaccgagugcagcaaccuccugcugcaguacggcuccuucugcacccagcucaaccgcgcgcugacggggaucgccguggagcaggacaagaacacccaggagguguucgcccaggucaagcagaucuacaagacgcccccgaucaaggacuucggcggguucaacuucagccagauccugcccgaccccuccaagcccagcaagcgguccuucaucgaggaccuccuguucaacaaggugacccuggccgacgccggcuucaucaagcaguacggcgacugccucggggacaucgcggcccgcgaccugaucugcgcccagaaguucaacggccugaccgugcucccgccccugcugaccgacgagaugaucgcccaguacaccagcgcccuccuggcggggaccaucacguccggcuggaccuucggggccggcgccgcccugcagauccccuucgcgaugcagauggccuaccgguucaacggcaucggggucacccagaacgugcucuacgagaaccagaagcugaucgccaaccaguucaacagcgccaucggcaagauccaggacucccugagcuccaccgccagcgcgcucgggaagcugcaggacguggucaaccagaacgcccaggcccugaacacgcucgugaagcagcuguccagcaacuucggcgccaucuccagcgugcugaacgacauccucucccgccuggacccgcccgaggccgaggugcagaucgaccggcugaucaccgggcgccuccagagccugcagaccuacgugacccagcagcugauccgggcggccgagauccgcgccagcgccaaccucgccgcgaccaagauguccgagugcguccugggccagagcaagcggguggacuucugcggcaagggguaccaccugauguccuucccccagagcgccccgcacggcguggucuuccuccacgugacguacguccccgcccaggagaagaacuucaccaccgcccccgcgaucugccacgacgggaaggcccacuucccccgcgagggcguguucguguccaacgggacccacugguucgucacgcagcggaacuucuacgagccgcagaucaucaccaccgacaacaccuucgugagcggcaacugcgacguggucaucggcaucgugaacaacacgguguacgacccccugcagcccgagcuggacuccuucaaggaggagcucgacaaguacuucaagaaccacaccagccccgacgucgaccugggggacaucuccggcaucaacgccagcguggugaacauccagaaggagaucgaccgccugaacgaggucgccaagaaccucaacgagucccugaucgaccugcaggagcucgggaaguacgagcaguacaucaaguggccgugguacaucuggcugggcuucaucgccggccugaucgcgaucgugauggugaccaucaugcucugcugcaugaccagcugcugcuccugccugaaggggugcugcagcugcggcuccugcugcaaguucgacgaggacgacagcgagcccguccugaagggggugaagcuccacuacacgugaggacuagucccuguucccagagcccacuuuuuuuucuuuuuuugaaauaaaauagccugucuuucagaucuaaaaaaaaaaaaaaaaaaaaaaaaaaaaaaaaaaaaaaaaaaaaaaaaaaaaaaaaaaaaaaaaaaaaaaaaaaaaaaaaaaaaaaaaaaaaaaaaaaaa

SEQ ID NO: 25066 - RNA, 4167 nt, Artificial Sequence
  SARS-CoV-2/Wuhan/WIV05/2019__EPI_ISL_402128 spike protein mRNA gc (1-1273)(K986P_V987P_D614G_M1229I)
aggagagggcgcuuggcuugcaaggacccugagcugcggcauugaagcacacccaacccaacucgacugaagucagccucacugaaccggaucugagaaucuucucucucugggcuugccagggcucuccgaaccuagcuagcauccucuucaauuccaacuagaaagcuuaccauguucguguuccugguccuccugccccuggugagcucccagugcgugaaccucaccacccgcacgcagcugccgcccgccuacaccaacagcuucacccggggcgucuacuaccccgacaagguguuccgcuccagcgugcugcacuccacccaggaccucuuccugcccuucuucagcaacgucacgugguuccacgccauccacguguccgggaccaacggcaccaagcgguucgacaacccggugcugcccuucaacgacggggucuacuucgcgagcaccgagaaguccaacaucauccgcggcuggaucuucgggacgacccucgacagcaagacccagucccugcugaucgugaacaacgccaccaacguggucaucaaggugugcgaguuccaguucugcaacgaccccuuccucggcguguacuaccacaagaacaacaagagcuggauggaguccgaguuccgggucuacagcuccgccaacaacugcacguucgaguacgugagccagcccuuccugauggaccuggagggcaagcaggggaacuucaagaaccuccgcgaguucguguucaagaacaucgacggcuacuucaagaucuacuccaagcacaccccgaucaaccugguccgggaccugccccagggguucagcgcccucgagccccugguggaccugcccaucggcaucaacaucacccgcuuccagacccuccuggcccugcaccgguccuaccucacgccgggggacagcagcuccggcuggaccgcgggcgccgccgccuacuacgugggguaccugcagccccgcaccuuccugcucaaguacaacgagaacggcaccaucacggacgcggucgacugcgcccuggacccccugagcgagaccaagugcacccucaaguccuucaccguggagaaggggaucuaccagacgagcaacuuccgggugcagcccaccgaguccaucguccgcuucccgaacaucaccaaccugugccccuucggcgagguguucaacgccacccgguucgccagcgucuacgccuggaaccgcaagcggaucuccaacugcguggcggacuacagcgugcuguacaacuccgccagcuucuccacguucaagugcuacggcgucagccccaccaagcucaacgaccugugcuucaccaacguguacgccgacuccuucgugauccgcggggacgagguccggcagaucgcccccggccagaccgggaagaucgccgacuacaacuacaagcugccggacgacuucacgggcugcgugaucgcguggaacagcaacaaccucgacuccaaggucgggggcaacuacaacuaccuguaccgccuguuccgcaagagcaaccucaagcccuucgagcgggacaucuccaccgagaucuaccaggccggcagcacccccugcaacgggguggagggcuucaacugcuacuucccccugcaguccuacggguuccagccgaccaacggcgugggguaccagcccuaccggguggucgugcugagcuucgagcuccugcacgcccccgccacggugugcggccccaagaaguccaccaaccuggucaagaacaagugcgugaacuucaacuucaacggccucaccgggaccggcgugcugaccgagagcaacaagaaguuccugccguuccagcaguucgggcgcgacaucgccgacacgaccgacgcgguccgcgacccccagacccuggagauccucgacaucacccccugcagcuucggcgggguguccgugaucacgccgggcaccaacaccagcaaccaggucgccgugcuguaccagggcgugaacugcaccgagguccccguggccauccacgccgaccagcugacgcccaccuggcggguguacuccaccggcagcaacgucuuccagacccgcgccgggugccucaucggcgcggagcacgugaacaacuccuacgagugcgacauccccaucggggccggcaucugcgccagcuaccagacgcagaccaacuccccgcggcgcgcccggagcguggcgucccagagcaucaucgccuacaccaugucccugggcgccgagaacagcgucgccuacuccaacaacagcaucgccauccccaccaacuucacgaucuccgugaccaccgagauccugcccgugagcaugaccaagacgagcgucgacugcaccauguacaucugcggggacuccaccgagugcagcaaccuccugcugcaguacggcuccuucugcacccagcucaaccgcgcgcugacggggaucgccguggagcaggacaagaacacccaggagguguucgcccaggucaagcagaucuacaagacgcccccgaucaaggacuucggcggguucaacuucagccagauccugcccgaccccuccaagcccagcaagcgguccuucaucgaggaccuccuguucaacaaggugacccuggccgacgccggcuucaucaagcaguacggcgacugccucggggacaucgcggcccgcgaccugaucugcgcccagaaguucaacggccugaccgugcucccgccccugcugaccgacgagaugaucgcccaguacaccagcgcccuccuggcggggaccaucacguccggcuggaccuucggggccggcgccgcccugcagauccccuucgcgaugcagauggccuaccgguucaacggcaucggggucacccagaacgugcucuacgagaaccagaagcugaucgccaaccaguucaacagcgccaucggcaagauccaggacucccugagcuccaccgccagcgcgcucgggaagcugcaggacguggucaaccagaacgcccaggcccugaacacgcucgugaagcagcuguccagcaacuucggcgccaucuccagcgugcugaacgacauccucucccgccuggacccgcccgaggccgaggugcagaucgaccggcugaucaccgggcgccuccagagccugcagaccuacgugacccagcagcugauccgggcggccgagauccgcgccagcgccaaccucgccgcgaccaagauguccgagugcguccugggccagagcaagcggguggacuucugcggcaagggguaccaccugauguccuucccccagagcgccccgcacggcguggucuuccuccacgugacguacguccccgcccaggagaagaacuucaccaccgcccccgcgaucugccacgacgggaaggcccacuucccccgcgagggcguguucguguccaacgggacccacugguucgucacgcagcggaacuucuacgagccgcagaucaucaccaccgacaacaccuucgugagcggcaacugcgacguggucaucggcaucgugaacaacacgguguacgacccccugcagcccgagcuggacuccuucaaggaggagcucgacaaguacuucaagaaccacaccagccccgacgucgaccugggggacaucuccggcaucaacgccagcguggugaacauccagaaggagaucgaccgccugaacgaggucgccaagaaccucaacgagucccugaucgaccugcaggagcucgggaaguacgagcaguacaucaaguggccgugguacaucuggcugggcuucaucgccggccugaucgcgaucgugaucgugaccaucaugcucugcugcaugaccagcugcugcuccugccugaaggggugcugcagcugcggcuccugcugcaaguucgacgaggacgacagcgagcccguccugaagggggugaagcuccacuacacgugaggacuagucccuguucccagagcccacuuuuuuuucuuuuuuugaaauaaaauagccugucuuucagaucuaaaaaaaaaaaaaaaaaaaaaaaaaaaaaaaaaaaaaaaaaaaaaaaaaaaaaaaaaaaaaaaaaaaaaaaaaaaaaaaaaaaaaaaaaaaaaaaaaaaa

SEQ ID NO: 25067 - RNA, 4161 nt, Artificial Sequence
  SARS-CoV-2/Wuhan/WIV05/2019__EPI_ISL_402128 spike protein mRNA gc (1-1273)(K986P_V987P_H69del_V70del_A222V_Y453F_S477N_D614G_I692V)
aggagagggcgcuuggcuugcaaggacccugagcugcggcauugaagcacacccaacccaacucgacugaagucagccucacugaaccggaucugagaaucuucucucucugggcuugccagggcucuccgaaccuagcuagcauccucuucaauuccaacuagaaagcuuaccauguucguguuccugguccuccugccccuggugagcucccagugcgugaaccucaccacccgcacgcagcugccgcccgccuacaccaacagcuucacccggggcgucuacuaccccgacaagguguuccgcuccagcgugcugcacuccacccaggaccucuuccugcccuucuucagcaacgucacgugguuccacgccaucuccgggaccaacggcaccaagcgguucgacaacccggugcugcccuucaacgacggggucuacuucgcgagcaccgagaaguccaacaucauccgcggcuggaucuucgggacgacccucgacagcaagacccagucccugcugaucgugaacaacgccaccaacguggucaucaaggugugcgaguuccaguucugcaacgaccccuuccucggcguguacuaccacaagaacaacaagagcuggauggaguccgaguuccgggucuacagcuccgccaacaacugcacguucgaguacgugagccagcccuuccugauggaccuggagggcaagcaggggaacuucaagaaccuccgcgaguucguguucaagaacaucgacggcuacuucaagaucuacuccaagcacaccccgaucaaccugguccgggaccugccccagggguucagcguccucgagccccugguggaccugcccaucggcaucaacaucacccgcuuccagacccuccuggcccugcaccgguccuaccucacgccgggggacagcagcuccggcuggaccgcgggcgccgccgccuacuacgugggguaccugcagccccgcaccuuccugcucaaguacaacgagaacggcaccaucacggacgcggucgacugcgcccuggacccccugagcgagaccaagugcacccucaaguccuucaccguggagaaggggaucuaccagacgagcaacuuccgggugcagcccaccgaguccaucguccgcuucccgaacaucaccaaccugugccccuucggcgagguguucaacgccacccgguucgccagcgucuacgccuggaaccgcaagcggaucuccaacugcguggcggacuacagcgugcuguacaacuccgccagcuucuccacguucaagugcuacggcgucagccccaccaagcucaacgaccugugcuucaccaacguguacgccgacuccuucgugauccgcggggacgagguccggcagaucgcccccggccagaccgggaagaucgccgacuacaacuacaagcugccggacgacuucacgggcugcgugaucgcguggaacagcaacaaccucgacuccaaggucgggggcaacuacaacuaccuguuccgccuguuccgcaagagcaaccucaagcccuucgagcgggacaucuccaccgagaucuaccaggccggcaacacccccugcaacgggguggagggcuucaacugcuacuucccccugcaguccuacggguuccagccgaccaacggcgugggguaccagcccuaccggguggucgugcugagcuucgagcuccugcacgcccccgccacggugugcggccccaagaaguccaccaaccuggucaagaacaagugcgugaacuucaacuucaacggccucaccgggaccggcgugcugaccgagagcaacaagaaguuccugccguuccagcaguucgggcgcgacaucgccgacacgaccgacgcgguccgcgacccccagacccuggagauccucgacaucacccccugcagcuucggcgggguguccgugaucacgccgggcaccaacaccagcaaccaggucgccgugcuguaccagggcgugaacugcaccgagguccccguggccauccacgccgaccagcugacgcccaccuggcggguguacuccaccggcagcaacgucuuccagacccgcgccgggugccucaucggcgcggagcacgugaacaacuccuacgagugcgacauccccaucggggccggcaucugcgccagcuaccagacgcagaccaacuccccgcggcgcgcccggagcguggcgucccagagcgucaucgccuacaccaugucccugggcgccgagaacagcgucgccuacuccaacaacagcaucgccauccccaccaacuucacgaucuccgugaccaccgagauccugcccgugagcaugaccaagacgagcgucgacugcaccauguacaucugcggggacuccaccgagugcagcaaccuccugcugcaguacggcuccuucugcacccagcucaaccgcgcgcugacggggaucgccguggagcaggacaagaacacccaggagguguucgcccaggucaagcagaucuacaagacgcccccgaucaaggacuucggcggguucaacuucagccagauccugcccgaccccuccaagcccagcaagcgguccuucaucgaggaccuccuguucaacaaggugacccuggccgacgccggcuucaucaagcaguacggcgacugccucggggacaucgcggcccgcgaccugaucugcgcccagaaguucaacggccugaccgugcucccgccccugcugaccgacgagaugaucgcccaguacaccagcgcccuccuggcggggaccaucacguccggcuggaccuucggggccggcgccgcccugcagauccccuucgcgaugcagauggccuaccgguucaacggcaucggggucacccagaacgugcucuacgagaaccagaagcugaucgccaaccaguucaacagcgccaucggcaagauccaggacucccugagcuccaccgccagcgcgcucgggaagcugcaggacguggucaaccagaacgcccaggcccugaacacgcucgugaagcagcuguccagcaacuucggcgccaucuccagcgugcugaacgacauccucucccgccuggacccgcccgaggccgaggugcagaucgaccggcugaucaccgggcgccuccagagccugcagaccuacgugacccagcagcugauccgggcggccgagauccgcgccagcgccaaccucgccgcgaccaagauguccgagugcguccugggccagagcaagcggguggacuucugcggcaagggguaccaccugauguccuucccccagagcgccccgcacggcguggucuuccuccacgugacguacguccccgcccaggagaagaacuucaccaccgcccccgcgaucugccacgacgggaaggcccacuucccccgcgagggcguguucguguccaacgggacccacugguucgucacgcagcggaacuucuacgagccgcagaucaucaccaccgacaacaccuucgugagcggcaacugcgacguggucaucggcaucgugaacaacacgguguacgacccccugcagcccgagcuggacuccuucaaggaggagcucgacaaguacuucaagaaccacaccagccccgacgucgaccugggggacaucuccggcaucaacgccagcguggugaacauccagaaggagaucgaccgccugaacgaggucgccaagaaccucaacgagucccugaucgaccugcaggagcucgggaaguacgagcaguacaucaaguggccgugguacaucuggcugggcuucaucgccggccugaucgcgaucgugauggugaccaucaugcucugcugcaugaccagcugcugcuccugccugaaggggugcugcagcugcggcuccugcugcaaguucgacgaggacgacagcgagcccguccugaagggggugaagcuccacuacacgugaggacuagucccuguucccagagcccacuuuuuuuucuuuuuuugaaauaaaauagccugucuuucagaucuaaaaaaaaaaaaaaaaaaaaaaaaaaaaaaaaaaaaaaaaaaaaaaaaaaaaaaaaaaaaaaaaaaaaaaaaaaaaaaaaaaaaaaaaaaaaaaaaaaaa

SEQ ID NO: 25068 - RNA, 4161 nt, Artificial Sequence
  SARS-CoV-2/Wuhan/WIV05/2019__EPI_ISL_402128 spike protein mRNA gc (1-1273)(K986P_V987P_H69del_V70del_Y453F_D614G_I692V_M1229I)
aggagagggcgcuuggcuugcaaggacccugagcugcggcauugaagcacacccaacccaacucgacugaagucagccucacugaaccggaucugagaaucuucucucucugggcuugccagggcucuccgaaccuagcuagcauccucuucaauuccaacuagaaagcuuaccauguucguguuccugguccuccugccccuggugagcucccagugcgugaaccucaccacccgcacgcagcugccgcccgccuacaccaacagcuucacccggggcgucuacuaccccgacaagguguuccgcuccagcgugcugcacuccacccaggaccucuuccugcccuucuucagcaacgucacgugguuccacgccaucuccgggaccaacggcaccaagcgguucgacaacccggugcugcccuucaacgacggggucuacuucgcgagcaccgagaaguccaacaucauccgcggcuggaucuucgggacgacccucgacagcaagacccagucccugcugaucgugaacaacgccaccaacguggucaucaaggugugcgaguuccaguucugcaacgaccccuuccucggcguguacuaccacaagaacaacaagagcuggauggaguccgaguuccgggucuacagcuccgccaacaacugcacguucgaguacgugagccagcccuuccugauggaccuggagggcaagcaggggaacuucaagaaccuccgcgaguucguguucaagaacaucgacggcuacuucaagaucuacuccaagcacaccccgaucaaccugguccgggaccugccccagggguucagcgcccucgagccccugguggaccugcccaucggcaucaacaucacccgcuuccagacccuccuggcccugcaccgguccuaccucacgccgggggacagcagcuccggcuggaccgcgggcgccgccgccuacuacgugggguaccugcagccccgcaccuuccugcucaaguacaacgagaacggcaccaucacggacgcggucgacugcgcccuggacccccugagcgagaccaagugcacccucaaguccuucaccguggagaaggggaucuaccagacgagcaacuuccgggugcagcccaccgaguccaucguccgcuucccgaacaucaccaaccugugccccuucggcgagguguucaacgccacccgguucgccagcgucuacgccuggaaccgcaagcggaucuccaacugcguggcggacuacagcgugcuguacaacuccgccagcuucuccacguucaagugcuacggcgucagccccaccaagcucaacgaccugugcuucaccaacguguacgccgacuccuucgugauccgcggggacgagguccggcagaucgcccccggccagaccgggaagaucgccgacuacaacuacaagcugccggacgacuucacgggcugcgugaucgcguggaacagcaacaaccucgacuccaaggucgggggcaacuacaacuaccuguuccgccuguuccgcaagagcaaccucaagcccuucgagcgggacaucuccaccgagaucuaccaggccggcagcacccccugcaacgggguggagggcuucaacugcuacuucccccugcaguccuacggguuccagccgaccaacggcgugggguaccagcccuaccggguggucgugcugagcuucgagcuccugcacgcccccgccacggugugcggccccaagaaguccaccaaccuggucaagaacaagugcgugaacuucaacuucaacggccucaccgggaccggcgugcugaccgagagcaacaagaaguuccugccguuccagcaguucgggcgcgacaucgccgacacgaccgacgcgguccgcgacccccagacccuggagauccucgacaucacccccugcagcuucggcgggguguccgugaucacgccgggcaccaacaccagcaaccaggucgccgugcuguaccagggcgugaacugcaccgagguccccguggccauccacgccgaccagcugacgcccaccuggcggguguacuccaccggcagcaacgucuuccagacccgcgccgggugccucaucggcgcggagcacgugaacaacuccuacgagugcgacauccccaucggggccggcaucugcgccagcuaccagacgcagaccaacuccccgcggcgcgcccggagcguggcgucccagagcgugaucgccuacaccaugucccugggcgccgagaacagcgucgccuacuccaacaacagcaucgccauccccaccaacuucacgaucuccgugaccaccgagauccugcccgugagcaugaccaagacgagcgucgacugcaccauguacaucugcggggacuccaccgagugcagcaaccuccugcugcaguacggcuccuucugcacccagcucaaccgcgcgcugacggggaucgccguggagcaggacaagaacacccaggagguguucgcccaggucaagcagaucuacaagacgcccccgaucaaggacuucggcggguucaacuucagccagauccugcccgaccccuccaagcccagcaagcgguccuucaucgaggaccuccuguucaacaaggugacccuggccgacgccggcuucaucaagcaguacggcgacugccucggggacaucgcggcccgcgaccugaucugcgcccagaaguucaacggccugaccgugcucccgccccugcugaccgacgagaugaucgcccaguacaccagcgcccuccuggcggggaccaucacguccggcuggaccuucggggccggcgccgcccugcagauccccuucgcgaugcagauggccuaccgguucaacggcaucggggucacccagaacgugcucuacgagaaccagaagcugaucgccaaccaguucaacagcgccaucggcaagauccaggacucccugagcuccaccgccagcgcgcucgggaagcugcaggacguggucaaccagaacgcccaggcccugaacacgcucgugaagcagcuguccagcaacuucggcgccaucuccagcgugcugaacgacauccucucccgccuggacccgcccgaggccgaggugcagaucgaccggcugaucaccgggcgccuccagagccugcagaccuacgugacccagcagcugauccgggcggccgagauccgcgccagcgccaaccucgccgcgaccaagauguccgagugcguccugggccagagcaagcggguggacuucugcggcaagggguaccaccugauguccuucccccagagcgccccgcacggcguggucuuccuccacgugacguacguccccgcccaggagaagaacuucaccaccgcccccgcgaucugccacgacgggaaggcccacuucccccgcgagggcguguucguguccaacgggacccacugguucgucacgcagcggaacuucuacgagccgcagaucaucaccaccgacaacaccuucgugagcggcaacugcgacguggucaucggcaucgugaacaacacgguguacgacccccugcagcccgagcuggacuccuucaaggaggagcucgacaaguacuucaagaaccacaccagccccgacgucgaccugggggacaucuccggcaucaacgccagcguggugaacauccagaaggagaucgaccgccugaacgaggucgccaagaaccucaacgagucccugaucgaccugcaggagcucgggaaguacgagcaguacaucaaguggccgugguacaucuggcugggcuucaucgccggccugaucgcgaucgugaucgugaccaucaugcucugcugcaugaccagcugcugcuccugccugaaggggugcugcagcugcggcuccugcugcaaguucgacgaggacgacagcgagcccguccugaagggggugaagcuccacuacacgugaggacuagucccuguucccagagcccacuuuuuuuucuuuuuuugaaauaaaauagccugucuuucagaucuaaaaaaaaaaaaaaaaaaaaaaaaaaaaaaaaaaaaaaaaaaaaaaaaaaaaaaaaaaaaaaaaaaaaaaaaaaaaaaaaaaaaaaaaaaaaaaaaaaaa

SEQ ID NO: 25069 - RNA, 4158 nt, Artificial Sequence
  SARS-CoV-2/Wuhan/WIV05/2019__EPI_ISL_402128 spike protein mRNA gc (1-1273)(K986P_V987P_K986P_V987P_H69del_V70del_Y144del_N501Y_A570 D_D614G_P681H_T716I_S982A_D1118H)
aggagagggcgcuuggcuugcaaggacccugagcugcggcauugaagcacacccaacccaacucgacugaagucagccucacugaaccggaucugagaaucuucucucucugggcuugccagggcucuccgaaccuagcuagcauccucuucaauuccaacuagaaagcuuaccauguucguguuccugguccuccugccccuggugagcucccagugcgugaaccucaccacccgcacgcagcugccgcccgccuacaccaacagcuucacccggggcgucuacuaccccgacaagguguuccgcuccagcgugcugcacuccacccaggaccucuuccugcccuucuucagcaacgucacgugguuccacgccaucuccgggaccaacggcaccaagcgguucgacaacccggugcugcccuucaacgacggggucuacuucgcgagcaccgagaaguccaacaucauccgcggcuggaucuucgggacgacccucgacagcaagacccagucccugcugaucgugaacaacgccaccaacguggucaucaaggugugcgaguuccaguucugcaacgaccccuuccucggcguguaccacaagaacaacaagagcuggauggaguccgaguuccgggucuacagcuccgccaacaacugcacguucgaguacgugagccagcccuuccugauggaccuggagggcaagcaggggaacuucaagaaccuccgcgaguucguguucaagaacaucgacggcuacuucaagaucuacuccaagcacaccccgaucaaccugguccgggaccugccccagggguucagcgcccucgagccccugguggaccugcccaucggcaucaacaucacccgcuuccagacccuccuggcccugcaccgguccuaccucacgccgggggacagcagcuccggcuggaccgcgggcgccgccgccuacuacgugggguaccugcagccccgcaccuuccugcucaaguacaacgagaacggcaccaucacggacgcggucgacugcgcccuggacccccugagcgagaccaagugcacccucaaguccuucaccguggagaaggggaucuaccagacgagcaacuuccgggugcagcccaccgaguccaucguccgcuucccgaacaucaccaaccugugccccuucggcgagguguucaacgccacccgguucgccagcgucuacgccuggaaccgcaagcggaucuccaacugcguggcggacuacagcgugcuguacaacuccgccagcuucuccacguucaagugcuacggcgucagccccaccaagcucaacgaccugugcuucaccaacguguacgccgacuccuucgugauccgcggggacgagguccggcagaucgcccccggccagaccgggaagaucgccgacuacaacuacaagcugccggacgacuucacgggcugcgugaucgcguggaacagcaacaaccucgacuccaaggucgggggcaacuacaacuaccuguaccgccuguuccgcaagagcaaccucaagcccuucgagcgggacaucuccaccgagaucuaccaggccggcagcacccccugcaacgggguggagggcuucaacugcuacuucccccugcaguccuacggguuccagccgaccuacggcgugggguaccagcccuaccggguggucgugcugagcuucgagcuccugcacgcccccgccacggugugcggccccaagaaguccaccaaccuggucaagaacaagugcgugaacuucaacuucaacggccucaccgggaccggcgugcugaccgagagcaacaagaaguuccugccguuccagcaguucgggcgcgacaucgacgacacgaccgacgcgguccgcgacccccagacccuggagauccucgacaucacccccugcagcuucggcgggguguccgugaucacgccgggcaccaacaccagcaaccaggucgccgugcuguaccagggcgugaacugcaccgagguccccguggccauccacgccgaccagcugacgcccaccuggcggguguacuccaccggcagcaacgucuuccagacccgcgccgggugccucaucggcgcggagcacgugaacaacuccuacgagugcgacauccccaucggggccggcaucugcgccagcuaccagacgcagaccaacucccaccggcgcgcccggagcguggcgucccagagcaucaucgccuacaccaugucccugggcgccgagaacagcgucgccuacuccaacaacagcaucgccauccccaucaacuucacgaucuccgugaccaccgagauccugcccgugagcaugaccaagacgagcgucgacugcaccauguacaucugcggggacuccaccgagugcagcaaccuccugcugcaguacggcuccuucugcacccagcucaaccgcgcgcugacggggaucgccguggagcaggacaagaacacccaggagguguucgcccaggucaagcagaucuacaagacgcccccgaucaaggacuucggcggguucaacuucagccagauccugcccgaccccuccaagcccagcaagcgguccuucaucgaggaccuccuguucaacaaggugacccuggccgacgccggcuucaucaagcaguacggcgacugccucggggacaucgcggcccgcgaccugaucugcgcccagaaguucaacggccugaccgugcucccgccccugcugaccgacgagaugaucgcccaguacaccagcgcccuccuggcggggaccaucacguccggcuggaccuucggggccggcgccgcccugcagauccccuucgcgaugcagauggccuaccgguucaacggcaucggggucacccagaacgugcucuacgagaaccagaagcugaucgccaaccaguucaacagcgccaucggcaagauccaggacucccugagcuccaccgccagcgcgcucgggaagcugcaggacguggucaaccagaacgcccaggcccugaacacgcucgugaagcagcuguccagcaacuucggcgccaucuccagcgugcugaacgacauccucgcccgccuggacccgcccgaggccgaggugcagaucgaccggcugaucaccgggcgccuccagagccugcagaccuacgugacccagcagcugauccgggcggccgagauccgcgccagcgccaaccucgccgcgaccaagauguccgagugcguccugggccagagcaagcggguggacuucugcggcaagggguaccaccugauguccuucccccagagcgccccgcacggcguggucuuccuccacgugacguacguccccgcccaggagaagaacuucaccaccgcccccgcgaucugccacgacgggaaggcccacuucccccgcgagggcguguucguguccaacgggacccacugguucgucacgcagcggaacuucuacgagccgcagaucaucaccacccacaacaccuucgugagcggcaacugcgacguggucaucggcaucgugaacaacacgguguacgacccccugcagcccgagcuggacuccuucaaggaggagcucgacaaguacuucaagaaccacaccagccccgacgucgaccugggggacaucuccggcaucaacgccagcguggugaacauccagaaggagaucgaccgccugaacgaggucgccaagaaccucaacgagucccugaucgaccugcaggagcucgggaaguacgagcaguacaucaaguggccgugguacaucuggcugggcuucaucgccggccugaucgcgaucgugauggugaccaucaugcucugcugcaugaccagcugcugcuccugccugaaggggugcugcagcugcggcuccugcugcaaguucgacgaggacgacagcgagcccguccugaagggggugaagcuccacuacacgugaggacuagucccuguucccagagcccacuuuuuuuucuuuuuuugaaauaaaauagccugucuuucagaucuaaaaaaaaaaaaaaaaaaaaaaaaaaaaaaaaaaaaaaaaaaaaaaaaaaaaaaaaaaaaaaaaaaaaaaaaaaaaaaaaaaaaaaaaaaaaaaaaaaaa

SEQ ID NO: 25070 - RNA, 4167 nt, Artificial Sequence
  SARS-CoV-2/Wuhan/WIV05/2019__EPI_ISL_402128 spike protein mRNA gc (1-1273)(K986P_V987P_K986P_V987P_K417N_E484K_N501Y_D614G)
aggagagggcgcuuggcuugcaaggacccugagcugcggcauugaagcacacccaacccaacucgacugaagucagccucacugaaccggaucugagaaucuucucucucugggcuugccagggcucuccgaaccuagcuagcauccucuucaauuccaacuagaaagcuuaccauguucguguuccugguccuccugccccuggugagcucccagugcgugaaccucaccacccgcacgcagcugccgcccgccuacaccaacagcuucacccggggcgucuacuaccccgacaagguguuccgcuccagcgugcugcacuccacccaggaccucuuccugcccuucuucagcaacgucacgugguuccacgccauccacguguccgggaccaacggcaccaagcgguucgacaacccggugcugcccuucaacgacggggucuacuucgcgagcaccgagaaguccaacaucauccgcggcuggaucuucgggacgacccucgacagcaagacccagucccugcugaucgugaacaacgccaccaacguggucaucaaggugugcgaguuccaguucugcaacgaccccuuccucggcguguacuaccacaagaacaacaagagcuggauggaguccgaguuccgggucuacagcuccgccaacaacugcacguucgaguacgugagccagcccuuccugauggaccuggagggcaagcaggggaacuucaagaaccuccgcgaguucguguucaagaacaucgacggcuacuucaagaucuacuccaagcacaccccgaucaaccugguccgggaccugccccagggguucagcgcccucgagccccugguggaccugcccaucggcaucaacaucacccgcuuccagacccuccuggcccugcaccgguccuaccucacgccgggggacagcagcuccggcuggaccgcgggcgccgccgccuacuacgugggguaccugcagccccgcaccuuccugcucaaguacaacgagaacggcaccaucacggacgcggucgacugcgcccuggacccccugagcgagaccaagugcacccucaaguccuucaccguggagaaggggaucuaccagacgagcaacuuccgggugcagcccaccgaguccaucguccgcuucccgaacaucaccaaccugugccccuucggcgagguguucaacgccacccgguucgccagcgucuacgccuggaaccgcaagcggaucuccaacugcguggcggacuacagcgugcuguacaacuccgccagcuucuccacguucaagugcuacggcgucagccccaccaagcucaacgaccugugcuucaccaacguguacgccgacuccuucgugauccgcggggacgagguccggcagaucgcccccggccagaccgggaacaucgccgacuacaacuacaagcugccggacgacuucacgggcugcgugaucgcguggaacagcaacaaccucgacuccaaggucgggggcaacuacaacuaccuguaccgccuguuccgcaagagcaaccucaagcccuucgagcgggacaucuccaccgagaucuaccaggccggcagcacccccugcaacggggugaagggcuucaacugcuacuucccccugcaguccuacggguuccagccgaccuacggcgugggguaccagcccuaccggguggucgugcugagcuucgagcuccugcacgcccccgccacggugugcggccccaagaaguccaccaaccuggucaagaacaagugcgugaacuucaacuucaacggccucaccgggaccggcgugcugaccgagagcaacaagaaguuccugccguuccagcaguucgggcgcgacaucgccgacacgaccgacgcgguccgcgacccccagacccuggagauccucgacaucacccccugcagcuucggcgggguguccgugaucacgccgggcaccaacaccagcaaccaggucgccgugcuguaccagggcgugaacugcaccgagguccccguggccauccacgccgaccagcugacgcccaccuggcggguguacuccaccggcagcaacgucuuccagacccgcgccgggugccucaucggcgcggagcacgugaacaacuccuacgagugcgacauccccaucggggccggcaucugcgccagcuaccagacgcagaccaacuccccgcggcgcgcccggagcguggcgucccagagcaucaucgccuacaccaugucccugggcgccgagaacagcgucgccuacuccaacaacagcaucgccauccccaccaacuucacgaucuccgugaccaccgagauccugcccgugagcaugaccaagacgagcgucgacugcaccauguacaucugcggggacuccaccgagugcagcaaccuccugcugcaguacggcuccuucugcacccagcucaaccgcgcgcugacggggaucgccguggagcaggacaagaacacccaggagguguucgcccaggucaagcagaucuacaagacgcccccgaucaaggacuucggcggguucaacuucagccagauccugcccgaccccuccaagcccagcaagcgguccuucaucgaggaccuccuguucaacaaggugacccuggccgacgccggcuucaucaagcaguacggcgacugccucggggacaucgcggcccgcgaccugaucugcgcccagaaguucaacggccugaccgugcucccgccccugcugaccgacgagaugaucgcccaguacaccagcgcccuccuggcggggaccaucacguccggcuggaccuucggggccggcgccgcccugcagauccccuucgcgaugcagauggccuaccgguucaacggcaucggggucacccagaacgugcucuacgagaaccagaagcugaucgccaaccaguucaacagcgccaucggcaagauccaggacucccugagcuccaccgccagcgcgcucgggaagcugcaggacguggucaaccagaacgcccaggcccugaacacgcucgugaagcagcuguccagcaacuucggcgccaucuccagcgugcugaacgacauccucucccgccuggacccgcccgaggccgaggugcagaucgaccggcugaucaccgggcgccuccagagccugcagaccuacgugacccagcagcugauccgggcggccgagauccgcgccagcgccaaccucgccgcgaccaagauguccgagugcguccugggccagagcaagcggguggacuucugcggcaagggguaccaccugauguccuucccccagagcgccccgcacggcguggucuuccuccacgugacguacguccccgcccaggagaagaacuucaccaccgcccccgcgaucugccacgacgggaaggcccacuucccccgcgagggcguguucguguccaacgggacccacugguucgucacgcagcggaacuucuacgagccgcagaucaucaccaccgacaacaccuucgugagcggcaacugcgacguggucaucggcaucgugaacaacacgguguacgacccccugcagcccgagcuggacuccuucaaggaggagcucgacaaguacuucaagaaccacaccagccccgacgucgaccugggggacaucuccggcaucaacgccagcguggugaacauccagaaggagaucgaccgccugaacgaggucgccaagaaccucaacgagucccugaucgaccugcaggagcucgggaaguacgagcaguacaucaaguggccgugguacaucuggcugggcuucaucgccggccugaucgcgaucgugauggugaccaucaugcucugcugcaugaccagcugcugcuccugccugaaggggugcugcagcugcggcuccugcugcaaguucgacgaggacgacagcgagcccguccugaagggggugaagcuccacuacacgugaggacuagucccuguucccagagcccacuuuuuuuucuuuuuuugaaauaaaauagccugucuuucagaucuaaaaaaaaaaaaaaaaaaaaaaaaaaaaaaaaaaaaaaaaaaaaaaaaaaaaaaaaaaaaaaaaaaaaaaaaaaaaaaaaaaaaaaaaaaaaaaaaaaaa

SEQ ID NO: 25071 - RNA, 4158 nt, Artificial Sequence
  SARS-CoV-2/Wuhan/WIV05/2019__EPI_ISL_402128 spike protein mRNA gc (1-1273)(K986P_V987P_K986P_V987P_L18F_D80A_D215G_L242del_A243del_ L244del_R246I_K417N_E484K_N501Y_D614G_A701V)
aggagagggcgcuuggcuugcaaggacccugagcugcggcauugaagcacacccaacccaacucgacugaagucagccucacugaaccggaucugagaaucuucucucucugggcuugccagggcucuccgaaccuagcuagcauccucuucaauuccaacuagaaagcuuaccauguucguguuccugguccuccugccccuggugagcucccagugcgugaacuucaccacccgcacgcagcugccgcccgccuacaccaacagcuucacccggggcgucuacuaccccgacaagguguuccgcuccagcgugcugcacuccacccaggaccucuuccugcccuucuucagcaacgucacgugguuccacgccauccacguguccgggaccaacggcaccaagcgguucgccaacccggugcugcccuucaacgacggggucuacuucgcgagcaccgagaaguccaacaucauccgcggcuggaucuucgggacgacccucgacagcaagacccagucccugcugaucgugaacaacgccaccaacguggucaucaaggugugcgaguuccaguucugcaacgaccccuuccucggcguguacuaccacaagaacaacaagagcuggauggaguccgaguuccgggucuacagcuccgccaacaacugcacguucgaguacgugagccagcccuuccugauggaccuggagggcaagcaggggaacuucaagaaccuccgcgaguucguguucaagaacaucgacggcuacuucaagaucuacuccaagcacaccccgaucaaccugguccggggccugccccagggguucagcgcccucgagccccugguggaccugcccaucggcaucaacaucacccgcuuccagacccuccacaucuccuaccucacgccgggggacagcagcuccggcuggaccgcgggcgccgccgccuacuacgugggguaccugcagccccgcaccuuccugcucaaguacaacgagaacggcaccaucacggacgcggucgacugcgcccuggacccccugagcgagaccaagugcacccucaaguccuucaccguggagaaggggaucuaccagacgagcaacuuccgggugcagcccaccgaguccaucguccgcuucccgaacaucaccaaccugugccccuucggcgagguguucaacgccacccgguucgccagcgucuacgccuggaaccgcaagcggaucuccaacugcguggcggacuacagcgugcuguacaacuccgccagcuucuccacguucaagugcuacggcgucagccccaccaagcucaacgaccugugcuucaccaacguguacgccgacuccuucgugauccgcggggacgagguccggcagaucgcccccggccagaccgggaacaucgccgacuacaacuacaagcugccggacgacuucacgggcugcgugaucgcguggaacagcaacaaccucgacuccaaggucgggggcaacuacaacuaccuguaccgccuguuccgcaagagcaaccucaagcccuucgagcgggacaucuccaccgagaucuaccaggccggcagcacccccugcaacggggugaagggcuucaacugcuacuucccccugcaguccuacggguuccagccgaccuacggcgugggguaccagcccuaccggguggucgugcugagcuucgagcuccugcacgcccccgccacggugugcggccccaagaaguccaccaaccuggucaagaacaagugcgugaacuucaacuucaacggccucaccgggaccggcgugcugaccgagagcaacaagaaguuccugccguuccagcaguucgggcgcgacaucgccgacacgaccgacgcgguccgcgacccccagacccuggagauccucgacaucacccccugcagcuucggcgggguguccgugaucacgccgggcaccaacaccagcaaccaggucgccgugcuguaccagggcgugaacugcaccgagguccccguggccauccacgccgaccagcugacgcccaccuggcggguguacuccaccggcagcaacgucuuccagacccgcgccgggugccucaucggcgcggagcacgugaacaacuccuacgagugcgacauccccaucggggccggcaucugcgccagcuaccagacgcagaccaacuccccgcggcgcgcccggagcguggcgucccagagcaucaucgccuacaccaugucccugggcguggagaacagcgucgccuacuccaacaacagcaucgccauccccaccaacuucacgaucuccgugaccaccgagauccugcccgugagcaugaccaagacgagcgucgacugcaccauguacaucugcggggacuccaccgagugcagcaaccuccugcugcaguacggcuccuucugcacccagcucaaccgcgcgcugacggggaucgccguggagcaggacaagaacacccaggagguguucgcccaggucaagcagaucuacaagacgcccccgaucaaggacuucggcggguucaacuucagccagauccugcccgaccccuccaagcccagcaagcgguccuucaucgaggaccuccuguucaacaaggugacccuggccgacgccggcuucaucaagcaguacggcgacugccucggggacaucgcggcccgcgaccugaucugcgcccagaaguucaacggccugaccgugcucccgccccugcugaccgacgagaugaucgcccaguacaccagcgcccuccuggcggggaccaucacguccggcuggaccuucggggccggcgccgcccugcagauccccuucgcgaugcagauggccuaccgguucaacggcaucggggucacccagaacgugcucuacgagaaccagaagcugaucgccaaccaguucaacagcgccaucggcaagauccaggacucccugagcuccaccgccagcgcgcucgggaagcugcaggacguggucaaccagaacgcccaggcccugaacacgcucgugaagcagcuguccagcaacuucggcgccaucuccagcgugcugaacgacauccucucccgccuggacccgcccgaggccgaggugcagaucgaccggcugaucaccgggcgccuccagagccugcagaccuacgugacccagcagcugauccgggcggccgagauccgcgccagcgccaaccucgccgcgaccaagauguccgagugcguccugggccagagcaagcggguggacuucugcggcaagggguaccaccugauguccuucccccagagcgccccgcacggcguggucuuccuccacgugacguacguccccgcccaggagaagaacuucaccaccgcccccgcgaucugccacgacgggaaggcccacuucccccgcgagggcguguucguguccaacgggacccacugguucgucacgcagcggaacuucuacgagccgcagaucaucaccaccgacaacaccuucgugagcggcaacugcgacguggucaucggcaucgugaacaacacgguguacgacccccugcagcccgagcuggacuccuucaaggaggagcucgacaaguacuucaagaaccacaccagccccgacgucgaccugggggacaucuccggcaucaacgccagcguggugaacauccagaaggagaucgaccgccugaacgaggucgccaagaaccucaacgagucccugaucgaccugcaggagcucgggaaguacgagcaguacaucaaguggccgugguacaucuggcugggcuucaucgccggccugaucgcgaucgugauggugaccaucaugcucugcugcaugaccagcugcugcuccugccugaaggggugcugcagcugcggcuccugcugcaaguucgacgaggacgacagcgagcccguccugaagggggugaagcuccacuacacgugaggacuagucccuguucccagagcccacuuuuuuuucuuuuuuugaaauaaaauagccugucuuucagaucuaaaaaaaaaaaaaaaaaaaaaaaaaaaaaaaaaaaaaaaaaaaaaaaaaaaaaaaaaaaaaaaaaaaaaaaaaaaaaaaaaaaaaaaaaaaaaaaaaaaa

SEQ ID NO: 25072 - RNA, 4167 nt, Artificial Sequence
  SARS-CoV-2/Wuhan/WIV05/2019__EPI_ISL_402128 spike protein mRNA gc (1-1273)(K986P_V987P_K986P_V987P_E484K_D614G)
aggagagggcgcuuggcuugcaaggacccugagcugcggcauugaagcacacccaacccaacucgacugaagucagccucacugaaccggaucugagaaucuucucucucugggcuugccagggcucuccgaaccuagcuagcauccucuucaauuccaacuagaaagcuuaccauguucguguuccugguccuccugccccuggugagcucccagugcgugaaccucaccacccgcacgcagcugccgcccgccuacaccaacagcuucacccggggcgucuacuaccccgacaagguguuccgcuccagcgugcugcacuccacccaggaccucuuccugcccuucuucagcaacgucacgugguuccacgccauccacguguccgggaccaacggcaccaagcgguucgacaacccggugcugcccuucaacgacggggucuacuucgcgagcaccgagaaguccaacaucauccgcggcuggaucuucgggacgacccucgacagcaagacccagucccugcugaucgugaacaacgccaccaacguggucaucaaggugugcgaguuccaguucugcaacgaccccuuccucggcguguacuaccacaagaacaacaagagcuggauggaguccgaguuccgggucuacagcuccgccaacaacugcacguucgaguacgugagccagcccuuccugauggaccuggagggcaagcaggggaacuucaagaaccuccgcgaguucguguucaagaacaucgacggcuacuucaagaucuacuccaagcacaccccgaucaaccugguccgggaccugccccagggguucagcgcccucgagccccugguggaccugcccaucggcaucaacaucacccgcuuccagacccuccuggcccugcaccgguccuaccucacgccgggggacagcagcuccggcuggaccgcgggcgccgccgccuacuacgugggguaccugcagccccgcaccuuccugcucaaguacaacgagaacggcaccaucacggacgcggucgacugcgcccuggacccccugagcgagaccaagugcacccucaaguccuucaccguggagaaggggaucuaccagacgagcaacuuccgggugcagcccaccgaguccaucguccgcuucccgaacaucaccaaccugugccccuucggcgagguguucaacgccacccgguucgccagcgucuacgccuggaaccgcaagcggaucuccaacugcguggcggacuacagcgugcuguacaacuccgccagcuucuccacguucaagugcuacggcgucagccccaccaagcucaacgaccugugcuucaccaacguguacgccgacuccuucgugauccgcggggacgagguccggcagaucgcccccggccagaccgggaagaucgccgacuacaacuacaagcugccggacgacuucacgggcugcgugaucgcguggaacagcaacaaccucgacuccaaggucgggggcaacuacaacuaccuguaccgccuguuccgcaagagcaaccucaagcccuucgagcgggacaucuccaccgagaucuaccaggccggcagcacccccugcaacggggugaagggcuucaacugcuacuucccccugcaguccuacggguuccagccgaccaacggcgugggguaccagcccuaccggguggucgugcugagcuucgagcuccugcacgcccccgccacggugugcggccccaagaaguccaccaaccuggucaagaacaagugcgugaacuucaacuucaacggccucaccgggaccggcgugcugaccgagagcaacaagaaguuccugccguuccagcaguucgggcgcgacaucgccgacacgaccgacgcgguccgcgacccccagacccuggagauccucgacaucacccccugcagcuucggcgggguguccgugaucacgccgggcaccaacaccagcaaccaggucgccgugcuguaccagggcgugaacugcaccgagguccccguggccauccacgccgaccagcugacgcccaccuggcggguguacuccaccggcagcaacgucuuccagacccgcgccgggugccucaucggcgcggagcacgugaacaacuccuacgagugcgacauccccaucggggccggcaucugcgccagcuaccagacgcagaccaacuccccgcggcgcgcccggagcguggcgucccagagcaucaucgccuacaccaugucccugggcgccgagaacagcgucgccuacuccaacaacagcaucgccauccccaccaacuucacgaucuccgugaccaccgagauccugcccgugagcaugaccaagacgagcgucgacugcaccauguacaucugcggggacuccaccgagugcagcaaccuccugcugcaguacggcuccuucugcacccagcucaaccgcgcgcugacggggaucgccguggagcaggacaagaacacccaggagguguucgcccaggucaagcagaucuacaagacgcccccgaucaaggacuucggcggguucaacuucagccagauccugcccgaccccuccaagcccagcaagcgguccuucaucgaggaccuccuguucaacaaggugacccuggccgacgccggcuucaucaagcaguacggcgacugccucggggacaucgcggcccgcgaccugaucugcgcccagaaguucaacggccugaccgugcucccgccccugcugaccgacgagaugaucgcccaguacaccagcgcccuccuggcggggaccaucacguccggcuggaccuucggggccggcgccgcccugcagauccccuucgcgaugcagauggccuaccgguucaacggcaucggggucacccagaacgugcucuacgagaaccagaagcugaucgccaaccaguucaacagcgccaucggcaagauccaggacucccugagcuccaccgccagcgcgcucgggaagcugcaggacguggucaaccagaacgcccaggcccugaacacgcucgugaagcagcuguccagcaacuucggcgccaucuccagcgugcugaacgacauccucucccgccuggacccgcccgaggccgaggugcagaucgaccggcugaucaccgggcgccuccagagccugcagaccuacgugacccagcagcugauccgggcggccgagauccgcgccagcgccaaccucgccgcgaccaagauguccgagugcguccugggccagagcaagcggguggacuucugcggcaagggguaccaccugauguccuucccccagagcgccccgcacggcguggucuuccuccacgugacguacguccccgcccaggagaagaacuucaccaccgcccccgcgaucugccacgacgggaaggcccacuucccccgcgagggcguguucguguccaacgggacccacugguucgucacgcagcggaacuucuacgagccgcagaucaucaccaccgacaacaccuucgugagcggcaacugcgacguggucaucggcaucgugaacaacacgguguacgacccccugcagcccgagcuggacuccuucaaggaggagcucgacaaguacuucaagaaccacaccagccccgacgucgaccugggggacaucuccggcaucaacgccagcguggugaacauccagaaggagaucgaccgccugaacgaggucgccaagaaccucaacgagucccugaucgaccugcaggagcucgggaaguacgagcaguacaucaaguggccgugguacaucuggcugggcuucaucgccggccugaucgcgaucgugauggugaccaucaugcucugcugcaugaccagcugcugcuccugccugaaggggugcugcagcugcggcuccugcugcaaguucgacgaggacgacagcgagcccguccugaagggggugaagcuccacuacacgugaggacuagucccuguucccagagcccacuuuuuuuucuuuuuuugaaauaaaauagccugucuuucagaucuaaaaaaaaaaaaaaaaaaaaaaaaaaaaaaaaaaaaaaaaaaaaaaaaaaaaaaaaaaaaaaaaaaaaaaaaaaaaaaaaaaaaaaaaaaaaaaaaaaaa

SEQ ID NO: 25073 - RNA, 4167 nt, Artificial Sequence
  SARS-CoV-2/Wuhan/WIV05/2019__EPI_ISL_402128 spike protein mRNA gc (1-1273)(K986P_V987P_K986P_V987P_L18F_T20N_P26S_D138Y_R190S_K417T _E484K_N501Y_D614G_H655Y_T1027I)
aggagagggcgcuuggcuugcaaggacccugagcugcggcauugaagcacacccaacccaacucgacugaagucagccucacugaaccggaucugagaaucuucucucucugggcuugccagggcucuccgaaccuagcuagcauccucuucaauuccaacuagaaagcuuaccauguucguguuccugguccuccugccccuggugagcucccagugcgugaacuucaccaaccgcacgcagcugccgagcgccuacaccaacagcuucacccggggcgucuacuaccccgacaagguguuccgcuccagcgugcugcacuccacccaggaccucuuccugcccuucuucagcaacgucacgugguuccacgccauccacguguccgggaccaacggcaccaagcgguucgacaacccggugcugcccuucaacgacggggucuacuucgcgagcaccgagaaguccaacaucauccgcggcuggaucuucgggacgacccucgacagcaagacccagucccugcugaucgugaacaacgccaccaacguggucaucaaggugugcgaguuccaguucugcaacuaccccuuccucggcguguacuaccacaagaacaacaagagcuggauggaguccgaguuccgggucuacagcuccgccaacaacugcacguucgaguacgugagccagcccuuccugauggaccuggagggcaagcaggggaacuucaagaaccucagcgaguucguguucaagaacaucgacggcuacuucaagaucuacuccaagcacaccccgaucaaccugguccgggaccugccccagggguucagcgcccucgagccccugguggaccugcccaucggcaucaacaucacccgcuuccagacccuccuggcccugcaccgguccuaccucacgccgggggacagcagcuccggcuggaccgcgggcgccgccgccuacuacgugggguaccugcagccccgcaccuuccugcucaaguacaacgagaacggcaccaucacggacgcggucgacugcgcccuggacccccugagcgagaccaagugcacccucaaguccuucaccguggagaaggggaucuaccagacgagcaacuuccgggugcagcccaccgaguccaucguccgcuucccgaacaucaccaaccugugccccuucggcgagguguucaacgccacccgguucgccagcgucuacgccuggaaccgcaagcggaucuccaacugcguggcggacuacagcgugcuguacaacuccgccagcuucuccacguucaagugcuacggcgucagccccaccaagcucaacgaccugugcuucaccaacguguacgccgacuccuucgugauccgcggggacgagguccggcagaucgcccccggccagaccgggaccaucgccgacuacaacuacaagcugccggacgacuucacgggcugcgugaucgcguggaacagcaacaaccucgacuccaaggucgggggcaacuacaacuaccuguaccgccuguuccgcaagagcaaccucaagcccuucgagcgggacaucuccaccgagaucuaccaggccggcagcacccccugcaacggggugaagggcuucaacugcuacuucccccugcaguccuacggguuccagccgaccuacggcgugggguaccagcccuaccggguggucgugcugagcuucgagcuccugcacgcccccgccacggugugcggccccaagaaguccaccaaccuggucaagaacaagugcgugaacuucaacuucaacggccucaccgggaccggcgugcugaccgagagcaacaagaaguuccugccguuccagcaguucgggcgcgacaucgccgacacgaccgacgcgguccgcgacccccagacccuggagauccucgacaucacccccugcagcuucggcgggguguccgugaucacgccgggcaccaacaccagcaaccaggucgccgugcuguaccagggcgugaacugcaccgagguccccguggccauccacgccgaccagcugacgcccaccuggcggguguacuccaccggcagcaacgucuuccagacccgcgccgggugccucaucggcgcggaguacgugaacaacuccuacgagugcgacauccccaucggggccggcaucugcgccagcuaccagacgcagaccaacuccccgcggcgcgcccggagcguggcgucccagagcaucaucgccuacaccaugucccugggcgccgagaacagcgucgccuacuccaacaacagcaucgccauccccaccaacuucacgaucuccgugaccaccgagauccugcccgugagcaugaccaagacgagcgucgacugcaccauguacaucugcggggacuccaccgagugcagcaaccuccugcugcaguacggcuccuucugcacccagcucaaccgcgcgcugacggggaucgccguggagcaggacaagaacacccaggagguguucgcccaggucaagcagaucuacaagacgcccccgaucaaggacuucggcggguucaacuucagccagauccugcccgaccccuccaagcccagcaagcgguccuucaucgaggaccuccuguucaacaaggugacccuggccgacgccggcuucaucaagcaguacggcgacugccucggggacaucgcggcccgcgaccugaucugcgcccagaaguucaacggccugaccgugcucccgccccugcugaccgacgagaugaucgcccaguacaccagcgcccuccuggcggggaccaucacguccggcuggaccuucggggccggcgccgcccugcagauccccuucgcgaugcagauggccuaccgguucaacggcaucggggucacccagaacgugcucuacgagaaccagaagcugaucgccaaccaguucaacagcgccaucggcaagauccaggacucccugagcuccaccgccagcgcgcucgggaagcugcaggacguggucaaccagaacgcccaggcccugaacacgcucgugaagcagcuguccagcaacuucggcgccaucuccagcgugcugaacgacauccucucccgccuggacccgcccgaggccgaggugcagaucgaccggcugaucaccgggcgccuccagagccugcagaccuacgugacccagcagcugauccgggcggccgagauccgcgccagcgccaaccucgccgcgaucaagauguccgagugcguccugggccagagcaagcggguggacuucugcggcaagggguaccaccugauguccuucccccagagcgccccgcacggcguggucuuccuccacgugacguacguccccgcccaggagaagaacuucaccaccgcccccgcgaucugccacgacgggaaggcccacuucccccgcgagggcguguucguguccaacgggacccacugguucgucacgcagcggaacuucuacgagccgcagaucaucaccaccgacaacaccuucgugagcggcaacugcgacguggucaucggcaucgugaacaacacgguguacgacccccugcagcccgagcuggacuccuucaaggaggagcucgacaaguacuucaagaaccacaccagccccgacgucgaccugggggacaucuccggcaucaacgccagcguggugaacauccagaaggagaucgaccgccugaacgaggucgccaagaaccucaacgagucccugaucgaccugcaggagcucgggaaguacgagcaguacaucaaguggccgugguacaucuggcugggcuucaucgccggccugaucgcgaucgugauggugaccaucaugcucugcugcaugaccagcugcugcuccugccugaaggggugcugcagcugcggcuccugcugcaaguucgacgaggacgacagcgagcccguccugaagggggugaagcuccacuacacgugaggacuagucccuguucccagagcccacuuuuuuuucuuuuuuugaaauaaaauagccugucuuucagaucuaaaaaaaaaaaaaaaaaaaaaaaaaaaaaaaaaaaaaaaaaaaaaaaaaaaaaaaaaaaaaaaaaaaaaaaaaaaaaaaaaaaaaaaaaaaaaaaaaaaa

SEQ ID NO: 25074 - RNA, 4167 nt, Artificial Sequence
  SARS-CoV-2/Wuhan/WIV05/2019__EPI_ISL_402128 spike protein mRNA gc (1-1273)(K986P_V987P_K986P_V987P_S13I_W152C_L452R_D614G)
aggagagggcgcuuggcuugcaaggacccugagcugcggcauugaagcacacccaacccaacucgacugaagucagccucacugaaccggaucugagaaucuucucucucugggcuugccagggcucuccgaaccuagcuagcauccucuucaauuccaacuagaaagcuuaccauguucguguuccugguccuccugccccuggugagcauccagugcgugaaccucaccacccgcacgcagcugccgcccgccuacaccaacagcuucacccggggcgucuacuaccccgacaagguguuccgcuccagcgugcugcacuccacccaggaccucuuccugcccuucuucagcaacgucacgugguuccacgccauccacguguccgggaccaacggcaccaagcgguucgacaacccggugcugcccuucaacgacggggucuacuucgcgagcaccgagaaguccaacaucauccgcggcuggaucuucgggacgacccucgacagcaagacccagucccugcugaucgugaacaacgccaccaacguggucaucaaggugugcgaguuccaguucugcaacgaccccuuccucggcguguacuaccacaagaacaacaagagcugcauggaguccgaguuccgggucuacagcuccgccaacaacugcacguucgaguacgugagccagcccuuccugauggaccuggagggcaagcaggggaacuucaagaaccuccgcgaguucguguucaagaacaucgacggcuacuucaagaucuacuccaagcacaccccgaucaaccugguccgggaccugccccagggguucagcgcccucgagccccugguggaccugcccaucggcaucaacaucacccgcuuccagacccuccuggcccugcaccgguccuaccucacgccgggggacagcagcuccggcuggaccgcgggcgccgccgccuacuacgugggguaccugcagccccgcaccuuccugcucaaguacaacgagaacggcaccaucacggacgcggucgacugcgcccuggacccccugagcgagaccaagugcacccucaaguccuucaccguggagaaggggaucuaccagacgagcaacuuccgggugcagcccaccgaguccaucguccgcuucccgaacaucaccaaccugugccccuucggcgagguguucaacgccacccgguucgccagcgucuacgccuggaaccgcaagcggaucuccaacugcguggcggacuacagcgugcuguacaacuccgccagcuucuccacguucaagugcuacggcgucagccccaccaagcucaacgaccugugcuucaccaacguguacgccgacuccuucgugauccgcggggacgagguccggcagaucgcccccggccagaccgggaagaucgccgacuacaacuacaagcugccggacgacuucacgggcugcgugaucgcguggaacagcaacaaccucgacuccaaggucgggggcaacuacaacuaccgcuaccgccuguuccgcaagagcaaccucaagcccuucgagcgggacaucuccaccgagaucuaccaggccggcagcacccccugcaacgggguggagggcuucaacugcuacuucccccugcaguccuacggguuccagccgaccaacggcgugggguaccagcccuaccggguggucgugcugagcuucgagcuccugcacgcccccgccacggugugcggccccaagaaguccaccaaccuggucaagaacaagugcgugaacuucaacuucaacggccucaccgggaccggcgugcugaccgagagcaacaagaaguuccugccguuccagcaguucgggcgcgacaucgccgacacgaccgacgcgguccgcgacccccagacccuggagauccucgacaucacccccugcagcuucggcgggguguccgugaucacgccgggcaccaacaccagcaaccaggucgccgugcuguaccagggcgugaacugcaccgagguccccguggccauccacgccgaccagcugacgcccaccuggcggguguacuccaccggcagcaacgucuuccagacccgcgccgggugccucaucggcgcggagcacgugaacaacuccuacgagugcgacauccccaucggggccggcaucugcgccagcuaccagacgcagaccaacuccccgcggcgcgcccggagcguggcgucccagagcaucaucgccuacaccaugucccugggcgccgagaacagcgucgccuacuccaacaacagcaucgccauccccaccaacuucacgaucuccgugaccaccgagauccugcccgugagcaugaccaagacgagcgucgacugcaccauguacaucugcggggacuccaccgagugcagcaaccuccugcugcaguacggcuccuucugcacccagcucaaccgcgcgcugacggggaucgccguggagcaggacaagaacacccaggagguguucgcccaggucaagcagaucuacaagacgcccccgaucaaggacuucggcggguucaacuucagccagauccugcccgaccccuccaagcccagcaagcgguccuucaucgaggaccuccuguucaacaaggugacccuggccgacgccggcuucaucaagcaguacggcgacugccucggggacaucgcggcccgcgaccugaucugcgcccagaaguucaacggccugaccgugcucccgccccugcugaccgacgagaugaucgcccaguacaccagcgcccuccuggcggggaccaucacguccggcuggaccuucggggccggcgccgcccugcagauccccuucgcgaugcagauggccuaccgguucaacggcaucggggucacccagaacgugcucuacgagaaccagaagcugaucgccaaccaguucaacagcgccaucggcaagauccaggacucccugagcuccaccgccagcgcgcucgggaagcugcaggacguggucaaccagaacgcccaggcccugaacacgcucgugaagcagcuguccagcaacuucggcgccaucuccagcgugcugaacgacauccucucccgccuggacccgcccgaggccgaggugcagaucgaccggcugaucaccgggcgccuccagagccugcagaccuacgugacccagcagcugauccgggcggccgagauccgcgccagcgccaaccucgccgcgaccaagauguccgagugcguccugggccagagcaagcggguggacuucugcggcaagggguaccaccugauguccuucccccagagcgccccgcacggcguggucuuccuccacgugacguacguccccgcccaggagaagaacuucaccaccgcccccgcgaucugccacgacgggaaggcccacuucccccgcgagggcguguucguguccaacgggacccacugguucgucacgcagcggaacuucuacgagccgcagaucaucaccaccgacaacaccuucgugagcggcaacugcgacguggucaucggcaucgugaacaacacgguguacgacccccugcagcccgagcuggacuccuucaaggaggagcucgacaaguacuucaagaaccacaccagccccgacgucgaccugggggacaucuccggcaucaacgccagcguggugaacauccagaaggagaucgaccgccugaacgaggucgccaagaaccucaacgagucccugaucgaccugcaggagcucgggaaguacgagcaguacaucaaguggccgugguacaucuggcugggcuucaucgccggccugaucgcgaucgugauggugaccaucaugcucugcugcaugaccagcugcugcuccugccugaaggggugcugcagcugcggcuccugcugcaaguucgacgaggacgacagcgagcccguccugaagggggugaagcuccacuacacgugaggacuagucccuguucccagagcccacuuuuuuuucuuuuuuugaaauaaaauagccugucuuucagaucuaaaaaaaaaaaaaaaaaaaaaaaaaaaaaaaaaaaaaaaaaaaaaaaaaaaaaaaaaaaaaaaaaaaaaaaaaaaaaaaaaaaaaaaaaaaaaaaaaaaa

SEQ ID NO: 25075 - RNA, 4167 nt, Artificial Sequence
  SARS-CoV-2/Wuhan/WIV05/2019__EPI_ISL_402128 spike protein mRNA gc (1-1273)(K986P_V987P)
aggagagggcgcuuggcuugcaaggacccugagcugcggcauugaagcacacccaacccaacucgacugaagucagccucacugaaccggaucugagaaucuucucucucugggcuugccagggcucuccgaaccuagcuagcauccucuucaauuccaacuagaaagcuuaccauguucguguuccugguccuccugccccuggugagcucccagugcgugaaccucaccacccgcacgcagcugccgcccgccuacaccaacagcuucacccggggcgucuacuaccccgacaagguguuccgcuccagcgugcugcacuccacccaggaccucuuccugcccuucuucagcaacgucacgugguuccacgccauccacguguccgggaccaacggcaccaagcgguucgacaacccggugcugcccuucaacgacggggucuacuucgcgagcaccgagaaguccaacaucauccgcggcuggaucuucgggacgacccucgacagcaagacccagucccugcugaucgugaacaacgccaccaacguggucaucaaggugugcgaguuccaguucugcaacgaccccuuccucggcguguacuaccacaagaacaacaagagcuggauggaguccgaguuccgggucuacagcuccgccaacaacugcacguucgaguacgugagccagcccuuccugauggaccuggagggcaagcaggggaacuucaagaaccuccgcgaguucguguucaagaacaucgacggcuacuucaagaucuacuccaagcacaccccgaucaaccugguccgggaccugccccagggguucagcgcccucgagccccugguggaccugcccaucggcaucaacaucacccgcuuccagacccuccuggcccugcaccgguccuaccucacgccgggggacagcagcuccggcuggaccgcgggcgccgccgccuacuacgugggguaccugcagccccgcaccuuccugcucaaguacaacgagaacggcaccaucacggacgcggucgacugcgcccuggacccccugagcgagaccaagugcacccucaaguccuucaccguggagaaggggaucuaccagacgagcaacuuccgggugcagcccaccgaguccaucguccgcuucccgaacaucaccaaccugugccccuucggcgagguguucaacgccacccgguucgccagcgucuacgccuggaaccgcaagcggaucuccaacugcguggcggacuacagcgugcuguacaacuccgccagcuucuccacguucaagugcuacggcgucagccccaccaagcucaacgaccugugcuucaccaacguguacgccgacuccuucgugauccgcggggacgagguccggcagaucgcccccggccagaccgggaagaucgccgacuacaacuacaagcugccggacgacuucacgggcugcgugaucgcguggaacagcaacaaccucgacuccaaggucgggggcaacuacaacuaccuguaccgccuguuccgcaagagcaaccucaagcccuucgagcgggacaucuccaccgagaucuaccaggccggcagcacccccugcaacgggguggagggcuucaacugcuacuucccccugcaguccuacggguuccagccgaccaacggcgugggguaccagcccuaccggguggucgugcugagcuucgagcuccugcacgcccccgccacggugugcggccccaagaaguccaccaaccuggucaagaacaagugcgugaacuucaacuucaacggccucaccgggaccggcgugcugaccgagagcaacaagaaguuccugccguuccagcaguucgggcgcgacaucgccgacacgaccgacgcgguccgcgacccccagacccuggagauccucgacaucacccccugcagcuucggcgggguguccgugaucacgccgggcaccaacaccagcaaccaggucgccgugcuguaccaggacgugaacugcaccgagguccccguggccauccacgccgaccagcugacgcccaccuggcggguguacuccaccggcagcaacgucuuccagacccgcgccgggugccucaucggcgcggagcacgugaacaacuccuacgagugcgacauccccaucggggccggcaucugcgccagcuaccagacgcagaccaacuccccgcggcgcgcccggagcguggcgucccagagcaucaucgccuacaccaugucccugggcgccgagaacagcgucgccuacuccaacaacagcaucgccauccccaccaacuucacgaucuccgugaccaccgagauccugcccgugagcaugaccaagacgagcgucgacugcaccauguacaucugcggggacuccaccgagugcagcaaccuccugcugcaguacggcuccuucugcacccagcucaaccgcgcgcugacggggaucgccguggagcaggacaagaacacccaggagguguucgcccaggucaagcagaucuacaagacgcccccgaucaaggacuucggcggguucaacuucagccagauccugcccgaccccuccaagcccagcaagcgguccuucaucgaggaccuccuguucaacaaggugacccuggccgacgccggcuucaucaagcaguacggcgacugccucggggacaucgcggcccgcgaccugaucugcgcccagaaguucaacggccugaccgugcucccgccccugcugaccgacgagaugaucgcccaguacaccagcgcccuccuggcggggaccaucacguccggcuggaccuucggggccggcgccgcccugcagauccccuucgcgaugcagauggccuaccgguucaacggcaucggggucacccagaacgugcucuacgagaaccagaagcugaucgccaaccaguucaacagcgccaucggcaagauccaggacucccugagcuccaccgccagcgcgcucgggaagcugcaggacguggucaaccagaacgcccaggcccugaacacgcucgugaagcagcuguccagcaacuucggcgccaucuccagcgugcugaacgacauccucucccgccuggacccgcccgaggccgagguccagaucgaccggcugaucaccgggcgccuccagagccugcagaccuacgugacccagcagcugauccgggcggccgagauccgcgccagcgccaaccucgccgcgaccaagauguccgagugcgugcugggccagagcaagcgggucgacuucugcggcaagggguaccaccugauguccuucccccagagcgcgccccacggcgugguguuccuccacgucacguacgugcccgcccaggagaagaacuucaccaccgccccggccaucugccacgacgggaaggcccacuucccccgcgagggcgucuucguguccaacgggacccacugguucgugacgcagcggaacuucuacgagccccagaucaucaccaccgacaacaccuucgucagcggcaacugcgacguggugaucggcaucgucaacaacacgguguacgacccccugcagccggagcuggacuccuucaaggaggagcucgacaaguacuucaagaaccacaccagccccgacguggaccugggggacaucuccggcaucaacgccagcgucgugaacauccagaaggagaucgaccgccugaacgagguggccaagaaccucaacgagucccugaucgaccugcaggagcucgggaaguacgagcaguacaucaaguggcccugguacaucuggcugggcuucaucgccggccugaucgcgaucgucauggugaccaucaugcucugcugcaugaccagcugcugcuccugccugaaggggugcugcagcugcggcuccugcugcaaguucgacgaggacgacagcgagccggugcugaagggggucaagcuccacuacacgugaggacuagucccuguucccagagcccacuuuuuuuucuuuuuuugaaauaaaauagccugucuuucagaucuaaaaaaaaaaaaaaaaaaaaaaaaaaaaaaaaaaaaaaaaaaaaaaaaaaaaaaaaaaaaaaaaaaaaaaaaaaaaaaaaaaaaaaaaaaaaaaaaaaaa

SEQ ID NO: 25076 - RNA, 4167 nt, Artificial Sequence
  SARS-CoV-2/Wuhan/WIV05/2019__EPI_ISL_402128 spike protein mRNA gc (1-1273)(K986P_V987P_ D614G)
aggagagggcgcuuggcuugcaaggacccugagcugcggcauugaagcacacccaacccaacucgacugaagucagccucacugaaccggaucugagaaucuucucucucugggcuugccagggcucuccgaaccuagcuagcauccucuucaauuccaacuagaaagcuuaccauguucguguuccugguccuccugccccuggugagcucccagugcgugaaccucaccacccgcacgcagcugccgcccgccuacaccaacagcuucacccggggcgucuacuaccccgacaagguguuccgcuccagcgugcugcacuccacccaggaccucuuccugcccuucuucagcaacgucacgugguuccacgccauccacguguccgggaccaacggcaccaagcgguucgacaacccggugcugcccuucaacgacggggucuacuucgcgagcaccgagaaguccaacaucauccgcggcuggaucuucgggacgacccucgacagcaagacccagucccugcugaucgugaacaacgccaccaacguggucaucaaggugugcgaguuccaguucugcaacgaccccuuccucggcguguacuaccacaagaacaacaagagcuggauggaguccgaguuccgggucuacagcuccgccaacaacugcacguucgaguacgugagccagcccuuccugauggaccuggagggcaagcaggggaacuucaagaaccuccgcgaguucguguucaagaacaucgacggcuacuucaagaucuacuccaagcacaccccgaucaaccugguccgggaccugccccagggguucagcgcccucgagccccugguggaccugcccaucggcaucaacaucacccgcuuccagacccuccuggcccugcaccgguccuaccucacgccgggggacagcagcuccggcuggaccgcgggcgccgccgccuacuacgugggguaccugcagccccgcaccuuccugcucaaguacaacgagaacggcaccaucacggacgcggucgacugcgcccuggacccccugagcgagaccaagugcacccucaaguccuucaccguggagaaggggaucuaccagacgagcaacuuccgggugcagcccaccgaguccaucguccgcuucccgaacaucaccaaccugugccccuucggcgagguguucaacgccacccgguucgccagcgucuacgccuggaaccgcaagcggaucuccaacugcguggcggacuacagcgugcuguacaacuccgccagcuucuccacguucaagugcuacggcgucagccccaccaagcucaacgaccugugcuucaccaacguguacgccgacuccuucgugauccgcggggacgagguccggcagaucgcccccggccagaccgggaagaucgccgacuacaacuacaagcugccggacgacuucacgggcugcgugaucgcguggaacagcaacaaccucgacuccaaggucgggggcaacuacaacuaccuguaccgccuguuccgcaagagcaaccucaagcccuucgagcgggacaucuccaccgagaucuaccaggccggcagcacccccugcaacgggguggagggcuucaacugcuacuucccccugcaguccuacggguuccagccgaccaacggcgugggguaccagcccuaccggguggucgugcugagcuucgagcuccugcacgcccccgccacggugugcggccccaagaaguccaccaaccuggucaagaacaagugcgugaacuucaacuucaacggccucaccgggaccggcgugcugaccgagagcaacaagaaguuccugccguuccagcaguucgggcgcgacaucgccgacacgaccgacgcgguccgcgacccccagacccuggagauccucgacaucacccccugcagcuucggcgggguguccgugaucacgccgggcaccaacaccagcaaccaggucgccgugcuguaccagggcgugaacugcaccgagguccccguggccauccacgccgaccagcugacgcccaccuggcggguguacuccaccgggagcaacgucuuccagacccgcgccggcugccucaucggggcggagcacgugaacaacuccuacgagugcgacauccccaucggcgccggcaucugcgccagcuaccagacgcagaccaacuccccgcggcgcgcccggagcguggcgucccagagcaucaucgccuacaccaugucccugggggccgagaacagcgucgccuacuccaacaacagcaucgccauccccaccaacuucacgaucuccgugaccaccgagauccugcccgugagcaugaccaagacgagcgucgacugcaccauguacaucugcggcgacuccaccgagugcagcaaccuccugcugcaguacggguccuucugcacccagcucaaccgcgcgcugacgggcaucgccguggagcaggacaagaacacccaggagguguucgcccaggucaagcagaucuacaagacgcccccgaucaaggacuucgggggcuucaacuucagccagauccugcccgaccccuccaagcccagcaagcgguccuucaucgaggaccuccuguucaacaaggugacccuggccgacgccggcuucaucaagcaguacggggacugccucggcgacaucgcggcccgcgaccugaucugcgcccagaaguucaacgggcugaccgugcucccgccccugcugaccgacgagaugaucgcccaguacaccagcgcccuccuggcgggcaccaucacguccggguggaccuucggcgccggcgccgcccugcagauccccuucgcgaugcagauggccuaccgguucaacgggaucggcgucacccagaacgugcucuacgagaaccagaagcugaucgccaaccaguucaacagcgccaucgggaagauccaggacucccugagcuccaccgccagcgcgcucggcaagcugcaggacguggucaaccagaacgcccaggcccugaacacgcucgugaagcagcuguccagcaacuucggggccaucuccagcgugcugaacgacauccucucccgccuggacccgcccgaggccgagguccagaucgaccggcugaucaccggccgccuccagagccugcagaccuacgugacccagcagcugauccgggcggccgagauccgcgccagcgccaaccucgccgcgaccaagauguccgagugcgugcugggccagagcaagcgggucgacuucugcgggaagggcuaccaccugauguccuucccccagagcgcgccccacggggugguguuccuccacgucacguacgugcccgcccaggagaagaacuucaccaccgccccggccaucugccacgacggcaaggcccacuucccccgcgagggggucuucguguccaacggcacccacugguucgugacgcagcggaacuucuacgagccccagaucaucaccaccgacaacaccuucgucagcggcaacugcgacguggugaucgggaucgucaacaacacgguguacgacccccugcagccggagcuggacuccuucaaggaggagcucgacaaguacuucaagaaccacaccagccccgacguggaccugggcgacaucuccgggaucaacgccagcgucgugaacauccagaaggagaucgaccgccugaacgagguggccaagaaccucaacgagucccugaucgaccugcaggagcucggcaaguacgagcaguacaucaaguggcccugguacaucuggcugggcuucaucgccgggcugaucgcgaucgucauggugaccaucaugcucugcugcaugaccagcugcugcuccugccugaagggcugcugcagcugcggguccugcugcaaguucgacgaggacgacagcgagccggugcugaagggcgucaagcuccacuacacgugaggacuagucccuguucccagagcccacuuuuuuuucuuuuuuugaaauaaaauagccugucuuucagaucuaaaaaaaaaaaaaaaaaaaaaaaaaaaaaaaaaaaaaaaaaaaaaaaaaaaaaaaaaaaaaaaaaaaaaaaaaaaaaaaaaaaaaaaaaaaaaaaaaaaa

SEQ ID NO: 25077 - RNA, 4167 nt, Artificial Sequence
  SARS-CoV-2/Wuhan/WIV05/2019__EPI_ISL_402128 spike protein mRNA gc (1-1273)(K986P_V987P_A222V_D614G)
aggagagggcgcuuggcuugcaaggacccugagcugcggcauugaagcacacccaacccaacucgacugaagucagccucacugaaccggaucugagaaucuucucucucugggcuugccagggcucuccgaaccuagcuagcauccucuucaauuccaacuagaaagcuuaccauguucguguuccugguccuccugccccuggugagcucccagugcgugaaccucaccacccgcacgcagcugccgcccgccuacaccaacagcuucacccggggcgucuacuaccccgacaagguguuccgcuccagcgugcugcacuccacccaggaccucuuccugcccuucuucagcaacgucacgugguuccacgccauccacguguccgggaccaacggcaccaagcgguucgacaacccggugcugcccuucaacgacggggucuacuucgcgagcaccgagaaguccaacaucauccgcggcuggaucuucgggacgacccucgacagcaagacccagucccugcugaucgugaacaacgccaccaacguggucaucaaggugugcgaguuccaguucugcaacgaccccuuccucggcguguacuaccacaagaacaacaagagcuggauggaguccgaguuccgggucuacagcuccgccaacaacugcacguucgaguacgugagccagcccuuccugauggaccuggagggcaagcaggggaacuucaagaaccuccgcgaguucguguucaagaacaucgacggcuacuucaagaucuacuccaagcacaccccgaucaaccugguccgggaccugccccagggguucagcgugcucgagccccugguggaccugcccaucggcaucaacaucacccgcuuccagacccuccuggcccugcaccgguccuaccucacgccgggggacagcagcuccggcuggaccgccggcgcggccgccuacuacgucggguaccugcagccccgcaccuuccugcucaaguacaacgagaacggcaccaucacggacgccguggacugcgcgcuggacccccugagcgagaccaagugcacccucaaguccuucaccguggagaaggggaucuaccagacgagcaacuuccggguccagcccaccgaguccaucgugcgcuucccgaacaucaccaaccugugccccuucggcgaggucuucaacgccacccgguucgccagcguguacgccuggaaccgcaagcggaucuccaacugcguggccgacuacagcguccuguacaacuccgcgagcuucuccacguucaagugcuacggcgugagccccaccaagcucaacgaccugugcuucaccaacguguacgccgacuccuucgucauccgcggggacgaggugcggcagaucgcccccggccagaccgggaagaucgccgacuacaacuacaagcugccggacgacuucacgggcugcgugaucgccuggaacagcaacaaccucgacuccaaggucgggggcaacuacaacuaccuguaccgccuguuccgcaagagcaaccucaagcccuucgagcgggacaucuccaccgagaucuaccaggcgggcagcacccccugcaacgggguggagggcuucaacugcuacuucccccugcaguccuacggguuccagccgaccaacggcgugggguaccagcccuaccgggucguggugcugagcuucgagcuccugcacgcccccgccacggucugcggccccaagaaguccaccaaccuggugaagaacaagugcgugaacuucaacuucaacggccucaccgggaccggcguccugaccgagagcaacaagaaguuccugccguuccagcaguucgggcgcgacaucgccgacacgaccgacgccgugcgcgacccccagacccuggagauccucgacaucacccccugcagcuucggcgggguguccgucaucacgccgggcaccaacaccagcaaccagguggcggugcuguaccagggcgucaacugcaccgaggugcccguggccauccacgccgaccagcugacgcccaccuggcgggucuacuccaccgggagcaacguguuccagacccgcgccggcugccucaucggggccgagcacgugaacaacuccuacgagugcgacauccccaucggcgcgggcaucugcgccagcuaccagacgcagaccaacuccccgcggcgcgcccggagcgucgccucccagagcaucaucgcguacaccaugucccugggggccgagaacagcguggccuacuccaacaacagcaucgccauccccaccaacuucacgaucuccgugaccaccgagauccugcccgucagcaugaccaagacgagcguggacugcaccauguacaucugcggcgacuccaccgagugcagcaaccuccugcugcaguacggguccuucugcacccagcucaaccgcgcccugacgggcaucgcgguggagcaggacaagaacacccaggaggucuucgcccaggugaagcagaucuacaagacgcccccgaucaaggacuucgggggcuucaacuucagccagauccugcccgaccccuccaagcccagcaagcgguccuucaucgaggaccuccuguucaacaaggugacccuggccgacgccggcuucaucaagcaguacggggacugccucggcgacaucgccgcgcgcgaccugaucugcgcccagaaguucaacgggcugaccguccucccgccccugcugaccgacgagaugaucgcccaguacaccagcgcccuccuggccggcaccaucacguccggguggaccuucggcgcgggcgccgcccugcagauccccuucgccaugcagauggcguaccgguucaacgggaucggcgugacccagaacgugcucuacgagaaccagaagcugaucgccaaccaguucaacagcgccaucgggaagauccaggacucccugagcuccaccgccagcgcccucggcaagcugcaggacgucgugaaccagaacgcgcaggcccugaacacgcucgugaagcagcuguccagcaacuucggggccaucuccagcguccugaacgacauccucucccgccuggacccgcccgaggccgaggugcagaucgaccggcugaucaccggccgccuccagagccugcagaccuacgugacccagcagcugauccgggccgcggagauccgcgccagcgccaaccucgccgccaccaagauguccgagugcguccugggccagagcaagcggguggacuucugcgggaagggcuaccaccugauguccuucccccagagcgcgccccacgggguggucuuccuccacgugacguacguccccgcccaggagaagaacuucaccaccgccccggccaucugccacgacggcaaggcgcacuucccccgcgaggggguguucguguccaacggcacccacugguucgucacgcagcggaacuucuacgagccccagaucaucaccaccgacaacaccuucgugagcggcaacugcgacguggucaucgggaucgugaacaacacgguguacgacccccugcagccggagcuggacuccuucaaggaggagcucgacaaguacuucaagaaccacaccagccccgacgucgaccugggcgacaucuccgggaucaacgccagcguggugaacauccagaaggagaucgaccgccugaacgaggucgccaagaaccucaacgagucccugaucgaccugcaggagcucggcaaguacgagcaguacaucaaguggcccugguacaucuggcugggcuucaucgccgggcugaucgccaucgugauggugaccaucaugcucugcugcaugaccagcugcugcuccugccugaagggcugcugcagcugcggguccugcugcaaguucgacgaggacgacagcgagccgguccugaagggcgugaagcuccacuacacgugaggacuagucccuguucccagagcccacuuuuuuuucuuuuuuugaaauaaaauagccugucuuucagaucuaaaaaaaaaaaaaaaaaaaaaaaaaaaaaaaaaaaaaaaaaaaaaaaaaaaaaaaaaaaaaaaaaaaaaaaaaaaaaaaaaaaaaaaaaaaaaaaaaaaa

SEQ ID NO: 25078 - RNA, 4167 nt, Artificial Sequence
  SARS-CoV-2/Wuhan/WIV05/2019__EPI_ISL_402128 spike protein mRNA gc (1-1273)(K986P_V987P_N439K_D614G)
aggagagggcgcuuggcuugcaaggacccugagcugcggcauugaagcacacccaacccaacucgacugaagucagccucacugaaccggaucugagaaucuucucucucugggcuugccagggcucuccgaaccuagcuagcauccucuucaauuccaacuagaaagcuuaccauguucguguuccugguccuccugccccuggugagcucccagugcgugaaccucaccacccgcacgcagcugccgcccgccuacaccaacagcuucacccggggcgucuacuaccccgacaagguguuccgcuccagcgugcugcacuccacccaggaccucuuccugcccuucuucagcaacgucacgugguuccacgccauccacguguccgggaccaacggcaccaagcgguucgacaacccggugcugcccuucaacgacggggucuacuucgcgagcaccgagaaguccaacaucauccgcggcuggaucuucgggacgacccucgacagcaagacccagucccugcugaucgugaacaacgccaccaacguggucaucaaggugugcgaguuccaguucugcaacgaccccuuccucggcguguacuaccacaagaacaacaagagcuggauggaguccgaguuccgggucuacagcuccgccaacaacugcacguucgaguacgugagccagcccuuccugauggaccuggagggcaagcaggggaacuucaagaaccuccgcgaguucguguucaagaacaucgacggcuacuucaagaucuacuccaagcacaccccgaucaaccugguccgggaccugccccagggguucagcgcccucgagccccugguggaccugcccaucggcaucaacaucacccgcuuccagacccuccuggcccugcaccgguccuaccucacgccgggggacagcagcuccggcuggaccgcgggcgccgccgccuacuacgugggguaccugcagccccgcaccuuccugcucaaguacaacgagaacggcaccaucacggacgcggucgacugcgcccuggacccccugagcgagaccaagugcacccucaaguccuucaccguggagaaggggaucuaccagacgagcaacuuccgggugcagcccaccgaguccaucguccgcuucccgaacaucaccaaccugugccccuucggcgagguguucaacgccacccgguucgccagcgucuacgccuggaaccgcaagcggaucuccaacugcguggcggacuacagcgugcuguacaacuccgccagcuucuccacguucaagugcuacggcgucagccccaccaagcucaacgaccugugcuucaccaacguguacgccgacuccuucgugauccgcggggacgagguccggcagaucgcccccggccagaccgggaagaucgccgacuacaacuacaagcugccggacgacuucacgggcugcgugaucgcguggaacagcaagaaccucgacuccaaggucgggggcaacuacaacuaccuguaccgccuguuccgcaagagcaaccucaagcccuucgagcgggacaucuccaccgagaucuaccaggccggcagcacccccugcaacgggguggagggcuucaacugcuacuucccccugcaguccuacggguuccagccgaccaacggcgugggguaccagcccuaccggguggucgugcugagcuucgagcuccugcacgcccccgccacggugugcggccccaagaaguccaccaaccuggucaagaacaagugcgugaacuucaacuucaacggccucaccgggaccggcgugcugaccgagagcaacaagaaguuccugccguuccagcaguucgggcgcgacaucgccgacacgaccgacgcgguccgcgacccccagacccuggagauccucgacaucacccccugcagcuucggcgggguguccgugaucacgccgggcaccaacaccagcaaccaggucgccgugcuguaccagggcgugaacugcaccgagguccccguggccauccacgccgaccagcugacgcccaccuggcggguguacuccaccgggagcaacgucuuccagacccgcgccggcugccucaucggggcggagcacgugaacaacuccuacgagugcgacauccccaucggcgccggcaucugcgccagcuaccagacgcagaccaacuccccgcggcgcgcccggagcguggcgucccagagcaucaucgccuacaccaugucccugggggccgagaacagcgucgccuacuccaacaacagcaucgccauccccaccaacuucacgaucuccgugaccaccgagauccugcccgugagcaugaccaagacgagcgucgacugcaccauguacaucugcggcgacuccaccgagugcagcaaccuccugcugcaguacggguccuucugcacccagcucaaccgcgcgcugacgggcaucgccguggagcaggacaagaacacccaggagguguucgcccaggucaagcagaucuacaagacgcccccgaucaaggacuucgggggcuucaacuucagccagauccugcccgaccccuccaagcccagcaagcgguccuucaucgaggaccuccuguucaacaaggugacccuggccgacgccggcuucaucaagcaguacggggacugccucggcgacaucgcggcccgcgaccugaucugcgcccagaaguucaacgggcugaccgugcucccgccccugcugaccgacgagaugaucgcccaguacaccagcgcccuccuggcgggcaccaucacguccggguggaccuucggcgccggcgccgcccugcagauccccuucgcgaugcagauggccuaccgguucaacgggaucggcgucacccagaacgugcucuacgagaaccagaagcugaucgccaaccaguucaacagcgccaucgggaagauccaggacucccugagcuccaccgccagcgcgcucggcaagcugcaggacguggucaaccagaacgcccaggcccugaacacgcucgugaagcagcuguccagcaacuucggggccaucuccagcgugcugaacgacauccucucccgccuggacccgcccgaggccgagguccagaucgaccggcugaucaccggccgccuccagagccugcagaccuacgugacccagcagcugauccgggcggccgagauccgcgccagcgccaaccucgccgcgaccaagauguccgagugcgugcugggccagagcaagcgggucgacuucugcgggaagggcuaccaccugauguccuucccccagagcgcgccccacggggugguguuccuccacgucacguacgugcccgcccaggagaagaacuucaccaccgccccggccaucugccacgacggcaaggcccacuucccccgcgagggggucuucguguccaacggcacccacugguucgugacgcagcggaacuucuacgagccccagaucaucaccaccgacaacaccuucgucagcggcaacugcgacguggugaucgggaucgucaacaacacgguguacgacccccugcagccggagcuggacuccuucaaggaggagcucgacaaguacuucaagaaccacaccagccccgacguggaccugggcgacaucuccgggaucaacgccagcgucgugaacauccagaaggagaucgaccgccugaacgagguggccaagaaccucaacgagucccugaucgaccugcaggagcucggcaaguacgagcaguacaucaaguggcccugguacaucuggcugggcuucaucgccgggcugaucgcgaucgucauggugaccaucaugcucugcugcaugaccagcugcugcuccugccugaagggcugcugcagcugcggguccugcugcaaguucgacgaggacgacagcgagccggugcugaagggcgucaagcuccacuacacgugaggacuagucccuguucccagagcccacuuuuuuuucuuuuuuugaaauaaaauagccugucuuucagaucuaaaaaaaaaaaaaaaaaaaaaaaaaaaaaaaaaaaaaaaaaaaaaaaaaaaaaaaaaaaaaaaaaaaaaaaaaaaaaaaaaaaaaaaaaaaaaaaaaaaa

SEQ ID NO: 25079 - RNA, 4167 nt, Artificial Sequence
  SARS-CoV-2/Wuhan/WIV05/2019__EPI_ISL_402128 spike protein mRNA gc (1-1273)(K986P_V987P_S477N_D614G)
aggagagggcgcuuggcuugcaaggacccugagcugcggcauugaagcacacccaacccaacucgacugaagucagccucacugaaccggaucugagaaucuucucucucugggcuugccagggcucuccgaaccuagcuagcauccucuucaauuccaacuagaaagcuuaccauguucguguuccugguccuccugccccuggugagcucccagugcgugaaccucaccacccgcacgcagcugccgcccgccuacaccaacagcuucacccggggcgucuacuaccccgacaagguguuccgcuccagcgugcugcacuccacccaggaccucuuccugcccuucuucagcaacgucacgugguuccacgccauccacguguccgggaccaacggcaccaagcgguucgacaacccggugcugcccuucaacgacggggucuacuucgcgagcaccgagaaguccaacaucauccgcggcuggaucuucgggacgacccucgacagcaagacccagucccugcugaucgugaacaacgccaccaacguggucaucaaggugugcgaguuccaguucugcaacgaccccuuccucggcguguacuaccacaagaacaacaagagcuggauggaguccgaguuccgggucuacagcuccgccaacaacugcacguucgaguacgugagccagcccuuccugauggaccuggagggcaagcaggggaacuucaagaaccuccgcgaguucguguucaagaacaucgacggcuacuucaagaucuacuccaagcacaccccgaucaaccugguccgggaccugccccagggguucagcgcccucgagccccugguggaccugcccaucggcaucaacaucacccgcuuccagacccuccuggcccugcaccgguccuaccucacgccgggggacagcagcuccggcuggaccgcgggcgccgccgccuacuacgugggguaccugcagccccgcaccuuccugcucaaguacaacgagaacggcaccaucacggacgcggucgacugcgcccuggacccccugagcgagaccaagugcacccucaaguccuucaccguggagaaggggaucuaccagacgagcaacuuccgggugcagcccaccgaguccaucguccgcuucccgaacaucaccaaccugugccccuucggcgagguguucaacgccacccgguucgccagcgucuacgccuggaaccgcaagcggaucuccaacugcguggcggacuacagcgugcuguacaacuccgccagcuucuccacguucaagugcuacggcgucagccccaccaagcucaacgaccugugcuucaccaacguguacgccgacuccuucgugauccgcggggacgagguccggcagaucgcccccggccagaccgggaagaucgccgacuacaacuacaagcugccggacgacuucacgggcugcgugaucgcguggaacagcaacaaccucgacuccaaggucgggggcaacuacaacuaccuguaccgccuguuccgcaagagcaaccucaagcccuucgagcgggacaucuccaccgagaucuaccaggccggcaacacccccugcaacgggguggagggcuucaacugcuacuucccccugcagagcuacggguuccagccgaccaacggcgugggguaccagcccuaccggguggucgugcuguccuucgagcuccugcacgcccccgccacggugugcggccccaagaaguccaccaaccuggucaagaacaagugcgugaacuucaacuucaacggccucaccgggaccggcgugcugaccgagagcaacaagaaguuccugccguuccagcaguucgggcgcgacaucgccgacacgaccgacgcgguccgcgacccccagacccuggagauccucgacaucacccccugcagcuucggcggggugagcgugaucacgccgggcaccaacaccuccaaccaggucgccgugcuguaccagggcgugaacugcaccgagguccccguggccauccacgccgaccagcugacgcccaccuggcggguguacagcaccggguccaacgucuuccagacccgcgccggcugccucaucggggcggagcacgugaacaacagcuacgagugcgacauccccaucggcgccggcaucugcgccuccuaccagacgcagaccaacagcccgcggcgcgcccgguccguggcgagccaguccaucaucgccuacaccaugagccugggggccgagaacuccgucgccuacagcaacaacuccaucgccauccccaccaacuucacgaucagcgugaccaccgagauccugcccguguccaugaccaagacgagcgucgacugcaccauguacaucugcggcgacagcaccgagugcuccaaccuccugcugcaguacgggagcuucugcacccagcucaaccgcgcgcugacgggcaucgccguggagcaggacaagaacacccaggagguguucgcccaggucaagcagaucuacaagacgcccccgaucaaggacuucgggggcuucaacuucucccagauccugcccgaccccagcaagcccuccaagcggagcuucaucgaggaccuccuguucaacaaggugacccuggccgacgccggcuucaucaagcaguacggggacugccucggcgacaucgcggcccgcgaccugaucugcgcccagaaguucaacgggcugaccgugcucccgccccugcugaccgacgagaugaucgcccaguacaccuccgcccuccuggcgggcaccaucacgagcggguggaccuucggcgccggcgccgcccugcagauccccuucgcgaugcagauggccuaccgguucaacgggaucggcgucacccagaacgugcucuacgagaaccagaagcugaucgccaaccaguucaacuccgccaucgggaagauccaggacagccuguccagcaccgccuccgcgcucggcaagcugcaggacguggucaaccagaacgcccaggcccugaacacgcucgugaagcagcugagcuccaacuucggggccaucagcuccgugcugaacgacauccucagccgccuggacccgcccgaggccgagguccagaucgaccggcugaucaccggccgccuccagucccugcagaccuacgugacccagcagcugauccgggcggccgagauccgcgccagcgccaaccucgccgcgaccaagaugagcgagugcgugcugggccaguccaagcgggucgacuucugcgggaagggcuaccaccugaugagcuucccccaguccgcgccccacggggugguguuccuccacgucacguacgugcccgcccaggagaagaacuucaccaccgccccggccaucugccacgacggcaaggcccacuucccccgcgagggggucuucgugagcaacggcacccacugguucgugacgcagcggaacuucuacgagccccagaucaucaccaccgacaacaccuucgucuccggcaacugcgacguggugaucgggaucgucaacaacacgguguacgacccccugcagccggagcuggacagcuucaaggaggagcucgacaaguacuucaagaaccacaccucccccgacguggaccugggcgacaucagcgggaucaacgccuccgucgugaacauccagaaggagaucgaccgccugaacgagguggccaagaaccucaacgagagccugaucgaccugcaggagcucggcaaguacgagcaguacaucaaguggcccugguacaucuggcugggcuucaucgccgggcugaucgcgaucgucauggugaccaucaugcucugcugcaugaccuccugcugcagcugccugaagggcugcugcuccugcgggagcugcugcaaguucgacgaggacgacuccgagccggugcugaagggcgucaagcuccacuacacgugaggacuagucccuguucccagagcccacuuuuuuuucuuuuuuugaaauaaaauagccugucuuucagaucuaaaaaaaaaaaaaaaaaaaaaaaaaaaaaaaaaaaaaaaaaaaaaaaaaaaaaaaaaaaaaaaaaaaaaaaaaaaaaaaaaaaaaaaaaaaaaaaaaaaa

SEQ ID NO: 25080 - RNA, 4167 nt, Artificial Sequence
  SARS-CoV-2/Wuhan/WIV05/2019__EPI_ISL_402128 spike protein mRNA gc (1-1273)(K986P_V987P_N501Y_D614G)
aggagagggcgcuuggcuugcaaggacccugagcugcggcauugaagcacacccaacccaacucgacugaagucagccucacugaaccggaucugagaaucuucucucucugggcuugccagggcucuccgaaccuagcuagcauccucuucaauuccaacuagaaagcuuaccauguucguguuccugguccuccugccccuggugagcucccagugcgugaaccucaccacccgcacgcagcugccgcccgccuacaccaacagcuucacccggggcgucuacuaccccgacaagguguuccgcuccagcgugcugcacuccacccaggaccucuuccugcccuucuucagcaacgucacgugguuccacgccauccacguguccgggaccaacggcaccaagcgguucgacaacccggugcugcccuucaacgacggggucuacuucgcgagcaccgagaaguccaacaucauccgcggcuggaucuucgggacgacccucgacagcaagacccagucccugcugaucgugaacaacgccaccaacguggucaucaaggugugcgaguuccaguucugcaacgaccccuuccucggcguguacuaccacaagaacaacaagagcuggauggaguccgaguuccgggucuacagcuccgccaacaacugcacguucgaguacgugagccagcccuuccugauggaccuggagggcaagcaggggaacuucaagaaccuccgcgaguucguguucaagaacaucgacggcuacuucaagaucuacuccaagcacaccccgaucaaccugguccgggaccugccccagggguucagcgcccucgagccccugguggaccugcccaucggcaucaacaucacccgcuuccagacccuccuggcccugcaccgguccuaccucacgccgggggacagcagcuccggcuggaccgcgggcgccgccgccuacuacgugggguaccugcagccccgcaccuuccugcucaaguacaacgagaacggcaccaucacggacgcggucgacugcgcccuggacccccugagcgagaccaagugcacccucaaguccuucaccguggagaaggggaucuaccagacgagcaacuuccgggugcagcccaccgaguccaucguccgcuucccgaacaucaccaaccugugccccuucggcgagguguucaacgccacccgguucgccagcgucuacgccuggaaccgcaagcggaucuccaacugcguggcggacuacagcgugcuguacaacuccgccagcuucuccacguucaagugcuacggcgucagccccaccaagcucaacgaccugugcuucaccaacguguacgccgacuccuucgugauccgcggggacgagguccggcagaucgcccccggccagaccgggaagaucgccgacuacaacuacaagcugccggacgacuucacgggcugcgugaucgcguggaacagcaacaaccucgacuccaaggucgggggcaacuacaacuaccuguaccgccuguuccgcaagagcaaccucaagcccuucgagcgggacaucuccaccgagaucuaccaggccggcagcacccccugcaacgggguggagggcuucaacugcuacuucccccugcaguccuacggguuccagccgaccuacggcgugggguaccagcccuaccggguggucgugcugagcuucgagcuccugcacgcccccgccacggugugcggccccaagaaguccaccaaccuggucaagaacaagugcgugaacuucaacuucaacggccucaccgggaccggcgugcugaccgagagcaacaagaaguuccugccguuccagcaguucgggcgcgacaucgccgacacgaccgacgcgguccgcgacccccagacccuggagauccucgacaucacccccugcagcuucggcgggguguccgugaucacgccgggcaccaacaccagcaaccaggucgccgugcuguaccagggcgugaacugcaccgagguccccguggccauccacgccgaccagcugacgcccaccuggcggguguacuccaccgggagcaacgucuuccagacccgcgccggcugccucaucggggcggagcacgugaacaacuccuacgagugcgacauccccaucggcgccggcaucugcgccagcuaccagacgcagaccaacuccccgcggcgcgcccggagcguggcgucccagagcaucaucgccuacaccaugucccugggggccgagaacagcgucgccuacuccaacaacagcaucgccauccccaccaacuucacgaucuccgugaccaccgagauccugcccgugagcaugaccaagacgagcgucgacugcaccauguacaucugcggcgacuccaccgagugcagcaaccuccugcugcaguacggguccuucugcacccagcucaaccgcgcgcugacgggcaucgccguggagcaggacaagaacacccaggagguguucgcccaggucaagcagaucuacaagacgcccccgaucaaggacuucgggggcuucaacuucagccagauccugcccgaccccuccaagcccagcaagcgguccuucaucgaggaccuccuguucaacaaggugacccuggccgacgccggcuucaucaagcaguacggggacugccucggcgacaucgcggcccgcgaccugaucugcgcccagaaguucaacgggcugaccgugcucccgccccugcugaccgacgagaugaucgcccaguacaccagcgcccuccuggcgggcaccaucacguccggguggaccuucggcgccggcgccgcccugcagauccccuucgcgaugcagauggccuaccgguucaacgggaucggcgucacccagaacgugcucuacgagaaccagaagcugaucgccaaccaguucaacagcgccaucgggaagauccaggacucccugagcuccaccgccagcgcgcucggcaagcugcaggacguggucaaccagaacgcccaggcccugaacacgcucgugaagcagcuguccagcaacuucggggccaucuccagcgugcugaacgacauccucucccgccuggacccgcccgaggccgagguccagaucgaccggcugaucaccggccgccuccagagccugcagaccuacgugacccagcagcugauccgggcggccgagauccgcgccagcgccaaccucgccgcgaccaagauguccgagugcgugcugggccagagcaagcgggucgacuucugcgggaagggcuaccaccugauguccuucccccagagcgcgccccacggggugguguuccuccacgucacguacgugcccgcccaggagaagaacuucaccaccgccccggccaucugccacgacggcaaggcccacuucccccgcgagggggucuucguguccaacggcacccacugguucgugacgcagcggaacuucuacgagccccagaucaucaccaccgacaacaccuucgucagcggcaacugcgacguggugaucgggaucgucaacaacacgguguacgacccccugcagccggagcuggacuccuucaaggaggagcucgacaaguacuucaagaaccacaccagccccgacguggaccugggcgacaucuccgggaucaacgccagcgucgugaacauccagaaggagaucgaccgccugaacgagguggccaagaaccucaacgagucccugaucgaccugcaggagcucggcaaguacgagcaguacaucaaguggcccugguacaucuggcugggcuucaucgccgggcugaucgcgaucgucauggugaccaucaugcucugcugcaugaccagcugcugcuccugccugaagggcugcugcagcugcggguccugcugcaaguucgacgaggacgacagcgagccggugcugaagggcgucaagcuccacuacacgugaggacuagucccuguucccagagcccacuuuuuuuucuuuuuuugaaauaaaauagccugucuuucagaucuaaaaaaaaaaaaaaaaaaaaaaaaaaaaaaaaaaaaaaaaaaaaaaaaaaaaaaaaaaaaaaaaaaaaaaaaaaaaaaaaaaaaaaaaaaaaaaaaaaaa

SEQ ID NO: 25081 - RNA, 4161 nt, Artificial Sequence
  SARS-CoV-2/Wuhan/WIV05/2019__EPI_ISL_402128 spike protein mRNA gc (1-1273)(K986P_V987P_H69del_V70del_D614G)
aggagagggcgcuuggcuugcaaggacccugagcugcggcauugaagcacacccaacccaacucgacugaagucagccucacugaaccggaucugagaaucuucucucucugggcuugccagggcucuccgaaccuagcuagcauccucuucaauuccaacuagaaagcuuaccauguucguguuccugguccuccugccccuggugagcucccagugcgugaaccucaccacccgcacgcagcugccgcccgccuacaccaacagcuucacccggggcgucuacuaccccgacaagguguuccgcuccagcgugcugcacuccacccaggaccucuuccugcccuucuucagcaacgucacgugguuccacgccaucuccgggaccaacggcaccaagcgguucgacaacccggugcugcccuucaacgacgggguguacuucgcgagcaccgagaaguccaacaucauccgcggcuggaucuucgggacgacccucgacagcaagacccagucccugcugaucgucaacaacgccaccaacguggugaucaaggucugcgaguuccaguucugcaacgaccccuuccucggcguguacuaccacaagaacaacaagagcuggauggaguccgaguuccggguguacagcuccgccaacaacugcacguucgaguacgucagccagcccuuccugauggaccuggagggcaagcaggggaacuucaagaaccuccgcgaguucguguucaagaacaucgacggcuacuucaagaucuacuccaagcacaccccgaucaaccuggugcgggaccugccccagggguucagcgcccucgagccccuggucgaccugcccaucggcaucaacaucacccgcuuccagacccuccuggcccugcaccgguccuaccucacgccgggggacagcagcuccggcuggaccgcgggcgccgccgccuacuacgugggguaccugcagccccgcaccuuccugcucaaguacaacgagaacggcaccaucacggacgcgguggacugcgcccuggacccccugagcgagaccaagugcacccucaaguccuucaccgucgagaaggggaucuaccagacgagcaacuuccgggugcagcccaccgaguccaucgugcgcuucccgaacaucaccaaccugugccccuucggcgaggucuucaacgccacccgguucgccagcguguacgccuggaaccgcaagcggaucuccaacugcgucgcggacuacagcgugcuguacaacuccgccagcuucuccacguucaagugcuacggcgugagccccaccaagcucaacgaccugugcuucaccaacgucuacgccgacuccuucgugauccgcggggacgaggugcggcagaucgcccccggccagaccgggaagaucgccgacuacaacuacaagcugccggacgacuucacgggcugcgucaucgcguggaacagcaacaaccucgacuccaaggucgggggcaacuacaacuaccuguaccgccuguuccgcaagagcaaccucaagcccuucgagcgggacaucuccaccgagaucuaccaggccggcagcacccccugcaacgggguggagggcuucaacugcuacuucccccugcaguccuacggguuccagccgaccaacggcgugggguaccagcccuaccggguggugguccugagcuucgagcuccugcacgcccccgccacggugugcggccccaagaaguccaccaaccuggugaagaacaagugcgucaacuucaacuucaacggccucaccgggaccggcgugcugaccgagagcaacaagaaguuccugccguuccagcaguucgggcgcgacaucgccgacacgaccgacgcggugcgcgacccccagacccuggagauccucgacaucacccccugcagcuucggcggggucuccgugaucacgccgggcaccaacaccagcaaccagguggccguccuguaccagggcgugaacugcaccgaggugcccgucgccauccacgccgaccagcugacgcccaccuggcggguguacuccaccgggagcaacguguuccagacccgcgccggcugccucaucggggcggagcacgucaacaacuccuacgagugcgacauccccaucggcgccggcaucugcgccagcuaccagacgcagaccaacuccccgcggcgcgcccggagcguggcgucccagagcaucaucgccuacaccaugucccugggggccgagaacagcguggccuacuccaacaacagcaucgccauccccaccaacuucacgaucuccgucaccaccgagauccugcccgugagcaugaccaagacgagcguggacugcaccauguacaucugcggcgacuccaccgagugcagcaaccuccugcugcaguacggguccuucugcacccagcucaaccgcgcgcugacgggcaucgccgucgagcaggacaagaacacccaggagguguucgcccaggugaagcagaucuacaagacgcccccgaucaaggacuucgggggcuucaacuucagccagauccugcccgaccccuccaagcccagcaagcgguccuucaucgaggaccuccuguucaacaaggucacccuggccgacgccggcuucaucaagcaguacggggacugccucggcgacaucgcggcccgcgaccugaucugcgcccagaaguucaacgggcugaccgugcucccgccccugcugaccgacgagaugaucgcccaguacaccagcgcccuccuggcgggcaccaucacguccggguggaccuucggcgccggcgccgcccugcagauccccuucgcgaugcagauggccuaccgguucaacgggaucggcgugacccagaacguccucuacgagaaccagaagcugaucgccaaccaguucaacagcgccaucgggaagauccaggacucccugagcuccaccgccagcgcgcucggcaagcugcaggacguggugaaccagaacgcccaggcccugaacacgcucgucaagcagcuguccagcaacuucggggccaucuccagcgugcugaacgacauccucucccgccuggacccgcccgaggccgaggugcagaucgaccggcugaucaccggccgccuccagagccugcagaccuacgucacccagcagcugauccgggcggccgagauccgcgccagcgccaaccucgccgcgaccaagauguccgagugcgugcugggccagagcaagcggguggacuucugcgggaagggcuaccaccugauguccuucccccagagcgcgccccacggggucguguuccuccacgugacguacguccccgcccaggagaagaacuucaccaccgccccggccaucugccacgacggcaaggcccacuucccccgcgaggggguguucgucuccaacggcacccacugguucgugacgcagcggaacuucuacgagccccagaucaucaccaccgacaacaccuucgugagcggcaacugcgacgucgugaucgggaucgugaacaacacggucuacgacccccugcagccggagcuggacuccuucaaggaggagcucgacaaguacuucaagaaccacaccagccccgacguggaccugggcgacaucuccgggaucaacgccagcguggucaacauccagaaggagaucgaccgccugaacgagguggccaagaaccucaacgagucccugaucgaccugcaggagcucggcaaguacgagcaguacaucaaguggcccugguacaucuggcugggcuucaucgccgggcugaucgcgaucgugauggucaccaucaugcucugcugcaugaccagcugcugcuccugccugaagggcugcugcagcugcggguccugcugcaaguucgacgaggacgacagcgagccggugcugaagggcgugaagcuccacuacacgugaggacuagucccuguucccagagcccacuuuuuuuucuuuuuuugaaauaaaauagccugucuuucagaucuaaaaaaaaaaaaaaaaaaaaaaaaaaaaaaaaaaaaaaaaaaaaaaaaaaaaaaaaaaaaaaaaaaaaaaaaaaaaaaaaaaaaaaaaaaaaaaaaaaaa

SEQ ID NO: 25082 - RNA, 4167 nt, Artificial Sequence
  SARS-CoV-2/Wuhan/WIV05/2019__EPI_ISL_402128 spike protein mRNA gc (1-1273)(K986P_V987P_Y453F_D614G)
aggagagggcgcuuggcuugcaaggacccugagcugcggcauugaagcacacccaacccaacucgacugaagucagccucacugaaccggaucugagaaucuucucucucugggcuugccagggcucuccgaaccuagcuagcauccucuucaauuccaacuagaaagcuuaccauguucguguuccugguccuccugccccuggugagcucccagugcgugaaccucaccacccgcacgcagcugccgcccgccuacaccaacagcuucacccggggcgucuacuaccccgacaagguguuccgcuccagcgugcugcacuccacccaggaccucuuccugcccuucuucagcaacgucacgugguuccacgccauccacguguccgggaccaacggcaccaagcgguucgacaacccggugcugcccuucaacgacggggucuacuucgcgagcaccgagaaguccaacaucauccgcggcuggaucuucgggacgacccucgacagcaagacccagucccugcugaucgugaacaacgccaccaacguggucaucaaggugugcgaguuccaguucugcaacgaccccuuccucggcguguacuaccacaagaacaacaagagcuggauggaguccgaguuccgggucuacagcuccgccaacaacugcacguucgaguacgugagccagcccuuccugauggaccuggagggcaagcaggggaacuucaagaaccuccgcgaguucguguucaagaacaucgacggcuacuucaagaucuacuccaagcacaccccgaucaaccugguccgggaccugccccagggguucagcgcccucgagccccugguggaccugcccaucggcaucaacaucacccgcuuccagacccuccuggcccugcaccgguccuaccucacgccgggggacagcagcuccggcuggaccgcgggcgccgccgccuacuacgugggguaccugcagccccgcaccuuccugcucaaguacaacgagaacggcaccaucacggacgcggucgacugcgcccuggacccccugagcgagaccaagugcacccucaaguccuucaccguggagaaggggaucuaccagacgagcaacuuccgggugcagcccaccgaguccaucguccgcuucccgaacaucaccaaccugugccccuucggcgagguguucaacgccacccgguucgccagcgucuacgccuggaaccgcaagcggaucuccaacugcguggcggacuacagcgugcuguacaacuccgccagcuucuccacguucaagugcuacggcgucagccccaccaagcucaacgaccugugcuucaccaacguguacgccgacuccuucgugauccgcggggacgagguccggcagaucgcccccggccagaccgggaagaucgccgacuacaacuacaagcugccggacgacuucacgggcugcgugaucgcguggaacagcaacaaccucgacuccaaggucgggggcaacuacaacuaccuguuccgccuguuccgcaagagcaaccucaagcccuucgagcgggacaucuccaccgagaucuaccaggccggcagcacccccugcaacgggguggagggcuucaacugcuacuucccccugcaguccuacggguuccagccgaccaacggcgugggguaccagcccuaccggguggucgugcugagcuucgagcuccugcacgcccccgccacggugugcggccccaagaaguccaccaaccuggucaagaacaagugcgugaacuucaacuucaacggccucaccgggaccggcgugcugaccgagagcaacaagaaguuccugccguuccagcaguucgggcgcgacaucgccgacacgaccgacgcgguccgcgacccccagacccuggagauccucgacaucacccccugcagcuucggcgggguguccgugaucacgccgggcaccaacaccagcaaccaggucgccgugcuguaccagggcgugaacugcaccgagguccccguggccauccacgccgaccagcugacgcccaccuggcggguguacuccaccgggagcaacgucuuccagacccgcgccggcugccucaucggggcggagcacgugaacaacuccuacgagugcgacauccccaucggcgccggcaucugcgccagcuaccagacgcagaccaacuccccgcggcgcgcccggagcguggcgucccagagcaucaucgccuacaccaugucccugggggccgagaacagcgucgccuacuccaacaacagcaucgccauccccaccaacuucacgaucuccgugaccaccgagauccugcccgugagcaugaccaagacgagcgucgacugcaccauguacaucugcggcgacuccaccgagugcagcaaccuccugcugcaguacggguccuucugcacccagcucaaccgcgcgcugacgggcaucgccguggagcaggacaagaacacccaggagguguucgcccaggucaagcagaucuacaagacgcccccgaucaaggacuucgggggcuucaacuucagccagauccugcccgaccccuccaagcccagcaagcgguccuucaucgaggaccuccuguucaacaaggugacccuggccgacgccggcuucaucaagcaguacggggacugccucggcgacaucgcggcccgcgaccugaucugcgcccagaaguucaacgggcugaccgugcucccgccccugcugaccgacgagaugaucgcccaguacaccagcgcccuccuggcgggcaccaucacguccggguggaccuucggcgccggcgccgcccugcagauccccuucgcgaugcagauggccuaccgguucaacgggaucggcgucacccagaacgugcucuacgagaaccagaagcugaucgccaaccaguucaacagcgccaucgggaagauccaggacucccugagcuccaccgccagcgcgcucggcaagcugcaggacguggucaaccagaacgcccaggcccugaacacgcucgugaagcagcuguccagcaacuucggggccaucuccagcgugcugaacgacauccucucccgccuggacccgcccgaggccgagguccagaucgaccggcugaucaccggccgccuccagagccugcagaccuacgugacccagcagcugauccgggcggccgagauccgcgccagcgccaaccucgccgcgaccaagauguccgagugcgugcugggccagagcaagcgggucgacuucugcgggaagggcuaccaccugauguccuucccccagagcgcgccccacggggugguguuccuccacgucacguacgugcccgcccaggagaagaacuucaccaccgccccggccaucugccacgacggcaaggcccacuucccccgcgagggggucuucguguccaacggcacccacugguucgugacgcagcggaacuucuacgagccccagaucaucaccaccgacaacaccuucgucagcggcaacugcgacguggugaucgggaucgucaacaacacgguguacgacccccugcagccggagcuggacuccuucaaggaggagcucgacaaguacuucaagaaccacaccagccccgacguggaccugggcgacaucuccgggaucaacgccagcgucgugaacauccagaaggagaucgaccgccugaacgagguggccaagaaccucaacgagucccugaucgaccugcaggagcucggcaaguacgagcaguacaucaaguggcccugguacaucuggcugggcuucaucgccgggcugaucgcgaucgucauggugaccaucaugcucugcugcaugaccagcugcugcuccugccugaagggcugcugcagcugcggguccugcugcaaguucgacgaggacgacagcgagccggugcugaagggcgucaagcuccacuacacgugaggacuagucccuguucccagagcccacuuuuuuuucuuuuuuugaaauaaaauagccugucuuucagaucuaaaaaaaaaaaaaaaaaaaaaaaaaaaaaaaaaaaaaaaaaaaaaaaaaaaaaaaaaaaaaaaaaaaaaaaaaaaaaaaaaaaaaaaaaaaaaaaaaaaa

SEQ ID NO: 25083 - RNA, 4167 nt, Artificial Sequence
  SARS-CoV-2/Wuhan/WIV05/2019__EPI_ISL_402128 spike protein mRNA gc (1-1273)(K986P_V987P_D614G_I692V)
aggagagggcgcuuggcuugcaaggacccugagcugcggcauugaagcacacccaacccaacucgacugaagucagccucacugaaccggaucugagaaucuucucucucugggcuugccagggcucuccgaaccuagcuagcauccucuucaauuccaacuagaaagcuuaccauguucguguuccugguccuccugccccuggugagcucccagugcgugaaccucaccacccgcacgcagcugccgcccgccuacaccaacagcuucacccggggcgucuacuaccccgacaagguguuccgcuccagcgugcugcacuccacccaggaccucuuccugcccuucuucagcaacgucacgugguuccacgccauccacguguccgggaccaacggcaccaagcgguucgacaacccggugcugcccuucaacgacggggucuacuucgcgagcaccgagaaguccaacaucauccgcggcuggaucuucgggacgacccucgacagcaagacccagucccugcugaucgugaacaacgccaccaacguggucaucaaggugugcgaguuccaguucugcaacgaccccuuccucggcguguacuaccacaagaacaacaagagcuggauggaguccgaguuccgggucuacagcuccgccaacaacugcacguucgaguacgugagccagcccuuccugauggaccuggagggcaagcaggggaacuucaagaaccuccgcgaguucguguucaagaacaucgacggcuacuucaagaucuacuccaagcacaccccgaucaaccugguccgggaccugccccagggguucagcgcccucgagccccugguggaccugcccaucggcaucaacaucacccgcuuccagacccuccuggcccugcaccgguccuaccucacgccgggggacagcagcuccggcuggaccgcgggcgccgccgccuacuacgugggguaccugcagccccgcaccuuccugcucaaguacaacgagaacggcaccaucacggacgcggucgacugcgcccuggacccccugagcgagaccaagugcacccucaaguccuucaccguggagaaggggaucuaccagacgagcaacuuccgggugcagcccaccgaguccaucguccgcuucccgaacaucaccaaccugugccccuucggcgagguguucaacgccacccgguucgccagcgucuacgccuggaaccgcaagcggaucuccaacugcguggcggacuacagcgugcuguacaacuccgccagcuucuccacguucaagugcuacggcgucagccccaccaagcucaacgaccugugcuucaccaacguguacgccgacuccuucgugauccgcggggacgagguccggcagaucgcccccggccagaccgggaagaucgccgacuacaacuacaagcugccggacgacuucacgggcugcgugaucgcguggaacagcaacaaccucgacuccaaggucgggggcaacuacaacuaccuguaccgccuguuccgcaagagcaaccucaagcccuucgagcgggacaucuccaccgagaucuaccaggccggcagcacccccugcaacgggguggagggcuucaacugcuacuucccccugcaguccuacggguuccagccgaccaacggcgugggguaccagcccuaccggguggucgugcugagcuucgagcuccugcacgcccccgccacggugugcggccccaagaaguccaccaaccuggucaagaacaagugcgugaacuucaacuucaacggccucaccgggaccggcgugcugaccgagagcaacaagaaguuccugccguuccagcaguucgggcgcgacaucgccgacacgaccgacgcgguccgcgacccccagacccuggagauccucgacaucacccccugcagcuucggcgggguguccgugaucacgccgggcaccaacaccagcaaccaggucgccgugcuguaccagggcgugaacugcaccgagguccccguggccauccacgccgaccagcugacgcccaccuggcggguguacuccaccgggagcaacgucuuccagacccgcgccggcugccucaucggggcggagcacgugaacaacuccuacgagugcgacauccccaucggcgccggcaucugcgccagcuaccagacgcagaccaacuccccgcggcgcgcccggagcguggcgucccagagcgucaucgccuacaccaugucccugggggccgagaacagcguggccuacuccaacaacagcaucgccauccccaccaacuucacgaucuccgugaccaccgagauccugcccgucagcaugaccaagacgagcguggacugcaccauguacaucugcggcgacuccaccgagugcagcaaccuccugcugcaguacggguccuucugcacccagcucaaccgcgcgcugacgggcaucgccguggagcaggacaagaacacccaggaggucuucgcccaggugaagcagaucuacaagacgcccccgaucaaggacuucgggggcuucaacuucagccagauccugcccgaccccuccaagcccagcaagcgguccuucaucgaggaccuccuguucaacaaggugacccuggccgacgccggcuucaucaagcaguacggggacugccucggcgacaucgcggcccgcgaccugaucugcgcccagaaguucaacgggcugaccguccucccgccccugcugaccgacgagaugaucgcccaguacaccagcgcccuccuggcgggcaccaucacguccggguggaccuucggcgccggcgccgcccugcagauccccuucgcgaugcagauggccuaccgguucaacgggaucggcgugacccagaacgugcucuacgagaaccagaagcugaucgccaaccaguucaacagcgccaucgggaagauccaggacucccugagcuccaccgccagcgcgcucggcaagcugcaggacgucgugaaccagaacgcccaggcccugaacacgcucgugaagcagcuguccagcaacuucggggccaucuccagcguccugaacgacauccucucccgccuggacccgcccgaggccgaggugcagaucgaccggcugaucaccggccgccuccagagccugcagaccuacgugacccagcagcugauccgggcggccgagauccgcgccagcgccaaccucgccgcgaccaagauguccgagugcguccugggccagagcaagcggguggacuucugcgggaagggcuaccaccugauguccuucccccagagcgcgccccacgggguggucuuccuccacgugacguacguccccgcccaggagaagaacuucaccaccgccccggccaucugccacgacggcaaggcccacuucccccgcgaggggguguucguguccaacggcacccacugguucgucacgcagcggaacuucuacgagccccagaucaucaccaccgacaacaccuucgugagcggcaacugcgacguggucaucgggaucgugaacaacacgguguacgacccccugcagccggagcuggacuccuucaaggaggagcucgacaaguacuucaagaaccacaccagccccgacgucgaccugggcgacaucuccgggaucaacgccagcguggugaacauccagaaggagaucgaccgccugaacgaggucgccaagaaccucaacgagucccugaucgaccugcaggagcucggcaaguacgagcaguacaucaaguggcccugguacaucuggcugggcuucaucgccgggcugaucgcgaucgugauggugaccaucaugcucugcugcaugaccagcugcugcuccugccugaagggcugcugcagcugcggguccugcugcaaguucgacgaggacgacagcgagccgguccugaagggcgugaagcuccacuacacgugaggacuagucccuguucccagagcccacuuuuuuuucuuuuuuugaaauaaaauagccugucuuucagaucuaaaaaaaaaaaaaaaaaaaaaaaaaaaaaaaaaaaaaaaaaaaaaaaaaaaaaaaaaaaaaaaaaaaaaaaaaaaaaaaaaaaaaaaaaaaaaaaaaaaa

SEQ ID NO: 25084 - RNA, 4167 nt, Artificial Sequence
  SARS-CoV-2/Wuhan/WIV05/2019__EPI_ISL_402128 spike protein mRNA gc (1-1273)(K986P_V987P_D614G_M1229I)
aggagagggcgcuuggcuugcaaggacccugagcugcggcauugaagcacacccaacccaacucgacugaagucagccucacugaaccggaucugagaaucuucucucucugggcuugccagggcucuccgaaccuagcuagcauccucuucaauuccaacuagaaagcuuaccauguucguguuccugguccuccugccccuggugagcucccagugcgugaaccucaccacccgcacgcagcugccgcccgccuacaccaacagcuucacccggggcgucuacuaccccgacaagguguuccgcuccagcgugcugcacuccacccaggaccucuuccugcccuucuucagcaacgucacgugguuccacgccauccacguguccgggaccaacggcaccaagcgguucgacaacccggugcugcccuucaacgacggggucuacuucgcgagcaccgagaaguccaacaucauccgcggcuggaucuucgggacgacccucgacagcaagacccagucccugcugaucgugaacaacgccaccaacguggucaucaaggugugcgaguuccaguucugcaacgaccccuuccucggcguguacuaccacaagaacaacaagagcuggauggaguccgaguuccgggucuacagcuccgccaacaacugcacguucgaguacgugagccagcccuuccugauggaccuggagggcaagcaggggaacuucaagaaccuccgcgaguucguguucaagaacaucgacggcuacuucaagaucuacuccaagcacaccccgaucaaccugguccgggaccugccccagggguucagcgcccucgagccccugguggaccugcccaucggcaucaacaucacccgcuuccagacccuccuggcccugcaccgguccuaccucacgccgggggacagcagcuccggcuggaccgcgggcgccgccgccuacuacgugggguaccugcagccccgcaccuuccugcucaaguacaacgagaacggcaccaucacggacgcggucgacugcgcccuggacccccugagcgagaccaagugcacccucaaguccuucaccguggagaaggggaucuaccagacgagcaacuuccgggugcagcccaccgaguccaucguccgcuucccgaacaucaccaaccugugccccuucggcgagguguucaacgccacccgguucgccagcgucuacgccuggaaccgcaagcggaucuccaacugcguggcggacuacagcgugcuguacaacuccgccagcuucuccacguucaagugcuacggcgucagccccaccaagcucaacgaccugugcuucaccaacguguacgccgacuccuucgugauccgcggggacgagguccggcagaucgcccccggccagaccgggaagaucgccgacuacaacuacaagcugccggacgacuucacgggcugcgugaucgcguggaacagcaacaaccucgacuccaaggucgggggcaacuacaacuaccuguaccgccuguuccgcaagagcaaccucaagcccuucgagcgggacaucuccaccgagaucuaccaggccggcagcacccccugcaacgggguggagggcuucaacugcuacuucccccugcaguccuacggguuccagccgaccaacggcgugggguaccagcccuaccggguggucgugcugagcuucgagcuccugcacgcccccgccacggugugcggccccaagaaguccaccaaccuggucaagaacaagugcgugaacuucaacuucaacggccucaccgggaccggcgugcugaccgagagcaacaagaaguuccugccguuccagcaguucgggcgcgacaucgccgacacgaccgacgcgguccgcgacccccagacccuggagauccucgacaucacccccugcagcuucggcgggguguccgugaucacgccgggcaccaacaccagcaaccaggucgccgugcuguaccagggcgugaacugcaccgagguccccguggccauccacgccgaccagcugacgcccaccuggcggguguacuccaccgggagcaacgucuuccagacccgcgccggcugccucaucggggcggagcacgugaacaacuccuacgagugcgacauccccaucggcgccggcaucugcgccagcuaccagacgcagaccaacuccccgcggcgcgcccggagcguggcgucccagagcaucaucgccuacaccaugucccugggggccgagaacagcgucgccuacuccaacaacagcaucgccauccccaccaacuucacgaucuccgugaccaccgagauccugcccgugagcaugaccaagacgagcgucgacugcaccauguacaucugcggcgacuccaccgagugcagcaaccuccugcugcaguacggguccuucugcacccagcucaaccgcgcgcugacgggcaucgccguggagcaggacaagaacacccaggagguguucgcccaggucaagcagaucuacaagacgcccccgaucaaggacuucgggggcuucaacuucagccagauccugcccgaccccuccaagcccagcaagcgguccuucaucgaggaccuccuguucaacaaggugacccuggccgacgccggcuucaucaagcaguacggggacugccucggcgacaucgcggcccgcgaccugaucugcgcccagaaguucaacgggcugaccgugcucccgccccugcugaccgacgagaugaucgcccaguacaccagcgcccuccuggcgggcaccaucacguccggguggaccuucggcgccggcgccgcccugcagauccccuucgcgaugcagauggccuaccgguucaacgggaucggcgucacccagaacgugcucuacgagaaccagaagcugaucgccaaccaguucaacagcgccaucgggaagauccaggacucccugagcuccaccgccagcgcgcucggcaagcugcaggacguggucaaccagaacgcccaggcccugaacacgcucgugaagcagcuguccagcaacuucggggccaucuccagcgugcugaacgacauccucucccgccuggacccgcccgaggccgagguccagaucgaccggcugaucaccggccgccuccagagccugcagaccuacgugacccagcagcugauccgggcggccgagauccgcgccagcgccaaccucgccgcgaccaagauguccgagugcgugcugggccagagcaagcgggucgacuucugcgggaagggcuaccaccugauguccuucccccagagcgcgccccacggggugguguuccuccacgucacguacgugcccgcccaggagaagaacuucaccaccgccccggccaucugccacgacggcaaggcccacuucccccgcgagggggucuucguguccaacggcacccacugguucgugacgcagcggaacuucuacgagccccagaucaucaccaccgacaacaccuucgucagcggcaacugcgacguggugaucgggaucgucaacaacacgguguacgacccccugcagccggagcuggacuccuucaaggaggagcucgacaaguacuucaagaaccacaccagccccgacguggaccugggcgacaucuccgggaucaacgccagcgucgugaacauccagaaggagaucgaccgccugaacgagguggccaagaaccucaacgagucccugaucgaccugcaggagcucggcaaguacgagcaguacaucaaguggcccugguacaucuggcugggcuucaucgccgggcugaucgcgaucgucaucgugaccaucaugcucugcugcaugaccagcugcugcuccugccugaagggcugcugcagcugcggguccugcugcaaguucgacgaggacgacagcgagccggugcugaagggcgucaagcuccacuacacgugaggacuagucccuguucccagagcccacuuuuuuuucuuuuuuugaaauaaaauagccugucuuucagaucuaaaaaaaaaaaaaaaaaaaaaaaaaaaaaaaaaaaaaaaaaaaaaaaaaaaaaaaaaaaaaaaaaaaaaaaaaaaaaaaaaaaaaaaaaaaaaaaaaaaa

SEQ ID NO: 25085 - RNA, 4161 nt, Artificial Sequence
  SARS-CoV-2/Wuhan/WIV05/2019__EPI_ISL_402128 spike protein mRNA gc (1-1273)(K986P_V987P_H69del_V70del_A222V_Y453F_S477N_D614G_I692V)
aggagagggcgcuuggcuugcaaggacccugagcugcggcauugaagcacacccaacccaacucgacugaagucagccucacugaaccggaucugagaaucuucucucucugggcuugccagggcucuccgaaccuagcuagcauccucuucaauuccaacuagaaagcuuaccauguucguguuccugguccuccugccccuggugagcucccagugcgugaaccucaccacccgcacgcagcugccgcccgccuacaccaacagcuucacccggggcgucuacuaccccgacaagguguuccgcuccagcgugcugcacuccacccaggaccucuuccugcccuucuucagcaacgucacgugguuccacgccaucuccgggaccaacggcaccaagcgguucgacaacccggugcugcccuucaacgacgggguguacuucgcgagcaccgagaaguccaacaucauccgcggcuggaucuucgggacgacccucgacagcaagacccagucccugcugaucgucaacaacgccaccaacguggugaucaaggucugcgaguuccaguucugcaacgaccccuuccucggcguguacuaccacaagaacaacaagagcuggauggaguccgaguuccggguguacagcuccgccaacaacugcacguucgaguacgucagccagcccuuccugauggaccuggagggcaagcaggggaacuucaagaaccuccgcgaguucguguucaagaacaucgacggcuacuucaagaucuacuccaagcacaccccgaucaaccuggugcgggaccugccccagggguucagcguccucgagccccugguggaccugcccaucggcaucaacaucacccgcuuccagacccuccuggcccugcaccgguccuaccucacgccgggggacagcagcuccggcuggaccgccggcgcggccgccuacuacgugggguaccugcagccccgcaccuuccugcucaaguacaacgagaacggcaccaucacggacgccgucgacugcgcgcuggacccccugagcgagaccaagugcacccucaaguccuucaccguggagaaggggaucuaccagacgagcaacuuccgggugcagcccaccgaguccaucguccgcuucccgaacaucaccaaccugugccccuucggcgagguguucaacgccacccgguucgccagcgucuacgccuggaaccgcaagcggaucuccaacugcguggccgacuacagcgugcuguacaacuccgcgagcuucuccacguucaagugcuacggcgucagccccaccaagcucaacgaccugugcuucaccaacguguacgccgacuccuucgugauccgcggggacgagguccggcagaucgcccccggccagaccgggaagaucgccgacuacaacuacaagcugccggacgacuucacgggcugcgugaucgccuggaacagcaacaaccucgacuccaaggucgggggcaacuacaacuaccuguuccgccuguuccgcaagagcaaccucaagcccuucgagcgggacaucuccaccgagaucuaccaggcgggcaacacccccugcaacgggguggagggcuucaacugcuacuucccccugcagagcuacggguuccagccgaccaacggcgugggguaccagcccuaccggguggucgugcuguccuucgagcuccugcacgcccccgccacggugugcggccccaagaaguccaccaaccuggucaagaacaagugcgugaacuucaacuucaacggccucaccgggaccggcgugcugaccgagagcaacaagaaguuccugccguuccagcaguucgggcgcgacaucgccgacacgaccgacgccguccgcgacccccagacccuggagauccucgacaucacccccugcagcuucggcggggugagcgugaucacgccgggcaccaacaccuccaaccaggucgcggugcuguaccagggcgugaacugcaccgagguccccguggccauccacgccgaccagcugacgcccaccuggcggguguacagcaccggguccaacgucuuccagacccgcgccggcugccucaucggggccgagcacgugaacaacagcuacgagugcgacauccccaucggcgcgggcaucugcgccuccuaccagacgcagaccaacagcccgcggcgcgcccgguccguggccagccaguccgucaucgcguacaccaugagccugggggccgagaacuccguggccuacagcaacaacuccaucgccauccccaccaacuucacgaucagcgugaccaccgagauccugcccgucuccaugaccaagacgagcguggacugcaccauguacaucugcggcgacagcaccgagugcuccaaccuccugcugcaguacgggagcuucugcacccagcucaaccgcgcccugacgggcaucgcgguggagcaggacaagaacacccaggaggucuucgcccaggugaagcagaucuacaagacgcccccgaucaaggacuucgggggcuucaacuucucccagauccugcccgaccccagcaagcccuccaagcggagcuucaucgaggaccuccuguucaacaaggugacccuggccgacgccggcuucaucaagcaguacggggacugccucggcgacaucgccgcgcgcgaccugaucugcgcccagaaguucaacgggcugaccguccucccgccccugcugaccgacgagaugaucgcccaguacaccuccgcccuccuggccggcaccaucacgagcggguggaccuucggcgcgggcgccgcccugcagauccccuucgccaugcagauggcguaccgguucaacgggaucggcgugacccagaacgugcucuacgagaaccagaagcugaucgccaaccaguucaacuccgccaucgggaagauccaggacagccuguccagcaccgccuccgcccucggcaagcugcaggacgucgugaaccagaacgcgcaggcccugaacacgcucgugaagcagcugagcuccaacuucggggccaucagcuccguccugaacgacauccucagccgccuggacccgcccgaggccgaggugcagaucgaccggcugaucaccggccgccuccagucccugcagaccuacgugacccagcagcugauccgggccgcggagauccgcgccagcgccaaccucgccgccaccaagaugagcgagugcguccugggccaguccaagcggguggacuucugcgggaagggcuaccaccugaugagcuucccccaguccgcgccccacgggguggucuuccuccacgugacguacguccccgcccaggagaagaacuucaccaccgccccggccaucugccacgacggcaaggcgcacuucccccgcgaggggguguucgugagcaacggcacccacugguucgucacgcagcggaacuucuacgagccccagaucaucaccaccgacaacaccuucguguccggcaacugcgacguggucaucgggaucgugaacaacacgguguacgacccccugcagccggagcuggacagcuucaaggaggagcucgacaaguacuucaagaaccacaccucccccgacgucgaccugggcgacaucagcgggaucaacgccuccguggugaacauccagaaggagaucgaccgccugaacgaggucgccaagaaccucaacgagagccugaucgaccugcaggagcucggcaaguacgagcaguacaucaaguggcccugguacaucuggcugggcuucaucgccgggcugaucgccaucgugauggugaccaucaugcucugcugcaugaccuccugcugcagcugccugaagggcugcugcuccugcgggagcugcugcaaguucgacgaggacgacuccgagccgguccugaagggcgugaagcuccacuacacgugaggacuagucccuguucccagagcccacuuuuuuuucuuuuuuugaaauaaaauagccugucuuucagaucuaaaaaaaaaaaaaaaaaaaaaaaaaaaaaaaaaaaaaaaaaaaaaaaaaaaaaaaaaaaaaaaaaaaaaaaaaaaaaaaaaaaaaaaaaaaaaaaaaaaa

SEQ ID NO: 25086 - RNA, 4161 nt, Artificial Sequence
  SARS-CoV-2/Wuhan/WIV05/2019__EPI_ISL_402128 spike protein mRNA gc (1-1273)(K986P_V987P_H69del_V70del_Y453F_D614G_I692V_M1229I)
aggagagggcgcuuggcuugcaaggacccugagcugcggcauugaagcacacccaacccaacucgacugaagucagccucacugaaccggaucugagaaucuucucucucugggcuugccagggcucuccgaaccuagcuagcauccucuucaauuccaacuagaaagcuuaccauguucguguuccugguccuccugccccuggugagcucccagugcgugaaccucaccacccgcacgcagcugccgcccgccuacaccaacagcuucacccggggcgucuacuaccccgacaagguguuccgcuccagcgugcugcacuccacccaggaccucuuccugcccuucuucagcaacgucacgugguuccacgccaucuccgggaccaacggcaccaagcgguucgacaacccggugcugcccuucaacgacgggguguacuucgcgagcaccgagaaguccaacaucauccgcggcuggaucuucgggacgacccucgacagcaagacccagucccugcugaucgucaacaacgccaccaacguggugaucaaggucugcgaguuccaguucugcaacgaccccuuccucggcguguacuaccacaagaacaacaagagcuggauggaguccgaguuccggguguacagcuccgccaacaacugcacguucgaguacgucagccagcccuuccugauggaccuggagggcaagcaggggaacuucaagaaccuccgcgaguucguguucaagaacaucgacggcuacuucaagaucuacuccaagcacaccccgaucaaccuggugcgggaccugccccagggguucagcgcccucgagccccuggucgaccugcccaucggcaucaacaucacccgcuuccagacccuccuggcccugcaccgguccuaccucacgccgggggacagcagcuccggcuggaccgcgggcgccgccgccuacuacgugggguaccugcagccccgcaccuuccugcucaaguacaacgagaacggcaccaucacggacgcgguggacugcgcccuggacccccugagcgagaccaagugcacccucaaguccuucaccgucgagaaggggaucuaccagacgagcaacuuccgggugcagcccaccgaguccaucgugcgcuucccgaacaucaccaaccugugccccuucggcgaggucuucaacgccacccgguucgccagcguguacgccuggaaccgcaagcggaucuccaacugcgucgcggacuacagcgugcuguacaacuccgccagcuucuccacguucaagugcuacggcgugagccccaccaagcucaacgaccugugcuucaccaacgucuacgccgacuccuucgugauccgcggggacgaggugcggcagaucgcccccggccagaccgggaagaucgccgacuacaacuacaagcugccggacgacuucacgggcugcgucaucgcguggaacagcaacaaccucgacuccaaggucgggggcaacuacaacuaccuguuccgccuguuccgcaagagcaaccucaagcccuucgagcgggacaucuccaccgagaucuaccaggccggcagcacccccugcaacgggguggagggcuucaacugcuacuucccccugcaguccuacggguuccagccgaccaacggcgugggguaccagcccuaccggguggugguccugagcuucgagcuccugcacgcccccgccacggugugcggccccaagaaguccaccaaccuggugaagaacaagugcgucaacuucaacuucaacggccucaccgggaccggcgugcugaccgagagcaacaagaaguuccugccguuccagcaguucgggcgcgacaucgccgacacgaccgacgcggugcgcgacccccagacccuggagauccucgacaucacccccugcagcuucggcggggucuccgugaucacgccgggcaccaacaccagcaaccagguggccguccuguaccagggcgugaacugcaccgaggugcccgucgccauccacgccgaccagcugacgcccaccuggcggguguacuccaccgggagcaacguguuccagacccgcgccggcugccucaucggggcggagcacgucaacaacuccuacgagugcgacauccccaucggcgccggcaucugcgccagcuaccagacgcagaccaacuccccgcggcgcgcccggagcguggcgucccagagcgugaucgccuacaccaugucccugggggccgagaacagcgucgccuacuccaacaacagcaucgccauccccaccaacuucacgaucuccgugaccaccgagauccugcccgugagcaugaccaagacgagcgucgacugcaccauguacaucugcggcgacuccaccgagugcagcaaccuccugcugcaguacggguccuucugcacccagcucaaccgcgcgcugacgggcaucgccguggagcaggacaagaacacccaggagguguucgcccaggucaagcagaucuacaagacgcccccgaucaaggacuucgggggcuucaacuucagccagauccugcccgaccccuccaagcccagcaagcgguccuucaucgaggaccuccuguucaacaaggugacccuggccgacgccggcuucaucaagcaguacggggacugccucggcgacaucgcggcccgcgaccugaucugcgcccagaaguucaacgggcugaccgugcucccgccccugcugaccgacgagaugaucgcccaguacaccagcgcccuccuggcgggcaccaucacguccggguggaccuucggcgccggcgccgcccugcagauccccuucgcgaugcagauggccuaccgguucaacgggaucggcgucacccagaacgugcucuacgagaaccagaagcugaucgccaaccaguucaacagcgccaucgggaagauccaggacucccugagcuccaccgccagcgcgcucggcaagcugcaggacguggucaaccagaacgcccaggcccugaacacgcucgugaagcagcuguccagcaacuucggggccaucuccagcgugcugaacgacauccucucccgccuggacccgcccgaggccgagguccagaucgaccggcugaucaccggccgccuccagagccugcagaccuacgugacccagcagcugauccgggcggccgagauccgcgccagcgccaaccucgccgcgaccaagauguccgagugcgugcugggccagagcaagcgggucgacuucugcgggaagggcuaccaccugauguccuucccccagagcgcgccccacggggugguguuccuccacgucacguacgugcccgcccaggagaagaacuucaccaccgccccggccaucugccacgacggcaaggcccacuucccccgcgagggggucuucguguccaacggcacccacugguucgugacgcagcggaacuucuacgagccccagaucaucaccaccgacaacaccuucgucagcggcaacugcgacguggugaucgggaucgucaacaacacgguguacgacccccugcagccggagcuggacuccuucaaggaggagcucgacaaguacuucaagaaccacaccagccccgacguggaccugggcgacaucuccgggaucaacgccagcgucgugaacauccagaaggagaucgaccgccugaacgagguggccaagaaccucaacgagucccugaucgaccugcaggagcucggcaaguacgagcaguacaucaaguggcccugguacaucuggcugggcuucaucgccgggcugaucgcgaucgucaucgugaccaucaugcucugcugcaugaccagcugcugcuccugccugaagggcugcugcagcugcggguccugcugcaaguucgacgaggacgacagcgagccggugcugaagggcgucaagcuccacuacacgugaggacuagucccuguucccagagcccacuuuuuuuucuuuuuuugaaauaaaauagccugucuuucagaucuaaaaaaaaaaaaaaaaaaaaaaaaaaaaaaaaaaaaaaaaaaaaaaaaaaaaaaaaaaaaaaaaaaaaaaaaaaaaaaaaaaaaaaaaaaaaaaaaaaaa

SEQ ID NO: 25087 - RNA, 4158 nt, Artificial Sequence
  SARS-CoV-2/Wuhan/WIV05/2019__EPI_ISL_402128 spike protein mRNA gc (1-1273)(K986P_V987P_K986P_V987P_H69del_V70del_Y144del_N501Y_A570 D_D614G_P681H_T716I_S982A_D1118H)
aggagagggcgcuuggcuugcaaggacccugagcugcggcauugaagcacacccaacccaacucgacugaagucagccucacugaaccggaucugagaaucuucucucucugggcuugccagggcucuccgaaccuagcuagcauccucuucaauuccaacuagaaagcuuaccauguucguguuccugguccuccugccccuggugagcucccagugcgugaaccucaccacccgcacgcagcugccgcccgccuacaccaacagcuucacccggggcgucuacuaccccgacaagguguuccgcuccagcgugcugcacuccacccaggaccucuuccugcccuucuucagcaacgucacgugguuccacgccaucuccgggaccaacggcaccaagcgguucgacaacccggugcugcccuucaacgacgggguguacuucgcgagcaccgagaaguccaacaucauccgcggcuggaucuucgggacgacccucgacagcaagacccagucccugcugaucgucaacaacgccaccaacguggugaucaaggucugcgaguuccaguucugcaacgaccccuuccucggcguguaccacaagaacaacaagagcuggauggaguccgaguuccggguguacagcuccgccaacaacugcacguucgaguacgucagccagcccuuccugauggaccuggagggcaagcaggggaacuucaagaaccuccgcgaguucguguucaagaacaucgacggcuacuucaagaucuacuccaagcacaccccgaucaaccuggugcgggaccugccccagggguucagcgcccucgagccccuggucgaccugcccaucggcaucaacaucacccgcuuccagacccuccuggcccugcaccgguccuaccucacgccgggggacagcagcuccggcuggaccgcgggcgccgccgccuacuacgugggguaccugcagccccgcaccuuccugcucaaguacaacgagaacggcaccaucacggacgcgguggacugcgcccuggacccccugagcgagaccaagugcacccucaaguccuucaccgucgagaaggggaucuaccagacgagcaacuuccgggugcagcccaccgaguccaucgugcgcuucccgaacaucaccaaccugugccccuucggcgaggucuucaacgccacccgguucgccagcguguacgccuggaaccgcaagcggaucuccaacugcgucgcggacuacagcgugcuguacaacuccgccagcuucuccacguucaagugcuacggcgugagccccaccaagcucaacgaccugugcuucaccaacgucuacgccgacuccuucgugauccgcggggacgaggugcggcagaucgcccccggccagaccgggaagaucgccgacuacaacuacaagcugccggacgacuucacgggcugcgucaucgcguggaacagcaacaaccucgacuccaaggucgggggcaacuacaacuaccuguaccgccuguuccgcaagagcaaccucaagcccuucgagcgggacaucuccaccgagaucuaccaggccggcagcacccccugcaacgggguggagggcuucaacugcuacuucccccugcaguccuacggguuccagccgaccuacggcgugggguaccagcccuaccggguggugguccugagcuucgagcuccugcacgcccccgccacggugugcggccccaagaaguccaccaaccuggugaagaacaagugcgucaacuucaacuucaacggccucaccgggaccggcgugcugaccgagagcaacaagaaguuccugccguuccagcaguucgggcgcgacaucgacgacacgaccgacgccgugcgcgacccccagacccuggagauccucgacaucacccccugcagcuucggcggggucuccgugaucacgccgggcaccaacaccagcaaccagguggcgguccuguaccagggcgugaacugcaccgaggugcccgucgccauccacgccgaccagcugacgcccaccuggcggguguacuccaccgggagcaacguguuccagacccgcgccggcugccucaucggggccgagcacgucaacaacuccuacgagugcgacauccccaucggcgcgggcaucugcgccagcuaccagacgcagaccaacucccaccggcgcgcccggagcguggccucccagagcaucaucgcguacaccaugucccugggggccgagaacagcguggccuacuccaacaacagcaucgccaucccgaucaacuucaccaucuccgucacgaccgagauccugcccgugagcaugaccaagaccagcguggacugcacgauguacaucugcggcgacuccaccgagugcagcaaccuccugcugcaguacggguccuucugcacccagcucaaccgcgcccugaccggcaucgcggucgagcaggacaagaacacgcaggagguguucgcccaggugaagcagaucuacaagaccccgcccaucaaggacuucgggggcuucaacuucagccagauccugcccgaccccuccaagcccagcaagcgguccuucaucgaggaccuccuguucaacaaggucacccuggccgacgccggcuucaucaagcaguacggggacugccucggcgacaucgccgcgcgcgaccugaucugcgcccagaaguucaacgggcugaccgugcugcccccgcuccugacggacgagaugaucgcccaguacaccagcgcccuccuggccggcaccaucaccuccggguggacguucggcgcgggcgccgcccugcagauccccuucgccaugcagauggcguaccgguucaacgggaucggcgugacccagaacguccucuacgagaaccagaagcugaucgccaaccaguucaacagcgccaucgggaagauccaggacucccugagcuccaccgccagcgcccucggcaagcugcaggacguggugaaccagaacgcgcaggcccugaacacccucgucaagcagcuguccagcaacuucggggccaucuccagcgugcugaacgacauccucgcccgccuggacccgcccgaggccgaggugcagaucgaccggcugaucacgggccgccuccagucccugcagaccuacgucacccagcagcugauccgggcggccgagauccgcgccagcgccaaccucgccgcgaccaagaugagcgagugcgugcugggccaguccaagcggguggacuucugcgggaagggcuaccaccugaugagcuucccccaguccgcgccccacggggucguguuccuccacgugaccuacguccccgcccaggagaagaacuucacgaccgcccccgccaucugccacgacggcaaggcccacuucccgcgcgaggggguguucgucagcaacggcacccacugguucgugacccagcggaacuucuacgagccccagaucaucacgacccacaacaccuucguguccggcaacugcgacgucgugaucgggaucgugaacaacaccgucuacgacccccugcagcccgagcuggacagcuucaaggaggagcucgacaaguacuucaagaaccacacguccccggacguggaccugggcgacaucagcgggaucaacgccuccguggucaacauccagaaggagaucgaccgccugaacgagguggccaagaaccucaacgagagccugaucgaccugcaggagcucggcaaguacgagcaguacaucaaguggcccugguacaucuggcugggcuucaucgccgggcugaucgcgaucgugauggucaccaucaugcucugcugcaugaccuccugcugcagcugccugaagggcugcugcuccugcgggagcugcugcaaguucgacgaggacgacuccgagcccgugcugaagggcgugaagcuccacuacaccugaggacuagucccuguucccagagcccacuuuuuuuucuuuuuuugaaauaaaauagccugucuuucagaucuaaaaaaaaaaaaaaaaaaaaaaaaaaaaaaaaaaaaaaaaaaaaaaaaaaaaaaaaaaaaaaaaaaaaaaaaaaaaaaaaaaaaaaaaaaaaaaaaaaaa

SEQ ID NO: 25088 - RNA, 4167 nt, Artificial Sequence
  SARS-CoV-2/Wuhan/WIV05/2019__EPI_ISL_402128 spike protein mRNA gc (1-1273)(K986P_V987P_K986P_V987P_K417N_E484K_N501Y_D614G)
aggagagggcgcuuggcuugcaaggacccugagcugcggcauugaagcacacccaacccaacucgacugaagucagccucacugaaccggaucugagaaucuucucucucugggcuugccagggcucuccgaaccuagcuagcauccucuucaauuccaacuagaaagcuuaccauguucguguuccugguccuccugccccuggugagcucccagugcgugaaccucaccacccgcacgcagcugccgcccgccuacaccaacagcuucacccggggcgucuacuaccccgacaagguguuccgcuccagcgugcugcacuccacccaggaccucuuccugcccuucuucagcaacgucacgugguuccacgccauccacguguccgggaccaacggcaccaagcgguucgacaacccggugcugcccuucaacgacggggucuacuucgcgagcaccgagaaguccaacaucauccgcggcuggaucuucgggacgacccucgacagcaagacccagucccugcugaucgugaacaacgccaccaacguggucaucaaggugugcgaguuccaguucugcaacgaccccuuccucggcguguacuaccacaagaacaacaagagcuggauggaguccgaguuccgggucuacagcuccgccaacaacugcacguucgaguacgugagccagcccuuccugauggaccuggagggcaagcaggggaacuucaagaaccuccgcgaguucguguucaagaacaucgacggcuacuucaagaucuacuccaagcacaccccgaucaaccugguccgggaccugccccagggguucagcgcccucgagccccugguggaccugcccaucggcaucaacaucacccgcuuccagacccuccuggcccugcaccgguccuaccucacgccgggggacagcagcuccggcuggaccgcgggcgccgccgccuacuacgugggguaccugcagccccgcaccuuccugcucaaguacaacgagaacggcaccaucacggacgcggucgacugcgcccuggacccccugagcgagaccaagugcacccucaaguccuucaccguggagaaggggaucuaccagacgagcaacuuccgggugcagcccaccgaguccaucguccgcuucccgaacaucaccaaccugugccccuucggcgagguguucaacgccacccgguucgccagcgucuacgccuggaaccgcaagcggaucuccaacugcguggcggacuacagcgugcuguacaacuccgccagcuucuccacguucaagugcuacggcgucagccccaccaagcucaacgaccugugcuucaccaacguguacgccgacuccuucgugauccgcggggacgagguccggcagaucgcccccggccagaccgggaacaucgccgacuacaacuacaagcugccggacgacuucacgggcugcgugaucgcguggaacagcaacaaccucgacuccaaggucgggggcaacuacaacuaccuguaccgccuguuccgcaagagcaaccucaagcccuucgagcgggacaucuccaccgagaucuaccaggccggcagcacccccugcaacggggugaagggcuucaacugcuacuucccccugcaguccuacggguuccagccgaccuacggcgugggguaccagcccuaccggguggucgugcugagcuucgagcuccugcacgcccccgccacggugugcggccccaagaaguccaccaaccuggucaagaacaagugcgugaacuucaacuucaacggccucaccgggaccggcgugcugaccgagagcaacaagaaguuccugccguuccagcaguucgggcgcgacaucgccgacacgaccgacgcgguccgcgacccccagacccuggagauccucgacaucacccccugcagcuucggcgggguguccgugaucacgccgggcaccaacaccagcaaccaggucgccgugcuguaccagggcgugaacugcaccgagguccccguggccauccacgccgaccagcugacgcccaccuggcggguguacuccaccgggagcaacgucuuccagacccgcgccggcugccucaucggggcggagcacgugaacaacuccuacgagugcgacauccccaucggcgccggcaucugcgccagcuaccagacgcagaccaacuccccgcggcgcgcccggagcguggcgucccagagcaucaucgccuacaccaugucccugggggccgagaacagcgucgccuacuccaacaacagcaucgccauccccaccaacuucacgaucuccgugaccaccgagauccugcccgugagcaugaccaagacgagcgucgacugcaccauguacaucugcggcgacuccaccgagugcagcaaccuccugcugcaguacggguccuucugcacccagcucaaccgcgcgcugacgggcaucgccguggagcaggacaagaacacccaggagguguucgcccaggucaagcagaucuacaagacgcccccgaucaaggacuucgggggcuucaacuucagccagauccugcccgaccccuccaagcccagcaagcgguccuucaucgaggaccuccuguucaacaaggugacccuggccgacgccggcuucaucaagcaguacggggacugccucggcgacaucgcggcccgcgaccugaucugcgcccagaaguucaacgggcugaccgugcucccgccccugcugaccgacgagaugaucgcccaguacaccagcgcccuccuggcgggcaccaucacguccggguggaccuucggcgccggcgccgcccugcagauccccuucgcgaugcagauggccuaccgguucaacgggaucggcgucacccagaacgugcucuacgagaaccagaagcugaucgccaaccaguucaacagcgccaucgggaagauccaggacucccugagcuccaccgccagcgcgcucggcaagcugcaggacguggucaaccagaacgcccaggcccugaacacgcucgugaagcagcuguccagcaacuucggggccaucuccagcgugcugaacgacauccucucccgccuggacccgcccgaggccgagguccagaucgaccggcugaucaccggccgccuccagagccugcagaccuacgugacccagcagcugauccgggcggccgagauccgcgccagcgccaaccucgccgcgaccaagauguccgagugcgugcugggccagagcaagcgggucgacuucugcgggaagggcuaccaccugauguccuucccccagagcgcgccccacggggugguguuccuccacgucacguacgugcccgcccaggagaagaacuucaccaccgccccggccaucugccacgacggcaaggcccacuucccccgcgagggggucuucguguccaacggcacccacugguucgugacgcagcggaacuucuacgagccccagaucaucaccaccgacaacaccuucgucagcggcaacugcgacguggugaucgggaucgucaacaacacgguguacgacccccugcagccggagcuggacuccuucaaggaggagcucgacaaguacuucaagaaccacaccagccccgacguggaccugggcgacaucuccgggaucaacgccagcgucgugaacauccagaaggagaucgaccgccugaacgagguggccaagaaccucaacgagucccugaucgaccugcaggagcucggcaaguacgagcaguacaucaaguggcccugguacaucuggcugggcuucaucgccgggcugaucgcgaucgucauggugaccaucaugcucugcugcaugaccagcugcugcuccugccugaagggcugcugcagcugcggguccugcugcaaguucgacgaggacgacagcgagccggugcugaagggcgucaagcuccacuacacgugaggacuagucccuguucccagagcccacuuuuuuuucuuuuuuugaaauaaaauagccugucuuucagaucuaaaaaaaaaaaaaaaaaaaaaaaaaaaaaaaaaaaaaaaaaaaaaaaaaaaaaaaaaaaaaaaaaaaaaaaaaaaaaaaaaaaaaaaaaaaaaaaaaaaa

SEQ ID NO: 25089 - RNA, 4158 nt, Artificial Sequence
  SARS-CoV-2/Wuhan/WIV05/2019__EPI_ISL_402128 spike protein mRNA gc (1-1273)(K986P_V987P_K986P_V987P_L18F_D80A_D215G_L242del_A243del_ L244del_R246I_K417N_E484K_N501Y_D614G_A701V)
aggagagggcgcuuggcuugcaaggacccugagcugcggcauugaagcacacccaacccaacucgacugaagucagccucacugaaccggaucugagaaucuucucucucugggcuugccagggcucuccgaaccuagcuagcauccucuucaauuccaacuagaaagcuuaccauguucguguuccugguccuccugccccuggugagcucccagugcgugaacuucaccacccgcacgcagcucccgcccgccuacaccaacagcuucacccggggcgucuacuaccccgacaagguguuccgcuccagcgugcugcacuccacccaggaccuguuccuccccuucuucagcaacgucacgugguuccacgccauccacguguccgggaccaacggcaccaagcgguucgcgaacccggugcugcccuucaacgacggggucuacuucgccagcaccgagaaguccaacaucauccgcggcuggaucuucgggacgacccuggacagcaagacccagucccuccugaucgugaacaacgccaccaacguggucaucaaggugugcgaguuccaguucugcaacgaccccuuccugggcguguacuaccacaagaacaacaagagcuggauggaguccgaguuccgggucuacagcuccgccaacaacugcacguucgaguacgugagccagcccuuccucauggaccuggagggcaagcaggggaacuucaagaaccugcgcgaguucguguucaagaacaucgacggcuacuucaagaucuacuccaagcacaccccgaucaaccucguccgggggcugccccagggcuucagcgcccuggagccccucguggaccugcccaucgggaucaacaucacccgcuuccagacccugcacaucuccuaccucacgccgggcgacagcagcuccggcuggaccgcgggggccgccgccuacuacgugggcuaccugcagccccggaccuuccugcucaaguacaacgagaacgggaccaucacggacgcggucgacugcgcccuggacccccugagcgagaccaagugcacccucaaguccuucaccguggagaagggcaucuaccagacgagcaacuuccgcgugcagcccaccgaguccaucguccgguucccgaacaucaccaaccugugccccuucggcgagguguucaacgccacccgcuucgccagcgucuacgccuggaaccggaagcgcaucuccaacugcguggcggacuacagcgugcuguacaacuccgccagcuucuccacguucaagugcuacggggucagccccaccaagcucaacgaccugugcuucaccaacguguacgccgacuccuucgugauccggggcgacgagguccgccagaucgcccccgggcagaccggcaacaucgccgacuacaacuacaagcugccggacgacuucacggggugcgugaucgcguggaacagcaacaaccucgacuccaaggugggcggcaacuacaacuaccuguaccggcuguuccgcaagagcaaccucaagcccuucgagcgggacaucuccaccgagaucuaccaggccgggagcacccccugcaacggcgucaagggguucaacugcuacuucccccugcaguccuacggcuuccagccgaccuacggggugggcuaccagcccuaccgcguggucgugcugagcuucgagcuccugcacgcccccgccacggugugcggccccaagaaguccaccaaccuggucaagaacaagugcgugaacuucaacuucaacgggcucaccggcaccggggugcugaccgagagcaacaagaaguuccugccguuccagcaguucggccgggacaucgccgacacgaccgacgcgguccgcgacccccagacccucgagauccuggacaucacccccugcagcuucgggggcguguccgugaucacgccgggcaccaacaccagcaaccaggucgccgugcuguaccagggggugaacugcaccgagguccccguggccauccacgccgaccagcugacgcccaccuggcgcguguacuccaccggcagcaacgucuuccagacccgggccgggugccucaucggcgcggagcacgugaacaacuccuacgagugcgacauccccaucggcgccgggaucugcgccagcuaccagacgcagaccaacuccccgcgccgggcccgcagcguggcgucccagagcaucaucgccuacaccaugucccugggcgucgagaacagcguggccuacuccaacaacagcaucgccauccccaccaacuucacgaucuccgugaccaccgagauccugcccgucagcaugaccaagacgagcguggacugcaccauguacaucugcggggacuccaccgagugcagcaaccuccugcugcaguacggcuccuucugcacccagcucaaccgggcccugacggggaucgcgguggagcaggacaagaacacccaggaggucuucgcccaggugaagcagaucuacaagacgcccccgaucaaggacuucggcggcuucaacuucagccagauccugcccgaccccuccaagcccagcaagcgcuccuucaucgaggaccuccuguucaacaaggugacccuggccgacgccggguucaucaagcaguacggcgacugccucggggacaucgccgcgcgggaccugaucugcgcccagaaguucaacggccugaccguccucccgccccugcugaccgacgagaugaucgcccaguacaccagcgcccuccuggccgggaccaucacguccggcuggaccuucggcgcgggggccgcccugcagauccccuucgccaugcagauggcguaccgcuucaacggcaucggggugacccagaacgugcucuacgagaaccagaagcugaucgccaaccaguucaacagcgccaucggcaagauccaggacucccugagcuccaccgccagcgcccucgggaagcugcaggacgucgugaaccagaacgcgcaggcccugaacacgcucgugaagcagcuguccagcaacuucggcgccaucuccagcguccugaacgacauccucucccggcuggacccgcccgaggccgaggugcagaucgaccgccugaucaccggccggcuccagagccugcagaccuacgugacccagcagcugauccgcgccgcggagauccgggccagcgccaaccucgccgccaccaagauguccgagugcguccuggggcagagcaagcgcguggacuucugcggcaagggguaccaccugauguccuucccccagagcgcgccccacggcguggucuuccuccacgugacguacguccccgcccaggagaagaacuucaccaccgccccggccaucugccacgacgggaaggcgcacuucccccgggagggcguguucguguccaacggcacccacugguucgucacgcagcgcaacuucuacgagccccagaucaucaccaccgacaacaccuucgugagcgggaacugcgacguggucaucggcaucgugaacaacacgguguacgacccccugcagccggagcuggacuccuucaaggaggagcucgacaaguacuucaagaaccacaccagccccgacgucgaccugggggacaucuccggcaucaacgccagcguggugaacauccagaaggagaucgaccggcugaacgaggucgccaagaaccucaacgagucccugaucgaccugcaggagcucggcaaguacgagcaguacaucaaguggcccugguacaucuggcugggguucaucgccggccugaucgccaucgugauggugaccaucaugcucugcugcaugaccagcugcugcuccugccugaaggggugcugcagcugcggcuccugcugcaaguucgacgaggacgacagcgagccgguccugaagggggugaagcuccacuacacgugaggacuagucccuguucccagagcccacuuuuuuuucuuuuuuugaaauaaaauagccugucuuucagaucuaaaaaaaaaaaaaaaaaaaaaaaaaaaaaaaaaaaaaaaaaaaaaaaaaaaaaaaaaaaaaaaaaaaaaaaaaaaaaaaaaaaaaaaaaaaaaaaaaaaa

SEQ ID NO: 25090 - RNA, 4167 nt, Artificial Sequence
  SARS-CoV-2/Wuhan/WIV05/2019__EPI_ISL_402128 spike protein mRNA gc (1-1273)(K986P_V987P_K986P_V987P_E484K_D614G)
aggagagggcgcuuggcuugcaaggacccugagcugcggcauugaagcacacccaacccaacucgacugaagucagccucacugaaccggaucugagaaucuucucucucugggcuugccagggcucuccgaaccuagcuagcauccucuucaauuccaacuagaaagcuuaccauguucguguuccugguccuccugccccuggugagcucccagugcgugaaccucaccacccgcacgcagcugccgcccgccuacaccaacagcuucacccggggcgucuacuaccccgacaagguguuccgcuccagcgugcugcacuccacccaggaccucuuccugcccuucuucagcaacgucacgugguuccacgccauccacguguccgggaccaacggcaccaagcgguucgacaacccggugcugcccuucaacgacggggucuacuucgcgagcaccgagaaguccaacaucauccgcggcuggaucuucgggacgacccucgacagcaagacccagucccugcugaucgugaacaacgccaccaacguggucaucaaggugugcgaguuccaguucugcaacgaccccuuccucggcguguacuaccacaagaacaacaagagcuggauggaguccgaguuccgggucuacagcuccgccaacaacugcacguucgaguacgugagccagcccuuccugauggaccuggagggcaagcaggggaacuucaagaaccuccgcgaguucguguucaagaacaucgacggcuacuucaagaucuacuccaagcacaccccgaucaaccugguccgggaccugccccagggguucagcgcccucgagccccugguggaccugcccaucggcaucaacaucacccgcuuccagacccuccuggcccugcaccgguccuaccucacgccgggggacagcagcuccggcuggaccgcgggcgccgccgccuacuacgugggguaccugcagccccgcaccuuccugcucaaguacaacgagaacggcaccaucacggacgcggucgacugcgcccuggacccccugagcgagaccaagugcacccucaaguccuucaccguggagaaggggaucuaccagacgagcaacuuccgggugcagcccaccgaguccaucguccgcuucccgaacaucaccaaccugugccccuucggcgagguguucaacgccacccgguucgccagcgucuacgccuggaaccgcaagcggaucuccaacugcguggcggacuacagcgugcuguacaacuccgccagcuucuccacguucaagugcuacggcgucagccccaccaagcucaacgaccugugcuucaccaacguguacgccgacuccuucgugauccgcggggacgagguccggcagaucgcccccggccagaccgggaagaucgccgacuacaacuacaagcugccggacgacuucacgggcugcgugaucgcguggaacagcaacaaccucgacuccaaggucgggggcaacuacaacuaccuguaccgccuguuccgcaagagcaaccucaagcccuucgagcgggacaucuccaccgagaucuaccaggccggcagcacccccugcaacggggugaagggcuucaacugcuacuucccccugcaguccuacggguuccagccgaccaacggcgugggguaccagcccuaccggguggucgugcugagcuucgagcuccugcacgcccccgccacggugugcggccccaagaaguccaccaaccuggucaagaacaagugcgugaacuucaacuucaacggccucaccgggaccggcgugcugaccgagagcaacaagaaguuccugccguuccagcaguucgggcgcgacaucgccgacacgaccgacgcgguccgcgacccccagacccuggagauccucgacaucacccccugcagcuucggcgggguguccgugaucacgccgggcaccaacaccagcaaccaggucgccgugcuguaccagggcgugaacugcaccgagguccccguggccauccacgccgaccagcugacgcccaccuggcggguguacuccaccgggagcaacgucuuccagacccgcgccggcugccucaucggggcggagcacgugaacaacuccuacgagugcgacauccccaucggcgccggcaucugcgccagcuaccagacgcagaccaacuccccgcggcgcgcccggagcguggcgucccagagcaucaucgccuacaccaugucccugggggccgagaacagcgucgccuacuccaacaacagcaucgccauccccaccaacuucacgaucuccgugaccaccgagauccugcccgugagcaugaccaagacgagcgucgacugcaccauguacaucugcggcgacuccaccgagugcagcaaccuccugcugcaguacggguccuucugcacccagcucaaccgcgcgcugacgggcaucgccguggagcaggacaagaacacccaggagguguucgcccaggucaagcagaucuacaagacgcccccgaucaaggacuucgggggcuucaacuucagccagauccugcccgaccccuccaagcccagcaagcgguccuucaucgaggaccuccuguucaacaaggugacccuggccgacgccggcuucaucaagcaguacggggacugccucggcgacaucgcggcccgcgaccugaucugcgcccagaaguucaacgggcugaccgugcucccgccccugcugaccgacgagaugaucgcccaguacaccagcgcccuccuggcgggcaccaucacguccggguggaccuucggcgccggcgccgcccugcagauccccuucgcgaugcagauggccuaccgguucaacgggaucggcgucacccagaacgugcucuacgagaaccagaagcugaucgccaaccaguucaacagcgccaucgggaagauccaggacucccugagcuccaccgccagcgcgcucggcaagcugcaggacguggucaaccagaacgcccaggcccugaacacgcucgugaagcagcuguccagcaacuucggggccaucuccagcgugcugaacgacauccucucccgccuggacccgcccgaggccgagguccagaucgaccggcugaucaccggccgccuccagagccugcagaccuacgugacccagcagcugauccgggcggccgagauccgcgccagcgccaaccucgccgcgaccaagauguccgagugcgugcugggccagagcaagcgggucgacuucugcgggaagggcuaccaccugauguccuucccccagagcgcgccccacggggugguguuccuccacgucacguacgugcccgcccaggagaagaacuucaccaccgccccggccaucugccacgacggcaaggcccacuucccccgcgagggggucuucguguccaacggcacccacugguucgugacgcagcggaacuucuacgagccccagaucaucaccaccgacaacaccuucgucagcggcaacugcgacguggugaucgggaucgucaacaacacgguguacgacccccugcagccggagcuggacuccuucaaggaggagcucgacaaguacuucaagaaccacaccagccccgacguggaccugggcgacaucuccgggaucaacgccagcgucgugaacauccagaaggagaucgaccgccugaacgagguggccaagaaccucaacgagucccugaucgaccugcaggagcucggcaaguacgagcaguacaucaaguggcccugguacaucuggcugggcuucaucgccgggcugaucgcgaucgucauggugaccaucaugcucugcugcaugaccagcugcugcuccugccugaagggcugcugcagcugcggguccugcugcaaguucgacgaggacgacagcgagccggugcugaagggcgucaagcuccacuacacgugaggacuagucccuguucccagagcccacuuuuuuuucuuuuuuugaaauaaaauagccugucuuucagaucuaaaaaaaaaaaaaaaaaaaaaaaaaaaaaaaaaaaaaaaaaaaaaaaaaaaaaaaaaaaaaaaaaaaaaaaaaaaaaaaaaaaaaaaaaaaaaaaaaaaa
